United States Patent Application Publication US 2006/0123505 A1 - sequence listing, part 17

SEQ ID NO: 26959 - DNA, 2967 bp, Oryza sativa
  ref <308>: DATABASE ACCESSION NUMBER: AK102401
  ref <309>: DATABASE ENTRY DATE: 2002-08-28
ggcaccagcccaaaaaacaaacaaaaacaaataataaatctcgaaattaaaccaaaccaaaccatttccaacttccaaagccgcctcctccctctcctctcccaacccaaatcattcgtgcgattccgcggcctcgttggattgacgcggcaactaactccaccaccaccaccaccacttcccccaccaccggcggcggcggcggcggcggcgacgaggaggccccattgcgctcgcggaggcgtggtgttgacgggggaggcgctggatctcggatggcatcggccaagtcgtcgcggtcgaggccggccgggcattccggggtgttcccggtgagcggcgccgtggggggaggaggagggggcgggggcggtggcggaggaggaggaggaggaggaggcgatggcggggtgcagctcgccgacaagctcaagatcttcaagaccgacaacttcgatcccgacgcgtacgtgcagtccaagtgccagacgatgaacgagaaggagataaggcatttatgttcttacctgcaagatctaaagaaggcttcagctgaagagatgcgcagaagtgtatatgcaaattatgctgcatttatcagaacatcaaaggagatatcagatcttgaaggggaactgctatcaataagaaatctactgaatacacaagcagctttaatccatggtctttctgaaggagttcaaatagattccttgacttcaaacactgaaggttctgcagaagacgatatatccaatgttgaagaccaggaaccttcagaaatacaaaaatggtctgcagattttccctgacatgcttgatgttttgctagctgagagaagagtggatgaagcacttgatgcactagatgaagcggaacgacttgcttctgatgcaaaacttaaacagactctaaccgcaactgaaattgcagctttgagaagggcagtttctgataatcgtcagaagttggcagatcagcttgctgaagctgcttgtcagtcttctactcgtggcattgagcttcgtgctgcagcttctgctctcaaaaggcttggtgatggccctcgagctcacagcctgctactcaatgcacataatcaaaggcttcaatgtaatatgcaaactatacatccatctagcacttcgtatggtggggcgtacactgcagcacttgctcagcaagtcttttcagtggtagctcaggcactcagtgactctgtagaagtttttggtgatgagtcatgttatgcatctgaactggttacatgggctacgaagcaggttatgtcctttgcactcttggtaaagaggcatgtgttgtcctcttgtgcagctgctggaggtttgagagcagctgccgaatgtgttcagatatcacttggtcattgctccttgttggaagctcgtggtctgtctgttgcagctgttcttctgaggcaattcaggcccagtctagagcaagcattatattcaaacatcagaagaattgaagagagtaccgctgcactagctgcagctgatgactggattctcacatatcccccaactggcattcgtcctttagctagatcatctgctgctaatttggctcttcagccaaagctctccaacagtgctcatcgttttaactcgatggttcaggagttctttgaagatgttgcgccgctgcttagcttgcaattaggtggttctacaatggatgacataactaaaattttcaattcatatgtcaatttgctcataagtgctttacctgggtcaatggaagatgaagctaacatagatggtttaggaaataagattgttagaatggcagagtctgaagaacagcaactggctttattagccaatgcgtctttgctagctgaggagttgctacctagagcagctatgaagctatcatcaatgaaccattctagtatggatgatctgcgtaaaagaggctcagataaacagaaccgtatgcctgagcaacgtgaatggaaacggaaattacaacgcatggtggacagattaagggatagtttctgcaggcagcatgctcttgaacttatatttacagatgaaggtgagacccatctcagtgcagacatgtatattagcatggacaatactgttgaagagccagaatgggccccatctcttattttccaggagctgtatgcaaagctaaataggatggccagtattgcggcagatatgtttgtcggcagagaaagatttgctactctgctaatgatgcgactcactgagacagtcatactatggctctcagaggatcaagccttctgggaagagattgaacagggaccgaagcctttgggtccccttggccttcagcaattctacctggatatgcaatttgtaattatctttggacaaggtcgattcttgtctaggcacgtccatcaagtcatattggatattattgatagagcaatggctgcattttcagctactggaatgaaccctgacagtgtcctcccgggtgacgattggttcatggatgtttctcaggaggttgtcagcatgattagtggaaagggtagagctgccaatggagacagggagataaacagccctactgcctcagtctcagcgcattccatgtcatctttcagatcccatggcagctcctagcttgtaagctatactttttgtaggcagatcatcattgtataataagcaatagtgcattctttctttctttttctcccacatttctcagttttctctgtctatttcttttgttctattcatttccttctgttgtgctagtacaggtggataactgtttgacgtaggaaaaaaaatcttgaattattttcttccctgagctaaggcctgtaagtgttgcttacttgcatggccagtatatgtcgcgagctttgtatcattctttcagatgttttttttatgtcacctggcacatcgcattcatgaattcaggattcgttactttcg

SEQ ID NO: 26960 - DNA, 940 bp, Oryza sativa
  ref <308>: DATABASE ACCESSION NUMBER: AK102402
  ref <309>: DATABASE ENTRY DATE: 2002-08-28
ggggagagcgaggcacagctaccggcggcgcagccacacagcagcagcaggtgaggaggagaggagacccgccgccgccgccgccatgggtatctcgcgtgattccatgcacaagcgccgcgccacgggcggcaagcagaaggcatggcgcaagaagcgaaagtatgagctcggaaggcagcctgccaacaccaagctgtcaagcaacaagacagtgaggagggtgcgtgtccgtggaggtaatgtgaaatggagggccctccgtttggatactggcaactactcatggggaagtgaggccgtgacccgcaagacccgtatccttgatgtggtctacaatgcatccaacaatgagcttgtcaggactcagacccttgtaaagagtgctattgtgcaagttgatgctgcccccttcaagcagtggtacctcactcacgatggagtggatattggtagaaagaagaaggctcctgcagccaagaaggatgctgaggggcaggatgctgaagctaccacagaggaagcgaagaaaagcaaccatgttgtcaggaagcttgagaagcgccaacagggacgcacacttgacgcccacatcgaagaacagtttggcagtgggaggttgctggcctgcatttcttcccgccctgggcagtgtggccgagcagatggctatatccttgagggcaaagagctggaattctacatgaagaagctccagaggaagaagggcaagggtgcctcagcttagagcaagtctttctttgttgctggttctacactgaaagaactacccttttttgttccctgagagctcctatgttatgtttgcagacgcatagctgtttttttaggattaaacaactttagcatgatgacatgagaatgggttatgtactctggatgttattaagttaaaatatttactttctgccagctcgtt

SEQ ID NO: 26961 - DNA, 1907 bp, Oryza sativa
  ref <308>: DATABASE ACCESSION NUMBER: AK102403
  ref <309>: DATABASE ENTRY DATE: 2002-08-28
gatctccacatgcaccatcttatctcaactccttagaattcccactcctcttcttcttgttcttcttgcttccctccaacttcttcttcttgttgttcttgctgttcttgtggttcttggcctgccatcggcggcgagcatggccaggaaatgctccagctgcgggaacaatggccacaactccaggacttgcaccggccaaaggagcctgcaggagagtggcggcggttatggcggcggtggcgccggtggcgtgaggttgttcggggtgcagttgcacgtcggcggtgcgcctctgaagaagtgcttcagcatggagtgcctatcgtcgccgtcgccgtcgccgtcgccggcgtactacgccgcggtcgccgccgccgcctccaactcgtcgccgaccgtgtcgtcgtcgtcgtcgctggtgtcggtggaggaggccggcgagaagatggccaacgggtacctctccgatggcctcatggcgagagctcaggagaggaagaagggtgagttcttgagagacatatggtttgtgcatgcttcactaatttgttgtggtttagcactaattacagccacctgacagtgatctaatcatcattaagactgaatttatttttgttgatgagaagttatttgacttcttttgttatgtccccttctccaatttttgccaccagttgctgtctgccatacaagcccatttttatgcttccaacttggtacaggaatatatgcatgactgacataaatttcctaagaatcagatttctgtctctcaagttgcaacctgaaactctcatccttatcacaaacaaagacctgatttatcctagttgtctcgtcctaatcatttgcatctagattcttgaactccaaacactagattgtttttgcagatatcaacagataaaaaaaaatcctctaaattgctgtgttttctacacctgaaattctgaacatgtcaaactcatcagttaactgtcatcaggtgttccatggactgaagaggagcacaggaaattcctggtagggctcgagaagctcgggaaaggcgactggcgcggcatttcccggcacttcgtcacgacaagaacaccgacgcaggtggccagccatgcccagaagtatttcctcaggcagagcagcctcacgcagaagaagagaagatccagcctctttgacgtggtaaacttcaaacatctttgcaacaatatctacacagacagtttcagacagcaagaatcatgtatttatatgagtgagttacagtaacctaacatgtctgaaaatttgatgttttttttcttttctttcagattgaggatgcagaaaaggctccgagtgtgaatgaacgtctgaaactgagacacgagacagcctctgtgcctgctgaaatgggattccctgcactgtcactgggtatcagcagcatggcacagccagaagccatgctgctgcctcctccatccttaaccctgacgccaagctgttcatcaccagcagtgagcagcagcagcagcgaacaaccaagaacaatccatccttctctgatggtggcaaagcctcaggtgcaactgcaactccagccacctgatctggagctcaagatctcgactgtccgtcagaacgatcagcccagttcgtcgccgaggacgccttttttggggacaatcagggtcacttgaacttaaagagagagagaagaagaagaaaaggaattatcttagagattactgaattatttgtgcctaaaaggagaagcttttgctagtggtgtatgtgtgtgtccccttggcaaaaacacaatgccatcttccaccatgtatcatttttataaggctattaggaagtgaagcttttactggactaatctagtcttgcaaataataaaaggaacggctgcc

SEQ ID NO: 26962 - DNA, 2700 bp, Oryza sativa
  ref <308>: DATABASE ACCESSION NUMBER: AK102404
  ref <309>: DATABASE ENTRY DATE: 2002-08-28
gatccaaatcgaatccccgaaagcgttactaccttcctctccagatactggcaaattattttctttacaaatcattcgcagctagcttagctcgctttgcttgtagtggcgacttgtgaggcggaggaggaaggagatcgaggctagggagatggcgtcgttgaagtcgccggtggcggcggaggagcaggcggcgacggcggcggcggcggcggcgaagggggaaggggagaggtgcccggtggaggaggtggcgctggtggtgccggagaccgacgacccgacgacgccggtgatgacattccgggcgtggacgctggggctcgcgtcctgcgtcgtgctcatcttcctcaacaccttcttcacctaccgcacgcagccgctcaccatctcggggatcctggcccagatcctggtgctccccgcggggcagttcatggccgccgtgctgcccagccgcgaggtgcgcctcctcggcggccgcctcggcagcttcagcctcaacccggggcccttcaacatcaaggagcacgtcatcatcaccatcttcgccaactgcggcgtctcctatggcggcggcgacgcctactccatcggcgccatcaccgtcatgaaggcctactacaagcagtccctcagcttcctctgcgccctcctcatcgtcctcaccacacagatactgggctatggttgggccgggatgctgaggaggtacctggttgacccggctgacatgtggtggccatcgaatttagcccaggtctcactcttcagggcgttgcacgagaaggagggcggcgatggcgggaaggggtcgtcgtcgagggggcctacacggatgcgcttcttcctcatcttcttcttcgcgagcttcgcctactacgcgctgccgggctacctgctccccatcctgaccttcttctcgtgggcgtgctgggcgtggccgcacagcatcacggcgcagcaggtgggctccggctaccacggcctcggcgtcggcgccttcacactggactgggccggcatctcggcgtaccacgggagcccgctggtggcgccgtggtcgtccatcgccaacaccgccgcgggcttcgtcatgttcatctacctcatcgtgccgctctgctactggaagttcgacacgttcgacgcgaggaagttcccaatcttctccaaccagctgttcacggcgtccgggcagaagtacgacaccaccaaggtgctcacgagggagttcgacctcaacgtggcggcgtacgagagctacgggaagctgtacctgagcccgctgttcgccatctccatcgggtccgggttcctgaggttcacggcgacgatcgtgcacgtggcgctgttccacggcggggacatctggaggcagagcaggtcggcgatgagctccgcggcggcgaagatggacgtgcacgcgaagctgatgcggcggtacaagcaggtgccgcagtggtggttcctcgtgctgctcgtcggcagcgtcgccgtgtcgctggtcatgtcgttcgtgtacagggaggaggtgcagctgccgtggtgggggatgctcttcgccttcgccctcgccttcgtcgtcaccctccccatcggcgtcatccaggccaccaccaaccagcaaccggggtacgacatcatcgcgcagttcatgatcgggtacgcgctgccggggaagccgatcgcgaacctgctgttcaagatctacgggaggatcagcacggtgcacgcgctgtcgttcctcgcggacctcaagctggggcactacatgaagatcccgccgcggtgcatgtacacggcgcagctggtgggcacggtggtcgccggcgtggtgaacctggcggtggcgtggtggatgctgggcagcatcgacaacatctgcgacgtggaggcgctgcacccggacagcccgtggacgtgccccaagtaccgggtcacgttcgacgcgtcggtgatctgggggctcatcggccccgcccggctgttcggccgccacggcctgtaccgcaacctggtgtggctgttcctcgccggcgccgtgctgcccgtgccggtgtggctgctcagcagggcgttcccggagaagaagtggatcgcgctcatcaacgtccccgtcatctcctacgggttcgccgggatgccgccggcgacgccgaccaacatcgcgagctggctcgtcacgggcaccatcttcaactacttcgtgttcaagtaccgcaaggggtggtggcagaagtacaactacgtgctgtcggcggcgctcgacgccggcacggccttcatgggggtgctcatcttcttcgccctgcagaacgcccaccatgagctcaagtggtggggcacggcggtcgaccactgcccgctcgcctcctgccccaccgcgccggggatcgccgtcaagggatgcccggtgttctgagctcgccggccggagctgcacacggtggtgtatgtaggtagcaagaatttgggtttggattggggaaaaaccatgaattcagcctggtgtcagttaactgatacagtcctaatagttgtcagctgttacctcccgtgtgatgagtgtaacaaattggcttcctgcaaggaaatgatatagtagctagtagttcatataagatcatgccattctggaatatgctgaaacagagatgtgatggtagttaatcatcagagaatccgcaattacggagc

SEQ ID NO: 26963 - DNA, 646 bp, Oryza sativa
  ref <308>: DATABASE ACCESSION NUMBER: AK102405
  ref <309>: DATABASE ENTRY DATE: 2002-08-28
ggtacagggtagtagatctttcgtacgttggagccggccggatcgacgaccatggggtgcgacgacaagtgcgggtgcgccgtcccgtgccccggcggcacgggctgcaggtgcgcgtcttcggcgaggagcggcggcggcgaccacacgacgtgctcgtgcggcgaccactgcgggtgcaacccgtgcaggtgcggccgcgagtcgcagccgacggggagggagaaccggagggccggctgctcctgcggcgactcctgcacctgcgcctcctgcggctccaccaccaccaccgctcccgcggccaccacctgatccatccatccatgcgcccaaaaatgcccaacgagacgtgtttatacgtgtggttaagcgtgtgtacgtgcgccatgcttagtactcatagctgcttagctaaacagcacagctgataaaaagggcttgctgcttgagtcgagtcgtatcccgttgtctagttctggctagactcgcgcatcacgcatgcaacggacatggtgatacgcgagggatggagagttcggagttgggagacactgtgtactgcagtaccaggttgataagtgtgtctgtacttgtgtaaatatgttttacatgaataaaaaggttggtaactttgtcatgtttc

SEQ ID NO: 26964 - DNA, 1120 bp, Oryza sativa
  ref <308>: DATABASE ACCESSION NUMBER: AK102406
  ref <309>: DATABASE ENTRY DATE: 2002-08-28
ggcagttggaaagcattcagtgctcttctctctctccttctccttcactttctctctcctcttcttcatgctcggatttccctctctcgcgcatcgatccgtcgcctcggcgcacaattcgggctcggaatcgggtccctgatccgcgacaccgcccggctcgatcgtttcccgggctgattcggtggccattgcggcgagatcggagcagggagagatcagggcagagaatcagcatgatgatggagactgagctatgctcctcccgggttctgtctccgcctcggtacgagagtggcgatgaggagctctcggtgcttcctcggcacacgaaggtcatcgtcactgggaacaaccgaacaaagtccgtcttggttggcctacaaggtgttgtcaagaaggctgttggtcttggaggttggcactggctggttctaaagaatggtgtagaggtgaagctgcaaaggaatgctttgagtgtattggaacctccaactggtaacgaagacgatgatgatattgatggcaacaattcgttctgtagcagttccgacatgggagacaaagacatggactattcgagcatagagtaccacaaaccaacaaagccaagagttcggcatacaaggccctggtcttcctgtataaaatccagcaaccgaggcaattttcaccccagtacaaagctgcgaacgagagtaaacctgacaaaacttggaactcctacgctgtggagatactggaagcatttcaatcttgtaagcatgaaccccaatccatcaaaggaacagctcttccatggggtccagcagcattttcagtctcagcaattggatgagttgcaggtgattctgggcttcatccaggcagcaaagaggctcaagaccctgtaccgctcctagcctgcttcacaaaaccctcagtgtgtagatctcaagaaattagatgttgttcctatgtggttaaaattaatctagtcttgagagagatgaacagaaaagaagataattagaggtgcatttgatgagtaattctttttactttttacctgtaattgagtttatgtaaccccaagttcacacagtgtcagcaactgaccaatctcaattattggatggag

SEQ ID NO: 26965 - DNA, 1588 bp, Oryza sativa
  ref <308>: DATABASE ACCESSION NUMBER: AK102407
  ref <309>: DATABASE ENTRY DATE: 2002-08-28
tctcggagtctcgggcccttcgctcctcttcctcgcgagtcgctggacgaggtcgccgccggcgaccctcaccgccgtcgccgtcggtcgccggctcgtcgcccctgcttccttcgctcgctgcccgcctcatccacgggtctcctcccccttgccgaatcctagggatttctccgcgtcaggaggcctcctccccttgcccgagactagggtttgctccgcgtcgaatccgcgcaccacctggacgccgccgccgcgatgcagaggtacgggctgcagctccgcacggagccggcggcgtcctcgtcgtcgcgggcgccgccgccgccgccggcccgccccctggcggccttcgccgacgatggcgacgatgacgtggaggccgacatcctccggcagtcgtacaagaagcgatcccagcagaaggtggaagagcagcagaagaaggcgatggaagaggatccctcggtgttcgcctacgacgaggtttatgacgacatgaagcagaaggccgccctccccaagatgcaggacagggtagttcgcgagtcaaaatacattgcggcacttaaggagaaagccgaacaacgtaaacgagagcaggacattatttatgagaggaagcttcaaaaagagaggagtaaggaagaccacctatatggtgacaaagacaaatttgttacatctgcctacaggaagaaacttgaggaagagcggaaatggctggaggaagagaagcggcggcagccttcaagaagaaaaggaagatgttactaagaagaaagacttgagtgatttttactttggtcttagtaagaatgttgctttcggtgcacagacacatgacaatacaaaacatgctaaacctgaaaagttagacgagaaagttcaagatgctaaaactagcaaggttggtgctgaagtatccgatcgctctcctaagcacaaaagggactccggtgaaggagcagagacggccaatgaaagtagaagtgtggaagaacctgctacaactcaatcaagggattcagctgctgctagatctaccgagaaaaatgcagatgtttccttggatgctcctcagacccagacaccagaaaatacccaaccagctcctcagacccagaatccacagaatactcaaccagcacagatcacggatgaacactataagagaaatgctaatgcacttgctgctgccagagaaagagctctggcgcggaagaaagccaaagcgcagcagatatgaagtacgaggcagagatactcaccgagttttttcttataggctaaggtcatcatattcttgtttgaggtttcgggaagactgtaaaatgatggatggtttcacccttctagcatttccaggagataatccccttggtttgatctgcatgatgctctaccttgcttgatcaaaatatatgtgcaggcaacccttcaacgttagaatatctcgttcggcttttctgaacatttgttctgctgtaagatgggaaataacttagcacagtgaactgaaggttgtatgcatatgttctcattcatgtataccgttgtacttttgtaacttgagtgattgaacgcg

SEQ ID NO: 26966 - DNA, 1687 bp, Oryza sativa
  ref <308>: DATABASE ACCESSION NUMBER: AK102408
  ref <309>: DATABASE ENTRY DATE: 2002-08-28
gatggactagcgttgcggacgaggcgacgaaacggacacacatggcggtggcgccgccggaggtagggcccgccgcggcggcggcggtcgccggcgggaagaaggaggtgcgcgcattggatggagcatcggcgatcggtgaagaagaggaggtggaggtggaggtggaggaagaggaagaagcggaggaagagagagaggatgaagaggagggggaggaggatgggggcgatgaagaagaggaggaggaggagggggtgaagtggctgaagcattactcctcgatgcaaagcatcttggtcgtcggcgacggggatttctccttctcgcgggcgctcgccgtcgcattctgctccggcgagaacctcgtctccacgtctcttgattcctatgaggctttgagggggaagtatgccaatgcagagtcaaatataatggtactgaaattgatgggggccacaactttgcatggtgttgatgcaaaaacaatgaagcatcacactgacctaaagatgagacggtttgatcgaattgtatttaatttgcctcatgctggattcaaagcaaaagagggtgatatgcgtatgatcaacttgcacaaggatctggtcagaggattcttccgcaatgcaagatgcctgcttcggccttccggtgaaatccatgttagtcacaagagaggaaaggtgtatgaaaactgggagatcgagaaactagcctctgaatcttcacttattatggttgagaaagttgatttccatatagaagactatcctggttataaccacaagagaggagatggtccaaggtgcgacgaacctttccctctaggtccttgttgcattttcaaattctccatcagaaaccataagaagcagaagaaatgtcattcaaagaagattggttcaatcccatcccttggaggcagccatgtccatcctgaaatattggcaagtgactggagtccatctcagccgtttcgaccagtcaatgcagttaacatgccagtaactttcgacccatactcactcagaattgctcaaagccatcaaccgggttttcctgtcaattttgttggcttatggacagcggctgcctgttctcttcagcattgcaatatccacccaatgctcaacattgtaaggccatcgcttcatcttttgcccattgcgtccatcattgctccacaaatgggcagaatcacaagtaccagtctctttgcacctcaggagcagccgaaacctgttcttaggccattgcaaagcgttagcagctacgaccttgccagggaacaccaaatgaatctgcggagggagtttgagatgagaggacaaacaatgcctgcaggaaccagcttggattacttcgagttcctggaatatctcttcagggatcctgctgagaaggagaagtggctgcaaactatgattacgttgcacgctacacggtggtgatcaatgatagttggttggtgacttggtgtgtatctttttgagaatttgacctgctaagtgctaaaaggatcagcatttctctaggatagaagaacttggcatttcatttcaagaggtgctgtgttagatggatgatgtcgaaaatgtacaggtaggatcgttttgtgtctcaaaactctgactgaccacaacagccaagttcctttttgtaatgcaggtgccgtttgggactg

SEQ ID NO: 26967 - DNA, 2772 bp, Oryza sativa
  ref <308>: DATABASE ACCESSION NUMBER: AK102409
  ref <309>: DATABASE ENTRY DATE: 2002-08-28
aagctgctgaatgcctacatggagtagagcagtcaccaggtccctcagtgatggaaactatccaaccatgtctaaaggctgttgccagagatgaattcttgaaacaccacgatgaagatgtcaaagtactattggcaacatgcttctgtgaaattacaagaataactgctcctgaagctccatacagtgatgatgtcttaagggacatgtttcatctgattgtggatacatttagtggactcaatgatgttaatggtaaatcctttggcaggagagttgctattctggaaacagttgcgagataccgagcatgtgttgtcatgttagaccttgaatgcaatgatctaattgcagacatgttccgatcttttttagaaattatcagtgacaatcatgagccaaatattgtaaattcaatgcaatcagtaatggccctaattatagatgaaagcgaggatatagaggaaagccttctcaatgtacttctatcaactttaggccggaaaaaaactggtgtttctttgcctgcacgcaagcttgctcgccatgttatagagcactctgcaggaaaacttgaaccatacataaggaagattctgacatcatccttggatggggatggtacttctaccaataatagcattgaccatcacgaagtcatatttgatttgtaccagtgtgctccaaaggttcttaaagtggtggtaccttatataactggggaactgctggcagatgaagttgaaactcggtctaaagcagttgaaatacttggcgaacttttctctttacctggaatccctatcttggaatcatttaaatctcttttcgatgagttcctgaagagattgactgaccgagctgtagaaattcgtgtttctgtaattgagcatttgaaaaaatgtctgatgtcaaaccattcccgtcctgaagctcaagagattatcaaggcactttgtgacagattgttggattatgaggaaaatgtgagaaagcaagtggtagctgctatttgtgatgtagcttgccattcacttggtgcagtcccagttgaaactatcaaacaagttgcggagcgtgtccgtgataaatcagtttctgtgaagtgctataccatggagagattggctgacatctacaagttctattgccggagtggttctgatagctcagtaaattctgatgattttgagtggattcctggaaaaatattaagatgcctctatgacaaagattttagaccagagtcaattgaatcaattttatgtggttcattgttcccaccagagtatccaacaaaggaaagagtgaaacattgggtaactgctgtcacacatttcgacaaagttgagatgaaagctctcgagcaaatttttctgcaaaaacagaggctacaacaagaaatgctgaagtacatgtcccttcgacagacaagccaggaagatacccctgatatgaaaaaaaagatcctggggtgtttccggagcatgtctcgtttgttcaatgatcatacaaagtctgaggagtacttgaacatgcttcatcagataaaagatgccaacatctggaatatattcacaagcttgcttgattgttcaacaacattcaacgaagcttggtctcttcgggttgatttgctaacgaaacttggtgaaaaacatgcattacatgattttgtgagcacgttgtcgatgagatgctcatatttacttgtgaacaaggaatatgtcaaagagatcctttctgaagcttctgaccaaaaatctactgggaatacaaaacttatgtcatcatgcatggatcttttaacggcagtatctagtttcttcccttcacttttgtctggacttgaagaagatatcattgagctcctgaaggaggataatgaactacttaaagagggtattgctcatgttctgtcgaaggctggtggcaacattcgtgaacaactagcttcatcaagttccattactcttctactagagcggctatgtttggaaggaacacggaagcaggcaaaatactctgttcatgctttggctgctataacaaaagatgatggcctgatgtctctatctgttctttacaagaggcttgtggacttgttggaggaaaagaaagtgcatttgccatccatcttacaatccttggggtgtatagctcagatagcaatgccaatttttgaaacaaggggagaagagataataaattttataactaaaaaaattcttgactgcaatgatgattcgggcgacgtttctgctcataaatctgaatggagtgatagtactcaaagttgtttattgaagatttatggcattaaaactttggtgaagagctgtcaaccttgcaaagatgctcaagcacatccgggaattgaaaaattaatgggcatccttaagaatatccttacatatggtgatatttctgcaaatatgatttcaagcactattgataaggcccatttgaggctggcggcagcaaaagctgttctccgcttatcaagacaatgggaccacaaagtgcctgttgatgtattctatttgactctcaggatttcacaggatgatgttcctcaggtgaggaaattatttcttagtaaagtacatcaatatattaaggagagggccttggatgcaaaatatgcttgtgctttcttgttagctatggatgattatcatgccccacagtatgaagagtttaagcacaacataattgaggttgcgcagatatgccagcaagttaagatgcgccaactttctgtccaagcgg

SEQ ID NO: 26968 - DNA, 1620 bp, Oryza sativa
  ref <308>: DATABASE ACCESSION NUMBER: AK102410
  ref <309>: DATABASE ENTRY DATE: 2002-08-28
gcttgcgttgcgccccaaattccgcctcctcttcttcactagctcttccaccctctccaatcccctctccctttctctccctctccctcttgccttcgccatgggctgcttccttggctgcttcgggggggccaaggagcgccgccgccgccggaaacgctcccctgcgcactccccctccggccgcgcccgggccacgccgcggctttccccgaagaaggctgccgctgccgccgcgttggatggagacgttgtttccgccgccgcgccgctgctggcgacgctcctggagttgagggattccactgatgacttgtgcttgaccgtcatcaagaagaaggtggcgtttgatcccaacgtcaccacttacgaggcggctgcgatcccggaggcggaggaggaggatgatgaggaggccgagccggcggcgggtgacgacaaggatgaggcgaggtggatgctggcaccggattgcgcgaaatccgaggctttcccgctgaaccacaggtacagcaactgcgcctacggcgacaatgacagcgagtacgacgaggacgaggacgaggacgaggaggaagacgaggacgaagaggaagaggcggatgggctcgacgagtgcgcgatcgacgacgaggacgacgacggccttctcggcatcgggcgcggcgaggacgaggcgtgcgagtcgctcttcctgcttccaatgagcaagactaaggagagcggcggcggccatgaagcggcttccggcgtcacctcgccggaggcgccgcccgcgcctcaacagacgcgcgacgcgaatccggtgctcagctcggtggagaatctcacccagtggaaggacgccaaggcccgcgccgccaccgccaccgccgcgccgaatgcttcggacaaggagaacagaacgacggcgaacttgctccccgagccggcgatcccagccaagaagagagagtggcaggtggtctgctccgactacagccccagcacgccaagcaagcaagaagtctcggtggacgcgagcctctcgacatggctgggctcttcggggacgccggagagcaactccgtccggtccttctcgccgatcagccgagaagaccggccgatccttggggccctgaccgtggaggacatcaagatatcctctgccaactcgtctccgaggaggtcgaggtctccgagcccgagccctgacgacatgcccatcctgggaaccgtgggggcttactggaattgcagctccaaggctggtgatccggtgacaagaggagggtttatgaggactagaacaaggtttgggcagaactttgcaggatgaagtggtgaattgctactgaaagcttccaagctggaagctggaagagtttggtttcaggaggaaaattgcagaagatgcatacatgcttttgtgagaagaacttacatatagagtcagtgagattgtggaagtagtggcatgctttattcaaagatgttgcttgtcaaattcttttatttgttgtaaacaatgtccatccatattctattatggtgatctttttttttttggcgctgtcgatatggtgtattgtttcgatgttacattgtcaatatggtgtattgcacttatgcctttcc

SEQ ID NO: 26969 - DNA, 951 bp, Oryza sativa
  ref <308>: DATABASE ACCESSION NUMBER: AK102411
  ref <309>: DATABASE ENTRY DATE: 2002-08-28
gggcggagctccggattcgaggggaccaagcatcgcctgcagaggaatccgcctgaaggattggacttcgattccgggaggatccccgcccggatccgaattttggccgaccgggatccccgtctcctccgccgagatggggagcacctcgtcgatgctgacgcagtacgacatcgaggaggtccaggaccactgcgaccacgccttctcgcagcaggagatcgtgtcgctgtaccaccggttctgccagctcgaccggaatgggggcggattcgtctccgccgaggaattcatgaccgtccccgagttcgccgtgaaccctctctctcagaggcttctgaggatgctcgatgggctgaactttaaggagttcgtggcgttcttatcggcgtttagtccccgcgcaagcctgcagcaaaaaattgaatttattttcagggtttatgacactgactgcaatgggaaggtggcatttgatgatatcttgagcatcttgcgggatctgtctggttcttttatgactgagcagcagaggcagaaagttttgatccatgttttagaagaagctggctatacaaaagattcaaattttactctgccagactttatgaagattcttgacaattctgatgtgaagatggaggttgaagttcctattgactaagtacttgtgtcattgttctgtgccccggcatgtatgtcagcttgagaagatggattaattagaccctactagtactttttttatcatgtattaagctgtaattagtgaaacatctgtatttgatcattttcaggcttaattaacttttaccacccgtgcatcctatgacctttcaggtactgttaccctgtaaggtccccttcattttttcctaacatcttttcatattgaaaacgtctgtgatattatggcttattaatcctttctagtaccttccattatgagtg

SEQ ID NO: 26970 - DNA, 1558 bp, Oryza sativa
  ref <308>: DATABASE ACCESSION NUMBER: AK102412
  ref <309>: DATABASE ENTRY DATE: 2002-08-28
gacacctcgtctccttccccacttctctcctcctcctccgcttctagggtttagggtttttgccggccaccatgcgccacctcgcccgcctcctcaacaaccgcatcctcctccccgcctcctcctcacccgcggccgccttctccaagcgtacctacgcccgccgcaccaagccggctccgccgaccgccgatgcggccgcccccgccgcggtggagggggagggggaggaggagagggggccgggctggcagagggagaagctccccgccgagatcccccggccgtccaccatcgcgttccagccgcgcgtcgccaacgccgtgcgcctcgtcggcaccgtcggcgcgcccgtgcagctgcagcggttgcccgacggccggttctccgccgtctcggtgctcgtgcaggaccgccacgctgattaccccaagttctggattcccataatattccaagatgacttggcacaagttgccgcgtctcacttgcaagagaaggaccatatatatgtgtctgggcaactaactggagatatcccaccgaccaaacttatggatggccaagcaaacattcaggttttagcccaaatgctatcatttgttggtggtaaagcagttcaagcagatagcatggtggatgaagaggagggatttatgcagattgttgaggctgaaaagaaagttgaaactaaaaaattcatccctaaatatccaccacgcacagtttcaggttacagaaacaaggataagctaaacaaactctggaatgatgttgtggctaatcctcaagactggactgataaccgacctcagaagaaaaatggatctataaatgcgaagtatcctgacttcaaaaacaatgtatcaaaagaggcactttggcttgacactgcaccaaaagcagtgctggaaaagttggatgatttagtattcagtagtgatttcagtgctgcaaaaaaatacaggccttttggtggtgacaagggcaatggtacaaactgggcaaagaagagtcaagattcttcttctatctcaaaacaaaaacaaggggagttgtggcaagatctggtggacaatcctggaaaatggtgggataaccgatcagataagccttcaataaaatatcctgatttcaagcacaaggaaaatggcacgcctctgtggattggatcccagacacctaaatgggctatagatgcgcttccaccggcaaaaccttccaaggcaccttttaagcaagagaccttcctctcatgatttgtaagagatctgatcagtggtaagcccttccctgtgcaatatgtacctcaggtttgttctatttagtacaaatattatagttgtcttaaggagctggttctttttctttaaggcaagtcgcagtgcctgctaatacctaattcaggtaggtattagcgaatgaaattattttggcttgactaccacatgcgttaatggaagccatgtgggcccggtttcattaaggttatgttaggatgtatatactagtcattccaattaatgccaatacatatcgtcatatccctgttttcagt

SEQ ID NO: 26971 - DNA, 1637 bp, Oryza sativa
  ref <308>: DATABASE ACCESSION NUMBER: AK102413
  ref <309>: DATABASE ENTRY DATE: 2002-08-28
gtctcttttccccttcactcacacacagtcacactgtgcgagcctgtgtgggactgtgggtgttggccattccagtacaatccgttctctttattcctccctctcctgcttgtctcgttgcgtggccgtggccttgtgcggttttatggatcaagaaacctcacgagaaccccgacgcttcggccgtctggtggcgcggcgctagccatctctttggatcgctcctcgcgatcgcattgcggccgcgttctttgatttttggttttttttttgtccggtcaaaggttggttcttggtggtgtagattcggagtggcgtgtcgtggcggcggttttttgttgttgttgttgttgttggtagatactggttcggattgtttcttggaggaggaggaatttcgcgtcttggagcaatggcgggcggcggcgggcagtcggcgatcgccgctgaggacgacgacctcgagcgcggcgcggagcgcgacgaggaggaggaggaggggagccaatacttcaccgacgcggaggaccaccagtcgtgggcgtcgcactcgcgccacaactccaccgcctacgaggactacatctccacctgcgcctccgtccgcgcgagctcctacgacggcgaggcggaggaggaggaggatgccggcggcggcggcggcggcgtcgagcaccaccgcaggaagtcgtcgtgcgtgtcggagtgctcgctggacgacgtcgacctggaggccgggctggccgaggtcatcaagggcagccccgagaaggcggagaggtgctgccgcatttgccaccttggcctcgagaccgcggcggcggagtccggcgccggcatcacgctcggctgctcctgcaagggcgacctctcctactcccacaagcagtgcgccgagacatggttcaagattagaggcaacaagatatgtgaaatctgtagctctaccgcatgcaatgtggtaggcattggtgattcagaatccgttgagcaatggaatgaatcgaacagcacagcacctgcacaagcaccaccagctgaaactcagagattttggcaagggcatcggttcctgaactttcttcttgcttgcatggttttcgcctttgttatctcatggctctttcatttcaacgtcccgggctaagttttgaaacacatggtcctcaataaaagctccaatgccattactacacacctgtgggttggatttagtaaatctgaagaacaggctgaggtgaaggaaagttatgaagtggtacaaaaatgttgggtggggcatgttgatcttaactgtgtcaatggcaattgcctcctttcacaacgaccaagattccattagacaagaagctggaaggacaatttcctcctgtttcccttgtctggatggagatgaaaacaaagaatggagaatgtgtttgttccgtcaatagtgctgtcatggttttcaggaagagattgtgctgtatccattccctatcttctcaggcaatttatcatttattctgctgatttggtgtaagtgttatcttccaggagaaaaatgtgctgagttcggaagcatgtcgccagaaagaataaacaatattgtgaagttcctgggcatatcgccgcacatgaaattgtcgattttgtgg

SEQ ID NO: 26972 - DNA, 1760 bp, Oryza sativa
  ref <308>: DATABASE ACCESSION NUMBER: AK102414
  ref <309>: DATABASE ENTRY DATE: 2002-08-28
tgagatacagagagactagagaaagagggagactgattgcgcgcgcgcctccctgcgcggctgatcgcgtatcagccgtcccgacgtttggtagggtagcaatccaaattggcccactgtctcctttcccccttcggatcaaggctgacggcgccccggtccaagttgcgcagtgcgacgtgggtcggtgggtgcgtgtggccccgcttgcagcgtgccggcccccggtcctgcctgtctcgcccgttccccctgcgccgcccctcgccggcccgcgcacgcgcccaagacgcacttggtggtccgcgtcgcgctcgtctctcgcgtgcgctgcgtctcccctcctacccctgattcgcacggaattcctcgaatcgcccgtgagatccgcttgattcgatctccgattcaggccccggggtctagggttttcgccgccgttcgagcggagcagagcggggcgtgggagatggcggggaagggagccaaggcgacggcggccaagtcggcggagaaggaaaaggggaagaaggcccccgtatcccgctcatcccgcgccgggtcccaggagaagccagctccaaacaaggatgtttaccaactatttgctgagaaggttagggataacaagcagctggaatcaagatgggcaattatgcaagaaactcgtgttgagtatttccgtggaaaagattttactaccttcatgaggaatcatccagaagttagggaaattttagggccagataaagatttagaagtggaagacattgttaacactctgctgagcaagaaccttgtgataaggtgtgaccgagtttggaaaactgtcagaccaggaaagaagaaattgtcatcgtggcctgcacatttggagatacatcgtgaacaagtgttcactgagaatgatggattttttgcttggatgtttctcaaaaggaggaccttgtggcaaacgattctttcatttgtttggcctctctttgctttggcagtttgcttatttccagtttacccataccaatgcaagattgtggtcttgtactcatgtgctggagctttattgttcattgtctctattcttttgttaagagctgctatctttggcatactatgggtactccttgggaaacgtgtgtggttctttccaaatataaatgccgaagagacaacatttagagaacttgttcggttttggcccgagaaggatgagggagagcgaccaaagtggacatcaagactcttctatgccactgttgctgtattggtgatattactgctcaggcaccatgctccagatgaagcagctagggcaaggtaccagaagaaggtttcgaacataattgatgatgttcttgagtggtctccaaagttagctttgtctgggatgatggaaaaacatactgggactaatgcatcagaaactagcaatcacaccagtggaactgggagtagtcctgtccctcccactaatgaagggaataccgcaaaagcagacccagatatggatcgtcagacgaactcagataaagtccaagatggtgatgagtatggtgatgacatgagaacaagatttagtgaagtttagaatcgacttataaactctaaagctctggtaatttggagtacttaccctcggggatttatctgcagaatcatatagataggttactgacaagttcaaattcagggtgctcatgttttgaccatgtttcattcacatattgccagcaatggctgtattacgaggttctcaaagc

SEQ ID NO: 26973 - DNA, 1779 bp, Oryza sativa
  ref <308>: DATABASE ACCESSION NUMBER: AK102415
  ref <309>: DATABASE ENTRY DATE: 2002-08-28
gagccttccagccaaactgaagtcacgactcgcgacatctgaagttgacacacctccaaccattactttctgttccagtgttgcacacacctccggccatttgggcgtcatgaagcaaaccgtcgtcctgtaccccggcggcggcgtcggccacgtcgtccccatgctggagctcgccaaggtcttcgtcaagcacgggcacgacgtcaccatggtgctgctggagccgcccttcaagtcgtccgactccggcgccctcgccgtcgagcgcctcgtcgcctccaacccttccgtctccttccacgtcctcccgccactccccgcccccgacttcgccagcttcggcaagcacccgttcctcctcgtcatccagctcctgcgccagtacaacgagcggctcgagagcttcctcctctccatccctcgacagcgcctgcactccctcgtcatcgacatgttctgcgtcgacgccatcgacgtgtgcgcaaagctcggcgtgccggtgtacacgttcttcgcctcgggcgtctcggtgctgtccgtcttgacccagctcccaccgtttcttgccggtagggagacgggcctgaaggagcttggcgacacgccgcttgatttcctcggtgtttcgccgatgccggcgtctcatctcgtcaaggaattgctcgagcatccggaggacgagttgtgcaaggccatggtgaaccgctgggagcgcaacacggaaaccatgggcgtcctggtgaactcgttcgaatcgttggagagccgggcggctcaggcgctcagggacgacccgctctgcgtcccaggcaaggtgctgcctccgatctactgcgtcgggcctttggtcggcggcggcgcggaggaggcggccgagaggcacgagtgcctcgtctggctcgacgctcagccggagcacagcgtcgtgttcctctgcttcgggagcaagggcgtgttctccgcggagcagctcaaggagatcgccgtcggcttggagaactccaggcaacggttcatgtgggtcgtgcgcacgccgccgacaaccaccgaaggcttgaagaagtacttcgagcaacgcgcggcgccggacctcgacgcgctcttcccggatgggttcgtggagcgtaccaaggaccgtggcttcatcgtcacgacgtgggcgccgcaggtggacgtgctccgccaccgggcgaccggcgcgttcgtgacgcactgcgggtggaactcggcgctggagggcatcacggcgggggtgccgatgctgtgctggccgcagtacgcggagcagaagatgaacaaggtgttcatgacggcggagatgggcgtcggggtggagctggacgggtacaactcggactttgtcaaagcggaggagttggaggccaaggtgaggctggtgatggagtcggaggaagggaagcagctcagggctcgttcggctgcgcggaagaaggaggcagaggcggcgctggaggaagggggctcgtcgcacgctgcgttcgtccagttcctgtccgatgtggagaatcttgtccagaactaactgacgaaaatttgcagatgcccagcatcttggccacaagtgacgaaaattctcagatgctctttatttgcctggggaccgggggccctttcaacgataatcatttaagaactacttgtgtaccttatttgttgttaataaagcaacgtactagaatggccgcgatgatatttatcccttgtctttattatcagagtatatggataaaatctaattgtatggtttgttatggt

SEQ ID NO: 26974 - DNA, 2540 bp, Oryza sativa
  ref <308>: DATABASE ACCESSION NUMBER: AK102416
  ref <309>: DATABASE ENTRY DATE: 2002-08-28
ctctctacctctgcctcgccctcctcaacgactcctccgcccgctcccgcctcgcctcagaacagtggacgctgtatgagcaggtggcagtggctgccatggattgccagcgtctcgatgtggcaaaggattgtattggagtgctttccaagcagtttcctggcagcatgcgggttggtaagttctttcagagatcagcataatatagttagactagcatcatttgtcaacaaacgtagatcttatattttgcttttggatgcacatccgataagactggaaataaaaattacatatggctgagaaaaactaaatataaaaacaatctggcctagaacttaaaaaaatgccaccaatcctgtgtcataaatttatgtcaagttacaattagggttgacaataggccactctgtcaataacttgaggagaaaatacggaggcaaatggtcagggctattaatctagattattatgagttgcactgaattgcttaaccatagtacaatatgatgctaaaccaatcttacaggaactgatgttgatttctttgaaaagatacacctgtatctagcttactactccatatatcaagatagaacgatgatgtggtaagctggattatagcaatgctatcagactaggcattatttgatctaaagtaggagggcagtgtgcctatcaactgaacatgtcatatcttacatgtttcttaactaatgatctattacctaaatcctggtgcgcacaaataaatgccacatacacctaatatcaaattcccctgtacttcatatgagtttgcaacttgatatatgctgagacatgtgatgctgattcttatggatatttttctgcatatggtactaaacactttgccctcaaatgaaggtcgattggaagccctgctgtttgaagcaaagggtgaatggactgatgctgaaagggcctatgcgcttatccttgaaaacaatccgttcgatcagattgtccacaagagaaaaattgctattgcaaaagcacagggtgacatggcattagctgttgagtatctcaacaagtatttggaactatttatggcagatcatgatgcttggagagaacttgctgaaacatatgttgccttacaaatgtataaacaagctgccttttgttatgaggagctaatattggcccaaccaaccgttccactttatcatctagcttatgccgaggtaagtgaactatgccaaactcatccctcattctctcaaagtctcaaagaaaaataaaacaaaataaaattgtatcaacttatgcagtttctcattttcatgtggagtgcagcagtaatagtttgttttgttcctcaatgaactaatggccaactggccaagtcttacagtggcaatgaacatcaaaaggctaattaaaattaagcacagtaaagttattgctcatcctattgaaagcagtgttgcttgattcaatagaattccatacagagcgatatacttatttgcacattttacggacgttgtgtttggcaatgtaaatggtgtttttgagaaatgaattcaaagtttatcttagaatttgcccccccacctctgtgctgtttttataccagttctgttgttatgttgtaaagtgatgatgggaagattttgttggagcttgatcttatggggtcttctgggattttggtggggaaaattttctcccttgttttagtagttgttgtgtatgccatatgcacgttacttaatctatacagtaggtgcaagagaatttaccgcatttaccgctgcttttttctgatttatacataataacttatttaacatgcttttctgatttggagatgctactactgttgcttttttttttttgttgaatgcaaaatcaccacaaatttagtgttctatacatgcaactaattcaagcctagaacctgtctgcaactcatgattctgctggaaactcaattgatctcatcctacacctctctgtacttctcaaattctcatgaactgtgtgtaatcctttatattttctaggttctgtatacaatgggtggtttggaaaaccttcaaacagctagaaaatattatgcatctacaatacagttgactggaggcaagaatacaagagccctctttggcgtgtgtttgtgtagctcggcaatcaatcagttgaccaaagggaggaataaggaagaggaaagctcagaactgcagagcttggcttcagaggcactattgaaggattacaagcaacgagcaccgtcgaaggaggcactcatcaccagcctgttgaagaacatgaaactctcctgatcttgccctccactcatcgaaggttttttagcttgtggcacaatcgcagctagtcagtggcgccacaatggcagtttgacaaatcaattgatagcagtataatgcttgtttttttttctcctgatggcaccgaaattgtaaaacttatgtaagatgcttcaatgggttgtaccacacctgttttgatcatttagaaatatatattcatcgtcgtgttttgattgc

SEQ ID NO: 26975 - DNA, 1642 bp, Oryza sativa
  ref <308>: DATABASE ACCESSION NUMBER: AK102417
  ref <309>: DATABASE ENTRY DATE: 2002-08-28
gagcgggccccacacgtcagccagagcacgaggtttatctcccaccctctccaatcccctcctcctcgccgccgccgccgccgccgcagcgtccccggcgaccggaggcgtgagatcccgccatggcagcggcagcggaggccgtgaccgaggtggatgccacgaacgaggagggggaggaggaggagcaggtggtgaacccgtgggaggtgtcggcggggaaaggcgggatcgactacgacaagctcgtcgaccagttcggctgccagcgcatcgacgacgcgctcgtcgcccgcgtcgcccgcctcaccgcccgcccccctcaccgcttcctccgccgcggcctcttcttcgcccaccgggatttgaacgagatactggatttgtacgagaagggggagaagttctacctctacacggggagggggccctcgtcggaggcgctgcacctcggccatctcatccccttcatgttcaccaaatatctgcaggatgctttcaaggtgcccctagtaatacagctaactgatgatgagaagttcttatggaagaatttgactgttgaggaaactaaaaggcttgcccgtgaaaatgcaaaagatatcattgcttgtggatttgatgtcgaaaggactttcattttctctgattttaattatgttggaggtgctttttatgaaaacatggttaaagttgccagatgtgtgacatataataaggttgttggaatatttggattcaccccagaggatcatataggaaaagtcagctttcctcctgtgcaagcggttccatcatccccttcttcatttccacatctcttctctgggaatgaccaactacggtgcttaatcccatgtgcaatagaccaggatccttatttcaggatgacccgggacgttgctccaagaattggttaccagaaaccatcattaattgaatcgagatttttccctgctcttcagggggagaacacaaaaatgtcggccagtgatccaaattctgcaatatatgtgacagatagtgctaaagaaataaagacaaaggtgaacaaatatgcgttctcaggtggccgggactcaattgagctccatagaaaacttggagctaaccttgatgtggatgttccaatcaagtacctgaacttcttccttgaagatgacaatgagctcgagcacataaagaaggagtacaaggaaggaaggatgctgacgggtgaagtgaagcagcgccttgttgcagttctatccgaactggttgcgagacatcaaagagctagagcactagtgaccgaggagatggtcgatgtatttatggcggcgagacctcttcccaatatgtttggctgagtctgatgtcaaaaactgcctggagatatttgctactagctggataagatgtccgaagtgatctctagaatttggaagcagcattcgtgtgtttcatgacttatatttgtaggctggccactcgtaatatttggtggcacgcttgattttgcaaatcagttgaggataaatttatttatcttaaagcctgctccatcaatatagaaccaacgtctttttgtattgaatcagaaatgttacaacagttttgagcttaatcagaacaatcaagaaacaaacagctttgtcgtctg

SEQ ID NO: 26976 - DNA, 1214 bp, Oryza sativa
  ref <308>: DATABASE ACCESSION NUMBER: AK102418
  ref <309>: DATABASE ENTRY DATE: 2002-08-28
ggcctcctcgtcttctccgaacgaagccttcccctttttcttcctcgtcttccaccaagaaccccaaggatttggagttcgaggtctctctccccggcaaagcgagagagcaagatagagaggccagagcccgacccatcgcctgctgcctgactgccgtctgccggactccaagaaagcgggggttggcttcttgcgcgcgcgggagggacagggtgtagctgtagcgtcgtccggcaaaggcggggggagggccccggccgcggccgctcaagtccggcgacatccgtggccgccgccgacgcggtcctctacctcctggggagagagccaggatttgtttatacagcattcaacttctaccatgagtcacaccttgatatacatgacatcgagataaagaagatcccgcagggtaccctaatcagagtagtgctcaaaggcctcgaacacatcgagtttcaagccaatgctgatgttgccgatgatgaaaacttccaccatttcattgctctagacctactcaccaaagatttaggtgagctgaaaatgcaaattactggccgtgcaaaccctgattttgttgagactgccaaagagaaaaagaatgacgctgtcaagactgtcgaaccgcatgggagcgattatgctgaggacgccataccgcgtcggatgcagccaaagtgaaaagcgaaggattactctgtccagctcaccgaagtgtcaagttccgattctggtgagatcagcagagcgcataagaagcagctactacagaaggcaaaggccaccgaagtgccaaataccaccgcagtgcatagggagcagcctgtgcagagagggagggggcagaggcgacggcgagggcgaggaggaggaagaggaaaagggagaatcagagaatgtaagtttgtccatgggtaaggaaatgcaaatatcatgatgaggagtgcagctcaatttagaggttgagtatgtgaaagtagattttacaggatttgctagagcaagtgagtaacctcaattgatggctatgggattaacattttttgctctgcttaaattttgatcgattttatctgatgtgggttatagagcgtatctgatgtgcttgagaagaatagttactgcttttccatggtatacttggcaactcatgtgaaagggattttgacatgaaccactgtgatattattaaacattctgcatttgtt

SEQ ID NO: 26977 - DNA, 2257 bp, Oryza sativa
  ref <308>: DATABASE ACCESSION NUMBER: AK102419
  ref <309>: DATABASE ENTRY DATE: 2002-08-28
gtcgccatctcgcggctgaacaggggaggggcgccgatctccgtctggcgcgcagagcagggggaggggatcctgacttcgattagtaagggtattggatgaagcttgtactgatctatggaggtgggtggtccacaagatgctctggacaacagaagtgatgataatgactttgataagaatgacaattctgatcctgttgtttaccagttagttcgggttgaaggtgatggaacacttattcctgctacggaggatgaggtcttacagtttgaaactttccttcatgatgagaaggttgatgatgatctgccttctattgacgatgtaacacatgtggaggaatattttactaatgattgcatagtgaagaagcctgagtttgaagaggggccttccaaattagacactgcagatgtacagacacaaaagttagatgctggcttagaggaagacaggttatgtacattgaatgattcgatagttcttccttcaaattgttcagctgttcatgaccagcagctggataaactaaatacagaacaaggggcaaatatcattgcccaacaggacaatgcttcgactgagactacaaaatcaacagtattaaatgacctttcttctgataaagaaaaggctgatgcctgctcgaaacctgtaaatgaggcatctgcaggacaatctgtttctggggttactagttcagttcctgatttttccattttaaagggagaagtctgcttggatgatcttacaatgagagaacttcaggaagcatttagagccacatttgggcgtcaaactactgtcaaggacaagctatggctcaaaagacggattgcaatggggttgatcaattcatgtgatgttccaagttcaggttgtgttgttagggattataaagttattgccatgggtgccaaacaagaaataccagtggttgaagcaataccaaagatggaacttgaggctaatttggttagggaccaagtaatgaatcctggacatgagagagatttaccatcaagtctttcctatcatagtgaggagcaacagagatcgtccaagagactcaaaagagtaccaacagataatgatgaaccacaagtaactatttttgccgaacaaggaactactaagagaattagaaagccaacaaaaagatacattgaggagctctcagatattgacactcatgaatccactgggagactttcttcacctggaaaaaggcatgtatatgatgaggtgttattgagaccacggatagcgcctttgcatgaggttgattcgttgagcacagcctatcctactagagaagatactcttggagggtgtagtgtgcatgtgccttatgtttcaaggatgagaagggggcgccctaggagtaacttcattccatttttggatcctgagccttctgtggaatgtactgaggcccctgctgcagatgtagtgaatttggaaaaggaaggtgaacggaagaaccataagaacactgggaagaaaggagtacatgtagaaacatcttgtgaaaaggatgttcagggtctgcaggacaaggatttttgcgactctgatgacaatcccaaaacaaagcggggtgggaagcggaagcatcatcgagcatggacattgtgtgaggttgtgaagctggtcgatggtgtggcccgatatggggctggcaaatggtccgagattagaagactagccttctcatcatattcgtaccgcacctcggtggatcttaaggacaaatggcggaatctgatcagggccagccagacacaactttccactgaaaacgatggtgtttgtccacggaagagcaatccttctgccataccgataccagtgtcgattctgctacgagtaaaaaaactggctgagatgcagtctcaagctggcgacgtgggagtgccgatcaagttttcagggcagagcactacggttgtacaggggaaagtttcgggtttcttgtgatccacgtgttgcatgcaaatagagggggaaaccactgagattgatgtacgcttttggacgtctgtgaataccacacttgtatagcaaagttgtgatcgcgactcgcgttctcgtgcaaaagaaagagtcgacgtatgtattgtttgctcctttttctacacacgaacacttcctatgttctccgagagatttgactaacgtaccttgagattgacatagtcaccttaaacaccttgttattgaaagaataaatgctcctttttcgtttgcacgg

SEQ ID NO: 26978 - DNA, 2757 bp, Oryza sativa
  ref <308>: DATABASE ACCESSION NUMBER: AK102420
  ref <309>: DATABASE ENTRY DATE: 2002-08-28
gagagcagtgcgcacgagttcctcctgctggagctggacgaacgaggcatggcagccatggatggattaatccccaactccaaactaacccccaccatgttttccgcctgatcaagatcaatcccctccatgcaacaacccatcaccattgatgctcactatttagcgagagccgagagagagaggagcagcagcagcagccacgccaagatccgggtgcggagggagggagaggatggcggagaaggggaggacggagatggaggtccggcccggcggcgtcgccctcatcaccatctccaaccctcccgtcaatgccctctccatccacgtcttgtatagcttgaaggaccactatgaagaagcacttaggaggaatgatgttaaagctattgttgtcacaggaaaaggaggagtattttccgggggactagacattaatacatttggtgctattcagagaaacaaagcggagcagctaaaggttgattatgtgtccatagatgtcatgactaatactcttgaagctgctggaaagccatcagtagctgctatcaacggtcctgctcttggtggagggttagaaatttccatggtatgtcaagcacgcatttcgattccaacggctcaattaggtcttccagagcttcaacttggagtgatccctgcatttggaggaacacaacgacttccccgccttgttggactaacaaaagcacttgaaatgatgctgatgtccaagcctattaaagccgaagaggcccatcagctggccctcatcgatgccatagtttcacctaatgatttgctgaatactgcctgccgttgggccttggatatatccgaatctagaaggccatgggtccataccctcagtagaactgacaagctagagtctcctgatgaggccagggagatcctcaagtttgccagagctcaggttcagaagcaggctgccaatcttcggcacccacttgtctgtattgatgttatcgaggaaggtatagtttcaggaccccaagctgggctacggaaggaagccattgctttccaggaccttgttttctcagatacatgtaaaagcttggttcatgtctttttttcacagcgtgcgacatcaaaggttcctgggatcacagacttaggtttaatgcctaggaaggtatctaaagttgccattgttgggggtgggcttatgggttctgggattgcaactgcactgatgctgagtaattatcctgttgtactcaaagaagtaaacgacaaattcttggacgcaggaattgacaggatcaaagcaaatttgcagagtcgtgtgaggaatgggaaaatgaccaaggagatatacgaaaaaacgctctcacttcttacaggtgtcgttgattacgagagattcaaggacgtagatttagttattgaggcagttgtagagaatgtgaaggtgaagcagcaagtgtttgctgacttggagcggtactgtccttcccattgtgtacttgccactaacacttctaccattgatcttgacctgattggagagaagacaaactcccaagatcgcattgccggtgcgcacttttttagtccagctcatgtgatgccacttctggaaatagtccgctccaatcatacctcaccacaagtagttgttgatttgctggatgtggggaagaagatcaaggagacaccagtagtggttgggaattgtaccggctttgcggttaaccggatgttctctccctatactagtatagcgctcttgcttgttgatcgtggaatggatgtttacaagattgatcaagtttgtaccgaatttgggatgccaatgggtccattcagattgctagacctggttgggtttggagtagctcttgcctctggcatgcagtaccttgagaactcccccgggagtgtcgacaagtcaatgctaattcctctcatgtttgaagacaaaaggacaggcgaagcctctcaaaagggattttacaagtatgagggtaatcggaaggccatccctgatcctgatatcttcaagtatgttgagaagtcaaggagaatggctggaactgtgcctgatcttgagctactgaagcttgacgacaaggaaatagtggagatggtgttcttccctgttatcaacgaggcctgccaggtcctcagtgagggcattgccaacaaagcctcggacctcgacatcgcctcaatcttcggcatgggatttccaccatacaggggtggcatcgtgtactgggccgattccatcggcgcaaagcgcattcacgcaggctatcagagtgggagatgaagcatggccagttgttcaggccttgctcatacctgtcagaaagggcagcagaaggtgttcctctgagctccaccgcgaagaacaatgccaaggcccggatgtgagtctgatcttactgccatcatgtgttttccagccgagattgatgaagaacagtaataatgcagcctcagtcagagtttcagacttcactggctgctgtgaagtgtggagcaaagagagtcaggagattgaataacagtatacagtgtgtattatctaaaaaataacagtatatagtgtgtatagtgagaaaccgtacgaaatgtgtatgaaaagagagaccaatttacgcacagaattcatatatgaatgttaaaaaaattcagatcactggacgtgatgacatactacatgcagctcggattcttatacggctgcttaaaaggcctcattgattggtgtatagatcg

SEQ ID NO: 26979 - DNA, 1398 bp, Oryza sativa
  ref <308>: DATABASE ACCESSION NUMBER: AK102421
  ref <309>: DATABASE ENTRY DATE: 2002-08-28
ggtccgttcgtctcctcgcccagatccgccaatcgcccatggagtccccaccccaccccctcctcctccttctcacgctcctcgtcgccgccggcgccgcctccgccggcgccgatgacctggtcgccgagctgcaatccctgcggtcccgctccccgtcgggcgtgatccacctcaccgacacctccatcacccgcttcctatccgccccggcgccgcgcccctactccgtgctcgtcttcttcgacgccgcctcgctccactccaagaccgacctccacctcccccagctccgccgcgagttcgccctcctctccgcctccttcctcgcccacaaccccgcctccgccgacctcttcttcgccgacatcgagttctcggagtcgcagcactcgttcgcgcagttcggcgtcaactccctcccccacgtccgcctcgtccgccccgagcacacccgcctcgctggctccgagcagatggaccagtcccacttctcccgcctcgccgactccatggcggagttcgtggagtcccgcaccggcctcgaggtcggccccatcgtccgcccgcccctcgtctcccgcaaccagatgatcctactcgtcatcctcttcttggtctccattccgttcctcatcaagaggatcatggacggggagaccttgttccatgaccgacgggtttggatggctggggcgctgttcatttacttcttcagcgtgtccggggggatgtacgggatcatcaggcacacgccgatgttcatcaccgaccggtccgatccaaacaagctcgtgttcttctaccaggggtctgggatgcagctcggcgccgagggttttgcggttgggttcttgtacactctcgtggggctcatgatcgccatggtgacacacttgctggtgagggtggagagcctgcagatccagcgttttacgatgctggcggtcatgataattgggtggtgggcagtgaagaaggtgattcttttggataactggaagactggatatagcattcataccttctggcccagcagctggaggtaaatgcttgtacaatggcagacgatatggatggtttcttccttcggtttctgaggttatggaattatccaactttgaccgtgctgagatagagcatattttggagtgttgggacttgccaagtttatttttgcaaatttctgatgctgtagtatgaaatatgtagacctcaagtcatgttagttatgcagaggaattatgacattgcacatctatcacttgaacaagaaagtttggcttttgaattattggtttggtttcttcgaatgatgtatcgtggttgatgtagcttgtcaggtgcattgtcattttggaaaattgcttaatggaaatcattagcattgaaggggcc

SEQ ID NO: 26980 - DNA, 2089 bp, Oryza sativa
  ref <308>: DATABASE ACCESSION NUMBER: AK102422
  ref <309>: DATABASE ENTRY DATE: 2002-08-28
gttccaggctcgagcactccgttctcccgggtctccggtgctgctcccgccgcagccggacacccgaacgcgaagctccaactctccaatgctcccctcgtctcgttacctcctcgccccggccccacttcccgccatggtggtacggccaccgccgccgcatccaccgagccgcggaacttcccctctcgctcggccaccattgtgccgcgccatggcgcgggccgccccctcgctctctgccgcggcctcgacggctgcctcctcctcgacgactcctgccaagaagaaggttctcttgcccatcgccatgggcacggaggagatggaggcagtcatccttgccggtgtactccgccgagccggcgccgacgtgacgctggcatccgtggaggacggcctcgaggtggaggcctcgcgtggctcccacatcgttgctgacaagcgcattgccgcttgtgcagaccaggtgttcgacctcgtggctctcccgggtggaatgcctggttcagtgcggttgagagacagtgtgatccttcagaggatcacagttagacaggctgaggaaaaaagattgtatggtgctatatgtgctgcaccagctgttgttctcatgccgtggggcctccacaagagaaaaaagatcacttgtcacccatcctttatagaagatctcccaacattccgaactgttgaatcaaatgttcaggtgtctggagagctaacaacaagccgtggaccagggacagcatttcagtttgctttatcatttgtagagcagttgtttgggccttgtaaagctgaagatatggacaacactttgttgacaaaggttgacgataatcttgaaagaagtattgaagtcaacgaaattgagtggtcttctgatcacaatcctcatgttctcattccaattgcaaatggttcaggagagatggagataataatgttgacggatgttttacggcgagcaaatgtaaatgtggtgttggcatcagttgaaaaatcaacaagtattgtcgggtcccaaaggatgaggattgttgctgataaatgcatttcagatgcttctgccttagaatatgatctaattatccttcctggaggacctgccggagctgagagactgcacaagtccagtgttcttaagaaattactcaaggaacaaaagcaaacaggcaggatgtatggtgggatctgttcttctcctgtgatcttgcagaagcagggtttactccaggataaaacagtgacagctcatccttccatagtcaatcagctcacgtgtgaagttattgatcgatcaaaggttgtgattgatggaaatttgattaccgggatggggcttgggacggtcattgatttttcgctggctattattaaaaaattctttggccatggacgagccaaaggcgtggcaaatggcatggtttttgagtatcccaagagctgaaacacctaaaatatatctggcactctgtaatacgcagacgtgggacatttagttgtgctgcaagtatattgcagtagctacgcttgagacaaaggtcaccggtgctcttcgtcttgctgttttatgggccttcaactcttcttgagacaacaacatattcctctgttgcgtcattggacatctggacggaaatcattccactatatttgttgggatggaccatttacattgagaagattcggtggaggtcaattcatctcgatatgatctgttggcacattacgacacaggttgattactaactggatctaaatattgcaactgatcaagtgatgataaccttctgcttgacggatgcgcttttagaagaaacccatcatgttcagtggggcttccaaggacctgaagcccttttgatgttgctcttatgcccagctatccaatctgatagtagagacttccagcctgcgacaaaccaatttagcttcgaaattcagatcttttttcagcaattttgttgcctgaattctgaagttaactggcaatgtagtacaatggattccctcaatttgctcgatagttgatcagataatttgctcgatagttgatcaaatatttgttgcaacaaacatgctc

SEQ ID NO: 26981 - DNA, 1157 bp, Oryza sativa
  ref <308>: DATABASE ACCESSION NUMBER: AK102423
  ref <309>: DATABASE ENTRY DATE: 2002-08-28
gacttttgtcatctcggcggcggcgcggcgcggagcagaggaggacgaagcagcaggcggcggcggcagagcacggcgacctagcccgacctcgcaaccatggcaaggggtttgaagaagcatctgaagaggctcaatgcgcccaagcattggatgctcgacaagcttggtggagcttttgcccccaagccatcttctggtcctcacaagtccagggagtgcctgcctctgatcctcattatcaggaacaggctcaagtatgctctgacataccgtgaggttatttctatcctcatgcagcgccatgtcttggttgatggcaaggtcaggactgacaagacctacccagctggtttcatggatgtcatttccatccccaagactggtgagaactacaggcttctgtacgacaccaagggacgtttccgccttcagtctgtcaaggatgaggatgctaagttcaagctttgcaaggttcggtctgtgcagtttggccagaagggaatcccctacctgaacacctatgatggtcgcaccatccgctaccctgacccgatcatcaaggcaaacgacacaatcaagatcgatctggagaccaacaagattgtcgacttcatcaagtttgatgttggcaatgttgtcatggtgactggaggaaggaacacaggccgtgttggtgtgatcaagaacagggagaagcataaaggcagcttcgagaccatccacgttgaggatgccctgggccaccaattcgccacccgtctgggcaatgtgttcaccattggcaagggcaacaagccttgggtgagcctgcccaagggcaagggcatcaagctcagcatcatcgaggagcaaaggaagcgggatgctgccgcccaggctgctgccaacgcttaaaatctgctgctgcgtctgcctggagttttgctatagcgagttgtttgcaaggatatagaactatctgccccagactatccttttttgagctcttttgcctaatgttatgttgatcaattcgcgaactcatgtttgctgctagctgtaatgcgactgtttaccttatttaaggcgccttttaagaacctccaaaccaaattgtctttgcctgttgctgagatggtatggttttgagcattcagcctatggcctttttgttc

SEQ ID NO: 26982 - DNA, 1289 bp, Oryza sativa
  ref <308>: DATABASE ACCESSION NUMBER: AK102424
  ref <309>: DATABASE ENTRY DATE: 2002-08-28
gggtggaggtggcaggcgctgccggccgcgaagagaggaagcaacaatggcctctccgcctccgccgttagggtcagagacggcgatctccccggcgtacggcgaggaggaggaggaggaggaggaggagcagtgccgcatctgccgcgtccctgcggaggcggggcgccccctgcggcacccctgcgcctgccgtgggtccatccgcttcgtccacgacgactgcctcctccgatggctcgccacccgccgcacctcccactgcgaggtttgcaagcgcctcatctccacctgccctctctacgccgcgaatgctcctgcaaggctccccttgtccgagttcatgctcggcctcgccaacaagctcatgggctggttcttcctcctcctctccctcctcgccgccatgtacatctgggaattcgtcatgcccttcaccaccctctggatatggcgcctcgctcttgctaggagctttgctcgggtgcgccacctgctctccctccggatcttcgctcatgctcatggacatggcgcccccctctatggccttatgccttctcccgacgccgtcttcgcctgtgtttctatcagaagagcctttctccgggacctcccccacttcagggacctcaatccccttgccagatttgctgcccatgctcttgctccctttgcactctggattgctcgcctggaaactcgtctcgaccgaaggtttggaggcttggatagtttgcaagtcattgcgctacataccgttgaagcttccttgatggtggtacttcttgatgtgatgcttgcttgtgtttttggttttatccccttctcactggggcggataatcctattctgcacatcgtgcttcagttttggaaatatggatagagtccactcctacacttcaacatcttctatccttttagttggatatggatttatcttttcactgggtgtacttttcactgggtttcatactttcgaccagtactcgaggggagaacacctcacaattgcagttttcttcaaggtcttgaccaatggaatgtacagactattcagccctcttagaaggttgcctggtatacatgtaatggtccagatggcattgtctttcttgcgactgttcttcagagggatcataaatctagtcaccgttgccaatatttcagttaatctcattaatgtgattgcaatatggccgttgttctttggctggtcagttgatatctgtgcttcacaattgtttggtgaaacaatatatcagaagcttgaacttctatttgccc

SEQ ID NO: 26983 - DNA, 647 bp, Oryza sativa
  ref <308>: DATABASE ACCESSION NUMBER: AK102425
  ref <309>: DATABASE ENTRY DATE: 2002-08-28
ggcttgcatagcttcgccatttcaaatctttgcttaggagtagcgatcgagagaggcaatggaggtggagatggggcacggagaggaggtggcggcggcgatggaggaggaggagctgcaggggtgggagacgccgaggagggaggagtgccgcatcccggtggtgccgccgcagtgcccggcgccgccgaggaagaggccggtggcgctgccggagctggggaaggagcggcgggagccgcccaagggcgggtacttccagccgccggacctcgagtcgctcttcgtgctcgcgccgccgcggaggcaggcgtccagctgcgcgtagtgctgctgcgcccagtctccgtgcagcagcacgcacagtgtgttggttgctgctactcctacattatagtagtgttactagtacagctttagccttttgtgtagggattgctgctaactctgcagttgcatcttgtttggtggtttttttgtggagcaagatggatgtgcatttgctgttctgcttttgtgatgggaagtagctgtatctatctaccgccatgcgtgtgaaatcctgttaatttagcagggggaaaaaaaccctatgtatctatgtacatgttattccaagttcagaaaatgggaaaaaaatgttcctg

SEQ ID NO: 26984 - DNA, 3149 bp, Oryza sativa
  ref <308>: DATABASE ACCESSION NUMBER: AK102426
  ref <309>: DATABASE ENTRY DATE: 2002-08-28
gaggtgtgtgagggagtttgcactgcagcactggttactggttactgagacatcatcccaacataaatctgcgatgtggtgtttcactccccattttttaagattatgtttcgattccgacgttaattacgtttctcagtgtatcaatctgtggatcatgctcgcagtacttaattttgttagtgtaataatctgtggatcatgcggtccttaattttgttaagagtcctgaattttgctgctgattagaatgttataaacataactgcaggcataggcagcattatctgtcgttgttctgctaattaatctcgtagcattatttacgattgctctgataaagtcgcatctgaaaagtctcacatgctttgagtgttgatgtttaaatgttgtaaaacatatcccctataaacatagagggttgttattttgctagttatcatttatttgtcatttattttgctagttatgtcacattctaaattgataggagggtttgaccatatataagacaaaaacacccgactagtgctttattttgctgattcattgttaaaattgcctctatgaaacaaaaacacccaaccagtgctttactttgctgattcattgttaaaattgaccctatggaacaaaaacacccaaccagtgctttactctgctgattcattgttaaaattgcccctatgaactgaggattggtctggttctctatcctgccaaaaatgtggtaaatcctgaaatctttggagttgctaaatttgggcagggtagagatgtcccatttggtgtcaagattgagctgtgagaatagatggggatagctgaacttttggtgtggaaacattattaaattattgtcggatagtgaattggaattgctagctgctttcatacaaaaccggccacttatcttatgcttttgtgttctgcaggcgttggacaagatcaggttcgagagcttgacggacaagagcaagctggatgctcagccagagctgttcatccatattgttcctgacaaggcctccaacacactgtcgatcattgacagtggtattggtatgaccaagtcagatcttgtgaacaacctgggtaccattgccaggtcagggactaaggagtttatggaggcactggctgctggtgctgatgtgtccatgattggtcagttcggtgttggattctactctgcctaccttgttgccgagagagtagttgtgaccaccaagcacaacgatgacgagcagtatgtgtgggagtctcaggctggtgggtccttcactgtcacacgtgacacatctggggagcagcttgggaggggtactaagatcaccctctacctcaaggatgatcagttggaataccttgaagagcgccgcctcaaggacctgatcaagaagcactctgagtttatcagctaccctatctctctatggactgagaagaccactgagaaggaaatttctggtgatgaagatgaggaagagaagaaggatgctgaggagggcaaggttgaggatgttgatgaagagaaggaagaaaaggagaagaaaaagaagaagatcaaggaggtttctcatgagtggtccctggtcaacaaacagaagcctatctggatgaggaagcctgaggagatcactaaggaggagtatgctgctttctacaagtccctgacaaacgactgggaggagcatcttgctgtcaagcacttctctgtggagggtcagctggaattcaaagctgttctctttgttcccaagagggcaccattcgacctctttgatacgaggaagaagctcaacaacatcaagctctacgtccgccgagtcttcatcatggacaactgtgaggagctgatccctgagtggctgagctttgtcaagggcattgttgactccgaggatcttcccctcaacatctcccgtgagatgctgcagcagaacaagattctcaaggtcatcaggaagaaccttgtcaagaagtgcgttgagctcttcttcgagattgctgagaacaaggaagactacaacaagttctatgaagccttctccaagaacctcaagctcggtatccacgaggactccaccaacagaaacaagattgccgagctcctgaggtaccactccaccaagagcggcgatgagctgaccagcctcaaggattacgtgacgaggatgaaggaaggccagaacgacatatactacatcaccggcgagagcaagaaggccgtggagaactcccccttcttggagaagctgaagaagaagggttacgaggtcctctacatggttgatgccatcggcgagtatgctgttggccagctcaaggagtttgagggcaagaagctcgtctctgccaccaaggagggactcaagcttgatgagagcgaggacgagaagaagcggaaggaggagctcaaggagaaattcgagggtctctgcaaggtcatcaaggaggtgctcggagacaaggtcgagaaggtggtggtctcggaccgtgtggtggactccccgtgctgcctcgtcaccggcgagtatggctggacggccaacatggagaggatcatgaaggcccaggcgctgagggactcgagcatggccgggtacatgtcgagcaagaagacggtggagatcaacccggagaacgccatcatggaggagctccgcaagcgcgccgacgccgacaagaacgacaagtccgtcaaggacctcgtcttgctcctcttcgagacggccctcctcacctccggcttcagcctcgacgaccccaacaccttcggcagcaggatccaccgcatgctcaagctcggcctgagcatcgacgaggacgagacggcggaggccgacaccgacatgccgccgctcgaggacgacgccggcgagagcaagatggaggaggtcgactaagcgggtttccttttttttcccctcgtcaaatccttcgcagcgaaagtacaccatggagcattggagctagcttatctgttttaccttttgaacatcgcgttgttgggtcggttcggtttattttgtgcgatttgctttacctttacctagcctgcaatgcatggggctagattgtgctatgggttctcgaactgcgtacgttaattatattgctaaatatgagtattatattagtgtccg

SEQ ID NO: 26985 - DNA, 1884 bp, Oryza sativa
  ref <308>: DATABASE ACCESSION NUMBER: AK102427
  ref <309>: DATABASE ENTRY DATE: 2002-08-28
ggccagcttccgcttccgggccgcctcggcctctcccggagcccgggaagaacgggggtttcttttcttttcgcattcaccgccgtagcaacggccgtcgccgccgtgggcgtgataagatgaatgaggaggtggtgtccgccggctcaccgctgaaggcctcctcctcgcccccaccgttgtgctccttcggaatatggtcggatcagcgtaagtcccctagattgccttggtggaagcagcagttcatctctgagtcggaggaggacgacgacgaggtgatgccgccggcgtcacacgtggtggaggacagcgacgagggggaggaggaagaggacgatgatgatgatgatgatgatgatgagaaggtggtgccgccgccgacgccgacgccgccgccgccgcaggctccagaagaagaagaagaagaagctcgagcactgcggcggagcctgctgagcctgatccacatcgactacatcgaggccatccggcggctccccgccgccgacctccggaccgcgctcgcgcggggcgtcctcgtcggcggccactgctacgggcccctccaccaccccgccgacaacatcctcctcaactccatctggtacgccgccgcgttccccctccacgccgacgaccggatcgacgtcgccgtcatcaccgccaactccctaagccgcgccgtgcagcgctccctcgacgggctcgtcgcctccctgcgccaccgccgccccgacctctcccgcgacgacgcgctccggcacctccgcgccgacctccgcgccgccgtcgcatccgcacgcggctctccaccaccacgactacccgcggaatcggactcggaggctgaagccgccgcgtatcgggcggctcagcacccaaaacctgctgctctggctcacttcttggccaccgtgctgcccgccgtggtgaccgacgcggcgtcggtgctcgccggcaagcccagcctctcctcatccgacatcgcgcgcgtctccgccatgctggcgccttcaccgctaccagatgagccgccacagcctcctctccgagagcggagtccaaagatcatccggatcatcaatgacaggaggaacaacctcagaggctggtacaagatcctgctccaattggcgaatgcagcgctgcgcaagtatgcccagcaaactggggaagaatatgagcttcataccatctatggtgaaaccttcctcaaggatcgcaacgagcgtgctgagtatatccacatcaatttcatggcttctccctccagctgccagtgcctgcaagcttctccagtctgcttctttgctgaagttcttcgtccaccacgctttaagtatcatgaagccgacatcactttgtgctgcatagtgcgaccgtcgccaaatgatgccgatagttgccatggttgtcttatcgagaaccacagaattgatcacccggaagctggcatgcgtttttgtgggaagaagcatagcaagatggatccaaatggctatggccatggctgggattggccaagcatagctgacgtcgaatacaggttttttgatcctgacaaggacgtcggacttgttgagtacttggatggagttataaccgatatcaaagcacgtatcagagacctatctatcagggatgaagacgacagtgacgaggacagtagcgatgatgatatctccggctattccatgagatttgtctgatgttgtgatgctctaacttgcagtactattcttcacctacaactttctcgaacagttatttacttacgtataaatgtttgaaactacagagctagcttaacgttggtgttattattctgaaatattctgtggcaagtatgacataatgcacgattggtagttttggttgttt

SEQ ID NO: 26986 - DNA, 1760 bp, Oryza sativa
  ref <308>: DATABASE ACCESSION NUMBER: AK102428
  ref <309>: DATABASE ENTRY DATE: 2002-08-28
ggtggtcccacaacacagtgacagaggaaaccctcagctcacagctccaggcgatttttcgtcgccgccagcgccggcgccgccgcgagccccgtcgactccctcgccggcggcggctggacgggacggaatctcaggtcaaccctctctccccgccattagaatcttcgcgatactcccccaatcggaggagaaacgaaaccctcgtcgagaaatttggacgcgcgcgattgctcctcctgcttgggtttcttggttgctcgagatctctctctctgcaatggcggtcagctcggagctggagggcttgcaggacgtggagccctcccgcttcatcgccttctccttcccaaaccctctcctcctcctcgaccacgcctccgacccgtacgcccatggcggccatgagttcctccgcgtggcggttctcgaccactcctcaccccacccgtcgccgcgcacggcggcgatgctcgtgccggcggggcggcaccgcgactggatcttctcaacccgcgccggccacctgcacctcctcctcgcctcccgctcccagtgcagccacctctcccgcctcatcctcgtcggccccgagctctccgcgccgtctccttctcgggtggtggtcgtcgccgccgccgctcgcccggacccggatcctgctcacgcgcggctgctcccactcctcctggctctatgcccccgtgccgcgtttgggggcgatgctatccctgacgtgccattgctctccttccatgatgacctcctccggcttgctcctgtcaaggttgtcgctggtcctgtggttggtgagatggttgttgaggatgtggccgtcgactgcgcgccacgttcggctgaattgcgccgccgattgcggttcaagcggatgccgttccttgttcagacgcaggtgcgccttgtgcggcaattatcgccgggtgattctttgatgttagatgcattggatgaggttggaggtggttcattgcagcctgaggtgggtggagagctggtccagccttacctacaggcaatggccgctggtcttgcggtgatcgccccttccatggatgagagctttcggttgggtggcaagccgaggtgtctttgtgctggtatcggtggcggcgctcttctgatgtcaatcagaatggggcttcagtgtgatgtactagggatagaggctgatggtgttgtgctggatgttgcaaggagccattttggattggtagaggatgagttccttcaagtccgtgttggtgatgctattcaaatgatccaggattttgctcatcaaggggaccctgatatgaatttcagtgcgattatggtggatcttgattcatctgatgctatatgtggagtcagtgcaccaccgttggagatgacaaaggaaagcattcttcttgcttcacgcacgatcctacatcgtgatggggctttcatattgaatgttatccctcctgctgcagatggatccttctacaaagggttgattgatgttcttcgccatgtcttctctgagttgtatgaaataaatgtcagtaatggtgaaaattttgtccttgttgccacagtgtcaccagttgaaactatccttgctgatagttcaggaagcgttctgacaaaattgaggaaattagctggggattttttggaacacataacgagaatctgacattccaagtcactgtattgttgctccaattggcctccacaacatctgtccagaagttattttgtttggatttgtttgc

SEQ ID NO: 26987 - DNA, 3399 bp, Oryza sativa
  ref <308>: DATABASE ACCESSION NUMBER: AK102429
  ref <309>: DATABASE ENTRY DATE: 2002-08-28
gacccggaggctgggacagtcccgcgagtggtgcgtttccggtaaccaaccaatcattccccccaatcaataatctaggcagccgaaatcccagccgtccgatgcgacgcaggcggcggcggcgggcgtccaacccagcacgcgtcgcgtcgcgtcggtttgggtttgggttagcccagccgctgccctgccactgccagccagactcgcagcagcagtcgccgcctcgagccaacgcatcctctctcacctcacctcacctcgccccaccctccccgcctcctcctcctccgccgccgccggtgagggtcccctcctcctcctcctcctccggcgagatccacccaatccctccccagtccccgctcggcgcgacggcagccagatccgccgctgccgctgcgatgccccggtagcgagcggtgggtgggtcccgcctgaagccgcccgcgattcccggggtcaggcgcctcctcctccgccgtctcgctcctgaggtatttcttcacatcgagtgttcctcatcaacctgcgcaacatatatttccaacataacatacaaccctgagccttttgtataaaagtgatggcagaaggtcaggatggttattttgactcatccactgacagcttgcgtgttgagcctatttatgaatcattcttgtgtcctctctctaaacaagttatgcgggatcctgtcactatagagagtggtgccacatttgaacgtgaagctattctgaagtggttcaaggacaatggtagcggtgggaggagacttgtctgccctgttactaataaggaactcagcagtactgagttaaatccaagtattgctctgcggaataccattgatgaatggatgcatagaaatgaggcagcgaaacttgacgttgcccgtaagtcattaacctctgattgttcagaaggtgatattttgcaagctcttgagtatgttgcggagatatgccagagaagtagatccagtagacatttagtgaggaaagttgggttgattagcttgattactgacttgttgaagaatagcagtccaaaagtacgtcaaaaggcattgggaagccttcgctttgtagcaaaaaatgacaatgacaacaagaatgaaattgctgctggggacaatattcgcactattgtgaagttcttaaatcatgggcactcacaggagaaagaacaggctgtatctttgttatatgaactttcagaatataaacctctttcggaaaagattggcagtgtttctggtgctattcttattcttgtcggcttgtcgagtagtaaagtagaaaacctattgacagttgatagagctgagaagacattggaaaatttagagagctgcgaaaagagtgttagacagatggctgaaaacggtaggctgcaaccacttcttaggcttctccttgaaggttcatctgatacacaattatccatggctgcacatcttggagagcttgttttaagcaatgatgtgaaggtacttgtggcacaaacagcaggctctacactggtgaatatcatgaaaagtgggaacagggaagccagagaagcagctcttaaggcattgaatcaaatttcatcttatgataccagcgcaaagatacttattgaagcaggcattcttccacctctcatcacagatctcttcactgttggcagtaaccagcttccaatgaggttgaaggaagtatcggcgacaattcttgcaaatattgtggcatcaggtgcaagttttgagtccgttccacttgatcacaaccgccagaacttggtgtcagaagaaattgttcacaacctgcttcatctcatcagcaatactggacctgcaattgagtgcaaattacttcaagtccttgttggtctaaccacttctgctacaactgtccaaagcatagttgatgccatcaaaagctctggtgctactgtcagtttgattcagtttgtagaagcacctcaaagagaagttcgcttggcttccatcaaacttttgaataatatatcaccttttatgggtcaagaactagctgaagcttttcgtggaaattttagtcaactcagcagcttggtcagggtaattgctgacaacaacggaatttctgaagaacaagcagcagcctgctggcctcatagctgatcttcctccgcgggactcagtactcaccagacgtcttctacaagatggggccttttccacaatcataacaaaagtgacaatggttcggcaaggggatattcgtggtggccgttttgtcaatccatttcttgaaggtctagttagggtagtttcccggatcacatttatcttggatgatctagatatcattgatgttgctcgtgactacaatctcactcccctctttactgacctacttcagatgaatggtctcgacactgtccagattgtctctgctactgcactagagaatctctctcgccagtcaaagcttctaactaggatagtgccggctcccaacccaggattttgtttttcaatatttccatgcctcagtcagaagtccgtggcaactggcgcttgcagagtccatgttgggatatgttctgcaagggagagcttttgtctcttggaagggaaggcagtagaaaagttggtcgcttgcttggaccacaacaatgagaaagtggttgaagctgctctagcagcactgtccaccttgttggaggatggagtagacattgaacaaggtgtcatggtcttgtgtgatgcagagggggtcagtccaattctagaggtattatgcgagaatcgtaatgaggcacttcggcagcgagcagtgtgggcggtggagaggatcctgaggatagacgaaatagcttatgagatatctggaaaccaaaatgttggaacagcattagttgaagcattcaggcatggtgactccaggacaagacaaatagcagagcgagcactaaagcatgttgacaagctgcccaatttctctggaatattttccaagatgggggcagcatgacaatcttagaaaagaataggctagctctacttcacacgtcgattgcagatcctcttgagttgcagaggaacacagagcttgaatctttgtgcatgccgaatgtcaggattgtgtccccagcttaacaatgttggtcttgcagactgcggctctccaaatggttttcgaatagtcagattgactgaatgaaaattgaaggtattgcatgtgttgtatagtgtggtgtatatctttcccttgtaatcttgtgtctgtattattcagatggccggatccatagcatgctatttttcctctgttcatacaatatttatacataaaccccaacatggggggtcaaaggaaagggaaaagaagtgttgcataaaagaagttttagcagttttcatcc

SEQ ID NO: 26988 - DNA, 2404 bp, Oryza sativa
  ref <308>: DATABASE ACCESSION NUMBER: AK102430
  ref <309>: DATABASE ENTRY DATE: 2002-08-28
gtggggattctaagttccaacaatccaatctcctcctcttcctcctctccttgagatccgatccaatccaaccctgcggcagccgcctcgccggaggaggaggatgcacggccggcctcgccgcccggacaagccggaggacggcggcggcggcggaggccaaggccgccaagctccgcgtcctccaggcacaggtcctgcacaaccaccactcccgcacctacaccaaggaggcactcgggctgagcttcaagctgctagagattaatcctgaggcgtacacagcatggaactacaggaagctcgcgtttcagcacaacattggggagctttccgagccggaggccatcaaatctgccattgatgatgagctcagagtggtagaggttgcattgaggcagaacccaaaatcctacggggcttggtatcagcggaagtggttgctaaatcaaaagctcgccccagtggatttcaagtgtgaatttggcctcttggataaactactgaaggtggacgcaaggaatttccatggatggaattaccgcaggttccttgccagattcatgggggttccagaagaggaagagcttaagtacactatggataagataagtgacaacttcagtaattactcagcatggcataatcgcagtatacttctgtccaatctgctaatcaaacagagcaagggtttcgagtcaaagcagaagatcttttcagaggagtttgaacttgtaactcaggccctttttacagacccaagtgatcaaagtggatggttctatcacctttggcttttagctcagacatctagtccagagaatccacagctgattgcttcgtggccttctaatggttcaaacctcagtttatcttccttgagctccatttgttgttactcactgaaggaagggattctaccaattgttctttattttaatgagcctgtgaaagggttaagttcatcgagtgtgagcttgaattctgatttggtggttagtaagaacattcagtggaggcccctttcagtaacagattctggacattctaactgttgggtcacttatcttgaagtatcaaacttggaatgtaacagtttgcagcaattttcggttgaagtaagcataaccaattcagatgaaattgtgtccagaagcggctctaattataactgtcccgtgcatttctcatttacctttgaactcagcaacaatgatagtacagccaaggatattgatccaattcatgaactaatctcctgggatttctcagagccactcctgtctcatgtaaaccccagttgtatctgttttgagcagttaaagatcactaattcattggttcacaaggagtcaaattggcatttggagagactatctgatgaaatagacctatttagagaattgcacgatgacaatagcaagtttgcaaagttgacattagcacgcttattgcttgcctgtgcctgcaataaagtcccgtggaagttctcttgttgaaaggaagggatactgtgaagagtcgctcgggctctttaatgacttgatcgacctggatccatctcataaaaggtactacgaggatgagcggagcctagtcttaatggatcagttaacatgtgacatggaggctttcaagaaatactgttcagtcaaagctctaccaaagttagctccattaaaccatgttcagctttgcagattatctttaacgcgtattggatttgctgaacgcttgttgtgggtccaaatgctggacctaagccacaacaacctcagatcgattgaaggtttggaggctttgcagcagcttgtatgcttgaacctcggcaacaaccagatcagtagtttcacagcacttgaaccactcacgaagataatttctttgaaagtactggatttatcttgcaacgagattggaactcacccaatcgacacaacccggtacatctgcccatctccattctcacatagagttgaagcatgtgaagcttttgaagaatgccggaagaaaaatattaacgtggaggaattctgggatgccatactgttcttcaaacatgtgaatttggtacagctttgccttgaaggaaatgcagttaccaacaaggagaacttaagaactcttgtggtgacactcaatccatctctaaaatggcttgatggcaaatttgttcattagctgtctgtcttatacaaactttggataggatggtcatgttgtatactgtttcattatcggtttttaggaacattaggtggcaatttttgtatggcccatttcaccatttgtactggaatactgggtttcaaagcaaatttgagacacgatcatggtaattgcagagttctttctgctttgaacgagtgaattgttaaaaatgatggtattgcagagtagaagc

SEQ ID NO: 26989 - DNA, 2113 bp, Oryza sativa
  ref <308>: DATABASE ACCESSION NUMBER: AK102431
  ref <309>: DATABASE ENTRY DATE: 2002-08-28
gaatcccccatctaaccccagacttttcctcccctcctccctctcctccggccccgccgccagagcccttccagaagcttccggagcccgcgccgccgatctgatcgccgccgcgtgccatggccgacgaggcgaaggcgaagggtaatgcggccttctcggccggccgctacgaggaggcggcgcggcacttcactgacgccatcgcgctcgccccggggaaccacgtcctctactccaaccgctccgccgcgctcgcctcggtccaccgctactccgaggcgctcgccgacgccgagaagaccgtcgagctgaagcccgactgggctaaggggtactcccgcctcggagccgcccacctcggcctcggcgacgccgcgagcgccgtcgccgcctacgagaagggcctcgccctcgaccccaccaacgagggccttaaggccggcctcgccgatgccaagaaggcggccgccgccccgccgcgccgcccgccgcccagcggcgttgacggcataggccagatgttccaggggcccgagctctggaccaagatcgcctccgacccgaccacgcgcgcatacctcgagcagcccgacttcatgcagatgctgcgggatgtgcagaggaaccccagcagcctcaacatgtacctctccgatccccggatgatgcaggtgctcggcctcatgcttaacatcaagatccagagaccagaggcctctgaatcgtcgcagcccagctcgtcgccgccgtcgcagccgcaggagcagcccgaggcgaaggcgagggaggtggagccagagcctgagccggagccgatggaggtgaccgatgaggagaaggagcggaaggagaggaaatcgtctgctcagaaggagaaggaagcggggaacgcagcttacaagaaaaaggacttcgagaccgcgatccagcattacacaaaagccatggaacttgatgatgaggacatttcctatcttaccaaccgtgcagcggtctacattgagatgggaaagtacgatgaatgcgttaaggactgtgataaggctgtggagaggggaagggaacttcgtgctgatttcaagatgatctcaagggcactgacaagaaaaggaacagccctagccaaacttgctaagacctctaaggactatgacattgccattgagactttccagaaggctctaactgagcatcggaatccagacactctaaaaaagctaaatgaggctgagagggcaaagaaagagttggagcaacaagagtactatgatccaaagttagcagatgaagagagagagaaaggtaatcagcttttcaaggagcaaaaatatccagacgcggtaaagcattacactgaggctatcgggagaaatcctaaggacccgaaggtgtacagcaatagggctgcatgctacaccaagttgggagccatgcctgaaggtcttaaagatgcagagaagtgcattgaactagatcccaccttctccaaagggtatacaaggaaaggtgcaattcagtttttcatgaaagaatatgacaaggcaatggaaacttaccaggccggtttgaagcatggtccgaataacccggaactgctggacggtgtgaaaaggtgtatcgaacagatcaacaaggccaacaggggtgatttgactcaggaagagattcaggaacgacagaacaaggctatgcaggatccagagatccagaatattcttacagatcccatcatgcgacaggtactggtcgatttgcaggagaaccctagggcttctcaggagcatcttaagaaccctggagtgatgcagaagattcagaagcttgtaagcgctggaatagttcaaatgagatagtcgaccaaagcaagaagcgctgttcgtgtctatgttcattgctccttactttttttccatgctcagtctttgtggacttaagatttacacagtttggggctaatcttcattctcaattggattatgtgagtgcagcgtgtcactggattattagtggttatggcatccgtgctacagctgcacgtgcaaacgtatgtctctatttgttagtcctaaacattttccctaccgaatgaaaatagagccataagaggtgc

SEQ ID NO: 26990 - DNA, 698 bp, Oryza sativa
  ref <308>: DATABASE ACCESSION NUMBER: AK102432
  ref <309>: DATABASE ENTRY DATE: 2002-08-28
ggcattactttcttcaatatttgcaatcagggggtttacttcttcgtcgaaattctgcacgcaacatagaaatcagcgtggaggatgcgatgaaataggcactgagttggaggagatggaacttactaacagatccccagtagttgctagtggtaccggctctgttccttccacggactcagctgtaggctgtggctcttcttcaggctctgaaggtaacaactaataatatctctgcagcaaacctgtttctctgagaagcattaagcagtaggacaatccacttatcttggaggatacttgaatcagatgtatacgtgtgaatgatcgagaattcaagatatgttctagtttagtttagggttggaaattggtttgaggttgcatatttgtactcagcgaggacgatgagcagcctcttcttccatcttactgacgcaatgaacgagaaagccggtgcttcggtggtacggaaactctgaaagtgatagtctgaacttgatcaagtcttcatcaagtcttcaagatcagcacattcacccagaaaacacatactcctagtacagtacatttcaactactaataagtaaatactgctggagatccaattcatgtttagtcattgcttaatcagtacatattcgtgtattgtgtattcctttatgtgaaaaagatttctaggagctggaagtgtgggc

SEQ ID NO: 26991 - DNA, 3191 bp, Oryza sativa
  ref <308>: DATABASE ACCESSION NUMBER: AK102433
  ref <309>: DATABASE ENTRY DATE: 2002-08-28
gggcaatcattcctcccaaatctgaaatcttgcaaggactccacgcccgagagggagaaatcgagggatcggcaatggcggacacggggagcctggagaagatggggcgagagctcaagtgccccatctgcctgagccttctcagttcggcggtatccatctcctgcaaccacgtcttctgcaatgattgcctcacggaatcgatgaaatccacgtcgagctgccccgtgtgcaaggtcccgttccgacgacgagaaatgcgaccagcacctcacatggacaatctggtcagcattttcaaaagcatggaggctgcagcaggtaccaatgttgtctcaacacaggaggctcctgtggtaaaacttgcagatggatcagattgtgtcaacagcgggaaaaattccaaaaggtcacaaaaatcattgacacgaaaaaggaaggtaacatccgagatggaaaaaaatacagcaaaggatgctacagcttctgcatcccaacctactacaaagccttccttctctactaacaaaagaatacaagtgaaaccattccctgaatctgagacaccaataagagctgagaagattatgaagcctgaagagccaaaaaataatctgaataatgatgttgaaggaaagaataaagcagtggcatcgggtcaacctggaagtccttcattgtcacccttttttttggctaagggaacaagaagaacaagaaggctgtaccgctgagacgttaagtgaaacgcaatctttagacacacccttgcgtcataatgcaccctcttttagcgatattaaagattctgatgacgaaatccctttaaatacaactccaaatagcaaagctgcggctacagaactctttgacagtgaaatatttgaatggacccagagaccatgctctcctgaattgtattccactccattgaaaaagcagagtaaagctaagagtaaactagatcaaattgaagagaagggtgatgaagaagatgtgcatattggtggttcatttgataagctgggtaatgcaagtaatgcagctcagcttgtcaatacaaaagcaacaaagcagaagagaaagaaaacaagtcccagtaacaaaaacagtgcaaaattgtccaatcgtgctgagccctgcataaaaaagtctgatgccaatcaacaaggttcaaatagacgtaaaagtgctgccctaaaatcttgtcagaaaagcagcagtgctgtagggaggaatacttcaggtagaagaaacaaggcctctagcaacagcaagccaattcatggctctagtgataactccccagagtcatatcttcctaaggagggtttggatgttgaagcacctgacaaacccctttctgaaaggatccaaaacttggagaaaactagtcgacgaaagggaagtgcaaggaagctggaaatggcagggaaaactatttcagatactacagagaagaatagtgagccaagaagtaagagagtcagaagaatgtctgaccacgctatagctaaaccggttgaagttccttcaggatctggaaatgaaacagaaataccacagcttcacaccctcacaaaaggcagcattcaacgcaaatcctccaacgctagaagacatagcaaagtttgtggagaacaggaaggtaagaataaacttgagaacacgacaatgacacctattattttacatgggaaatgccaaaataaagaggcagtatgtacagctccttcagtaaggactgcatctgttaagtacaagcaagcaaaatttagcgaacaaccagattgttttggaacggagaactttggaaaccttcaagcatgccctgcacgtaatgttttactgaagaagtgtgaggtatctactttgaaggtttcctgtgctttctgccagaccgatgtcatcacagaggagtctggagagatggttcattatcaaaatgggaaacaagtccctgcagagttcaatggaggagccaatgtggtgcactctcacaagaactgccttgagtgggctcctgatgtctacttcgaagatgattctgcctttaatcttacaactgaattggcgagaagcagacggatcaaatgtgcttgctgtggaattaaaggagctgcacttggatgctttgagatgagttgtcggagaagtttccacttcacctgtgctaaactaatcccagaatgcagatgggataatgaaaattttgtgatgttatgccctctacatcggtctacaaagttacccaatgaaaattctgaacagcaaaagcaacctaaaaggaaaacaacactcaaagggtcatctcaaataggatccaatcaagattgtggtaataactggaaatggccatctggatcaccacagaagtgggttctctgctgctcatcactttctagttctgagaaggaacttgtatcagaatttgcaaagttagctggcgtgcctatttcggcaacttggagtccaaatgttacccatgttattgcatcaactgatctctctggtgcttgcaaacggacgctgaagtttctcatggcaatcttgaatggcagatggattgtctccatagattgggttaaaacttgcatggagtgcatggaaccaattgatgagcacaaatttgaagtcgctactgatgttcatgggatcactgatggtcctaggttaggaagatgcagggttattgacaggcaacctaagctgttcgacagcatgaggttctacctccatggggactacacaaaatcctacagaggctacctgcaagatctcgtggttgcagcaggtggaatagttcttcagaggaagcccgtatcaagagaccagcaaaagcttcttgatgacagctctgacctcctcatcgtttacagcttcgagaatcaagatagggcaaaatccaaggccgaaaccaaggctgctgatcgcaggcaggctgatgctcaggctcttgcttgcgcttctggaggcagagttgtgagcagtgcatgggtgattgactcaattgcagcctgcaatctgcaacctctttgaatctagaagactgcctggtgccaaaatgcgagttcgatagagtaagaaacaagatagaaatctaagatgcacagggctttgtaatgagacttaaattatttgaaaataagtttactatgcgttgcaaaagaaactagactgcatttctatgg

SEQ ID NO: 26992 - DNA, 3070 bp, Oryza sativa
  ref <308>: DATABASE ACCESSION NUMBER: AK102434
  ref <309>: DATABASE ENTRY DATE: 2002-08-28
ggggttctctccctcactcccatttctctctccgccacgcggcgccccacggcccaccggagatccgacgccgtcggcggcgagcgccactggccccgcatccaggcgaagctcgccgtgaagccgcaaccccggcgccggcagcggagctcccggcccgcgcccgcgacacgcctcttctccttctagcgtgacgcgttcgctaccccggagggcatctccgattggcatgcgatctgttggtgtctccactgaacaggaaactccaacatgcagaattgagagccgaagctccctgctccaatgaggttctcagaagtaaaaccttttgttgcttcagccaattcagtgtaagaaactctcatatgctgctctttaataagtgatgtttgtcggtttgcatttgtcttcttggcccgtttgtggaacacgaaagatgtggctactactgccataaatagaactgtgctgcatatagaaattgccatggcaattttccatgtttgcttcttgtgttttgttgtctgatgagagcagggtggcaacttcagttgagggattccattacataggccattatttccctcaattaaagcaggagtcgcattgctaaagattccatcttttgggacatcaccctcaaagttgttgaatgaaagattcaaactagcaagccctgtcatggtcccaaggaacttagggatgcttccggataaattattatgagaaagatcaagcaacaggaggccctttggttgatctagtgatggtggaatttgcccttggagtaagtttccagatgtattgagatattgtagactctggcactcaccaatggaggacgggatctctccagaaatcaaattgctagagaaatcaagtaatgcaaggtttgttagattacccacttcagagggcagaggcccagttataaaattatgatccaaaatcaaagaagtagacaagacagagatggcgaaaagttcttttggaatcaacccagtaagattattgtatgagagtttcaactgttccaaagggcaattgctgagactggggggtatttctccactaagtgcattgcctgcaacagataataatgttagcatacgaaggttgccgatacttgatggaatggatcctgaaaggttgttgttagtgagatatagtctattcaggttcttgagtttgccaagagagtctggtattgtgccctcgtagaagttattgttcatctcgatgaacttcaagctgaccagattccctagcccttcaggtattttgccagtcatactgttgtagttggtgacaaaatactcaagacgtgtggaaagattgccaattgaatttggtagctcacctgtaagcttgttgtcacccacatcaagtagtcgcaaattgctgcagttagttaaactagacatgaagctccaaccatatttattactcgtttcaaactgattcactgcaaaagttacggaatataagctcttttggttgattcctatgcattgggggatggttcctgacaaagaattgtttactgtttggatccatctaagcgtagaaatattgcacagggagggtggaattgagccatgaaactggttttcagatattaggaataactggagctttggcaggcggttgcctaagtcaagtggaatggtcccatttaggttgttggtttgtaagttgagttcttcaagagaggaaagattgaatattgaagaaggtaaagaaccttctagctcattattttctacatgaaactgcttaatggaatataggtttccaatagtatcaggtactgggcccactagattattacttgatagatcaagagatgtaagcaacttcagtttccccagtgattcagggatgttcccatctagtctattgcctccaagtttcacagtaagtaatgatgagaggtttcccagccaagttgggatgcttccttcgatattgttcttccctagttcaaagaattcgagagaggacaagcgttgcatcggtgggatgcttcctaccaggttattagagaagacactaagaaattgtagtgccgagagatttcctattgaggcaggaattggtcctgagagttgattagaacctagtcctagaacagtgagattggccagtctgcctatgtctgatggaatttctcctgtaaagttgttttcttctaggattagaaatttcagattcgcgaggcttccaatgaatgaagggatgcttccacttgttgctgtagagccaaatgttctccattcctctgcaggttgaaagcgtcgctgggatcggcccttggatggagttgtagctgcggttgaggtgtctcaggtctcggatatggccgagctccgacggtatctcgccatggaggcgattcttgtggagatggagccgcctcaggtatgtgaggttgccgagcaaaggtgagatggcgcctacaaggttgagcttggtgaggtccagcgccaccacacggcctgtgcggcgtccactcagcccacacgccacaccacgccattggcacatcgggatggattggttgccccaggatgcgagtgcctgggttgggtcactccttatgagcgacctgaatgacatgagcgcaaggcggtcggtgacgttggtggtggtggatgaagaaggtgaggccgggaggcatggccattgttagagcacgaaaggaagatgatgatggcgagcaagagaagctcatggtcatgggtatggtggatcaacaccattgctgccgctgttggttggtcctttcttttctgctatatctcttaaggcaaattgaaggttatgatgtgattaatatatagctggaaggagcacttgccactgtgtagtttgattcaagccaagtaacaagttgtgggtgcactggctggcattcgacgggtttgcaaattcgcagtctgcccggcggcttggactcgttttaaaaacttatcttgaagactttaagccttgtttttcctggttacgaccttacagattgtaatcttttaattttttcctgttttatcaatagaacttcgcaccatcc

SEQ ID NO: 26993 - DNA, 1823 bp, Oryza sativa
  ref <308>: DATABASE ACCESSION NUMBER: AK102435
  ref <309>: DATABASE ENTRY DATE: 2002-08-28
gattccccccaccgagcacgcggcagctacacgcccccacgtcgccgtcgtcctcctccctccgccgcgccgtcgatctccctcccctcccgggccgccgccgccgcggcgtcctccacgccgcctgttgttcttgcctccttccccgaccgccactcttcttcaagaggtggccgtccgtcggcggagcagcacgggaagtcgacgccgctagctccgcctcccgtcgatcagtcggagatggagcaggttcgtggtgttgtgcttcaaagaaacacgctggtgatgtctgctgcatagacaacacatggaaccatccgatctagttgatggatacaagttcggtgatcaaactacaagcgatgttcgtgtttgctttaaacgggccgatgaccaggcagaatggttttgctgccattcatctgtgctttccggaaatagcaagtattttgcagactggcttagcagaaatgacattggttcaaacaactgcattggggttgactgtataagtgctgactatgaacattatgtcaaggtgttgaagttaatatatcttcctgcagaatcaattatagattcttttgaatctgttaggtcagcggttggcgtgcttcgagcgtcaacacttctcaaatgtgagttaattaccagaagctgcattgaataccttgaagcagcttcatgggatgaaaaagaggaggaagagattttggaagtagctcagagccttggctcagaggaagcagtagctctgttagcccgtcttcaagccccaaatgtttctgctgtgaagaatgtcttcatctctgccattcgttttgctacgtccatggaaagtccatctcctcctttcttggatgatctcaagacttctgctcaggagcaaattgacttcatgctccatgaggacgatgacactgctttggttacaatggatgaggatgtgaggtctgtggtgcgagaaggattgaaaaaactgttctccacgcttaagattggactagatctgttgacctcggagtatgagcaattgcctgaacaggcagaacaaagggttctctgtagtttagctgacattgactggatggctaatgtcttgacaaagattgagatgatgaacgagtttgtctctggttggtcagaaatctctggctatgttctttcagttgttcaggataagaagtatagctcaggattgtggcttgtaaaagcaaaacttattgaagtgactggaaaggcctttgatgctgttggctatggctctgtggttttcccagcatcatccagagttcattttctgcggatgtggcttccattcatgcaaacaacgaagcgcttgcttgatgaaaagtcgaaggatgatgcgattccacagatggatgcagacttgtttcagaacattgagggtgcaatagtctcattggtgttagcattgccatcaggtgatcaggcagacattcttggagagtggatgaagaatgcagagcagttcagatatcctgatctcactgaggcatttgaggtgtggtgttaccgtagtaaaacggcaaagaggaggctagtaggagggctaaacgggagtggcaaccccacagtcagcttgtaactttgtaaggctaccattaattttaatcttttgttgtagcctatacaagtcagtgaaatcaggtggttggtaccaagcaatataccaactagattttcattgttgtatgttgtaaaacaactgctcatgtgtaatacacttgagctttcttgcagtatgttcattacccttgtccaagttcactacttcttcctgacctgagacatttcgaagc

SEQ ID NO: 26994 - DNA, 1094 bp, Oryza sativa
  ref <308>: DATABASE ACCESSION NUMBER: AK102436
  ref <309>: DATABASE ENTRY DATE: 2002-08-28
gtgttgaggaagtcggaagtccgaaggcatggcagcggcggcggcgaggcagacggtgtgcgtcaccggcgccggggggttcatggcctcgtcgcacgtcgagctgctcctctcccgggggaactacgcggtccgcggcaccgtgcgggatccaggtgatgccaagaatgatcatctcagggcgctacaaggtgccgaggagaggttgcagctgctcaaggctgatctgttggactatgacagtgtagcttcagcggttgccggctgtgagggcgtcttccatgtcgccagccctgtaccctcgggccgatccaccaaccctgaggtagaggtcatagctcctgctgtaacaggcacacttaatgtgttgaaggcctgccatgaggcaaaagttaagcgagttgtcatggtgtcttccattgctgccgtgttcagtaatcctaactggccaaaggataaggctttcactgaagacagttggtcagatgaggaattatgcagaaagaatcaggattggtattacctttcgaaaacggtggcagagcgtgaggcttttgcttatgcagcaaaaactgggctggacattgtaactatttgcccatcattggtgattggacccttaatgcaatctacagtaaacgcgagtagtaaagttctcattaactatttcaaaggagatcgtgacactgtcgaaaatagactccggaatgtagtggatgttcgtgatgttgccaatgctctccttttggcgtatgaaaatccagcatccggacgatacatctgcagctcagctccaataagagtctctgatatgataaacattttaaagaccttatatccaacttatacttatcccaaaaactttgtggatgtggaagagaacaccatatacagttttgagaaacttcagaagcttggctggagtttcaggcctattgaggaaaccctccgggacagcgtggaatcctacaaagcatttggcatccttgattgaggatccaaactgtgagaacttcagtgtctgttaaactctccatgattcatgtaatctgtgttgagatcaaccgggtcaataaagaatcgttattaaaacc

SEQ ID NO: 26995 - DNA, 827 bp, Oryza sativa
  ref <308>: DATABASE ACCESSION NUMBER: AK102437
  ref <309>: DATABASE ENTRY DATE: 2002-08-28
ggccttctctcgtcttcttatccacttctcttctctccttctcactctcctcctccctcccggcctccccaccagcaacggcggcggcggccctggtggcggtgaccggcggcggcggctttggaggtggtgactggcggctccccatgccgccctgccctcccatcccctcctcacccctctcccagatctatccgaggggaggaggccgccgtcggcgtcacaaccgaggggagcacacagcgcggtggagctgacgacacggcgggcggtaggtgtgcacgcgggcggtggcagatctgacgacgacgaccacgaccgcggcgacgacgacgacgacgctgcaggccgtgctaggtgacagaggaggcctgccacggcggcgggcggcggatgtgcacgcggcgcgggtagcacgcgggcggcggcgaatctgacgacgacgaccatgaccgcggcgacgacgacgctgccggccgtgctcggtgacagaggaggcctgccatggcggcgggcggcggatgtgcatgcaccgcggggagcacgcgggcggcggcggatctgacaacgacgaccacgaccgcggtgacaacgacgacgacaaagctgccggccgtgctcggtgacagaggaggccgatgggcggcgccacagcataggggaagcggcggcggcagcactgccctcccctccccctactgtgttttcttgtgtgttcttgtttgtaaagatgtttattaggatatgtgtgttgttaatctgttctgttgatgatgtcaatgttgaatttggattgatgccaatattatgtatttgtgatgctctgg

SEQ ID NO: 26996 - DNA, 872 bp, Oryza sativa
  ref <308>: DATABASE ACCESSION NUMBER: AK102438
  ref <309>: DATABASE ENTRY DATE: 2002-08-28
ggctgtctttctctatctagcgggtcgcggtgagtcgtcgtcgtcgtcgccggcgatggggaagggaggcgggctgagcaagctgaggtgcatgatcaggaggtggcactcgtcgagccgcatcgcgcgggcgccgccgtcggcgggggagctggaggagggctctgcggcggcggcggggagggcggcgtcgttccacggcgcggacgaggtgcccaaggggctccacccggtgtacgtcggcaagtcgcggcggcggtacctcatcgccgaggagctcgtcggccacccgctgttccagaacctcgtcgaccgcaccggcggcggcggcggcggcggcgccgcgaccgtcgtcggctgcgaggtcgtgctgttcgagcacctgctctggatgctggagaacgccgacccgcagccggagtccctcgacgagctcgtcgagtactacgcctgctgagaaaggccgccgcgccgcgccgcgcggcttacctccccccaccaccaccggccgtgacggcggcggcgacgcgccggagttggaagcttccagaagctgcggtaaaatctttcgaaaaaaaaaatctgtgttttggtaggggtagaagtgaaatttcggacgccggggtcgaagtgaagagtacgaagcggcagctagcgtttttttttttacttaaccccggcgtcggtgctaattggggaatttaccatttgttactgtgctgttaattctctgatcgttcatgtattagctattgggtttctcattatttctttattttgccccaaaataagatctatgggcaaacatgcccatcggtccaatgtacattccagtgtaaaaaattatcatgtaattgccgagttaatttgcc

SEQ ID NO: 26997 - DNA, 3653 bp, Oryza sativa
  ref <308>: DATABASE ACCESSION NUMBER: AK102439
  ref <309>: DATABASE ENTRY DATE: 2002-08-28
gagtcactcctcttttgaaaaaaaaaaatcagagagaagaagaaatctgtgaaaaatctccgaccaccggacatcgggggcatggccgcctccgcccttctctcgcctgtgcggcctctcgccggaaccacactttccttcggtgttccctaccaaaacaagagaaggatcccaacgatgcgggtctactgcgctgctgatgaagaagaggaagtcaatgacttgggagtcaatgtggcactatccatgctaaaattttacaaaagagaaatatcgcccttactaccctcaagctgccgttatgtgccaacttgcagccagtactctatgcaagcatacaaaaaatacggcgttgcaaagggtacaatcttgacagcttggcgtctatgccattgtaatcctcttggtggtcatggttatgatcccccaaggtggtttggtgaggaagagttaccaaagcaatgatggcctggtgttagattatatattcgcaaggattccattgcatattgtttaccgatgcaactgtcgcaagcaagggtgttcaggagttctactgcacctgacaaggggaacttatttgtttacagtagtatcgactcatgccatgttgagaaggtgatcagatgttcagaatttctatgaggaggattgttatgataactggtaaatgactttctactatgaacttggaaaccacctccttagtaacaattgtgctggtttatcagtaccgctgaggaattgtattcccaggaatcctgttgtattagcacaagaatagtatagaattttcatctgataggctaggagcagtgatgccttgtggtactgatgccttggctcttccattcctcaatgtttctttgatccttaacaatctgcaaatcttggttttggagccacttcttccctcgtcctatcaaaagaagcaatgatcattagatataatttgatgggagaacagaggactctattgcattgatacaaggcagcagccaaaactacaccagtcttatctgattgaatgatgtagctgaggaccatgtaacatagtgaatgatgcagcctgtgacctgggtattgtatatgctcataatgcaaaggcaatttgcaaattcaatccatgctgtttgacagataaatatgtgcagatgtcaaatctttgtaaaaagggcaggtgcaaggcaacttaacaacttcaccctgaactatgttactgtactcagtcaattcttcaagttgaaaggactcaacacataatgtctgtagactgcagtttgtagaggcaaaatccaggccgaagaagacggaaaaggatggaggcatcaattccttcaacccattcatacccaacaattttcctggtgattgatagcatggtggtgttttaattttgctgagtacagggtttgatgttttccatgcttggcttggatacatcacccaccttctcctcctttttggcatattatacagctgatggctcttacaaggaaaaataaacaggccatgttgcaactggagcaatcaaagtactagaagtacgcaaaaagaagaaaagaaagaaaccaaacagtcatccggaggaagtgtcttgtgattggcgcacccatgcggagtgagcaaagaggattcgtcccatccatccctgcagcagccactgcccgtcctctcccagcagaaagtccttgtgatggtacttgttcacctcgtccctgattgtatcaacgatatctggtctcagtttcagctgctgcatgcctgcacggtggttcctggcctgccactgtttgtacttctcagggcgctccaccaggtctgcaccctcacaggcgatggcgttgagggcgtaaggccccagaacgttctgctccagcgccagccgcagcccactatcccttggggtggtcgcgtccagtatgtcaaacagagccgagtaatacaagagcactgcacggaagcgtgacaggaaggaggcaccatagctatcattggtgatgccttggatgaacacgtctggctgcatcttgctgatgttacggagggcaacatccctggggtttggcccgtcgcagaagacgctctcgtccatcagagcactgaaactccagaggtcattcaccacaagcacctcatcaggctcgatgtgcaggtcctcggcaccaactgtctcccactttgctgctgcaacagcttggaatctgaatggcacacgaaactcattggcacagctgctcaggcaatgcccagcctcctcaatacgctgaaatggacgaaacgccggctggaggatgtcaacgatggtgatcctcacctccggcggcccgtcttccctgcttcccagccggcggagcaggtctggccagtgcagcccacagcgcgggccgtaatcaactatgtgcagcctcttcttcccttgcacagcttgcatgattgtcatggcggcaaacatgagtgccaccttcgtgaagcagcaggctgccatgtagagcttgtacaccttgaggtactcgaccaacgacatgcgcatctgattctgatacagatgcttccctctgccagctagccgtgcctcaagccccttggcgaagtagtgagccactcgctgcatggcgtcgcctgttgccaaagcgtgctgcttgatcttcttcagcagctcgcctgcagattgctggttgtctgtcgccgtggcctgtgcacactggatcagcagcaacccatcagttcgtccagcaactcgcgagcaccagcctcctgtgtccctgcaatcgtcaaggcagctaatttactggtcctccccagttcctcctccagctgctgctcgtccctgtcatggtttttcttctttcgtcccctacaatgaccatcacttgatacttgatccaccgtctccagcgttctgaagctgttgtttctgggcaacaacttgctggcctctcccatgcccttcgagaacaccctaaccacttcactgcccggcaacatattgttggcctcctctgtgctgcccctgttgacacactgcaagttggtgatagcagcagaagaacccatctcatcctccatgagcatacgagagacgtaggagagaagttggttgtccaatgatgagggatctgtgccatcactgttggagaggggtgttgcggggaggtcaaagaagacaggtggtggggatggtgcttcgttctccttgaggagggcctcccaaaagaaatcctctgggttggccatgctgataatcattcaatggtggtagcctttgctcttgctcgccatatcatgagacagcagcaaataccctgtctataactccaacctagtgtgtgatgattccaataacctagtacaaacaggacatggaaatgaagatgactccaagattgctttgagaatgcagacaaggggatatatccgccattgtagagggaatgctgacagggagaactggactagtcatgtgctacccatgttgagtgggcaaagaggatgcggcccttccagccctgaagaagccactattgatcctcctcaatgacaaaatctttgtggtagtggttcttaaccatcataactttctccctgttcaagggcagctgcctcaacccgaattaaatttgaaaatatattgtttcatttattttttcccc

SEQ ID NO: 26998 - DNA, 2146 bp, Oryza sativa
  ref <308>: DATABASE ACCESSION NUMBER: AK102440
  ref <309>: DATABASE ENTRY DATE: 2002-08-28
gggctgcctccaggttcattgaaccaagccaccccgacacgaatcgctcaggcctcccccctgttgttcatccctcactcaacttttgggcagcttggctttattcaattccccttcctttttattgcgaatttgcgactgcgagcgagcttttcttcctcaaagcaagacgacgacggaggagcagccctgcagagcataaagagaggagaggagaggagagggggccggtcaaggaagaggagggaagatgagcagcacagctccactcctcacaccctacaagatgggaagatttgatctttcccacagggtagttctcgcaccactgacgaggcagcgatcctatggtaatgttcctcagcctcatgccattctgtactatcagcagagaacaaccaaaggaggccttttgattgctgaggccactggaatctcggacactgctcaagggtacaaagatactcctggtatttggacaaaggagcaagtggaagcgtggaagccaatcgtagacggcgttcatgccaaaggaggaatatttttctgtcagatttggcacgtaggaagagtctctaataacacttttcagcctaatgggcaggctccaatttcgagcaccaataagtcactaaaacctgcagtaagagccaacggcatagatgtggctactttctcaactcctaggcgattagagactgatgagatcccttttgtcgtgaatgattacagggttgctgctagaaatgcaattgaagcaggatttgatggtgttgaaatccatggagctcatggttatttgatcgatcagtttctaaaagaccaagtcaatgatcgttctgacaaatatggtgggagcttagagaatcgctgccggtttgcgctagaagtggtccaagccgtaactgatgaaattggagctgacaaggttgggataaggctgtcaccctttgccagctattcagaggcagcagactcaaacccagaagctctaggcctatacatggcaaatgcactaaacaagtttggtatcctctattgtcacatggtggagccacggatggtaaagcttggtgaaaagtttgaaaccccccatagtcttcgtccaatcagggatgctttcaagggaacgtttattgctgctggtggctacaataaggaggatggaaataaagcagtctccactggatatactgatttggttgcttatgggcgcttgtttttgtctaatcctgatttgcctgagaggtttgaaatagatgctcctctcaacaaatacaacagagagactttctacatctctgatccagttattggatacactgactacccatttcttccatcagatgtctaaatgtgcctttcagtactcgaattctcttccgcctctcatcaaagcagctcagcagccaccatttgtgttgttacttggtaggattgaagaaatatggccattgatctgaaagctgtttttcatgtgtgtgggcaaagcattgataaaataatgtgacattgtgatttcagcacggcacatgaatacaaagggagatgataggtagatcaagcagtgttgagaaattattttagtttgtatgcacaaatattgtgagcctgatataatatcagggagcttgcctgtcttactttgctctcaaatatgttctcagtcattcacatggttgtcagcgactgcaaatcttttacgtattcctgatatgtgtcactgactgagagatgggagtacagttggaataaaaagtggaagttgaatgtatgcagactgctattcctagcttatcatgtttgatgtttcaggataccttttgggtctgaagttctgagctgttcttctggcagttactgattacaggggcatactggacaagtaattaggatacagactgcacagaaagagcttacgaaggcaagaaggacctctccctgcccatctccgtatgtttttactaaacaaaaatttgtgtatcctgtatttgtgttgtgaaaatcatcctggcctaatttccagtcctttacaaatgattcatcatccactaaaaacttgagcttatcataaaagtaatagcttaaggatgcttttaacgatttctctctatgctacttgatagagccatctcgtaattaagtt

SEQ ID NO: 26999 - DNA, 2076 bp, Oryza sativa
  ref <308>: DATABASE ACCESSION NUMBER: AK102441
  ref <309>: DATABASE ENTRY DATE: 2002-08-28
gagaatcaaattatgcggtaggagctgaaatctctttgagagaagtatccatcacataaggcaagtctcttacgtagaggaggaggaagagaagagaagagaagaaaaggacggatggttagccagtccaagacgccggcgccggagccgtcgacgacgaagatgccatcggcgcctccggcggtaaagggcgtagcgaagacgctggcgcagcaccacaaggccgtgatcgggttcctgcttggcttcttcctggtcctgctgctctacaccttcctttctggccagcttgtttcctcggaggatgccattgtgagggccgtcacacaacagtccacgcctgccgtgcataccgatcaagacggcaggaccacatctccgacttcaccaacgtccacgtccagcaatacgacacaagataacttggaagggaaaaatactgagcggtctagccagccagctgtgaacgacgaagcaagtgacaagatggaggaggatcttatccggcaagacattgatcaagctggaacgaaaaatggcacaaaccataaacccggtgcaccacgcaagccaatatgcgacctgttagatcccaggtatgacatctgtgagatctccggcgacgcacggaccatgggcaccaatcggaccatactctacgtgccgcccgtcggagagcgtgggcttgccgacgacagccatgaatggagcatccgagatcagtctcgcaagtacctggagtacataaacaaggtgacggtaaggtcattggatgcccaggcagcgccgggatgcacctctcgccacgccgtcccggccgtggtgttcgccatgaacgggcttacctcgaacccgtggcacgacttcagcgacgtgctcatcccactcttcatcaccacccgcgtctacgagggcgaggtccagttcctcgtctccgacctgcaaccgtggttcgtcgacaagtaccggctcatcctcaccaacctgtcccgctacgacatcgtcgacttcaaccaggacagcgacgtccggtgctacccgaaaatcaccgtaggactccgcagccaccgcgacctcgggatcgacccagctcgcactcagcggaactacacaatgctggacttcaggctttacatccgggaggtctactcgctgccgcccgccggcgtggacatcccgttcaaggagtccagtatgcaacggaggccgcgggccatgctcatcaaccgcgggcggacgaggaaattcgtcaacttccaggagatcgccgcggcggtggtggcagcaggtttcgaggtggtcccggtggagccgcgtcgtgacctgagcatcgaggagttctcccgggtggtggactcatgtgacgtgctcatgggcgcgcacggggccggactcaccaacttcttcttcctccgcaccaacgcggtgatgctgcaggtggtgccgtggggccacatggaacacccatccatggtgttctacggtggtccggccagggagatgaggctgcgcgacgtcgagtacagcatcgccgccgaggagagcacgctctacgacaagtacggcaaggaccacccggcgatcagggacccggaatctatacacaagcaagggtggcagttcgggatgaagtactactggattgagcaggatatcaagctcaacgtcaccagatttgctcccacgctgcagcaggtgcttcaaatgctcaggggatagaccttactccgatccgatccttcctatacaggcaggcttagagatacatccgtagaaacaaacaatttctttattttttgacgtttcgacttagcatgccgtggcgaattcgcgcgcctccgtttgttaggttgcactatctggatgtttacacaaataaatagtagagtgaacaaagtataccatagtaccataccatatactctatgaaggaaactaaaggaacgcacatcactatctggtgctgcgtggtatatgtatggccaaatggcccgaggcacgactcatggcacggggttttggcccggcccaaatacaacagttggccccgtaccagttcggccctactattggccc

SEQ ID NO: 27000 - DNA, 916 bp, Oryza sativa
  ref <308>: DATABASE ACCESSION NUMBER: AK102442
  ref <309>: DATABASE ENTRY DATE: 2002-08-28
ggcaggagggttttcccttttccaccttgtcgccggcaaagccacagccacggcgatctgctccccctcacggcggcgatggcgctctcgacctcccggcctcaccacctcctgcgccctctcctccgcggcttccacgccacttctcaggccatggcgaggcctgagccccacgagttctccaagccgagcgactacctcgggagctgggagcccgcgggcgacccacgggaggcgtgggcgcggctggagcggcttcgcaagggctacgcgcgcgacgtgcggcagctgcggaggcagtactcgtacgagatgcagctgctggaggccgagcggcagcgcaaggcggaggcccgcgccgaggccgcccgcctcgccaacgaggagcgcaaggccaccaaggccgccgccgcgcagacgcgcgccgccgagcgccgcgccttcgagaaggacttccgccaagcccttatgaaagaaagagctgagaagctggagagctggagggagaaggagaagcttaaagtacagaagaaggcggatcacagggagctcttgcgcaagaaaagctctatgtgggttgctgaggataaactggaaacaacaattcttgacgctatcaaaaataccacagctctctgaggatacaagatggtgtattctgaaagcatgacggaggatggactgaaggaagcttatttgtgattcccttctggaactaatcacaactgcctaagcaataacaaccatatttgaaaattctgctgcaacactgtatgttatattgttagacttgaacgccaagctgaaattgtattttggcattgccttttttctgagagagacctctctcctcaaatttctgttaaaaatttgttgcacgattaaaattatcatggccaaattttgattttcctgc

SEQ ID NO: 27001 - DNA, 1734 bp, Oryza sativa
  ref <308>: DATABASE ACCESSION NUMBER: AK102443
  ref <309>: DATABASE ENTRY DATE: 2002-08-28
gagctctacccatcatttgcagccaccagcatctgctccggcacgcttctgccaccgccgtcgccggagatccgtcacgcgtccgactccgattgactgaaccgtcggagcacgtacgccgggatgcggtgctggcgtcgcctggcggcggccggcgcactgctcgccgccctctgcgccgcgcttgctctggcggtggcggagcaccggcgccctgacaccacggccagcagcagcagccgccggccgctgcggttcgcgtcgggaggagggttcaaggtggcgctcttcgccgacctgcattacggcgagaacgcctggacggactggggcccacggcaggacgccggctccgaccgcgtcatggccgccgtcctcgacgccgagaagcccgacttcgtggtgtacctcggcgacctcgtgaccgcgaacaatctagggatccccaacgcgagcctgtactgggacagagcgatttctccgaccagaggcagggggatcccgtgggcgacggtgttcgggaaccacgacgacatgccgttcgagtggcctcctgagtggttctctcctgcaggcgttccgccgctgcattgcccaccaccgagcatgtcagattcaggtaaacttaagatagttcatttctgaatttgtttcagttcagtcactgaacttcagcgcagaaaaaagaaaaggaaaagaaagaaggcaaccactgtatgctttcaaacaaaagtaatcattcatttgaacttttcaagaaaaccatgtttttaacttgatgtgcagactgcagcttccgaggaacaccgcgacttgaactgatgacaagtgaggttatccgtaatggattgtcatattcatcaaatggccccaaggacctctggcctgctgtttccaactacgtcttgcaggtgctatcacagaagcgagatgatccagctctgctcatgtatttccttgactccggtggtggatcctatccagaagtgatatccagtgctcaggttcagtggtttcatagtcaatctcagttccttaatccaaatggaaggattccagagataatcttttggcatattccaagtacggcatatgccaaggttgcgccgaaagctaagtccgaaataagaaaaccctgtgttggctctatcaacagggaagaagtagcaccacaagaagctgaatggggtatgatggatgcccttgtcaagagggcttcagtgaaggtttgtttcatctgaacatttcttgacatgtatacagaatttcttatcccctgaatcccttcagataacttagatacacaggtcaaaattcagaagacacttactttttatttgttagagaacatatatcattggttgtcattttacaggcaattttcgttggtcacaaccacggcctggattggtgctgcccacacgagaaactctggctatgttttgtccgacacacaggctatggtggctacggtaactggccaagaggagcaagggttattgagatatctgaacagcccttctcaattcagtcatggatacggatggaggatgggacaacgcacagcgatattagcttgagctcctagacttgtaaatgaaatgtagttgctggagttttatttcagacaaataaagagtccaagtaggaaaatgaaggtggacactgtatataattaagctgagcccccttgtaaaattgtaatatatgcgtacagagtaagaaaaggttggc

SEQ ID NO: 27002 - DNA, 1781 bp, Oryza sativa
  ref <308>: DATABASE ACCESSION NUMBER: AK102444
  ref <309>: DATABASE ENTRY DATE: 2002-08-28
gaccttcacttgattgctggtggtagtagtagtagtagtactataggctcttcttggagatagcggacgagctggagtcgtagcagccgcagctagctgcagcgagcagctatcgtagacggagatagagacaggccagtctagtgcacttacgggagatcgaggagacttctcagcctttacttgaggaggcctcagctgcctgcgaaatccgcggatataagtgtggcttcgggacggcgcttcccatccgacaccggcgccttcgcggactgggtcgcctcctccgcggcggcggcggccgccggccgaggcgacgacctctccctcggcttcaatgccaccgccgcggccgcggccccctccggcgcctcgctggccgccggcctatggggcccggcctcctcctcgcgccaggccgcgctgaactacggcatggccgacgtcgggatggtcgtcgtcacccccgccgcctccttccaccacacacatcaccaccaccaccaccacgaggccgccgccgctgccgccgccgcggcggcggcggccgccgatcctatcttcccgctgctctccgccggcccctgcgtgcttgatccggataagtcggcggcgtcgggcagcgcgatccaattttggcagccgccgccgcagctgccgtcatcggcggcgggtggtaaccctaaccctagctccagcgccttcccctacctcaagaagcccctcccgatgctcgacaccggcggcggatcgtccggctccggcggcgcggcgacgtgccaggactgcggcaaccaagcgaagaaggactgcggccaccagcgctgccgcacgtgctgcaagagccgcggcttcgattgctccacccacgtcaagagcacctgggtgcccgccgctcgccgccgcgagcgccagcagctcaccggctccgcctcgtcttccccggcaaccgcctccgccgcggccgcctccaagaagccccgccttctcacctcccaaaccacgacgtcgcacacctccacctccaacgccaccacgccccgcagcttcgacaccacctccagccatcaagacgcgtcgtttagggagagcttgccaaggcaggtgcgcgcgccggcggtgttcaggtgcgtgcgcgtgacgtccatcgacgacggcgaggacgagtacgcgtaccaggcgacggtgaccatcaacgggcacgtgttcaaggggttcctgtacgaccagggagtcgacgacggccgcggcctcgccgccacgagcaatgacgactcgacggccggcggcgtgcccaacatctccgagctccacctcggcggggcctccatttccggcaatgccatgagagaaggcggctcctccatggtgcactcggacttgtacggcggcggcggcggcagcggcggaggcccgcacattctcggcggatcgagctatggtaacaccatgaactgagcttcttatagaagagtaaggttattacaccaattactgccattctttttctctcgtcgttcttgccccgtaccaccacgaaggggcatcaacgcatgctgtttgttctactactcatatcttcggtggtgttagtgttatcgttgttgtagtataataacatcggagaattgttgttagcttgtactactaccttagcagtagctgttcttttttcattttttctctttccattggagtagagattaataattgttaggaagaattccaaagaagataatgcaagattaaatcagtaagcataagaaagtattataattgcc

SEQ ID NO: 27003 - DNA, 2047 bp, Oryza sativa
  ref <308>: DATABASE ACCESSION NUMBER: AK102445
  ref <309>: DATABASE ENTRY DATE: 2002-08-28
gacgcctcggcaatccaaagccctcctcgtcctcgcagagcatccattgcctcgattttctattccaaattcccccacgcgaagaacagccagcgccctcctcctcctcctccttcgccttcctcctggtttcttgccatctttccagggaaggaggaaccgcggcccggccgcattcttggacaagaattgttggcataaaggaacattttgttgatgttctaatggagtcaaaaggtggcaaaaagaagtctagcagtagtagttccatgtacgaagctcccctaggctacaagattgaggacgttcgcccagccggaggaatcaagaagttccagtctgctgcttactccaactgcgctcgcaagccatcctgatattccttcacatgcctttccccgtagagtaggaatttcctgcaatttttcctttgttttgttgcaataaatctcccttggctggctgctttctcaatctcttcccttgtcttctccgatctcttctttcctgtcttgtccactgctccttgcaacacttgatcaaatgtcgatgtccttggctgattcttggggctctgcccctgcctcgcccattgggtttgaaggctatgagaagcgccttgagataacattgtctgatgcgcccgtctttgtggacccctgtggtcgcggccttcgtgccctctcacgtgagcagatcgactcgttcttggatcttgcaaagtgtaccattgtatcccatctttcgaacaagcacttcgactcatatgtgctttcagagtcgagcctttttgtttatccccacaaggttgttctgaagacctgtggtacaacaaagcttctgctctccattcctcgcatccttgagcttgctgcagagttgtcactgcctgttctatcagtgaagtactctcgtgggatgttcatcttccctggagcgcagccatcaccgcatcgcagcttcttggaggaggtttctgtgctcaacagcttctttggtggcctcaagtcaggtggcaatgcttatgtcattggtgatgcattcaagcccaagaagaagtggcatgtctactatgccacagaagagcctgagcagcccatggttacactcgagatgtgcatgactgggctggatgctaagaaagctgaggtgttcttcaaggattccactgatggctcctgctcatcagctaaggagatgactatgttctctgggatttctgaaatcatccctgagatggagatttgtgactttgagtttgacccgtgtgggtactcaatgaatggcatttatggtcccgccgtctccacgatccatgtcactcctgaggaaggtttcagctatgcaagctatgaagcaatgaacttcaatcctagctccttggtctacgatgatttgatcaagaaggtcctggcttgtttctgcccttcagacttttcggtcgctgttaccatcttcggtgggcatggttttgccaaatcatgggcaaaaggtgcagaggttgattcctacatgtgcgatgatcttgttgagcaagagcttcctggtggcggtgtgctgatgtatcagagttttactgctgttactcctggtgctgtgtcaccgaggtcgaccttggatggctggaacagcgatggagcagagatggttgcgaagagcaaagagatgagtgtctgctgggaaggagagaaggcggcgaagaagaaagatgcagatgcctgagaaatcggcagttcttcaacctcaagttgcaagtttgattcatctgaagtttctgagacgccttatttggttctgctcttgcggtttcggttaagcagctggctgggctaccggcaaagcatatgttacttgttcattgttcttttatatctgtctgcccaaataagtgctctagatggtttgctgcgtctgccatagtgagcaattcagattgtagtagaattcttatctgttgccgatgctctttaagggagaatgatatgtaactcgattattttcaataactattgcaacttccataattttctgtccattggttatgttt

SEQ ID NO: 27004 - DNA, 2571 bp, Oryza sativa
  ref <308>: DATABASE ACCESSION NUMBER: AK102446
  ref <309>: DATABASE ENTRY DATE: 2002-08-28
gtaggggaagcaaaggaggcttcgagatttccgcggaacccccacgccaccaccatcctcctcctcctcctcctcttccccccatcctccgcctccacctattacccacatcctagggtttccccctcctcctccgcctcacctcccagtaccccatcctcccaccgccgcagccgcattcgaaggtgtgtatccatcgatccccgcctacccgccaacgactccccttcccgtctcgaggtgcctctggtccggggatcgatccttggttcctcgccgccgccgccgcttggtttcggtggggggtggagctttgtgttgctcggtgatctggaggcgtgattcgccgcgccggggccgtggattggttttgttgattggggggagttgggggtttcgatttgggagggagattgaggtggtggtggtggtgtatcgaggggccctggttttctctgctattggattggattgggatccatgatcgagattgctcggtgaagtttttggtcctaggggaattttttttatcggcccggatcaggaatggagggttctcttggggagatctagggttgcttgttctgtatcgtttctgtgtgcagaaaattagttgaaaaaaatcccaaaaaaaatagaaagaggaaaaaaaagagagagggggagagtggaggagagtttggaggctatggcgctgaattactcgtcgtgctcgctcaccagctcgttcctgatgaacgaggactgcgctggcatgatgtgtgggtgcgggtgctggtcggaggaggcctcgccgctgtcatccggtggggtgaactccctgtggtgggatgagctggagtttgagctggagctggaagaggaagaggagttcgaccctgtggacctcttgcctaccgaccccttcggcatgaacctggagaccacgttcaccgcggcgatcgccagttgcattgaggacctcacagtcatgtccagtgctgggcgttttggagacagccgcgatgatgctgtttttgccgacctgagttattacttgaataaggcttttgttctatcaccggagtttcagtttggtggctatcggggtgtttttgaaggccccttggggtttggaggcctttctgctggtgaaggtgattcttttgggttcatgaagaacccttcttcctcaggaaatgctgatgattcttttgggttcgtggagacccctcctacctctggaaatgctgcattggagtgcggcgatgcagttgaagttgttcctgtccaggagggaggagttccacatgagggaatgctgtttgcccttgactaccttggccttcgtgacatcctctctgttgagagagtgtgtaagacattgcattcggctgtcagaaatgagcccttactgtggaagtccatccacattgaaggggatttgcgccagagaatttctgatgctggtcttctacacctgacacagaagtgcccagatactttgcagtgtctaagtattgcgtgctgcgtaaatatcacagaccaggggctgaaggctgttttagaaagtaatccaagattaacaaagctgagcattttgggctgcccacggtcaactttggatggccttatttccaatctcaagtcatttaatacgaaggcggtgtttggaattaagcacctcagagttggaacactcttcagtttacgaaaggagcagtacgaagagttattatccttgttgaataccgacaagacacaggaggtgcataaccgggggccaagattccttcatgctaatcggtttttatcagattgcaatgatggatatgctcttgatattgagatgtgccctatttgtcagaactacaaacttgtttatgattgcccagatgaaggatgtgatgacagaagatctggtaattgcaaaggttgtactgtttgcatactgagatgttatgagtgtggaaggtgtgtagacaagttggcattcaaggagtcattttctctggactgggtttgccctaattgtcaagagaagaaggatctgtctcccccaatgaaataggggtttgtcccccaatgaatactcttcctccgctaacagagaacagcatgcaatgctgtcatgcaagccatcttaacatatcatttctactgagaaaacggacaaaaaaaaacgaagagtttgttattcttgaaggcgcagccatcctgacatgctacattagcttcttgcaagaaaaagaacaaaaaatagtagttagtttgattcagcaaaaaaaggaaaaaaaagattgtttcgctactattgtctgactggtgacatttcagagggattgcggttcaagagcggaagtacagcgtgaactttacgtcagtattgcagcagctgctgctgttcttggaatgttaagatcgaagatgaactgctctactcctttcacggtctcaccagagcaaataaagagaggactgctgtaatttaccttgtacatgcgtgccacaatgttgttgtagttctgagaacatttgtcacactaccatgtaatttacaactacttgcagagaaataaatgacttctaacc

SEQ ID NO: 27005 - DNA, 2790 bp, Oryza sativa
  ref <308>: DATABASE ACCESSION NUMBER: AK102447
  ref <309>: DATABASE ENTRY DATE: 2002-08-28
gttctcactcactcgctcggagagaaaaaaaaagggaaaaaaaaggagcgtagaaaaaaaaatttaccactcgcctcgcctgcacaaatctcgagcacgggttggcggcggcggcggctcaggctcgatccgcggccgaaaccctaggtggtggtggtgggattcggagttgaggtggggatggcgtcgccgaggaacgaggggttcctgacgcaggaccagcgggagaagctgcggatcgcggtgcagaacgccgagacgctgtcgctcgcctccccgcgctcgccgaccgggggctccacctccgcgctcctgcagcagtacgagcagcagcgcgccgccgccgcggcggctgcggccaggggcggcggcggcggtgggggtgggggtggggtgaggcacgtgcggcggtcgcattccgggaagaccattaaggtgaagaaagatggtgctggtggcaaaggtacctggggaaagcttatagatacagacacagatgcatgccttgaccgcaatgacccaaactatgacagtgatgaggaaccatatgaactagttgaagcccctgtttcaaccccagtagaggactacaagaaatctgttgccccaattattgaggaatatttcagcactggtgatgttaaattggctgcttctgatctgaaagagttgggttatgatgatttccaccgttactttgtcaagaagcttgtttccatggcaatggataggcatgacaaggagaaagagatggcgtcagtgcttttatcatctctttatggtgatgtgatcagttctacccaaatcagactaggctttgtgatgctgctagaggctgttgatgacttggctgttgacatacttgacgcggttgatgttcttgctcttttcattgcacgagctgttgttgatgacattctgccacctgcttttctcagcagggaaaaagcgagtctctccgagtcttcaaaggggatgcaagttgtacagattgcagaaaagagctatctttcagcaccccaccatgcagagttgcttgaacggcgatggggtggttcaactcgcaccacagtagacgctgtaaagttgaggattactgatcttcttaaggaatatattaagaatggtgacacagctgaggcgtgtaggtgcatcagagaattggcagtgccattttttcaccatgaggttgtcaagcgagctctcactcttggaatggagagtccaactgcagaagctcttattgtcaagcttctgaaggaagcatctgaggaattgctgataagctctagtcagatgatgaagggattttctcgtgttgtagatagtcttgatgacctatctcttgatataccatctgcaaaatctcaattccagacattggtatcaaaagcagtttctgaaggatggctcgactcttcgtttgtacatgtaggtgccaatggggatgtccaagatgatgaacatgagaagctgaggaggtacaagaaagaggctgtttctatgattcatgagtactttctctctgatgatgtacctgagattattcgcagcctcaaagagcttggttctccagagtacaaccccgtctttattaagaagcttataacaattgctatggaccgcaaaaacagggagaaagagatggcttcaattcttctatcctcattaagcatggaattgttctcaacagaagacattgtcaagggtttcataatgcttcttgaatctgcagaagataccgcacttgatatattggatgcctcagatgagctgggactgttcctagccagagcagtgattgatgatgtgcttgcgcctctgaacttagatgagataagcggcaagcttccaccaaactgcagcggggctgaaacattgaacatggcgcgctcccttgccactgcccaccatgcaggagagaggcttctgagatgctggggcggtgggacaggatgggttgtggaggacacaaaggacaagatagcaaagcttctggaggagtacgagagcggaggcgatgtaggagaagcttgcaactgcatccgcgagctgcacatgccgttcttcaatcatgaggtggtcaagaaggcgcttgtcatggcaatggaaaagaagaacgacaggatcctcggtctgctgcaggagtgctttggtgaagggatcatcaccatcaaccagatgaccaaggggttctcaagggtgagggatgggcttgatgatctggctctcgatattcctgatgccagggagaagttcctgtcctatgtggagcatgccaagaagagcggatggcttctaccctcattcggcgtcgctacttcagcttgaaccaatgttatgagtgagcaggaagcatcaagctggaccggaccgatgaacaacgaagcaagaaggcacatgccgtgatatttgctgcatccaagatattccaagttgatgattttcatttgcgttttctgatgcttgtcgttgtgcttgcgcgtgtaggtagcggagcgagcccctcttacttgtggttgttgtggtggcttatgtgtctagatctttcacctctgacacacccgttgctgttgttagttgcattccatttttaacttcccccatagacccttttttacttcacaagtaaaaacagagaaaagaacccccgtcatgtaaaagttgctccctgcctcagcatttgcatctgttgcttacctcatttactgtacgttctcgcctgcagcgataagtagcttgatgtgttcttttttaaaaaaaaaatactaggagtagatgttaattgtc

SEQ ID NO: 27006 - DNA, 1609 bp, Oryza sativa
  ref <308>: DATABASE ACCESSION NUMBER: AK102448
  ref <309>: DATABASE ENTRY DATE: 2002-08-28
gaccacgccaccattcccacgcctcacgcggcggagagagagagagagggtgaatttgctagcgagatgccggaagccgaggccgcggcggtggtcaccggaggcggcagccgcgccgccggccccgccgactacgagcgcttcatcaccctcttctccccggagggccgcctctgccaactcgactacgcgttcaacgccgtgaagctggccgggatcacctccgtcggcgtgcgcggcgacgactccgtctacgtcctcacccatcggaaggaggacaagttgcacgacccgacgaccatcacgaacctgttcgcgatcaccgaccggattgggctgctcgccaccgggatgccaggtgatggaagggcaatagctcaggaggcaaggaacgcagctgccgagtttcgcttcaagtggggatataaaatgtctccttgtatgttagctcaatggattgcagacagagcacagatccgcacccagcatgctcagataagaccttatggagttgtttctatgatctttggaattgatgaagagaaaggaacccccgagctcttcacatgtgatccagctggacaattctttgcacacaaggccacaagtgctggtccgaaagagaaggaagttatgaactttcttgaggaaagaatgaagagcaaaccttctctatcatctggcacaacaaaagggttggcaaaatctgcgttgaaacatgtcctggagggggatttctatgcccgagaatttgagcttggatttatcaagaaaggggatccaactgtaactctgcacccagtgaaattcaagcgcacgcggaggtgaaggacgagagcagaacaaagtgctcgatataggacgatcaccagtctttcaaatcttttacagcatggaagttatgcaaaaccattaccgctaactgattactgtacgctatagctatatgtatgactgcgctcaagctgtgtcaagtgtcaattatgagttgcccccggatttacgataccaactgatgatcacacatcaacacttcaaactgtaactgtctacgaaggaactgcatcctcctgctcccgtgtaaccttagccagggataattttcctatgaagttggtcgcaaggctgccgaggaagagatctccgttgaactcgtcaccgaagtgaccatgttgatcacattcccttcagagtcaccaagaaccctcacgatctcgccgttcaacgacacctgagccaccactgctcccttgagcgtcgccttggtcctctcgacgagcgccgggaacgacgcgatgaccctcctcgtcaagctccagcgagagatcaggtccagccatggagacctcacctgcagtttgagcacagaaaattgtaagtttgagcactgaaaatgttgtgtagatgcttatggcagcagaaaggttagagagcagagacctggagaagggcaatccagaagtgaccatctgaacccagccgaatgttgtctggattccccggcaggttgtccacgaagatctctgcctccccagccttctcccctttcagccacactctcaagcatctgaacctgcagttgacaatatcacttcatggtcacttgacg

SEQ ID NO: 27007 - DNA, 2152 bp, Oryza sativa
  ref <308>: DATABASE ACCESSION NUMBER: AK102449
  ref <309>: DATABASE ENTRY DATE: 2002-08-28
gattgtggctgcattagccaccattgttactgatgttctctactgccactgctatccacctgtgcactccatagtttggcacaattcataaaggcagcagcagcagcagcagcaggagcaggatgcactatcatcttcttcttgttgtttttcttgcaaaaggcgggaaggcagaggcaaaagggcgctaaaagttgcggccttttcttgcacccacctagtcgctggcgtgcacattattaagctcttccacttcggcacatccccggatcaatcggcaacggcgtttctcttcatcttcttgctccggcgtggtctggtcgccggcgttactgacggcgacggtttttgaagctgcattcaagtagggataggatggcgccagcgatggctctgaggttgctggtggtggtggcggtggcggcggtggtgtcctgcgccgtcgccgccgatgaggggagcgtcgtcgaggtgtggccaatgccggcgacggcgagcaaaggcgggcagacgctgcacgtcagcagggagctcaggatgacggcggaggggagcaagtacgccgacggggaggccatcctgaaggacgcgttccagaggatggtgacgctgatagagctggaccacgtcatcaatggcagctcccagggcttgccgctgctcgccggtgtgaatgtcgtcgtgcatttgcccggcgatgagctcaacttcggggtggatgaatcatacaatttgtcagtgcctgcaactggaagtccaatttatgctcaaattgaggcccaaacagtttttggagcacttcatgccttggagacgtttagccaattgtgtaactttgatttcacctcaaggttaattgaacttcagtctgccccttggagcatcacggacatgcccagatttccttatcgagggcttcttattgatacttcaaggcattaccttcctgtcccagtaataaaaagcgtaatcgattcgatgacctacagcaagttgaatgttcttcattggcatatcgtggatgaacagtcatttcctatagaaataccttcatacccaaaattatggaatggtgcatactcttactcagagagatatacaatggatgatgctatcgacattgttcagtatgctgaacgacgaggtgtcaatgtcttagctgagattgatgttcctggccatgctctctcatggggtgttggttatccgtcgttgtggccatcagctacttgtaaagaaccacttgatgtcagcagcgaatctacattccaagtgattaatggaattctttcagatttcagcaaggtttttaagttcaagtttgtccatttgggaggtgatgaggtcaatacaagttgctggacttccacaccacgcgttaaagcatggttggcccaacatggtatgaaagaatctgatgcctacagatattttgtattgagagctcaaaagatagcaaaatcacatggctacgaagttattaactgggaagaaacctttaacaactttggagacaaactagaccgcagaactgtggtgcataactggcttggaggtggagttgcagagaaagttgttgctgctggtttgagatgcattgtgagcaaccaggataagtggtacctagatcacttggaagttacatgggatggattttatatgaatgaaccactgagaaatatcaagaacccggcacagcagaagttggttcttggtggtgaggtatgcatgtgggctgaacacatagatgcgtctgacattcagcaaaccatttggccacgtgctgcagcagctgcagagcggttgtggactccgtttgagaagctttcaaaggagtgggaaatagcagcgctcagcgcaagactggcacgcttcaggtgcttgctgaatcatagagggatcgctgctggaccggtaactggttatggacgttccgcgccagcagagccaagctcctgtataaagcagtaggatatccaaagcagataaatattattattattattattcatattggactgaaaatcatttcagacacccatttaaccgctgtaagcagaagcagtcaaaggaaaaggctggggccaatgtaactgaactctgagttacaagagagtgtttcaataatattgcattctcattttcatgtagt

SEQ ID NO: 27008 - DNA, 1989 bp, Oryza sativa
  ref <308>: DATABASE ACCESSION NUMBER: AK102450
  ref <309>: DATABASE ENTRY DATE: 2002-08-28
atcgccgctggcgacggcgagctcgccgcatttcgtgatcccggcggaagctttgtcatgctattatcgccgattgggttttctttattttctttttctcgcgttcttgcgtgattttagggggggattcttgacgtgcgttacctacggtttcgtgtcgcggctgctgcacgtaaatctggggggagagagagagagagagagagagcttgggcttttggggctcttgctgtgtttttgtttgacttgaccacgtctataacttctgctgctacttttttttctcagcttgcagagattcttgccttgtgaagctctgcttcagtgcatgaatgtgtttttagcttcaagatattgatcttaacgtgcactgatatatttctgtactctttgatcttttatgcgaacctggcaagccagctgctgctgctttgctggctgtaaactcgttggcattgttgtttgcgatgtggtatacttgttcatgatgttgttcaaatgcaatgctgcattgctctggtgcgattcatagtctatgatttattaattttggcgtagtagtggatggtaacatattgggaggattggttcagagtacatcatttcccattacatgtggagtctctgtctctgaaatgttagcatgtattggtggaactctacacatagctgtgtgaactcatggtgcggtgagcatttgcaaacaatttggttcctccgcatgcatgaatcagtgatgaatttgtctgaaccgtgtgtgcgcgccagtaagatgttgggaatctcagatttgtttcaaacgcttgcaaaatccttagtttctgtctggtattgtagaaatgaaattgccatttctaggaaacaccttttagggcttaaatccttgtagtataatgttttatgcacttgtttcactgtcacatccattgtatggatgcatataatcttcctctttgtatgaatgcatatcatcttctgtgatttatcttcttatttttactgtttagtgatgtatccgcataccagtttattaagccaagtgtagctttgtccaaaagtaagactgcccaaagacatcattatggataatatgtgttgtaatgaggatgcatgattgcttatttgctttatttctgtttatgatgaatatcttattatcaaaacatgcacatcttcctgtttcgcttaagtctgcaatatgttgttgatgtttcaactgtttactgtacatgaaccttgttgatcagacgaatttatttccttttgaccctcttagtcaaacgttggttttgagcatttttgtgctacatggcccattctagtagaaatatcacaggcttttgttcatttacatgcaccattttctttctcatggtagagaaaaacatggaacaattttattacactttccatggaaaagttttttttttctgtagatttctcgatttctgtgattttaagtatatttccttgtcccactcttctacactatgaaatatgcacctatttatttactcacactttcttgtttgcactatgcagtttgtagaaagtgtatctataagaagattaatgatgaagagctagagcactgtccagtctgtaaaattgatcttggctgtgctcccctcgagaagcttagagctgatcacaatatacaagatgtgaggtcaaaaatatttccattgaaaagaaagaaggttaatgctgaagaggttgaatctcctattgcgccgcctgctaaaaggaaagagagatctatctcttcattggtggtcaatacacctgaaataacaccaaagagtttgacagggcgccgaacaagggcatctaccaggaagtctgctgccgcattacgtgaccttggtcctatcattcctcctgtgaaaaaggatagtgataacaccaataagaatgctgataattcaagcttgctggacagcttgagcaaagtacctcaaacaagaagacaggtattgtcaaatgcgg

SEQ ID NO: 27009 - DNA, 1586 bp, Oryza sativa
  ref <308>: DATABASE ACCESSION NUMBER: AK102451
  ref <309>: DATABASE ENTRY DATE: 2002-08-28
gactctccacccacacctccactccactccacgccattttttcgctcgctcgctcgcctcgtgcccacgttcgccgaggggagtagcgttagcgtagcgtgctcttcgggggcgggttggttcgcgatgggggcgtcggggaagtggatcaggacgctggtggggctgaggccggcggcggagagggagaaggagaggggcggcggcggggggaaggggaggaagtggagcagactgtggaggagctcgtcgtcgcagaggggcggcgggaacgcgtcggcgtcggaggtgtactccgagacgtcgtcctccgccgacgcgctcagctccgtcgtcgcggccgtcgtccgcgcgccgcccagggacttccggctcatcaggcaggagtgggccgccgtccgcatccagaccgccttccgcgccttcctggcgaggcgggcgctgagggcgctgcgagggatcgtgcggctgcaggcgctggtgcgcggccgccgcgtgcgcaagcagctggccgtcacgctcaagtgcatgcaggcgctcgtccgggtgcaggctcgcgcgcgggatcggcgagccaggatctcggccgacggcctcgactctcaggacatgctcgacgagcgcggcggacgcgtcgatcatgtcaaggaagccgaggcaggatggtgtggtagtcaaggcactgcggatgacgtgagatcgaagatacacatgaggcatgagggtgcaatcaagagagaaagggcacgtacttatgctcaatcccaccagaggtgttcaaaccacggtggaagacccagctcccctgctgtatctctcaagcaccatgggaatggtgctactaggagcaaccatagttggagctatctggaagggtgggtggccacaaaaccttgggagagccgactgatggagcaaacccacaccgaaaactccaccaattcgcggtgttcagagagcgtcgaggaagtaagcgttggcggcccgaagctttctgatgcaagctcggtcaagatcagaaggaacaatgttacaacaagggtggcagcaaagcctccctccatgatctcggctacctcttctgatttcgtgtgcgatgagagctccccatctacatcttctgtgactccactgtcagccaacaattccctggcaacagagagaagatctgattgtggtcaggttggtggaccgagctacatgagcctgaccaaatcagccaaggcaaggctgagtggctatggctctcacaagccacctcttcaaaggcaaaggtccggtgatctcctccatcacaacaacaggatggcattctcttccatagatgttcagagcactgctggctcggaggtctcagtaacttcaaagaggttaaacagtttggctcttaaaggtcgagccacaagaagtttagacaaggagaatgagagacggcctagttccttgctttaggatacgcaccctaattggtccctcaagatattttagcggagtctttagatgttttacctgtacgtatctgctggtttcaatgtctcattgcttattttgctctctatatttatggtgtacaaatgtgaaactcc

SEQ ID NO: 27010 - DNA, 1329 bp, Oryza sativa
  ref <308>: DATABASE ACCESSION NUMBER: AK102452
  ref <309>: DATABASE ENTRY DATE: 2002-08-28
ggcatagacctagccagctagcaaccgacaagccaaggcgacggcaatggcgccgacgacgacggccacggcggcggcggagcaggcgccgccgccgcagcatacgaggaaggcggtggggctcgccgcgcacgacgactccggccacctcacacccatccgcatctcgcgcaggaaaactggagatgacgacgtcgctataaaggtgctgtactgtgggatttgtcactctgacctgcacaccatcaagaatgagtggagaaacgctgtctacccagttgttgcagggcacgagatcaccggggtggtgaccgaggtggggaagaacgtggcgaggttcaaggccggcgacgaggtcggcgtcgggtgcatggtgaacacctgcggcggctgcgagagctgccgggacggctgcgagaactactgctccggcggggtcgtcttcacctacaactccgtcgaccgggacggcacgcgcacctacggcggctactccgacgcggtggtcgtcagccagcgcttcgtcgtgcgcttcccctcctccgccggcggcggcgccggcgccgcgctgccgctggacagcggcgcgccgctgctgtgcgccggggtgacggtgtacgcgccgatgaggcagcatgggctgtgcgaggccgggaagcacgtcggcgtggtggggctcggcgggctcggccacgtcgccgtcaagttcgccagggcgttcgggatgagggtgacggtgatcagcacgtcgccggtgaagaggcaggaggccctggagaggctcggcgccgacggcttcatcgtcagcaccaacgccagtgagatgaaggctgcgatgggcaccatgcatggcatcatcaacacggcctctgcaagcacatccatgcactcttacctggcactcttgaagcccaagggcaagatgatcttggttggcctgcctgagaagcctctccagatcccaaccttcgctttggttggagggggcaagatactagctgggagctgcatggggagcatcagtgaaacgcaggagatgatcgacttcgccgccgagcacggggtggccgccgacatcgagctgatcggcgccgacgaggtgaacacggccatggagcgcctcgccaagggcgacgtcaggtaccgcttcgtcgtcgacatcggcaacaccctcaggtcggattgactagggagctcactgtcactggtctcagctctgtagcataccggacctgcaatcctgcaaagtagtgcaatcttcttgctacaagacatacatatcacctctacttggtgtcaataaatgtagcaaaagaggtacattgttgt

SEQ ID NO: 27011 - DNA, 2137 bp, Oryza sativa
  ref <308>: DATABASE ACCESSION NUMBER: AK102453
  ref <309>: DATABASE ENTRY DATE: 2002-08-28
ggacggcccagatcgctccccccctaattcccgccttgccccctcctccccatgtcgccgccggtggccggcgccgcctcctccggcgacgggccgccggggcgcccgccgcgcgagctctacaccatccctgcctcctcgggttggttccagtgggatgagatccacgagacggagcggcgggcgctgccggagttcttcggcggcgccggggggagcgggttcgggacggcgtcgcggaacccgcggatctacagggagtaccgcgactacatcatcagcaggtaccgcgaggacacctcccgccgcctcaccttcaccgaggtccgcaaggcgctcgtcggcgacgtcacgctcctccggaagctcttcgccttcctcgactcctcgggcctcatcaacttctccgcctccccctcccgccccgaggcgcagcagcagcagcggcagacggaggcggaggccgtcgtggaggcgcccgtggggctgcaggtgacgccacggccgccgccgtcgtacttcgcggaggagaagggaggagggggcaacgagaacggattccgtttgccgccgctgacctcgtatagtgatgtatttggagagtgggcgcctgggatggcgcctatatgtgggctctgtggcatggagtgcagagacgggaatgcccaaatattgaaggatggttttaaagtatgctcaaaatgttatgccaataatgataataagggtgaagcaaatatacatccaggtgacaaaaaggagcggatcgacaatcattcttctagtgcatggacagatgcagaaactctccttctcttggaaggtgtactaaaacatggagatgactgggatctcatcgcccagcatgtccgcacaaagaataaatcagaatgcattgcaaggctaattcagttgccttttggtgaacatatgctgggcacagtaaatggtaaattggataacagactccataaaatccaaacaaccgatggaaaagtgaacaagtccactgtgaaggagtcttcaagtcaaccaactgaaacagttgatgacatgcagattgatggaaatgaagatggcgctgataaatctgttgaagaacatcctacaaaacatagacggttgttttcttcaatagatatcactgtctcattaatggagcagttagcgcatcttaccacatcgacaagcccagatgttgttgctgcagctgctgatgccgcaattaaagcactgggtaatgaaaacccccaagcaaggagagcttttcaactcagtgagaaagagtaccaaaccagggcattctcttctaaccatgcccggcagagtgatgatgttggtggtggtgatcgggatgtagaaatgcacgggcacccagataaaaagcaggggaagatgtttatttctaccacatatcaagtaagggcagctgttgctacgtccataggtgtagctgctgcccgtgctaaaatgcttgcagaccaggaagaacgggaaatggagctcctaatggcgtccataatagaaactcagctaaaaaagatccaatacaagatcaaacactttgaggagctagagttgatcatggatcaggaatacgctactctacagcaaatgaagtcttcccttgtcgatgaatggcaaaaggtcctcaagcgagcatttgagactggagtaccaatatcgagggatgaagtgcttataaagttgttccaaaacaagccaaatctgtagagaaattgaccaaagtcggttagatctccatgagggagcattggaggttgggatatctgtactgagggatgtgctgttcgagtaacatccctattccttagagaagttgactggagtcgattatccctcctctgatctgcctctccatagagcagtcatctagcagtttaacattgtggtgtcagagcgtggctgtaaatgtgctgattgagctttgggttgatctcaaaattttgcgtttgagatcacatcgatcctctgtagtttgtatcatcctatgcgattgcacgtgattgctccgttatactatccaactaggttagacaagtagtgttgctaatagcttcctgtacctgtctacatttcgttgatttcatttgttgggatgtgcaaatcttcctcc

SEQ ID NO: 27012 - DNA, 974 bp, Oryza sativa
  ref <308>: DATABASE ACCESSION NUMBER: AK102454
  ref <309>: DATABASE ENTRY DATE: 2002-08-28
gatctaccgcaatgttcgcctgcgctctcgccaccgcacgaagactccggcctccgctctatttgctcctcctcgctccgcacatcctccctcctcgcgtgtccccgccgccaccgcactccaccgctgcccccaccggagcctaggtcttccgccgccgccgcgctccaccgttgcgcccgccggagctgaggtcgtccccagccgctgccgctgccatgtgcaatcatccccgcatttcgagggaaaatccgccgatgataccgcgaggtagtggtggccgatgggtatgggtgccgccggcgctgcccgcaaccgatgcgtcaccctcctcactattgtcgtgccacacagatcgaggactaaagcaccaccatggccgccaccgcgcgctcgatcgatcatgccagcaacccaaaaactgacgctgtcgctcgccacaccaccgacgccgtcgcctgccgtttgctccgcggctcttcccattccttggaggtcgcacgcctatggcaccatcggtcaccgccgcacatactctttgccgccccttcctctccctccatcacccgcagcgagaaaacctccatccgcagcatgtaccgctgtttgcaggtcttcaacggtaccaatgattatcctacccgacgcccagtagactacccactggaagagcagcaaactgatgaacatcgtctagaagaccagggagatatacatgtccataagcattggacaaaatggagacaagattcaaaggaatcacgagagcaggcaatgaaggaatgaggaatctaactctaagaaatagacagtttcaacatctgtaattggtaaccccttccgagtgttttttaaattaaaatatgtatgcccagcagtaatatgctgaaatgatatttgggtggtgcaggaaatgaaactgtgcaatccataatgtgtcttgtattcaacaatgcacatccagcattagtacc

SEQ ID NO: 27013 - DNA, 3876 bp, Oryza sativa
  ref <308>: DATABASE ACCESSION NUMBER: AK102455
  ref <309>: DATABASE ENTRY DATE: 2002-08-28
gagttgcatttcccatttcgattcgagactcgaaaacccaccacccctctctccctccctctcgctcgcctcggctcggctcgccgtctgtctctctttcagatcacatcaaagcgggcaccagcaccagcaccagcaccaactcctctctagggtttggtaaaaacctccatttcctccgcggatcgaagggaggctagggttccgatcgagaggggaagctttcgggtactcgtttcagccatgatgtcgcggtcgtacaccaaccttctcgatctcgcggaggggaacttcgcggcgttgggcccgggaggcggcggcggcgggaggcggaggtcggggtcgttcgggctgaagcggatgtcgcgggtgatgacggtgcccgggacgctgtcggagctggacggggaggacgactcggagcacgcggcgacgaacagcgtcgcctccgacgtgccctcgtcggtggcgggggatcgagtcatagtggtctccaaccagctgcccgtcgtcgcacgccgccgtcccgacggccgcgggtggtccttctcatgggacgacgactcgctgctcctccagctccgcgacggcattcccgatgagatggaggtgttcttcgtcggttccctccgcgccgaaatccccgtcgccgaccaggaagaggtctcccaggcgctgctcgatcgcttccgatgtgctccggtgttcctccccgaccccctcaacgaacggttttaccaccgcttctgcaagcgccacctatggcctctgttccactacatgctccctttctcctcctccgcatccccgagtccctcctcctcctcctcctcctcctcctccccctcatcctcatccggcagtggccacttcgacagcggcgcgtgggaggcctacgtgctcgcgaacaagttcttcttcgagaaggtcgtggaggtcatcaacccagaagacgactacgtatgggttcacgactaccatctcatggcgctgcccaccttccttcgccgccgcttcaaccgcctgcgcatcggcttcttcctccgcagccccttcccctcgtcggagatctaccggaccctccctgttcgcgaggagatcctaaaggcgctgctcaattgtgaccttattggattccacacttttgactatgccagacatttcctctcttgttgtagtaggatgctgggaattgaataccagtcaaagcgtggatacattgggttggattactttgggcgtaccgttgggatcaaaatcatgccagtgggagttcatatgggtcaattgaagacggttctgagcttgcccgacagggaatggagggtctccgagctgcagcagcaatttgaggggaagactgtgttgctcggtgtggatgacatggatatcttcaagggtatcaacttgaagcttcttgccttcgagaatatgttgaggacacatcccaagtggcaggggcgggcagtgttggtgcaaattgctaatccggcccgtggaaagggtaaggatcttgaagccatccaggctgagattcatgagagctgcaagaggattaatggagagtttggccagtcaggatacagccctgttgtcttcattgaccgtgatgtgtcaagtgtggagaagattgcctactacgcaatagcagaatgtgtggtggtgactgctgtgagggatgggatgaacttgacaccatatgaatatattgtctgtaggcaggggtctgactccacatcagaagtgaatggaccaaagaggagcatgctggtggtatcagaattcattgggtgctcaccatctctgagtggtgctatccgggttaacccatggaatatagaggcaaccgcagaggcactgaatgaggccatatcaatgtcggaacaggagaaacacctaaggcatgagaaacattaccgttatgtcagcacccacgatgttgcttattggtcgaaaagtttcatccaagatttggagagggcttgcaaggaccacttcaggaggacatgttggggcatcgggttggggtttggttttagggtggtggccttagatccccatttcacaaagcttaacatggattcaattgttatggcttatgagcggtcagagagtagggctatatttcttgattatgatggaacactggtgccacagacttccatcagtaggacacctagtgcggaagttttgaggatcatcaataccctgtgctcagataggaggaacaaagtttttcttgtcagtgggagacgcagggacaaattgggagaatggttttcctcttgtccagatctgggcattgcagcagagcatggttacttcttaaggtggactagagacgaagagtggcaaacatgtacccagacctctgacttcgggtggatggaaatggccaagccagtgatgaatctgtatacagaagcaactgatggatcttacattgatcctaaggaaagtgctttggtgtggcatcaccaggatgctgaccgaggatttggatcctcccaggcaaaggagttacttgatcatctggaaagtgtattagcaaatgaacctgtttctgtcaaaagtggccagttcattgttgaagtcaaacctcagggagtaagcaagggagtagtagctgagaagatactcgtctcaatgaaggagagaggaaagcaggctgactttgtattatgcattggtgatgacaggtcggatgaggacatgtttgaaaacattgctgataccattaaaaagggtatggttgctacaaacacatcattgtttgcatgcactgtgggacaaaaaccaagcaaggccaaattttacctggatgatacgtttgaagtggtcaccatgctgagcgcactggcagatgctactgaaccagaacctgagactgatcttaccgatgagtttgatgaactggccgtgtctgtctcctcagttgatattgatgatgaacaaacgcccagtgataaactgatcggaggatagtagtcaaggttgcttatatctgcagattgtcatgattaattcaaccatctctatacaatttttgatgaatgtgaaagctgggtactcaaagaatgactaacacccacaccacactccactccagcatagtactgcgcttagctaattaagcagcaacttaacttgatcttcgtgtgaccgatcgatggctcgcgcggcgaataataagtatgtggcggcggtgatggtggtggcgctgctgttggcggcgccggcggcgagcgcggtgacatgcgggcaggtggtgagcatgctggcgccgtgcatcatgtacgcgacggggagggtgtccgcccccaccggcggctgctgcgacggggtcaggaccctcaactccgccgccgccaccaccgccgaccgccagaccacctgcgcctgcctcaagcagcagaccagcgccatgggcggcctgaggcccgacctcgtcgccggcatcccctccaagtgcggcgtcaacatcccctacgctatcagcccttccaccgactgctccagggtgcactgagtggatcaacgtcaagtgatgccacaataataatggagagatggatccatcgatctgcggctctcattttgcggttgctatctgcaatattcgtcgtcgtcagagagatcgagctagaaatgcatgttactcctccgttctgttactatctgcttacctgttgcttcgtcgcggtttgatagtcgtcgttatagctagtgtaagagtgtgagggttgattttgatctgtctcctttacgggacgaggggcagacgaatcatgcatgaatcttagaggacctgcttgcattgtaccttactgcatgcatgcatgcttcaatatatatccatcaaatgaagagtctttt

SEQ ID NO: 27014 - DNA, 2873 bp, Oryza sativa
  ref <308>: DATABASE ACCESSION NUMBER: AK102456
  ref <309>: DATABASE ENTRY DATE: 2002-08-28
gggctttctgcctcgctctttattgggtgtgctcgctgctcgtctttgtgccgcagctcagcctcagtgcaacccactcgctctctctcactctcgccgcggcttaaagcgcacacggcacggcgggggcggcggccacttccacatcgccattaatgagcctggagcaagccccataggccgtagtagtagtgctactagcttcatcagctccacctcgctcggaagagatcgtctcgtcgagcgaggccctttttgctcccccaatggattcttgccgcagctagtgtttcttggcgattcttgcggcgctttgggagctgaccggtgaagagctctctttgaggcgatgggttgggcgtggcggagggagcagtgggcggttgcatggctgtccgtggcggttcttggggcggcgctggtgggcgccgctggcgcgttcgaggagggcacggcggtgtacattgtgaccatgaagcaggcgccggtgttccacaagcgcctcgacctggagaggtttgggagcagcagagtcgccggcggcggcggcggcggcgggggggacaccccgtccactagcatcctcatgaagccaaggcatggtccagcccaacctatgaattatggctcgtacttagttcgtcttcaaaattcactcttgaagagaacactgagaggagagcgctatataaagctctacagctaccgctatctgattaatggttttgctgttgtcatcactcctcagcaggcagagaggctatctatgacgaaagaagtggcaaatgtaatgttggacttctcagttaggacggcaacaactcatacccctgaattccttggtttgccacaaggagcatgggttcaagagggtggcccacaatgtgctggtcagggtgttgttgttggcctcatcgacacaggaatcgatccaactcatcccagcttcgcagacgacttgataactgacagttatcctgttcctgctcattactctggcatttgcgaggttacaaatgattttccatctggatcctgcaacagaaaacttgtgggagctaggcattttgcagcctctgcaataaccaggggagtgttcaatgcctctcaagatcatgcttcaccttctgatagtgatggtcatgggacccatacagcatccatagcagctggtaatcatggaattcctgttgttgtggctgggcatcattttgggaatgcaagtggaatggctcctcgtgcacacattgctgtctataaagctctgtacaaaagctttggagggtttgctgctgatgtagtagctgcaatagatcaggcagctgaagataatgttgatataatcagcttatccattaccccaaatagaaggcctcctggactagccaccttctttaatccaattgacatggctcttctttcagctgtaaaagctggcatatttgtcgtgcaagctgcaggaaatacaggtccttcccccaagagcatgtcatcatacagtccatggatttttactgtaggagcatctgcccatgacagggaatacaacaactatgttgtacttggcaacaatctgaccattacaggagttggccttgctcctggaacagatggtgattccatgttcactctagttgctgcacctcatgcactgaaaaacaatgtagccagtcctactgaaatgtccctaggggagtgccaagattcaagccaccttgatgaagatctgataaggggaaagatactggtctgcagctattccatacgatttgtacttggcctgtcgtctgtgaagcaagctttagatactgcaaagaatgtcagtgctgcaggagttatattctatctggatccatttgtcattggattccagctgaatccaactccaatggatatgcctggacttataataccatcatctgatgactctaaggtatttctaaattattacaatgagtcccttgtgagagatgagacctcaaacaaaatcgtcagctttggtgcaattgcaaaaatactaggaggccaaaatccaaattatggtatttctgccccaaaagtaatgttttattctgccaggggtcctgatcctgaggacaactcactggccaatgctgatatcctgaagccaaatctgatagcacctggcagttccatttggggtgcttggagttctcttggattggactctgctgaatttgctggtgaaagttttgcaataatttccggtacaagtatggctgcaccacacgttgctgggcttgctgctctagtcaagcagaagttcccttattttagccctgcagctataggttctgcattatcgactactacaagtctcagtgacagggaggggaatccaatcatggcacagagaacatacggcaatccaaattcaactcaatctccagctacaccttttgacatgggaaatggatttgtcaatgctactgctgctttggatcctgggctcatatttgattccagttacgacgacttcttctcctttctatgtgggttcggtatatcgactccagagcatgtgaagcagattgcgggatggggcgcagatggtgtgatcattgggagcgctatggtgaggcaattgggcgaagctgcttcacccgaagaaggattgaagaagctagaagagctagccaagagcctgaaggctgcattgccctgaaacaatcagttccatgaggaaagaaaatacagtccatttttttgtagtcaggtttgaagcatagtattgggagcatgacttttgctattggggttttcggggttactgttgtctgttgaaaataattaagtcattgtgttagttgcttgaacgaataaatcaaggtaagaatgatactacatgttgc

SEQ ID NO: 27015 - DNA, 1773 bp, Oryza sativa
  ref <308>: DATABASE ACCESSION NUMBER: AK102457
  ref <309>: DATABASE ENTRY DATE: 2002-08-28
gcgtaggaggagatgtgagggttctgaagccactgatgcacctgctgcttggactggtcatgtactgggtcgccgaggagatgacggtgcctgtgctcgtcgacgtcaccacccgagcactctgccccggcgccgacatcgcctgcccggaggccatctacctcaccggcctccatcaaacggtgggagggattttcagggctgtaggatacactttgatggggcagctagctgatgaatatggccggaagcctctcctcctactcactgcctcaacttccatcatcccttatggtgttcttgcctgcaacaaatccaagattgctgtgtatatcttccttattctgcgtactttgtcattcatgataggccaaggaaccataaccagcctcgcagtgacatacacggccgatgtggttgatccatcaaagagagcatttgcatttggctgcataactgggatactatctgcttcgcatgctctgggcaatggcttctctaggtttctgcccgagcggtggattttccaggtctcggttgctttgttgatctcttctgtcatctacatgaaaatatctctggttgagacacttcaaagagcttcttctggttcgtttgagcatatgtcgttctcatctttggttgtcaggttaccactgcggcgctgggagtctatcaaggagaatattaacataatcaggagaagtgaaacacttagcagaatcacatacatttccttcttctacgagttgggcatgatcggcattagtgatgtcctaatgtactatctgaagtcagtatttggttttgacaagaaccagttctctgaaattcttatggtagtaggcattggttcaatcttttcgcagattttggtactccctgttattatcaatacagttggtgagaagggagtcctatgcgttgggatacttgcatctgttgcctacgctgtcctgtatggtttggcatggagttactgggttccttatcttacttcctcattgggtgtcatctatgttctggtcaaaccagctacttatgcaatcatctctggggaagtggactcatctgaccagggaaaggcacaaggattcatttcaactgtgaaatccacagctgtactgttggcaccattgttcatgagccccctgacctcttacttcatttcagaacaagcccccttcaactgcaaaggtttcagtttcctcgttgccggtttcttcttggcaatatctttgggcatttctttcatgcttaagccagaagccaaatgcacaagagttgcagttccagatcagcttgatcatgaagcagtgcaagcaccactattagctcaaccatgaacaaattggcaaggaactgaactttgtacctgtacataccattctacctggcaaacatctgaagtttgaagattgcattggttgtaacgccacaatcttgaaactcatgttgccaaagctgatattgggtttatagcaaagatattaattgtacatatagcggatgttaatgttatgtctagtactaattagttacgttttagattcaatagtagccaagtgaagtttgtgtaagaaggtaaagttgcaggtaactttatctccgacttaagttaggtgactttaatatcactggcatatgggtccacagcaatggcacggtattacaaaagtgtgcctgcactttatagttgcaactgactgaaccaaggctgttctcgtgaaattaatatatatagcacttgataatataagtacattttatgag

SEQ ID NO: 27016 - DNA, 1678 bp, Oryza sativa
  ref <308>: DATABASE ACCESSION NUMBER: AK102458
  ref <309>: DATABASE ENTRY DATE: 2002-08-28
ggtcgtccacggtgcgccgccaccccaagcaaagcagtggcggtggcggcggcgcggtgccgagcgcggccggcgcctcggcgggtgggggcgggcgccgctaccggcggtacggcgcacgtcggcgggcgagaaagcgccgctggagtgctgctacttacttggctgcggcatggcggcgggaccttcgctccgtcgcggcggccggcggttagccgctcggctaatccaaatccggccgggcaaagcgagcacattctccactgccttaggagcaaatttcttcactgcgtccccgacagtcaggaatatcttgtcttcaccgatgagatccgtgaatttcgctgatcggagcttcaggatcacagctggccccggattggctagaatcagctgaggaatgccaggaaggatgctccgatcaatatcgtctgccagttccactgcagcagcaaccaagctagcatcagttgtacccaatactggtttccatcaaagaatgatgaagaagcaataagttcttaaaggaatgatattattttgtcctaccccatggtgaacatttccccagactgatttcatgaccgagatgatgtcagtcttcttggtgaagtttgcaattccaaggaagcctttaagctgctgaagggcaatggtgatggccgctcccgccatgaatccaacgatggcagcatgggacaagaactctatgataaaccctagcctgcagcagagtacaatctcactctatggtagccactcacctgaggaatccgagcgctgcctgggtgaccccagcgaagaacgttgcagtgaaggccagccgggtgtactcttcctgattcttcttgggatcaaactcattctggaggagagtgccaagcagcagcgaaacgacggccactggaccaatggctatatccctggaacttcccatcatcgcgtatatcaaaggcggtacgaagctgctgtctgaaaaatcagcagatttccgttagaccactggctggactatcactcgagcacaccctatacaaatactagagctgtgctattcaggtcgctgctgtgcgtgcaagatggtgtttgatcgtcaggcacaaacctggggtatgcaaaggctggcaatgttgagggagacgaggtcgcccctgaacttgcggaaggtgtagtgccggccccagtccagcaccggaagaagttttgcaggctgatcaacaccttctttgacatcggctggtccttgtactgccgcaacgggtcgtcggcgaagaacgtctccttcacggcgtcggtgaactcgtcgatgagcttcttcttcggtgggaactcgaccttgtggccgtgatgatgatgatgatggccgccgtccatgtggctgtgcgatgacgtccggctggcgatgtcggcgtcgatggcctcgcccccgtcggacacggctcgcggcattgccggcgttattcaccggcaaggtgctgaaggcgaacctatctgcacatgaagcgcagtactgaagcagtactgccaaagcacctgcatgcatcaacgcatgcatggtcgacagtgaagaaaaaaaaaacttttgcagtacggagaaccaaaatatctgaaacatttgcatttacaacgcagggaagaaatctatatgtatgtactagtactactaacaagaagcagc

SEQ ID NO: 27017 - DNA, 1720 bp, Oryza sativa
  ref <308>: DATABASE ACCESSION NUMBER: AK102459
  ref <309>: DATABASE ENTRY DATE: 2002-08-28
gtccgccgcgcgctttcctcccttgctcccaccaccacacctgtcctccttcccctccatcgtcgtctccctcctcttgtcccactccgactccgacatggcggccgcgaagcacttcacctacgtcatcctcggcggaggcgtcgccgcgggatacgctgcgcgggagttcgccaagcagggcgtcaagcccggggaactcgccatcatctccaaggaatcggtggctccctacgagcgtcctgctctcagcaagggatacctctttcctcagaatgcagccagacttccgggattccacacctgcgtcgggagcggcggagagaggctcttgcctgaatggtattccgagaaaggtatcgagctgatcctgagcaccgaaattgtcaaggctgatcttgcctccaagacattgaccagttcagctgatgcaacctttacctatgacactttgctcattgccactggctcctcggtcataaagctcactgactttggtgttcaaggagcagaggccaacgacatattgtacctgagggatattgaggacgctgacaagttggtcgcggctatgcaagccaagaaggatggaaaggctgtgattgtcggaggtggctacataggacttgagcttagcgcagccttgaagaccaacaattttgatgtcactatggtgtaccctgaaccttggtgcatgccccgtctcttcacttctggccttgctgctttctacgagggatactacgctaacaaaggaatccatatcataaagggaaccgtggctgttggttttgatgctgatgccaatggagatgttactgcggtgaagctaaagaatggaaacgtgctggaagctgacattgttattgtcggtgtcggtggcaggccactgactcatctcttcaagggtcaagttgcagaggagaagggtggaatcaagactgatgcattcttcgaaacgagcgttcctggtgtatacgccattgccgacgtggccgccttcccgatgaagctatacaatgagattaggagagtagagcatgttgaccatgctcgcaaatcagccgagcaggccgtgaaggcgatcaaggcgaaggaggccggcgagtcggtgccggagtacgactacctgccctacttctactcccggtcgttcgacctctcgtggcagttctacggcgacaacgtcggcgaggatgtgctgttcggcgacaacgaccccacggcggccaagcccaagttcggctcgtactggatcaaggacggcaaggtcgtcggcgtcttcctcgagggcggctcggcggaggagaatcaggtcattgccaaggtcgccagagctcagccgccggtggccgacgtcgaggctctcaagaaggaaggactcgacttcgctgccaaagtctgaacctctctatgcacacgcatttcattttgtggacgctgtgatgctgccatcttttcgattctgagcttcgtagtgattttgttagctccgatcctatatatggaggatttgttttgttctcattgtgaatttgtgatgtagtcactgtggcgaggtcccaataatgtctgtactctgtagcttctgtgattggttgttttctttttaaaaaaacctgtgtatcgtctgtgtttctttttttttatcacggattaggctgttctttgctagttacttaagaagatttgacaaatgaaatcagaacagttttaggcc

SEQ ID NO: 27018 - DNA, 2100 bp, Oryza sativa
  ref <308>: DATABASE ACCESSION NUMBER: AK102460
  ref <309>: DATABASE ENTRY DATE: 2002-08-28
gctaaaatcccctccccccaacccgccgccatgtcctccccgccgccggccgccgccgcctccccctcctccgagctaaccaagtccaagaagaagaagatcaagtccaaggacgccgccaccgccgccgccgtcgacccgccgtccctcgccgaggcggaggcgaagaccgacggctacctcatcaagccgcagtcgctggtcccctccctcgacacctcgacatggccgctcctcctcaagaactacgaccgcctcaacgtccgcaccggccactacaccccgctcccctccggccactcgccgctcaagcgccccatcgccgagtacctccgctacggcgtcatcaacctcgacaagccctccaacccctcctcgcacgaggtcgtcgcctggatcaagcgcctcctccgcgtcgacaagaccggccacagcggcacgctcgaccccaaggtcaccggcaacctcatcgtctgcgtcgaccgcgccacccgcctcgtcaagtcgcagcagggcgccggcaaggagtacgtctgcgtcgcgcgcttccacgccgcagtccccgacaccgcccgcgtcgcccgcgcgctcgaggctctcaccggcgccgtgttccagcggcccccgctcatctccgccgtcaagcgccagctcagggtgaggaccatctacgagagcaagctgctcgagcacgacgccgaccggcacctcgccgtgttctggatctcctgcgaggccgggacctatgtcaggacgctctgcgtccaccttggcctgctgctcggcgtcggcgcgcatatgcaggagctgcgccgcgtgcgatcggggatcctcggggagcaggataacatggtcacgatgcacgatgtcatggacgcgaggtgggcgatggacaactacaacgatgagacttacttgcggcgcatcgtgatgcctctcgaggtattgcttactagctacaagaggcttgttgttaaggactctgctgtcaatgctatatgctatggtgctaagcttatgatacccgggttgctccggtttgaaaatgatatcgatgtcggggaggaggtggttctcatgaccactaaaggagaggccattgctattggtattgccgagatgaccaccgctgttatggcgacttgtgaccatggtgcagtcgcaaagattaagagggtggtgatggatagagacacgtatccgaggaagtgggggcttggtccggttgcgctcaagaagaaaaagatggtcgcagagggtttactggataagcatgggaagccaaatgagaagaccccagctgagtggatccggaatgtggcacttcctactggtggtgatgcgatgatcgctagcattgcagctgctcctgaagaggccaaggtgaaggcggaacaggatgtggttgcgactgaagaggtcaaggagaagaaaaagaagaagaagcacaaggatgaggaggatgctgccgacgaaggccgcaagaggaagattgaggatgatgacgcgtctgcttctgtgcctgtaaagaagatcaaggttgaagagagtgctgaggaggtagaaggggagaagagtgagaagaagaagaagaagaagaaagacaagggtgaacaaggatcaggtgatgcagaggtgaaggaagagaaggctgatatatctgatggggagaaggttggcagtgagaagaaaaagaaaaagaagaagagcaaggaaggaggtgatgttgtggatccagagagcgcagccaatggagatggcgtggaagctgagaaaagcgaaaagaaaaaggagaagaaaaagaagaagagtcgagatacagaggaggcataataggtagaattatagtacgcattggctgaatgtatccttttgctgcggttgtagggagtttgagatgcctatctttccttgctgtgatcccttttcaaccattaatggtttcaaaggcctaatgcccatccttgaattactaccattttactgctgtgaagtactgtggtaagtagcgatatttccattgaacttgttgaacaatgagccatgtattgctgttcctgttttcagttaatgcaatgagttttgcttacacctcacagt

SEQ ID NO: 27019 - DNA, 2454 bp, Oryza sativa
  ref <308>: DATABASE ACCESSION NUMBER: AK102461
  ref <309>: DATABASE ENTRY DATE: 2002-08-28
gagctttcacaaggcagcgtgaggaggaggaggaggggagctcagctcacgcagaggcgacgacgacgcgcacgcgcaccgccctcctccctccccgcgatctcgccgtaggggatctcgtcggcggcgaggaagcaaaggccgagggggcagcggctggggaggggaggggaggggagagcggcattggttggagcttggaggaagttgggtgtgtgtgtctgggggtgagggtgagggatcggatcgaagcttctggaaggttccgggcgcggatccggctcggtgggttgctcgctcgtggctggaggtagcggcgcgctgtttgagcggggggagcaactctgaggtttggttttcctgagatggaggacctgctgggcgcggaggtcggcaagaacgactatgactggcttcttactccccctgggacaccccgttgtcctgtactggaggttgctgagaaaacaccatccccaaatatattacctaagcgcactgccactagatcatcgtcaaccaccagagcgtcgaggctttcagtatctcaaacagagaatggtcattctacagctcccactagaccagctagaagtaactctgtcactcgcccttctattcagtccactctcatgtctagctccaacaggacagcagttctcaatacaagcatttcctccgtcagctcaagacctacaaccccaagtaggcgaagcagcactgttgttgcaccaaagcaatcaattgcagcttcacgccctgttccagcaaggtcctccactcctgttaaaactcgtccatctacaccaaccaaaactcgcccatctactcctgtgagaactcgtcaaacagccaattctacaagcgactcagctgctgccaggaccacatccgctcaaaattcaaggccatcaacgccaacctctagatcacgtgctatgcccaattcatcttctggtgcaattcctgcaatgagccgcccaggtgcatctacaatttctgcaacaagtcgctcaaatgcatctacaatatctgcaacaagccgtcctggctcatcctcaagtaatgtacctgggataagccgtgccacctcattgtcttcaagtacagttccttcaatgagccgctccagctcacgttcatccacacctacacgccagcctgcaatgcgctcatcggcccctgctgttggtcgctcgccttctgttgggcggagttctagcatcagtagcttgacatcatctatcaatcgacctgcagcaaatggtggccggaactcagcaccttcatcggctccgtcatctcgtccaagttcccctggtccacgacctcgagctccagttcgtccacttgatatccctgattttccaaatgaaacaccaccaaatcttaggacaaaactgcctgaacggccactatctgctggtagatcacggccaggcatggctttaggagtaagatcaacctcaaatactgaaccatcagctgcctcagctcctgtaaagaaggtgtctgtgcctgctatgagtcgaagtaaattttctgatgcaccatccaggacacctactctcacaaatggacgccaaaacagacagagtgagaggtctactgtggatagtcaacctagtaaagtctccaggcctgccacagggacagataatggatttgggatgacgatgtcaaagaagtcacttgacatggcaatcaggcacatggacattcggcagaacttgggtggaatccgtggcgcatccctcttcccgcatagcatccgctcaaccgccggcaagggcaggccagctcgaatgtcagatcctgggcacaccatctcaaacggagaccaccggcactacgccgacaatggcagcaccaacgggcacttctccggggactccaatggggctctctcgcgcaacggtggcagctcgaccgactcacccgaccggggaagcatcggaggcaaggagacgctgagcgagctggacatgtacggcagctcgcgctacgaggcgatgctgctgagggaggacgtgaggaacacgagctggctgcacggcttcgacgacagcaagcccgaccagagcccactgttcgaccaccggttcgagccgctcccagagcccttcagcccgctatgacgaatgcacggttgccgctgcctgtaaatctgctgttccatggtctgctttgcaagatgtgtatgccattccatatgttttctgtttggttctgtttcaggttctacacgctcttcccttgggtacaatactctgctggtaatattttactttaccgatataagacggagagattgtggggtgtggctcatttaatttatccctggagtagggattggtttccacgtactgttgtactgagaatccacaagagtataggaattgataaaaacagtaaagatttgtaagttattgtaatgccattggtttctcatgg

SEQ ID NO: 27020 - DNA, 1874 bp, Oryza sativa
  ref <308>: DATABASE ACCESSION NUMBER: AK102462
  ref <309>: DATABASE ENTRY DATE: 2002-08-28
gattcccatttcctaaaaaaaaaatccccaaatctccacatgattcctccgtaattcggcgcgccctctcatggcgtccctcgccgaattccccctcccggtgatctctccgacttgctggagctatcggtagcgggaggaatcaatcaatcaatcccccacgctgggtggttcttgagcaagaacggctcgtcgccgtgccgatcgatcacgtcggccgccggggaaatcctctggggatttgtgggtggttttgggctaaagattccgtttctttcgagcccttttggtctcgggtggatccgcttagctttggttcttttgctggttggggggcatggcggcggagtcgtcggctgctgctgctgcgggcgggggcgagaggaggggcccgatggatctgaacctgtatctcggcctccctccgctgccgccgcctccgggaaggctggatgtcgccgccgattacccgtcgctgctgctgaactccgccgccacggtggcgaacgagcaaaggggctcggtggtggtggcggcaccgcctccggcggcggcggcgtactcgccgtcgaacgcgctgtcagcgccggagcaggtgctggtagatcctgttgcagcgtggcttgttgatcccggtgagcagcagccggtgccgccgctcgagacgccatcgtacatggccagggcctcgtcgacgctgccacagatttttgcttgtgcagcgttggaaatgcttgtgcagaccggtggagcaatcccacctactggtcttataaggggagcagagattgctgctgcaagccgccctatgacgccggagaatcggctgcggaggttgatccaggtgagcgatcaacacggcgtcgggaatgggagggcggggactgggccagtgagccgcagccgacgggcgaatagcccggaagccgataatctggcgcgggccatccagaggtctcataattctcttgaggcatcaaggaggcagatgcttgatggtgatggcagtgatgccaccaagaaggatgacggttgcggatgcaacggcagcttcgaatgcaatatctgctttgaatcagctaaagatcctgtggttaccccttgtggccacctcttctgctggccttgcatataccagtggcttcatggacattcagagcactctgattgccctgtctgcaagggcgaggtgctcgaagtaaacgtcacaccgatttatggaagaggaggtggcgaggagaactcctccagaaatgatatccaaatccctcccaggccgagtgcgcagaggaccgagagcttgaggcagcagctgcaaaggccagacacaagaggaggcattgcaaacatggtgaggcggttgatgcaaaaccaagatatagtggtaggccaggcggcttcatctgcaccccggccaaggggtaggggtcgaaggcaggcaagacaagatgcgccttctgcaccagcaacacagcagcaggtggtcaatgctgatgctgggagtggcaatcaggctcctttgccacctcctgatgctaatggtgctgcaccggctgctgctgtcgctccccaacagtcatcatctgtggagcaagcgtcgacttctagcaccgtgggtgttatagcgggagggccagcacaaggtaggaggtcaagagtttctgaatccacccctgcaaggaggacaaggaggaggcatcagtaggtaacttagagttgttactgtaatagaacatatacaccatgtttccttgtaaccttgatcatatttaggctcatcccaaaattatgtagaattgtggatgaaatcttttcttttatttaccttgtatccaccattttaccttaggcaaaggaataaagatttcgatttc

SEQ ID NO: 27021 - DNA, 1591 bp, Oryza sativa
  ref <308>: DATABASE ACCESSION NUMBER: AK102463
  ref <309>: DATABASE ENTRY DATE: 2002-08-28
gatccgcccgaccgcccctaccgcaacctgtagccgctgatggcttcgacgccggcggccggccccaacggcgtggcgtcgccggcggggcaggctccttcgagctcgctccccggatttcacgaggcccctcctagcgtgctcatatcgagaccttcatggatcgtccgcagcgaggtgagctcaatccttccctgcacctctccccttttgttctcgtgcctgcgattcgtcgaacacttcgtagacaggaagcgtagttgaatcgaccggtaggtttttcctcggcagcgggacatggagaggaggtgtggggatgggttagggtagcgggtaagattgtgctgcctgcagcagaagctagcgcgatgggaagaatcatgaggaatcggcaattgagtaccaaaaatgaggaaattaggccatggttggtagaaattgtttcggcattacatttacggaattgtttttttctgaccaagtcgccggaggggggcgttccccacctgaatatatttcaaaccatcttacagaatgttaaggtcgtcatgtgtatcagaactttgtagcaattgattccacttcttttttattgaatacctgaagcttagcaccatgcaaatatgcaatccactgaacactttataagcaaaatttacttgccattcacttcatgacttagatcttgttccaacgtttttacagccagcaatgcttactgtgtgtttgctctagcctgtagtgatttcttaactccaaacataccaaggttggccttgcagatttatgtgttttttgatgtagcggtcgggttatccattatctgaaaaaaattgtgatagtacatgagatttatcatagattcattgcgagggaaacatggcaggggaaaaggggaatggggttgagaaagggcatgctattttcctttctgtgccaactgataccctctctgtttgtcactgagttaggagtccttcaacttgccagacagatggaacaagaccatctcagaccatattgtacattaagaattgtcatttgttaacttttgacatgtttatacaccaatcctgatatcttcactgcaagtatgatgcagtcaaatattaggagggagagaccaaaaaggcctgatcctccatgcaccatctgcagaggcacaggcaaaatagattgccgcaactgttttggtcgagggagaaccaatcatgccgatcttgtcatgctcccgaagggcgaatggccacaatggtgccgtatatgtggtggtagcgggttagattactgccaccgttgccatggaaccggtgaatttcgagaacccatgggctttcacttcgctaccatccacaggaaatgaacttcacctagacagtgttgtatggttgacagtccgacagatctgtgtagagaaatcataattacttcatgatatacagttcaaagagttgaacactactagtttagttcgtgaaaaactccattttagtttatcgcaatgctcgtgttatggaatccggactgctcgcaatgacggtcatcaactctttgatataaactgtcgggcattgtcccgagctatttctgc

SEQ ID NO: 27022 - DNA, 2086 bp, Oryza sativa
  ref <308>: DATABASE ACCESSION NUMBER: AK102464
  ref <309>: DATABASE ENTRY DATE: 2002-08-28
gactggtgctcattgccaagggtgtaggcagcaacagggatcaacgtgcggtgcagctccttgcgctgtgctgcggcctgctgctgtgctgcggctcattgtgccagggccgcatgtcgccggggatgggatggggaggaggcaggatggtgtgcttggaagcgagcgttggcgtggtggtcagggcgtaccaggccagcgacggggaagatgcgcgcacgacgatgccaatgccgcctccggcggcgaggacggagcgactgatgcggtccgttccgagccctggtgttgggcactagctaggtacgtactccctcttcctctaaatatttaacgccgttgacttttcaaaacatatttgaccgttcgtcttattaaaaaacttttgtgaaatatgtaaaactatatatatacataaaaatatatttaacaataaatcaaataataggaaaagaattaataattacttaaaaaaatattttgaataagacgaacggtcaaacattttaaaaaaagtcaacgatgtcaaacattttgggatggagggagtaggtcgcttgatcagcttctccggactccggttgccaatcaaaatgttaattaactagccacgttatcgcgctttgcacgactttaatcctatttaagagcttttctatacggtctattagtttagctaagtttttaagaaggttttaacgtagtaagttattttttataacaaaatagtattgatttccctagccaattatagatttaactaaattgtactatatatttataagagaaataactagaagtctcatgtttcttctctctttatcccctcttttttatcctgtgtctagatgaggtactagaaacctcatgaaatttccataagtttaactcatttgtgggttttttatactgtacccttttaatacaatggtcattgtttatccaaatactttatctgacggctaatatatttgtgatgatgtggtgcgttctcgtgtaagtaaacttgctgctttcactataattaattaactagccacatagtcgcactttgcacgactttaatcctatttaagaacttttctatatggtctattagtttagctaagcttttaagaaggttttaacatattaagttatttttttaacaaagtagtattgattttcctagccaattatagatttaactaagttgtactatatgtttataagagaaatcactagaagtctcatgtttcttctctctttatcccctcttttttatcctgtgtctagatgagatactagaaacctcaagaaatttccatatgtttagctcatttgtgggtttttttaggatttttacggtacattgtactgtaagtatatactagcaatatataaaagggtatgtttggtatttgttaaacagctagaaagggctatttagtcatttgaagttcagattaatttatttcaatcgggagtacttgtaacgggatgatttgccagttctattccaacatggagaggcggcgagttgggcttgcctcctactgcctgcccatccctggctgtgcgccttgcccctggtctgctgccgccgcccggatgccctacactgctgctgcttcttaggtgcgcgggaatgacagaagaggaggaaaggaggacagtaaattgaatcaatcccggtttgcggtggcccggggcgcggcgtgctcacggtggctggcggcggtagcccatgtgatgaaggaaggggaatggagcggatttctctcaagccgccgtttctttcgaacgacaaaccgactggatttctctaggtcgggatctgaccaagaaacaaaacgcgaaaatacaaaaatacccccacgcagaaagatgaaaagacaaatatacccttttcgaatttatactgcaaagctaaccgggtgaaatatcagatacatctttaccgttagatcgtttaaactgctagtatatacttacagtatagtttaccgtagaagtgctctctttttttcggggcatttgtgggttttttatactgtacccttttaatacaatggtcattgtttatccaaatcctttatttgacggc

SEQ ID NO: 27023 - DNA, 2219 bp, Oryza sativa
  ref <308>: DATABASE ACCESSION NUMBER: AK102465
  ref <309>: DATABASE ENTRY DATE: 2002-08-28
ggtctccacctcgaccttccccccacttcgcttcgcgtgctcggatccgaatccaaaccctcctccaagccctaatccaatccacccaacggtctcctcctcctcccctctccgcttcccccccgaaaccctaaacccccacctcctccccccacccgcggtttcccgcccgatccccaccgccgcgcgctcaatccgggttcgaattcgaatcccagctcgaggcgcccgctcgattcgacccccgcggctactgctgctgctgctgcctcgaggcctccagctcagccggcttggcgcggatggtggcgtccccggcggcgtcgagacctaggccgagccctagctccggatctgggaggaggaaccccgccacgcccgcgaggtgttcgacggaatgagcggtcgggttgggggtggaggaggagaggaggcggcggaagcatgagcgggggcggagggggaggaggcgggagcgggagcgggagtgggagccgggacgagtacggtagggcggtggcgcgggcggccgtggcgcaggcgctggaggcggccgggttcgactgcgcgcaccgctcggcggtggacgcgctcgtcgacgtcatcctccgctacgtcgtgcacctcggcaggaccgcggcgttcaacgccaacctcgccggccgcgtcctcgccaacgagtacgacatcatacaggcgctcgaggagatcggcaccgatttcgatgggttcgtcggcgcggccacctccgaccgctgccttgtcggctcgggcgtcgtcagggagctgattgattacgttgagtccaagcccgaggtgccgttcgtgcggcctctgcctagcttcccggtgccgcgcgtggagccgcagccagctcaaagcttcgcgatggccgggaaggagtctgggatgaagcatgtgccggaatggctcccggtgttcccggatccacacacgtacataaggacagaggtttggagcgaagaggaggccaaggccagggtggacaaggttgagcaggtgcggcagcggaggaaggctgagaagtcactgctcagcttgcagcggcggttggcacttgcaggtgctgatggatttaggccagcggttacagagaatactgcggaaaaggggaaggagatacaggtggctgggagcaagagaaatccattccttgagcctgcattgccacctggggagaaggaggtgtctgatgttgctatgcaaccacagaggaggaaaatctctgtcctcgacgcatttgcaccagcgattcaggctgcaaacatgatggacattgatactgggccaggttgggacaacaatcagaatcagaagagcattgttcccaaagagagggcaccggtgcacctcaagattggaattgataagaagccgttatcagctgtgttgaattcaaaacccctggatctgagggaggatccgtctttcttgaaggaggaagtaaaggatgagcggaagcggagggcgggcatgatactaagggcatcaatggagaacccacaggagcttccgcagctttaatgctgcataatgttgatcttgggataagcagagctatcaacattgtacatgttttctttttctggatcttcaatgcgcgttatctcaagggtggtatgacgcgatcctgttccaaagaacacccaacctgcacccaaccagacaactgtaagctggatttgttgtaactatgaccaccatgctgtttccctctatggttgattcaaaaggagctgattttggaaggtcgtgcttcttagccccctcaaagccatggccagtcttcatccaaagaatgacgctcctgctccccttttggtaatcaatcctctttcccgtgcctactcgtagtagaaagaacgactgatgtacaaaacctgactatgctgactaggatggatcgacattttacttagcgagttcctccctcaaggcagtttcctgatgaaatgtgtagaagtcagattgagatggtcgatgctgaagcgagtactgattgagattttgtagtttgagaatcgtttatttcccatttgcttgccatatgatgtgtcctcaatgtttacacctgacgacgttaaactgggctgaaatcagttaagttagctcagtcacacgttgaatggcccgttacttctaatgggctgataatttgatcgaggctgtcatgtttaatgggccatgataaatttgac

SEQ ID NO: 27024 - DNA, 1375 bp, Oryza sativa
  ref <308>: DATABASE ACCESSION NUMBER: AK102466
  ref <309>: DATABASE ENTRY DATE: 2002-08-28
gatctagtcatctgttccaaaccagtggaaagctagggtttcgccgactcgcgagtggagggcgctgctcgtcgccaggctcgtcgcgccgtcctcgccggcgggaaggccagtcctccgtcagcatcctctcttccgttggtcatcctccctctctttcgccagtcgccatcgctctcttccactggttcgctctctccgtcaagccgtttggttccgccggctctctctgccacgcccctctctttcgtcgactctctccgttgagctctctgagcaccttcacttaactggggccgtattgccaattcaatgatgggatcggcacaagattgggcatttggatggcagccgtggacgggaccggcactggaggacctgctcccacaactctcccatgaggagcaactacgattgcacaaccacttgcgtgagcacgagcgtatcctcaagtggcacaacaagaattctcctccaatatcttctctgcactcagaaggggagcgtgacttcttcatcattatccatgtccgctacgctctccaccattacaatgccaaacacccagatgaggagtttgatgctgtgaagcctctgatggaatccagtgtacgtttcaggggccaggtgtggttccacatcaacttctgggctcgctcccgcaagagcaaaaagatcaagcgcttctttgctgaggtgcactacaagcctcccagcagcagcagctctgtctgctcttacctgccatttccagtcccaggagctgagaggccacccagcagcagctccgtctcctcggatctgctacttccactcccaattcctgtcgttgaagcatgcaccatcattgaagagcctcttgggcagtacaggaagagctgcgcgttttgtcgtggtcacttagacattttacaccccatgggtcgtaaatttgtttgtggaaacgacaaggaccggtttgagcaacaactcttgccgtgcgggtctatagggcttgagatgccattcacttgccgcctgggtccggcctctgtcaacagtagtcatggggaaaaagaagactagggggaataatgaagtggccccttggacgcccttttgctcgcatcgtttgtgccaatcaagtctggtgataacagaaattgaattgtcttgtactaccttcgtcctcaaaatataagaaaaactaaatgggacatatcctactattatgaacctggataaaaatgattctactcagattcaatagtttcttatattttcaacggagggagggagtaaaacgttagcagtcctcttatcttgtgcagaatatgattgtacactgttcagaactcttgagattcagaatattgtttgcctgagggaggttgat

SEQ ID NO: 27025 - DNA, 2634 bp, Oryza sativa
  ref <308>: DATABASE ACCESSION NUMBER: AK102467
  ref <309>: DATABASE ENTRY DATE: 2002-08-28
ggccgccaccgcaacattctcatttctctctctcgtccccgccccacccccacccaccacaccacacccccgtctccgcgcgaaaattcccacgccacgcgcgctggaagagagggaaggcttttcctccgttctccgcccacgcgccgtcatcgctgcccgcctttcttcctccgctttgtttgggccggagcggggggcgcaccggcgccggcgacgtctctcttccgaatcgggaggcgggagccagttcatggaatctggtggaattgatgctcaagtcagagcaatcgagcagcgcacaagattggagattcctatacgtgattgagattgcaaatgtggcgcctgttcaatgagttgtgggatgttctaggatctgggtttttctcatcgaggtttctttaatccagctcaaatctatttacacctcatccgtttgcaccgagatcatctctgtgtgtgtggtcaccgtgagattaggaggagatggacgaggaggattactcgtgggttcggcggacaaggttctcccactccgtcgtccgctccaagtccggcagggagcagttcggtgcattcgtcgagcagttcaaccgcggcgcggcacggaggcagagagggcccggcttcagggttcatgctccatggcctcaaccttggaaccgagggcgaggctcccagccaccacctcggcgaattcctccgttccgaggacgacaggatcgtcgaatgctcagccatcgtcggagacgaagccagcttcgtcgtcctcggacgccaaactggagcagcacgagaagagcctcaacttggaaccaaggacgaggctctcggccaccacctcggcgaattcctctgttccgtggacgacaggatcgtcgaatgcccagccgttgtcagagacaaagacagcttcgtcctcctcggacgccaaaccggagcagcaagagaagcctcgtgatcatcagccgtcgcaagaagtgtccaccaagcaggatgataaggctgaaaatgacacgaaggcaacagccacatctgggcctctcgagttctccttccatcctgatgagcaaaccttgaggctgcagagggcgtgttccagccctgttcctttcccaagcaacaagaacatgctggtggctgatgctgcagcacgtagctcatctctcaaggttgccggcgaggggccgaagccgaagccgaagcagagagcaaggtcccctcccctgcgtcgtgacgttcctgagctgttcaaggaggccaaatcgtcaagcaagaggttttccacaccgccaccgcgccggaagccttcgtctccaccggcgccgagtaggagccctcctcatgtctttgccacggcgagagcgcatggcaagccgaagcataagaaggattcctctgccaatggaagggcgaaggtcgccgcacttgaggtgctcgagaagtggaccgtcgatcgctcgcagctgctcatcgggcacaggttcgcctccggggcgcacagtcgcttgttccatggaatctacaaggagcagcctgtcgccgtgaagttcatcaggcaacctgaggatgaggaagatgcagagctggccgcgcagcttgaaaagcagttcaacacggaggtcaccacactgtcccgcctgaaccatcctaatgtcattaagctgattggagcatgcagtagcccacctgtcttttgtgtcatcaccgagtttctttctgggggttctttaagaacatttctgcacaagcaggagcacaaatctctacctttagagaagatcatttcaattggtttggatattgcaaatggcattggatatattcactcacaaggagttgttcatcgtgatgtgaaaccagagaacatcatatttgattcagaattttgtgcgaagattgttgattttggaatatcttgtgaagaagcagagtgtgaccctctggcgaatgacactgggactttcagatggatggctccagagatgatgaagcacaaaccttatggtcgaaaggttgatgtttacagctttggccttatcttatgggaaatgtttaccgggtcggtaccttatgaagacttgaatccattccaggcagcttttgctgtttttgataagaacgagaggccggtcatccccagtagctgccctgcgccactacggcttctaattgagcaatgttgggcctcgcaaccagataaaaggcctgaattctggcaaatagtacagatattggacaagtttaaggcggttctagataaagatggaacactggacaatatgccatgcttaaacttgcaaggaactcatgatcacaagaattggctagctcactgggtccagaagctcaaacatacccatcatgatctctctggacctccgccaccaaaattgatgtagttaatcctctcccttccaaactatgctaatcggataggcctcagaatgtaactgtcaattttttgctttgttatataggaaaaatatatgtgtttgtcttcgcgattttatagcacagtaaacatttgcttagctttgctagtgacattttcttctttttgtttcgtctgttacactgtttgatacaagtgacagaaatgtctctatgcaattccttgaaaattgtttc

SEQ ID NO: 27026 - DNA, 1697 bp, Oryza sativa
  ref <308>: DATABASE ACCESSION NUMBER: AK102468
  ref <309>: DATABASE ENTRY DATE: 2002-08-28
ggtccgcaagtctcgtgctctcactctccaccttcttcttcccagcttctctcgtctcggctcaaggctctagccatggacgccgccgcaatggaatccctcatcctggagctccacgccatcgaggccgtcaagttcggcgccttcgtgctcaagtccggcatcacctccccgatctacctcgacctccgcatgctcgtcgcccacccgcgcctcctctccaccgtcgcctccctcctcggctccctcccggcgacccgcccctacgacctcctctgcggcgtcccctacaccgcgctccccatcgcctccgtcctctccgccgccgcctccgtccccatgctcctccgccgctaccacgtcacgccgcacgccgccgccgaatgcctcgacgggtccttccgcgccggggacgccgtgctcatcgtcgaggacctcgtcaccacgggctcctccgtgctcgagaccgtcgcgccactccgcgaggtcgggctcgtcgtcgccgacgccgtcgtggtcatcgaccgcgagcagggcgggagggagaacctcgccgcgaacggggtcgcgctccactcgctcatgacgctcacggaggtgctcgccgtcctcgtgaagcgcgggaagctgggcgaggagaaggcccaggaggtgaagcgattcctcgacgcaaacaggaagatggctgtgccgggactgccggttaaaccgaaagtagttaggaaggcattttctgagagagctggattggcgacgaatccgatggggaggaagctgttcgagttgatggaggccaagcaaagcaacttgtgtgttgctgcagatgtcgggacagcaacagagctacttgatctcgccgataagattggtccagagatctgcatgttgaaaactcatgtggatatcttgtctgattttacaccggattttggccacaagctccgttcgattgctgagaggcacagctttttgatatttgaagaccgcaagtttgcagacattggaaacacagtaactatgcaatatgaaggaggaatattccgcatattagactgggctgatattgttaatgcacatatagtttctggacctggaattgtagaaggcttgaagctgaagggtctgccaaaaggaagagggttacttttgctttctgaaatgagttcagctggcaaccttgctcatggagattacactgctgcagccgtgaagattgctgagcaacattctgatattgtaattggatttatatcagtaaatcctgcatcttggtcagtgacgccgtcaagtccagcgttcatccatgctactcctggagttcagttggttgctgggggagactcgcttggtcaacagtacaacactccttactctgtcataaacgacagaggcagcgacataattatagtcggtcgtgggattataagggcgaacaatcctgctgagaccgcgagagagtaccgcatccaaggatggcatgcttaccaatccagcttatcatgagaatgctgtaaggtctctcccattctgtaacacgaatgtaagggcattcaggcgattgactgacgcaataaaagagagtatacgcatgctctatcatcgctgtggttcgtaattcacatgccctatattgacacgcactatcccagcaacaatttcgtttatgtgatggtaaataaataaagtttgctccgaac

SEQ ID NO: 27027 - DNA, 4260 bp, Oryza sativa
  ref <308>: DATABASE ACCESSION NUMBER: AK102469
  ref <309>: DATABASE ENTRY DATE: 2002-08-28
gcctaccatagtctagctagactctgacttgaggtgtttgtgtgtgagagtcatggaggccgccggcgccggggaagccgtggccatgacagcagcagccacgggtgctttgggtcctgtcatcgagaagctcggcgatttgcttcgcaatgagcacatggctgctctggagggaagccgcggagacattgagttcatcaaatctgaactcgagccgctgcgctccctcctcctgaggatatgggataaggaggatcgtcttgacgcggcgtgcaaggagtggatggcggaggcgaggatgctgtcctacgacatggaggacgccatcgacggcttcaggttcatgcttgctgtggaggctgctgctgcgacgagccctttcgagggaatgagaaatcaggtgcaggagctggtaaaccgttgctgcgagaagcagtggattacagaggccatcatcgacgcagacgcccctgcggctttgtcctcgtctccttccctgccccgcaagaatgcgtcggagctcgtggaggtggacgagaagaaagcggagctcatcaagttgctcaagcacaaagagagagtgtgcatacatggctctgctgggatgggcaagaccactcttgctggcctcgcgtaccaagcagtgagcgagcaattcgactgccgcaccttcgtgtcggtctgtccgagccaaagcatgatgcacgttctgactagcattaccagtgaagtcattgcgtctgctatcatcaaagcaatcagcgacaaacagaggtaggagttgatattctatcacttcgattcgatctactcctatacagtatgtgtatccgtaatcttatggagtagtatattttgttggcagagaattaacagtgaataataatactgcaccaacaactcaaggcaccggtgaagccgagcgaacaatgtctcatcgacagcatactggagctcctaacgtacaggagacaagtaacagacagcagcgcaccagttgcgggcaccggtatagcagacggcgccaaaactgacggttcagctcttcctaccaccgacactgcaactctcgctagcaccggtatagctgacacaaaaactgacggctcatctgtcgctcttgctggcactggtggtataggcgacgcaaagactgaaagcgcacctcatgctgcgactggtgcagacaacacaaagaaagctctcatcgacaggatatcaacgagattcgtcaccaacaaaaggaaactaaatgccagtgcacagcttgctggtgccggtgttgacgacgacaaacaatatctcgtcaacatcgtattgaaattgctaggagaaaaaagaaaagtaaccgactgtgcaccggttgctgggacgaccgatgtagaggatgatgaacaatatctcgtcgatatcttgtcacaattccttgctgaccaaaggtatcttgtcattgtggatgacatttggcattgccaacaatgggaagtcataaggaagtctcttgtaaagaatgaccggggcagtagaattatcatgacaactcgtgttaattcagtagttgaaaaatgttgcaaggacgaccatgctgttgtttgtgaagtaacggcgctttctatggatgctgcagtagctttatcggaaaagatattcaatgtccacactgctccatcagacaagaagagctgttcttctatagctaaactgtctggtcgtatgccgttagcaataatctgcatatcggccgcagtggcacagctgctatcaccgccatctgcaacaaatcggtttgatgtggccttgtgccaagcattaaaaggatttgcagaaattccctgcatgaaaccgttggttgagagtctagtccttggctaccactgccttcccccgcatctcaagacttgcttgctggaatgcagcatatataccccaaaccaaagattcgaaagggatgatctgatcaggatttggatggacgaagggtttgctgacgaggaacaagctcctggttactttgaggagcttgtcaaatgggggtatatttcgatttccccggctgaaggcagacgccatagccgggttgccgaatatgaaatcagcgccgtggtactagccttcctcagattccaggcagaagaacatggctttgttgcttccgcggggtatttctccaacatagagtccctgtgtggtcgacgacacagtaggatatctgtccagggaggcctgggttcatgggttgtttcaagattggatttctcatgcatgcgcacgctcgtggtttttggacgagcaagtttaataccattcgatcgtttgagccacctgcgagtgctgcatctagacgaggaggacacgagcttggagggtgcagcagatctatacaatttcccggatttgggcgacgatgatctggtggatatatgtgaactgcttttgctgaggtacgtgaaactaaagggctgcaaaatcaccatgctgcctccacaaattggacaactgaagcttctggagactctggacgtgagaggtacaggtgtcagggagctaccaagggagatcggggagctgcagcgactcaagactctgaatgtaagtaacacggcggtgacacaagtaccaaaggaaatcgggaagctgcacatgctcaagactctggacgtaagcgacacaaacgtgcgtgaactccccgcggaaataagagaactagaaaacctggagacgcttgacgtgagcaacaccatggttgcaaagttacccagggaaatcagagccctgcagctgttgaagacactgcacgtaagtggcatagatgtcacggaaacagagctagctgaggaaatcggacagctgcagcatctggagacacttgatgtcagtaacacaaaggttgcgaagctacccatggaaatttgaaacctgcagcagctcaagactctgaatattagcaacaccaatgttagagagctaccttgggaagctggccagcgttccaactccatcagtgtggttgccggcaacaaggattcccctaaagtggtgaacttgcttgagggcgcagtggacaattatggtcatatttgttcgcgggagaacatatccattaccctctttgatcgtttcggctccagctgggaacctatacctgtggcgagatttaagattcccggcaaacatatcagtctcccggattggctcaataaagaaactctcggcgacatttcatccttagaaatcaatctctggaaactgagggaggatgacctcaagattcttcaggagatgcccaagcttcaggttcttgcactacgggtcgaagttctccccagaacagccatcactggcgcagggttctcaaggctggagagcttctgtgttgattgccgtgtgccacgactgagcttccagagtgaagccatgccggtgttgaaacatcttcagttcaagttctatgctttccgggcaaccaaacaagagcctatgggcatcgtgcacctctcgagtctccgaagtgtcgatttcaggtgtgcctccgggtacacaacggatgctccgggcatccgtgagattatcaatcaggtgaggaaagaagccaaggagcaccgcaaccgtatcaccctttgcatcaacacgaaagagatcgtccatgacattgtggctggtagcactggtacagctggtagcagtgcggtaagtgtgactgataagaaacctgagcctaccggtaatgaggacattattgacaatggaaacaatatttcggtcagaagtagtggcctacctgaatggatttactttcagtgatccatggtggcgatccttatcctagctttgtacggccgtcatcgtctttttgagaaaatcgggttgcgtcatcgtgcttaatttaatcagaagacagcttgaagtgtttcatccatcccgaagaagtttggttttccctcctaaagtcacctgacgcgcgccttagccagagtggtgagtggggactgaccttgtggagacgcgaggcactctggcagccggccggtgagggcagcaagatttcgctcactctttgcggtcgaagacacgtctgttaggaataatccttgtgtgctgattagtagtagctataaatggttagttgctgattttgtgggtggatgtgtcggtctgattggaggctacgtttactttccttttattaggatttatttccctgtaatagcttacttaagcgataaaatagagtctggaaaagctgccaagttttgcagcacc

SEQ ID NO: 27028 - DNA, 816 bp, Oryza sativa
  ref <308>: DATABASE ACCESSION NUMBER: AK102470
  ref <309>: DATABASE ENTRY DATE: 2002-08-28
ctctctctttccccaccgcctcctccgccccaacgcggtctccctcccccccccctcccccgcgcgatcgctcgcacgcacggccgccgccgccgccgcgcccagccatggcggacgtcgccgcggaccggcctcccgcggccgagcaggaggaggcgcggccgccctcatccaccgcggcggtggcggaggaggacgaggaggaggaggaaggggacgtgtgccggatctgccggaacccgggggacgacgagcacccgctccggtacccgtgcgcctgcagcggcagcatcaagttcgtgcaccaggactgcctcctccagtggctcgaccacagcaactcccgccagtgcgaggtacggaaccctcggttcgcttttatgggccgcgggggccttggggtttgtctcgattcggcggtggaatcgatcgattggatgataatccggtgcatttgctcgataatttctggtgaatttttgcggtgttgtatgtagctggtggttgtaataggtcagcatcacttcgctcgcgctggataggggcaagtgataacagtgataccttttatgggcgagagaggtttctacggctctaagatgatataatttgtgcaatagggtttgtgaaccgtacgctgagacattgtttttatttagattattttacaaggctgctagctgtatttatttgatctcgtggcaacattagctagtttcagatatttctctacaatcacatttacagatgtaaagcttagtatggacaaggttttctacctgtgactgcaagagattgaaaactagcacattattt

SEQ ID NO: 27029 - DNA, 1439 bp, Oryza sativa
  ref <308>: DATABASE ACCESSION NUMBER: AK102471
  ref <309>: DATABASE ENTRY DATE: 2002-08-28
gaccaccagccgccgcctcggccgcgagatcgccggccgccgccatgtcgaatccggccgcctactacgccgccgtcgcgcggaagcagtacttctgctaccaatgcaaccgcaccgtcctcctcccggcctccgccgccgccgccggggcgctctcctgcccggagtgccgcggggatttcatcgaggaggtcaacgtccccgcccccgccatcatccccttccccttcgccttccccccgatgatgcccaccgccacctccgcctccgccgccgccgccgccgcggcctcgccgacccagtcctcctcctcgtccgccgccacgtcgccatccagcgacctctccgccttcctcaacagcatgctcggcccgctcaacctccgcaccgacgagcggatgccgggaaccacctccgccgcgggcacggcgacccccgaggacgagcccgacgggttcgacgcggtcacgttcttccagaactacctccagaatctcatggacggcggcgccaacatccaggtcctcctcgacgacgccagcgtcggcctcgcccccggcatcggccgcgtcggcggcgccagcttcggggactacttcgtcggcccgggcctggagcagctcatcgagcagctcaccgagaacgacccgaaccgctacggcacgccgccggcggccaagtcggctctctccacgctccccgatgtcgtcgtgaccgacgccatggtcgccgcggcggatggcgccgagtgcgccgtctgcaaggaggatttctcgcctggggaaggggccaagcagatgccctgcaagcacatttaccacgccgactgcatcatgccatggctggatctccacaattcatgccccatatgccgctttgagctgcctactgatgaccctgattacgaggggcgtaagaaatcaaacccacagccaactgctggcgttgatgccggagctgcatctgggagttctactgctgctgaggagcgagaggagagtggggagagtgcgaggttggtcgaacggcggtttaacgtgtcgctgccatggccttttagtggattgggatcgcaaacgccgcagcaggatgggagcaatgggggcgctggtgccagtggctcgaaggatggaggcgcatccagtgacaaaaaataagcataaatgtgcgattgattggaggttttcctcttggatctggcgttcaaaggtctacaatatttatgtgtcgctgccacttatatactatagacatcaaaagaccaaagaaatttacagtctttttatccgctggaacaattgttcattcttgttctcgctgcccgttaggtcatgtacacaaggcacggaaactgccgaggcaggaaacgtgcgttgggagtttgagacttttatgtgtagatttgttaattaaattcatcaaagtaccaaacttggagc

SEQ ID NO: 27030 - DNA, 1183 bp, Oryza sativa
  ref <308>: DATABASE ACCESSION NUMBER: AK102472
  ref <309>: DATABASE ENTRY DATE: 2002-08-28
gactcgctcatcggaagcaaatcatcttcctagtgcatacaagttagctcatcatcagcactagtacagtactactagacagttgtacgtacagtagaagtagctacccaaccttgggagagatggagattccagtgattgatctcaaggggctcgccggcggcgacgaagaaagggagcgcaccatggcccagctccacgaggcctgtaaggactggggcttcttctgggtggaaaaccatggcgtggaggcggcgttaatggaggaggtgaagagcttcgtgtaccgccattacgacgagcacctggagaagaaattctacgcctccgacctcgccaagaacctccacctgaacaaggacgacggcgacgtcctcgtcgacggcggcgacctcgccgaccaggccgactgggaggccacctacttcatccagcaccgccccaagaacaccgccgccgacttcccggacatcccgccggcggcgagggagtccctggacgcgtacatcgcgcaggcggtgtccctcgccgagctgctcgccggctgcatcagcaccaacctgggcctcgccggcgccgccggcgtcgtggacgccttcgcgccgccgttcgtcggcaccaagttcgccatgtacccaccgtgcccgcgcccggacctcgtctggggcctccgcgcccacaccgacgccggcggcatcatcctgctcctccaggacgacgccgtcggcgggctcgagttccaccgcggcggccgcgagtgggtccccgtcggcccgacccggcgcggccggctgttcgtcaacatcggcgaccaggtggaggtgctcagcggcggcgcctacaagagcgtcgtgcaccgcgtcgccgccggcgccgagggccgccgcctgtccgtcgccacgttctacaaccccgggcccgacgccgtgatcgcgccggcgacggcggcggcgccgtaccccgggccgtacaggtacggcgactacctggactactaccagggcaccaagttcggcgacaagaccgctaggttccaggccgtcaagaagctcttcagctgattaagcacttggggattatattttgttgtgatgtgattaaaatcgcgtgcgctaatcggggtttgtaactttgtatacttgtttggtttgaatcaatcgtcgtgtagtacgcagggttcccc

SEQ ID NO: 27031 - DNA, 1257 bp, Oryza sativa
  ref <308>: DATABASE ACCESSION NUMBER: AK102473
  ref <309>: DATABASE ENTRY DATE: 2002-08-28
ggttccttctccaaacccctgcgcaggataacacacactagcaggcagcagcagcagaagcagccgcgagccaagaaatggaggcagcggcagccatggcggccctccccgcttctccctgctcatcctcctcgtccccgtcgtcccttttcctcgctcccaacccgtgctgctggaaggcggcgccaagagctacggtccgcgcatcggcgtcggcggcacggcggacgctctcctccgcgtgggaacttcccgggccgtcggcggctcggcctgcggcaaggaagccgcgcctcgaggagctggacaccaccaacatgctccttcgccagcgcatcgtcttcctcggctccccggtggatgatatgagtgctgatcttatcatcagccaactcttgctgctggatgctgaggataaaactaaggacatcaaattgtttattaactcacctggaggctccataacagcaggaatgggagtttatgatgccatgaaattttgcaaggctgatatatcaactgtctgctttggactggcggcttccatgggtgcatttttgctagctgctgggacaaaggggaagagattttgcatgcctaatgcgagaattatgatccatcaaccatcagggggtgctggtgggaaggtcacagagatgggattacagatacgagagatgatgtatgagaagataaagatcaacaaaatactgtcaagaatcaccgggaagcctgaagagcagattgatgaggatacaaagtttgactatttcatgagtccttgggaagccaaggattatggcatagttgacagcgttatagatgaagggaagccggggttggttgctcctttggcaggagctgtgccacctccaaaatcgcgtgtgtggtacttatggaatgcttcaggaccaactagaaaaatcatgaaaaatctaccttcagaggagaagcttattcaaaatggtaatggcagtgcaagtggagacgatgggaagttcaaggagatctcaacagcttgaggttattacacattgtgaagcttaatgtagtctggcagtagtagaaaaagaatgtcaagtagctgtagcgctccttaattttatggactgcaagaacacgttcttccaatgcaataactcatggcgatttccagtgtacattgctttcattctgccattatgttggctgaattattattgttcttgccaattgccatacttaaaaagaaagagagaaaacccagcaagttatatt

SEQ ID NO: 27032 - DNA, 2246 bp, Oryza sativa
  ref <308>: DATABASE ACCESSION NUMBER: AK102474
  ref <309>: DATABASE ENTRY DATE: 2002-08-28
gggatttcgagaccccccagatcggggggagagatccccgtgtcgtctggtgtggtgggtcggcctccgccccccggccgccgcgcttctcttgatctttctttcttttttttgatttttttgcgtttcccctccgggagaggggaggggaggagggttcttggatgggctgctttccgtgcttcgggtcgggcggcaaggggggggcgaagaagggcggcggcgggcgcaaggacggcggctcggcggatcgccgcgtcgcccgggtcggatcagataaatcaaaatcacagggtggattggactctaggaaggatgcattcatcccaagggatgcgaatggtcaacctattgctgcacacactttcacttttcgtgaacttgctgctgccactaagaacttcagacaagattgtctattgggggagggaggttttggccgcgtatataaaggacacttggagaatgggcaggctgttgcagtgaagcaacttgatcgcaatggacttcaaggaaatagagagtttctggttgaagtccttatgctcagtctattgcaccatgataacctggttaacctaattggatactgtgctgatggggatcaacgtctccttgtatatgagtttatgccattgggatcacttgaggatcatttgcatgatattccacctgacaaggaacctctcgactggaatacacggatgaagattgctgctggtgcagccaagggcttggaattcttgcatgacaaggcaaatcctcctgttatttacagggatttcaagtcatcgaacattcttcttggtgagggataccatccaaaactatcagactttggcctggcaaaacttggccctgttggtgacaaaactcatgtttcgacacgtgttatgggaacttatggctactgtgccccagaatatgcgatgactgggcagcttactgttaaatctgatgtgtatagttttggtgttgtgttccttgaactgattactggccgcaaagtaatcgacaacaccaaaccacttggagagcagaacctagtggcatgggcccgtcccctgtttaaagaccgcaggaaatttcctaaaatggctgatccattacttgcgggccgatttcctatgcggggcctgtatcaggctttagcagttgctgcaatgtgtttgcaggagcaagctgccactaggccttttataggagatgtggtcactgctctttcatatcttgcttcccagacatatgatccaaatacacctgttcagcacagtcggagcaatgcatctacccctagggccagaaaccgtgttggtgcgaattttgaccagcgtcgtcttcactcaccaaatcaccaacaatctccagatttaaggaaagaaggcaccacaacatcaaaatatgaagctgaggttagcaggactaattctggcagtggctctggtcgacgagctggcttggacagcatggatgtgacaggttcacagatgggtagtcctgctcacgcaggaaggaagagggaatcatcgcggagtactgataggcagcgtgcagtcgcagaggccaaaacatggggggagaattcaagagaaagaaagtggccaaatgctcgtggcagctttgatagtacaaatgagtaaacctctgaagcagaaggttcagttaagtcgtcattctaggggaaaaaaaaagatgaatcacttgcagaacccaactgggtcgaattaggtacatggggcattttcgctccatctcggctctgcggtctatgtgaatagagcttctctttttcttttttctgtcctggagacaccaccgctgcttcagagctctcctctcgtccatacgaatagcatcaccgcgatctcatcgtcgacgcgcctattcctggcgtccattcctcgtgattgatcatgcaaatgtgccttttattcatcatgaagacagaaacaccgtttggctggaaatgtaggtagaaagcaaaagagaaaatttgctctggagctatccattgggtatctcatgtcgatgttgttgcatgatgagtgtcagcggctgcaccattgttcctgagtgttctagctctatgtgaagtgaagtctgcgtaccgagggatgtgatgttcttttttcttttcttttcttttctttttgtctcaatggtttgtacctagggggtacggcattttacctgtgtttcatacacctgtcatttgacaatttcatgtcggagttatctgttgtttc

SEQ ID NO: 27033 - DNA, 1182 bp, Oryza sativa
  ref <308>: DATABASE ACCESSION NUMBER: AK102475
  ref <309>: DATABASE ENTRY DATE: 2002-08-28
gcttccaaaactttcgaaagcttccattagcgactaatccagccttcgttaagggtgattagaatttgattaatttcaaggcctcagatcggagattgaatggagtgcggtggtgcgctgcagctgccgccggggttcaggttccacccgacggacgacgagctggtgatgtactacctgtgccgcaagtgcggcggcctccccctcgccgccccggtgatcgccgaggtggacctctacaagttcaacccatgggatctccccgagagggcgatgggaggggagaaggagtggtacttcttctcgccgcgggaccggaagtacccgaacgggcagcggccgaacagggcggcggggacggggtactggaaggcgacgggggcggacaagccggtggggtcgccgcgggcggtggcgatcaagaaggcgctcgtcttctacgccgggaagccgcccaagggcgtcaagaccaactggatcatgcacgagtaccgcctcgccgacgtcgaccgctccgccgccgcccgcaagctctccaagtcctcccacaacgccctcaggttggatgattgggtgttgtgccgaatctacaacaagaagggagtgatcgagaggtacgacacggtggacgccggcgaggacgtgaagccggcggcggcggcggcggcggcgaagggtggtcgcatcggcggcggcggcggcgcggcggcgatgagggtggagctctccgactatgggttctacgaccaggagccggagtcggagatgctgtgcttcgaccggtcggggtcggcggaccgcgactcgatgccgcggctgcacaccgactccagcgggtcggagcacgtgctgtcgccgtcgccgtcgccggacgacttccccggcggcggcgaccacgactacgccgagagccagcccagcggcggatgcggcgggtggcccggcgtcgactgggccgccgtcggcgacgatggcttcgtcatcgacagctccctcttcgagctgccctcgccggcggcgttctcccgcgccgccggcgacggcgccgccttcggcgacatgttcacgtacctgcagaagccgttctaattaacggaacgtgacgcctctgcaaacgctaattagctcactaaccactgtcaggtcgatcgtgtaattcttttaccagtctagggtacagcc

SEQ ID NO: 27034 - DNA, 3254 bp, Oryza sativa
  ref <308>: DATABASE ACCESSION NUMBER: AK102476
  ref <309>: DATABASE ENTRY DATE: 2002-08-28
aggggttcagatctgatcttttttctgctctctcttgtgtgttttttcgagttgtttgtggttgctcacctcttgtgcaccggcaatggcaggcttgagcagcgtttcttgctcggcggcggcggcggcggcggcggttgctagatctccggcgtgacaccggtcggaatgggctggatgtcgacggggacgacgttcgggcgttgatggcaggtgtggtgttcccatgattgatgatgtggagatactgggatggttcgagatgaagaaaatgcttgtgaggtgctctgttgagagaaaccttattacctgatgacttgttaattcgaagttattctagcacaccagttgctgctggttggatctttttctttcattgctgagtaggagcgtaggagttggttggttcaagaatttcgttcaagatgatgcagaggccgttccgtccggaggagtactccttgaaggagacttctcctcaccttggtggtggagctgctggtgacaagctcaccaccacctatgacttggttgagcagatgcagtatctttatgtccgggtagtaaaagctaaggaccttccaagcaaggacatcactggaagctgtgacccatatgttgaggtgaagcttgggaattataagggtacaactcggcatttcgagaagaagactaatcctgagtggaaccaggtctttgccttttctaaggagcgcattcagtcatcagtggttgagatcattgtcaaggataaggactttgtcaaggatgacttcatcgggcgggtgttgtttgacctgaatgaggtcccaaaacgagtgccacctgacagcccattggctccacagtggtatcggttggaagagcggaatggacacaaggtgaagggagagttgatgttggccgtttggatgggtactcaagcagatgaagcattccctgaagcttggcactctgatgcagcgtcgatcccaggagatggacttgcaagtattagatcaaaagtttaccttactccaaagctttggtatctgagagtcaatgtcattgaggcacaagatcttataccaaatgacaggaccaggttccctgatgtttatgtcaaagccatgctaggtaaccaagctcttagaacccgggtatcaccaagccggacgctgaatccaatgtggaatgaggatttaatgtttgttgctgctgaaccattcgaggaacacctgattctgagtgtagaagataggattgccccagggaaggatgatgtacttggaaggacaatcatttctctgcagcacgtacctcggaggctggatcacaagttgctgaacagccagtggtacaatcttgagacgcatgtaattgtggatggcgagcagaagaaagagaccaaattttcaagccggattcacttgagaatatgcctcgaaggtggatatcatgtcttggatgagtcaacacattacagcagtgatttgaggccaactgctaaacagttatggaagcacagcattggcattcttgagttgggtatcttgacagcacagggcctgttgccgatgaagaccaaggatgggcgtggaacaactgatgcttattgtgttgctaagtatgggcagaagtgggtgcggacaaggactattattgatagtttcacacccaagtggaatgaacaatacacttgggaggtgtatgatccctgcactgtgatcactattggtgtatttgacaattgccacttgaatggtggggaaaaagccaacggtgcccgggataccagaattgggaaggtccgcatccgcctctctacgctagaaactgatcgagtatatactcatgcttaccctctgattgttctgacacctgctggtgttaagaaaatgggggaggtgcagcttgctgtcaggttcacatgctcatcactgctgaacatgatgcatctgtattcacaaccattgctgcccaagatgcactatgtacacccattgtccgtgatgcaggtagacaatctaaggcgccaagccaccaacattgtatcaacaaggctgagccgtgcagaaccaccactgcggaaggaaattgtggagtacatgctggatgttgactctcatatgtggagcatgcggaagagcaaggcaaactttttccgtatcatgggtgtcctaagccctctgattgcggtggccaagtggtttgatcagatctgccattggagaaatccgctgaccaccatactgatccacattctctttgtgattttagtcttgtatcctgagctgatactgccaacaatcttcctctacctgttcctgattggagtgtggtactaccgctggcggccaaggcagccacctcacatggacactcgcctctcacatgcggagagtgctcatcctgatgagcttgatgaagagtttgacacattccctacttctcgtccgcctgacattgtgaggatgcgttatgaccggctacggagtgttgctgggaggatacagaccgtagtcggcgatctcgcgacacaaggagaaaggctgcagtccctgctaagctggagagacccaagagccacggcgctctttgtgaccttctgctttgttgctgccattgtcctctacgtgactccattccgtgttgtggtcttccttgcaggcctgtacaccttgagacacccaaggttccgccacaagatgccctctgttcctctgaacttcttcaggaggctccctgcaagaactgatagcatgttgtaagctcgactgcctcatgctatgctatcgagctgcccaggcgatggctgcaatgcataagaaattggagaaacctgaactcttatctattctcttttttgtagtctatcagttgcatggttatgtatgtcttcaggtggtttagaacctttcatgtaactgctgaacgcattatgtgactggatttgcatgtatggtgcgtgcgggaaatttgttcgtggtcatcacctgtcatcgggaggcttactgggcatgtcatctcatacatattgcattctgtataattccatcagatatgtgcccctgaatttaggctagttgtgttaaggatgatgactgacatttgggctgcaggaagaaatttgtgttaatctgtgctcggcaattctaagtgcaggcattaaccctgaccaatctgtggcccatcctgttgagtgatctgttgttttgtgatttgtgctgattgccttggagcctgaacaaattttttggcagcttcactatact

SEQ ID NO: 27035 - DNA, 1718 bp, Oryza sativa
  ref <308>: DATABASE ACCESSION NUMBER: AK102477
  ref <309>: DATABASE ENTRY DATE: 2002-08-28
tggtcggcacgctgcacagtacgcgcgctgctcctaaacccaaaccctaaagccgccgattcctctcctctcctctccacaccagctcgatcgcgatcggggtcatggccgccgccaccgcggcgccgtcgatcgacgaggccaaggcgaagagcgttctccgccaggtggagttctacttcagcgacagcaacctcccgcgcgataagttcctgagggagacggtcgagcagcgcgaagatggattggtaagcttggctttgatatgctctttcgcgcggatgaagtcgcacctcgggctggacgccgccgtgaagcccgaaactgtgccagaggagacagtgctcgcagtagcagaggtgctacgtcgttcccagatgcttcgtatctcggaggatggaaaaatggttggtcgagctagtgagctgttgaaggcagatgaaatcatcaagcaagtggactcaaggacagttgctgcgtcaccattgccttacaatgtaaagctggaagatgtccaatctttctttgcgcaatatgcaaaggtaaatagtgtcaggctaccacgccatatctcaaacaaaaaacacttctgtggcactgccttagttgaattttcagaagaggatgaagcgaaaattgttttggagaataatttgttctttgcaggggcaaatctggaaataaaactaaagaaggaatttgatgctgaaacagaatctaaaaaagaagcatatgaaaaggcacatcctaagaaggacgagcagaatgaaggctatcctaaaggcctaattgtggccttcaaattgaagagaatcacggttgatggtggggtgcaacaaaactgtgcagacaatgatactgccactgaagaagaaactccaaagtccatgaagaaaacatcaactggggaatctgaagagaggactaccgtgaacagtgatatggaggaacagaagtcatcagacgacatgactgaagcgaaagaagtgaatgctggggaagctacagaatctggtgacaagtgcacagttgatgccttgctagaaagtgaaaagaagggtgataatgaaacatcgatcaaagatgacagaggcctctctggcaaagcgaatagtccaatctcaagggaagatctaaaagaagcgttcaaaaaatttggaacagttcggtatgtggacttcagtatcggggatgaatcgggataccttcgtttcgaggattctaaggcagctgaaaaagcccgcatgtctgctgtattagctgatgaaggtggcttgatagttaaagaccacattgttaccttggagcctgtgactggtgaagctgagaaggattattggaatacaatacgtggcattcaagggaaatacaaggacaataggagttacaaaggaaggactggaaagagctacagaggaggaaagcagttcaatgggaagcgaggccgacattctgattcctccgaaaagggtgcgaataaaacacagaaggtcgaagctgctgcttaggctaattttaacgtcttcactcgaccgagaagtaacatgctacgcttactatcggtggtcttgtatatttattatatcagagaccatttattaccatattttgtgactgttattgtccattttttatgctaaccttgttccaaggtatacttccgtaatgattagcctttagtaacggctttgccgtttacttttgaatggctttggagg

SEQ ID NO: 27036 - DNA, 2708 bp, Oryza sativa
  ref <308>: DATABASE ACCESSION NUMBER: AK102478
  ref <309>: DATABASE ENTRY DATE: 2002-08-28
gttcgggtcgagccgcggcgaggcgacgaactcatcacctccactctctgctgcaacacgagtgaatcggaggcggcacgatgcgcaagtgggcgctctcctccgcgctcctcctcctcctcctcctcctcaccacactccccgatccagctaagaagctccaagtcaatgctgatgacagcactgatgagttagttgatccgccgaaggtagaggagaagattggtggtgttccccatggcctgtccacggactctgaggttgttcagagggaggctgagtcaatctcgaggaagaccctcaggagctcagcggagaaatttgagttccaggctgaggtgtccagactcatggacatcatcatcaactcactctacagcaacaaggacattttcctgagggagctcatctccaatgcttctgatgctttggacaagattaggttcctggctctcactgataaggaggttttgggcgaaggtgacactgctaagcttgaaatccagattaagctggataaggagaagaagattctctccattcgggataggggtattggtatgaccaaggaagatctcattaagaaccttgggaccattgccaaatctggaacttcagcttttgtggaaaagatgcagactgggggtgacctcaatctcattgggcaattcggtgttggtttctattcagtatacttggttgctgactatgttgaagtgatcagcaagcacaatgacgacaaacagcatgtctgggagtccaaagctgatggatcattcgctatctctgaggatacatggaatgaacccctgggccgtggaactgaaataagactgcacctccgagatgaagccaaggagtacgtggaagaagacaagctaaagtatttggtgaagaagtactctgagttcatcaatttccccatttacttgtgggcaaccaaggaggttgatgtggaagtgccagctgatgaggatgagtcaagtgaatcaagtgaagaagaggaatcatcccctgagtctacagaggaagaagagacagaagagagtgaagagaagaagcccaagacaaagacagtaaaggaaaccactactgagtgggagcttctgaatgatgtgaaggctatatggcttcgtagccctaaggaggttactgaagaagaatacacaaagttttaccactcacttgctaaggactttggtgatgacaagcccttgtcttggagccacttcactgctgagggagatgttgagttcaaagctttgctctttgttcctcccaaggctccacatgatctctatgagagttactacaactctaacaagtcaaaccttaagttgtatgttagaagggttttcatctctgatgaatttgatgagcttcttccgaagtatctcagctttttgaagggtctcgtcgactcggacacattgcctctcaatgtatcacgagaaatgctccaacaacatagcagcctgaagaccatcaagaagaaactaatccgcaaagctcttgacatgattagaaaacttgctgaggaagatcctgatgagtacagcaacaaagataagacagatgaagaaaaaagtgcaatggaggagaaaaagggccagtatgccaagttctggaatgagtttggaaaatcagtcaagttgggcatcattgaagacgcaactaacaggaaccgtcttgcaaagcttctgagatttgaaagtaccaagtcggaaggcaaacttgcctctcttgatgagtacatttcaaggatgaagccagggcagaaggacatcttttacattaccggaagcagcaaggaacaattagagaaatcaccgttccttgagaggctaaccaaaaagaactacgaggttatctacttcactgaccctgttgacgagtacttgatgcaatacctcatggactacgaggacaagaagttccagaacgtctccaaggagggtctcaaactcggcaaggactctaagctcaaggacctcaaggagtccttcaaggagctgaccgactggtggaagaaggctcttgacaccgagagcgtggactcggtgaagatcagcaaccggctgagcgacaccccctgcgtggtggtgacatccaagtacgggtggagcgccaacatggagaagatcatgcagtcacagaccctctcggatgccagcaagcaggcgtacatgcgcggcaagagggtactcgagatcaaccccaggcaccccatcatcaaggaactccgtgacaaggtcgcccaggacagcgagagcgagagcttgaagcagacggcgaagctggtgtaccagacggccctcatggagagcggcttcaaccttcctgatcccaaggacttcgcctccagcatctacaggtcggtgcagaagagccttgacctgagccccgacgcggccgtggaagaggaagaggaggtcgaggaggccgaggttgaagagaaggaatcatccaacatcaaggaggaggcggagccgtcgtcgtatgataaggacgagctgtagtgatgtgtcgccaccaactgttgtttttttatctagctcttgtgttaggttgtttaaaaatgtgatggtttcgagggacgtccatttttccatgcgaaaatgcatagtaccatgatacggggattttgtcgatgtacgtagtttgtgatactctagttcaaattaatggccgtctaatttcgatcatcc

SEQ ID NO: 27037 - DNA, 2840 bp, Oryza sativa
  ref <308>: DATABASE ACCESSION NUMBER: AK102479
  ref <309>: DATABASE ENTRY DATE: 2002-08-28
ggggcttgtcctttggaaaatttctggaacttagcttctcaaatcatgcggcagctagtagggtagccagttgtggccattctcttcacagggattgccttcgtttttacggctttggtgaaatggttgcttgcttccgatatgcatcgatcaaggttcattcagtgtatttgccaccaccgaaacttgatttcacttctcagcaccaggaatgggtagagcaagaagcaaatgaggtggttgactcagctgaacttctgttcactgaagtactgaatgcactccaccaaatttcagagggaaggccaattacaggttcttttgatggcaacatgaaaatcctcgagttaagaaggaacatcatggagctggaagagatcctgcaaatagagaaagcagattttacggaatcattgaagaatctactgaacaaggagatcagaaaggggaagccattcattgatattcttgaggttaacaaactaaggaggcagctactgtttctgtgttacctgtgggatcagcggctaatctttatagcaaattcaggtggcaagtactgtgacacactaggaggtttacgggttgggagtaggagttctgactctaacgataaatcagttgataccaatgcaactacaaaactagagaagagctcaaagggctccgaagttctttcaaatgctaaggaaggatccttgaagcagagccaaagtccacttcatgctaatgacaaggagcccaaccaacctgatcaatctaatggaaatagttcaaggattggtgcagggttgaatggcatggaagatgcgattgccaaaatcaatcattctaacagcgcagatgttaaggataacctggatcatcaagaatccagtattggtgttcgtagggttctttctgatggtcagtttccagtaaatgctgatatttcagacacattggatgcaaaatggagaggtgaaaatggaacagttcctgatacaagtatcctgaaaccattagctctgctagaaggttcagctgatcttaaaaaccaagctaaggcagtgccaaccaatgcttctttatctgtcaggtctggagatacagtagaagacttatcaagctggctcaaaatgccatacatgacattctatgactccttaaacacaaattctgggacagcaccgagatttggggccctggctgactacaatcctgtgtacattacattgttccgtgagttatcacagcaaggtggagcaagactttttctgccaactggagctaatgatgttgttattccagtatttgatgatgaaccgaccagtataatttcttatgcacttgtttcacccatgtactgtcaccaaatgttggatgagaacagcaagaacaaagatggtccagattcttcacttccattgcctgtatatgattctggaaattttaatccttttcatttatttgaggatttcggatccgctgatgatcttgcttcgtcaatatctggaaccagagggtcatttgttcccgatctagttcacctaagagttccctttgaggatggtggcccactcgggaaggtgaaatacacagtgacgtgctactatgcgaaaagctttgaagctcttagaaggtcttgctgtccatctgaacttgactttttaagatctatcagtcgatgcaagaaatggggagcacaaggtggcaaaagcaatgtgttttttgcaaaatctctggatgatagatttataataaagcaggtcacaaaaacagaacttgaatcattccttaagtttggactagattattttaaatatttatcagagtctataagcaccggaagccctacatcccttgcaaagattctgggaatctatcaggttacaattaagcatgtgaagggtggcaaggagtcaaaaatggatttacttgtgatggaaaatcttttatttggacggaatattacaaggctctatgatctcaagggatcttcgaggtcaaggtataatgctgattccagcagcaacaaggttcttcttgaccagaacttgattgaggcaatgccaacgtcaccaattttcgttgggaacaagggaaagaggcttctggaaagagctgtttggaatgatacttcctttctggcaggaattgatgtgatggattactcattgcttgtgggagttgacgaggagaaacatgaattggttctgggaataattgattttatgaggcagtatacatgggacaagcacctcgagacatgggtcaaatcgtccggtattctcggcgggccgaagaatgcccctccaactgtgatttcacccatgcagtataagaagcggtttagaaaagctatgtctgcttattttattgtaattccggagcaatggatgcctgcaataatcaatccgagcaaatcatcatcaaatctttgccaagaagatcctcaaaatgcttcacaagagtagtacaatattcagttcattatgccaggcagagagcacctggttttttgtcttgatccaatcaaaagcgccaaacgatcagtctggatgctgcggcatcaatgtggtattacgactgcaattatcaaaatgcttggactctcatttgcacagatccgattgcagtggagtcgtcttggctcaagaatcatcgggtgtatatatccttgaaactgtaattatgcattagtttttttattttctttttgatttattatgtaataatataatgtcgtcgcttctctctagttcccattccattttggttggatgtaaacaatagaagtggggcattttttttttgtaagtgctcgttgtatattattatatatatatgccatgttattt

SEQ ID NO: 27038 - DNA, 1370 bp, Oryza sativa
  ref <308>: DATABASE ACCESSION NUMBER: AK102480
  ref <309>: DATABASE ENTRY DATE: 2002-08-28
ccccttgaccccttcctctcgtcgtcgtcggtgcggcgccgccagggaaaatggagtcatcgaggctgcggaggcggcggcgctgccgcgtccggtgcctcctcgctcctcccgttgccgcccgtgcgcagcagctgcagcgcgtcgcatatttctccaaacccacgcagatctccgctttttcccggcggcaaccacgccgcggcaagcagttctagttataagcctgtgcagaatatgcagaagaaagaagtacaagatacacgacgcaggagatttgcagcaggaaaacatgttctctgtcttaaactttgatggtggaaatgcatacgagcaaattattgaagcgacggagaactttagtgaaaaatattgcattggagcaggtggttatgcgtctgtctatgtagctaaattatcaaatggtaaaaattttgcagtcaagaagataaatgcaacagagaatggccgtttgataaacgagcaaatgttctatcgtgaaatagaggccacaatgcaaatacgccacaagaacattgtaaaagtctttggctactgctgtacagcacgagataagtttattgtctacaagtatatgaaaggaggaaacttgttgacagctctcaagtcctacagaagtgcaagcgagttggattggaagcgcaggttatgtattgctcaggatgttgctcatgccctatcttacttgcatcacgactgttcagatcctatagtccatcgagatgtaacaaccaaaaacattctgctagatctggagttcagagcttgtttatcagactttgggatagctaaaatactggatgctgatggatcaggacacacaaggctcgctggtacaaaaggatatcttgcaccagagctggcatacactacgaaggtgacagagaaatgtgacgtttatagcttcggggtggtagttcttgagctgttgatgggatctcaccctggagactttgtttcgtcgatctcatgccctagcaagaaaagcacaccgatgaaggatttgttggacaccagactcccgcctccagcaggtgaagttgcaagcgagatatttggattgatcacggttgctatacagtgccttcaccccaatccatcaactcgtccgacgatgccatccgcaattcatttgttctccaagttttctagggcggttgatcttgattatctgcatgctgacatcatggagttctgccttctttgaaccttgacctttgtattcattttctacttgtggaatgttcccgaggataaagggaactacacaggtattctacatcttatgcctttgttgatgtgggaaggaagggagctaataggtgtgttgttttacaagaattgctatc

SEQ ID NO: 27039 - DNA, 1918 bp, Oryza sativa
  ref <308>: DATABASE ACCESSION NUMBER: AK102481
  ref <309>: DATABASE ENTRY DATE: 2002-08-28
gttattgcccaccaagaattcaagaaaggcaagagcagaggtgagcagcgatcctccaatggcggctgcaaggagagtggtcttgttccccagcctcggcgtgggccatctcgcccccatgctggagctcgccgcggtttgcatccgccacggcctcgccgtcacggtcgccgtccctgacccggccaccaccgcccccgccttctccgccgcgctccgcaagtacgcatcccgcctcccctccctctccgtccatccactccctcctcctcctcatcctcctgcctcctccggcgccgatgccgccgctcacccgctcctccgtatgctcgccgtcctccgcgcccacgcgcccgccctcggggacctgctgcgtggcccccatgccgctcgggcgctcgtggccgacatgttctccgtctacgccctcgacgtcgccgccgagctcggcgtccccgggtacctcctcttctgcaccggcgccaccaacctcgccgttttcctccgtttgccacggttttgcgccgggagcagcggaagcttgagggagctcggcgacgcgcccgtgtcgttccccggcgtgcgcccgctgccggcgtcgcacttgcccgaggaggtgctcgaccgtgggacggacataagcgcggccatgctggacgcgttcgaccggatggcggacgcgcgcggcattctggtgaacaccttcgacgcgctggagggtcccggggtggcggcgctgagggacggccgctgcctctccaaccgcgccacgccgccggtctactgcgtcgggccattgatcaccgacggcggcgcggaggaggagaggcacccgtgcctcgcttggctggacgcgcagccggagcgcagcgtcgtgttcctctgcttcgggagccgcggcgcgctctcgccggagcaggtcagcgagatggccacgggcctcgagaggtccgagcagagattcttgtgggcgctgcgcgcgcccgcgggcacgaagccggacgccgcgatgtctcttcttcctgacggattcttggcgcggacagccgacagaggcgtcgtggtgaccgcgtcctgggtgccgcaggtggcggtgctgcagcacgcatccacgggcgcattcgtgacgcactgtggatggaactcgacgctggaggctgtcgcagccggcgttccaatggtgtgctggccgctcgacgcggagcagtggatgaacaaggtgttcatcgtggaggagatgaagattggcatcgaggtcagagggtataaacccggggcacttgtccaggccgacatcgtcgatgccatcttgaggcggatcatggaatcggatgcgcagcagggagtcctggagcgggtcatggcgatgaaggagagcgcagcggcagcatggaaggaagggggatcatcgtgcactgcattcgctgaatttctcaaggacatggaggaggggaatgttgccatggcgcattccaatcaggttgaaacttgaatttcttcctgagcatggctcttgacctttgcatttgtcttccatcaattaggatccatagaaaattgtccaaacccatctgcaagcaccacagttggtcaaatgcttgtttatgataagcttaagttcaaatgaaattcactgaccacaaatatgtgatgacaggtctcttacttgttagaaattcaagcttttcaatttcgtagttcgtagtggtctggtcaattatacatggtgcttcattgctgttgaacagttggggaggcctccaagataatttcccattaaggccttgttcttcggttaatccccataatatgggtataatatgtacataagagcaaggataatggtgagctataagcaagctaaatgcttatgtggaagagagagataaataaaagtggagagtgttggctctcatgc

SEQ ID NO: 27040 - DNA, 2770 bp, Oryza sativa
  ref <308>: DATABASE ACCESSION NUMBER: AK102482
  ref <309>: DATABASE ENTRY DATE: 2002-08-28
ggcggcgtctctctccctttctctccccctcccttcccttcccatcaccgccgcggaacgcgccgccgccagaaaccctaaccctagatcgcgaggggtggtgggtggccgggccggcggggggtggggggatggcaagcaagttcgggctcgccgggggcatcccggagaggcgggtgcggccgatctgggacgccgtcgactcgcgccagtacaaggctgcgctcaagctctgcaccgcgctcctcgccaagcacccgacctccccttacgtcctcgctctcaagggtcttattttggaaaggatgggaaagcctgatgaagcactcagtgtgtgtttgaatgccaaggagcagttgtattctgacaacatctttcattttgatgatctcactcttagcaccctgcagatagtatttcaaaggcttgagcgattggatcttgctacttcatgctatgagtatgcttgtacaaagtaccccaataacttggagttaatgatgggcctttttaattgctatgtcagagagtactcatatgtgaagcagcaacatacagcaataaaaatgtacaaaaccgttggagaagaaaggtttttgctctgggctatttgcagtattcaactgcaggtacactttagcattggaggtgagaagttattaccactggctgaagcgttgcttaaaaaacacataacttctcatagtttacatgagccagaagcactggcactctatatttcaattctggaacagcagtcaaaatatgatgctgctttggaagttctttctggagacttggggtctcttatgggaagggaggaggacaagcttcgtctgcagggacggcttcttgctcaagcatgcaactacactgctgcttccgagatatatcaaaagatccttgaatcttgtcctgatgactgggagtcctttctccattatttaggctgcttgctggagcatgatgtgaacttgcctaaatcaaggacaagtgaacacccttcttcattacctgtagattctgctctggcccttaagacttctttaagcgacgagctggtagagtctcgccttgcaagtgcattgtcattcgtgcaaaagctacaggttaatgacaccagcgactgtgtcagaggacctcatttagccagtattgaaattgaacggcaacggtgccgaagtggaaacccaactgatagaaaattcattgaagctttgataaattactttcacagatttggtcatttgtcttgtgcagcatcagatgttgagatatacctccacatgctatcaagtgatgaaacaactgaattgttagatacaatctccagatcttttgatgcatcatcactttcagtaaaaggactgggtttggcaataaccacttttaaggttcaagaactcctgggaacctttttctcaaaatcaactacagaactccagcacattgcaaaaggaatggttgaggcattttataaaaacttgcctctctcaagagaccttgatcctcaagaaagcatgcatggtgaagaattgctatgtatggccagcagtattcttgtgcagctattctggcgtacgaggaacttaggatacttaattgaagcaattctggtgctagagtttggattgactgttcgcaagtatgtctggcaatacaaagttatgctggtgcatctctactcttacctaggagcacttccattagcacatcgatggtatgtaaccctggaggtgaaaaacattcttcttgaatctgcgtcgcatcacatcctgccacagatgttgaattcacctttactgcagcaaactgctgatcttgttaaggactatctaaaatttatggatgatcatttgaaagaatctgctgatcttacctgtcttgcatatagacaccgtacttactcaaaggtaattgaatttgttcagttcaaagaacgcctgcaacactccatgcagtatctttctgtaagatctgattccataatattgagtctgaagcagaaggctgagtctcttgatgaagtggagtctattcttgaaaatgtgaaccatggggcaaggttggttgaactatcaaacgaagacaacgtgaaacgctttacttttaacgaagatcttcaggcacgcccttggtggacaccaacaacaagtgttaattttctgtcagaaccatttgatgaaggttctacacctgcatgctttagagccaaagcgtgtgaacacaaatctactgagaaggatgactcaaagataaaatatgctgagagaaaagctcttcttcctcgtcttgtttatctttcgatgcatggttgtgcatcttccctcagggagactcaactcaatggatctggtttggatactgatgccacagagatgaaaccattacttttgaaatatgctaggagtattggatattccattgatgatgcccttagtgtgattctgggtatgtcatctggcaagaagtctgtcaaggattttacccctgatatagtcagttggatgagctttgctgtatttatcaatgcatggaacttgtggtctaatgaatcggtagtccccagagctgatgagagcagcccaagttcctggcaaattgtggatagcttggtaaaaatttgcgtagaggagcagctgattgatgccaaccgaatcctaacttctcctggcaataacataccagtcctagtgcagatgattacagaacccatttcttggcatctcgtggttattcagtcttgtgtgaggtcgatggctccacaggg

SEQ ID NO: 27041 - DNA, 2550 bp, Oryza sativa
  ref <308>: DATABASE ACCESSION NUMBER: AK102483
  ref <309>: DATABASE ENTRY DATE: 2002-08-28
ggttttcccctcccaaaaatcctccgccgcctgctcatggtctcatggagcctgtggtcagccgccgccttcccctcgagcttgagaagccggagccgctgccttcctctcaagctcgctgaaccagccgtcgctgacgtcgtgtggagccagtggttaccgtcgctgtcttcccagcgagccagcggcagctgccgccaccttcttgcgagttcgatgtccactgtcgccgtcatttcgtctccttctccatcccacgcgagcttggttctgcaagatctgtgccgcatcgagcgcctacaagcacgcggtaaccaacagtcctacatctcatgctctcttcttatcaaccttacataactggtggaaacctctacttgatttttctgtggtgcatggtcaatcaggcctgcttggaagcacaaacgaaaggatcacatatagtatcctatcaaaacattaacaatgttagaccgtacttttagtgggtgttgcatgcagttattattatcaaagctatcaaagatgctctgtgatattaattgtgatcctctttcattatacaggaaatgtacggacagcttgtaaagtaaacttgatgaagagtggtttcctatctccatcaaagtttgtcaaattcacttgtctgctgctgtattgtattgcttacaagctatttttcttataccatcatcccatacgcttagatgcatattgtacacccttgcctcatgtaatcatgtttgcagatatattttggtacatatatagtccagtgactctacgagcaactcaatttactactagaaaaaagatacccagtgttcttctcctttttatttaaatattttagtagctttcattttctttacaaccttacaagcaaaatgtttgatcttgatcatggtttagaaattggccgcctcttcgaaatacaaggtaaattaaccaaacattgacctactatatatgcttgcgtatgtcatatgtagatatactcattacttgaagaaatgcttgacggacatagtctacaggtattatatgcattattggttaggtactaaaaaaatgcacactgattttacttgattttagttttcccatacggccagtaatataaggtctcataggagttgttaaatattcaatcgttttgcccaaatggttcaattgagaagaacttaaagttagctattgcaggtagcctaggccaacagaaagtctgaagttgttatctccttattgtttgcagagatcacatcgcaaccaacttgagttgttatatctaatgcccgcgcaacgcgtggggggggggggcacggctagtctggtattaaactcgttcccctcgtcccctctgccctccccactccgcgccgcggcaggcggccgcgcgcctggatccccctctccgccgcgcgaatcccttcctcttgtccgtcgcgtcgagcccaattcggcgcgccacctctcctccctccgccgccggctcagtcactctcgccataagaatcccggaaccaccgccgccgcataacctcttagccgccccaaggccgggtgttcgccggcacgccggtccaaggaaagccgtaggaatctaaccatgtcctcaacacagtccttcaagagtggcgccactcgcagcttcacaactactatgcggagaggggccaatggcgcccccctctgcttctccgggagcagggaaggaaagcggcgcgccctcagtttacccaatggcagccaaggaagaagcttgcgcttgcgcttgtgttgtgctcctcccgagtccaagtggtggacgacgccactgactcctgacgatctaatcgagccgacgggacatggccaggaggaactggaggctatatggaacgccctggtcgaagaacctctccggcccatcctgactgcctttcaggaaattaaggccactaatggcaacgtcttccgctgtcgctgcttccacgcgggcataacgtcaggtttattagttctcgtgattcgtatttgtcagttccacaaactggcgcctggcctttgcgtggattttgttctcggatatgtatgctacaggatgagtgttttagcagcggagctgaaaagaaatgggaaagcaaacaacatttgtgctaggatacagtttgttattatgcttttgttgttctgggctaacaatcctattaaggactcttgcttctacttcacacagttgatctggtactttgcactccatgtgtattcctgcgctgtgttctacgaatacattggtgtaaagcatcccgcacgctacctggaagcaatgttttatacaatactaacaaccaacggtggcctgatgaaagtacttaagttcatgtttttgggacaagaatgagaaacattttccttgtctggtgatatagaattagggggatattataagttcgatgtataaatcaaattcaccatggggaatgccagatgtgatctacttaatgaaaatgggattttataacgttacatgttccttcaataattcattttagcatgaccaatttgatt

SEQ ID NO: 27042 - DNA, 1205 bp, Oryza sativa
  ref <308>: DATABASE ACCESSION NUMBER: AK102484
  ref <309>: DATABASE ENTRY DATE: 2002-08-28
gactttagttccttcttcctgcctctctctctcagtcgcctcctatgctcgccggcgtcgcccgccgccggcgatgccgagcccgctgaagcgccgcatcccaggccgcctcggccgcctcctcgcctccctccgcccgccctcccgcgcgggccctctccccgtccagaccggcttccccacctccctcgccgacctcctcgtcaagaaccatgaccgcctcctcctcaccaagcccaggcgccgccgccgcccgaccccgccgacgacgacgaccgctacggcctccgttgccgccgccgacgtcgagacaccgctgcccagtgggcgggaggagctcgaggaggagaaggttggcggcgtcgctgtcaggctccgcccggagctcctcggcgtcggcgcggcggcggcgctcgcgctgatggtgatctggagcaggtggttggtggcggccgtcaccgtcgcctcgctgtcgctgttctggatcgagtccgtcaggtcctcctcctcccgcctccggccacggccacggtcaactcccgcggcggagaccgccgctgagctgccggatttgcgcggccgcggcgtcgtctcaccgatccgggaggcggcggcagcgacgcccaggccgagctccgccgattccgacgtggggagcgaggtctccgtctcctccatttggaccgacggcgacgagatgagccagctcgtcgtcggcgattcgacgaccaatcccaccaagaggaaggagaagaggaggtggctgaggaagctaatcgccaagaggaaggagaagaaggattcctcggtggtctccccctcccacggcgaggttgtcggcaacgccgccgccgagcagcagcagcagccgtcaacgtcggcggagccgatcatggcggaggcgtcgccggcggatggtcgacgaggaggcgcattgcccgtcgcggcgttcgtcccggtcgtcctcgtaggcctcgtcggcgggaagctcccggcggtggcgctgaccgtgatcttcgccgtgttcttcagctcagtggagaggagatcaccagcttagctctagtgatgatgaactcatctcaccatcagttcaggtttctgaatttcttcagaaatcaatccgaaagctgcccctcgaaaccgagggaaactttcagaaattcagatcgagttcgttcgtttgttgtaaatttagagaaccc

SEQ ID NO: 27043 - DNA, 2127 bp, Oryza sativa
  ref <308>: DATABASE ACCESSION NUMBER: AK102485
  ref <309>: DATABASE ENTRY DATE: 2002-08-28
gttaacatggaaaccgctgtactagtgtttgcagggaagtcactcgcaacccctgcaatctccttctttgtcaacaaggcattcagctacctgaacgagtaccgcaaggctgaaggattggaggccgtgaagaacaggctagaggagaacatacccaagatccaatcagtgatcgatgtcgctgatcctgattacatcaaggacaagagtgaagccctagatgcatggctgtggcagctcagagatgcagtcgaggaggctgaggatgccatcgatgagctcgaagtggagagggatcaaaataaggttagtcatcaggccggctcttcttcttttacacggatgaagcataaatttgtccagtctgttaagcatgttagagtgttgggtacgacatctaattcccctctcaagaggttaaagaaagccttggaaggtttagatgaggctgctaaaggagtcaagaattttctcacacttgtacaaattcatcaaaacacaatatccaacttaaacaatccagaacaagatgatattagcttccgtgccaaggggaaggacttaaatgctgatagggtgttcggtagagaaaatgagaaggaacatattgttggatggctgaccaatacatcaagtgaagataaccaagatgccaagaacaataatcatgtccccattatgtcaatagttggccatggcggcattgggaaaaccactttggctcagctcatctcccatgactccagaatcaagaaacattttgacaccgtgatctgggttgctgtatctatgagctttgatgcaaaaacattgcttgataaaataattcagtctgttacattattaaaacctagtgttgatacctacgaggcactgcaacagcatttgaaaaaggagattgagaccattaaatatcttctaattttagatgatgtctgggaagataaggacatctctaagtgggaaaatctattttcatctttgagaacaggagtgtgtggaaggaagattttgttgacaacccgaatgcaatcagttgcagatttagcatcagcggtaatgagatgtgaaagggagttcttcccattatgtggacttgaagaagatgaaaatttaagactttttaatcatcatgccttcattaatccagatccccaagaatttgaagacttccaacaagttggagaagaaatcgcaaagaaactaagagggtgtcccttggtaactaaggttgtcgctgggcatctacgggcacacatgaaagttcaattttggaatacatttttgcatgaacatctggataattttgatggaagtatggaagatgttgtcaaagttctcaagttaagttactaccatttggtacctggcctacaagtgtgcttccgatattgtagcatattcccaaaaaaccatgaattcaaaaaagaagaattggtgaagatgtggatagctgcaggattgatctcccagaccacaggtgaagcagagagagcacaggatgctgcagaagagtacttggatctgctgaatagaaagtccttctttgaactcaagttgagaaacttccgtttcggaaggaacgaatgccatgaatattttgtgatgcatgacttaatgcatgatttggcaacatgggtttcttcaggtgaatgtgcaagaattgctgatgttgctagctccaagaagctgaaaccaacagtacgccacctatctgttgctggtattgatggttttccagtcgacgccatcaaaagtttgtcccagttcaaaaatctgcgcaccattatcattgaagattgccataatatccaggatgacacttcacgggaagtggagaaagttatagaaagcttaaaagccctgcgtgtcgtgcaataccacatgttcagtagatcccgattccctggaaaagaagctaatctaaagcaccttcgttatgtaagtgtctcaatgaattagtatgtataagacctaaagcatgcttgtgttgttttaattttctttttcaaatgttttgtgttaaatcgtgaaataccttgttgtttgtatcggatatggcactatttggaaggcatgcttgcagtgtaataataaattcaaactttacattctggcatttgatct

SEQ ID NO: 27044 - DNA, 1395 bp, Oryza sativa
  ref <308>: DATABASE ACCESSION NUMBER: AK102486
  ref <309>: DATABASE ENTRY DATE: 2002-08-28
ggggttcgaactcctcacttcaacccgcactccggccaccgtcggctgccgccgatccctccgccgccgacgccggacgccgccagtgcccagggagttggtagcatggaagccggaggcaccgccgccggcacacgaggaggaggaggaggggcggagctgtgccggcagatggcggcgcagctggcggcgtaccagcgcgggatggccgtcgaaagggagcgccaagcttccacctccgccaactaccgcgccgcgcttctctcctcccgctccatcgcccgtcaaaccatctcccgccaagaggaactgagtggactcaaccttcagttgcggaatttggaagatggtcttgcagaagcattgtctgttaaggccggcaaggagtcaaagtaccaacttaccaaagagacgatttcaagcactgcggctataaatgagaagcttgagggcatggttacagatcagcggaacaagagagatcaccatgctgcagtcatatcgaatcacctcgaggctgttgaagctcttgaagcaaagtttattgaggatgaaacacggatgaagaaaatagaagaagctgtaatctggtacagcaagttccttggtttccaggttgttggaggagaaggtgtaaagttcatcttcaacaaaatagacttgcaaagccctgataaggagtactcggttaccttaaagcttgccaaagatcgatataacttacttcaatgtgatccaagtataaaagattctgaagagttgatgaaggatttgaacctcactaacgatctgttcaagtttgtaagaatcgtcagagaaaggttccaggctgaggctgctactgtgaatggaggtcttctcatgagttcagttgtttgtccagatgcttcctctataccagtttcacctccaatgttaatgccacttgactctagaactgaaaatgttcttgataagagtctttctcagagtaagaacaaggggcggaatctaccttctaaaagaggagctgctgccctatcagcagcatctcctggttctgcggtatctattgtgcggcgctccccacattttgtgggaatcaggtgagttgtcagctgaggcaatttgttgtcacctgagcagactggctctttaactgatcaagcattgtagatccaagaaagtaactaaagtaatatcttcaaataattcatcaactgtcagggaactcattgccggttgtatgtatgattcaaattatcttgtcagatcttgtacttgatggcgttgtgtgttagtacttcccttatcaaatgaatcgcttgtttagcgagcagtgatctcatggtgtacttctatccaatgtactgaactgttatagtgttattatgggattttctctctctttttttt

SEQ ID NO: 27045 - DNA, 1544 bp, Oryza sativa
  ref <308>: DATABASE ACCESSION NUMBER: AK102487
  ref <309>: DATABASE ENTRY DATE: 2002-08-28
gacttcgctgcaaaaccctaccgtcgccgccgcccccgcagctatgacgtcatcgccggcggcgaggcgccggccgccgggtccgctggcgctggggctggagtcgtcggcgaacaagatcggcatcggcgtcgtctccctctcgggggagatcctctccaacccgcgtcacacctacgtcaccccgccggggcacggcttcctgccgcgggagacggcgcaccaccacctcgcccacctcctcccgctcctccgcgcggcgctgggcgaggccggggtgacccccgccgacctcgcctgcgtgtgctacaccaaggggcccgggatgggcgcgccgctccaggtcgccgccgccgcggcgcgcgcgctctcgctgctctgggggaagccgctcgtcggcgtgaaccactgcgtcgcgcacgtcgagatgggccgcgcggtcaccggcgccgtcgaccccgtcgtgctccacgtctccggcgggaacacgcaggtcatcgcgtacagcgaagggaggtacaggatcttcggcgagaccatcgacatcgcggtggggaactgcctcgatcgctttgccagggtgcttgagctgtccaatgatcctagccctgggtataacatcgagcagcttgcgaagaagggagagaagttcattgatctcccttatgttgtaaagggtatggacgtgtcatttagtggcatactgagcttcattgaagctacagcaattgagaagcttaaaaataatgagtgcacgcctgcagatctatgctactcattgcaggaaactctctttgctatgcttgttgaaatcactgagcgtgccatggcacattgtgattcgaaggatgttcttattgttggtggtgttgggtgcaatgaacgtttgcaagagatgatgaggataatgtgttcagaaagagggggtaggctgttcgcaaccgatgatcgatactgtattgacaacggggcaatgattgcatacactggtttactggcatacgcacatggcatgaccactcccctagaggagtccacttttactcaaagattccgaacggacgaagttcatgcaatctggagggagaaggagatgccagtgttaactaacatccgtgcccatgcaatggctgaagtatccaaagatgaagcttccgttccgactccaattgctgtagattcatgaggtaattcttgttcttttccttcctatccaaggaaatagaatacttggaaaggaagccagagtccagagacatgtacttcggttgatgatacgaaagcctttgtggcggcacatgggaagtttcttgtactgctgtgtggggttaacctggtgaaagatttggatcatcggcaacctcgtaacacttatgtatttcatgttgtatctctcaatagatgaaccatgattaaacaaaccacaccgtctatttggtcagttaagccctactcccttttatgtgatccattcatttgatgtaaaagcgattcctgctgctaatttcactcccatgctgtacctcctagggtgtgtttagttc

SEQ ID NO: 27046 - DNA, 1190 bp, Oryza sativa
  ref <308>: DATABASE ACCESSION NUMBER: AK102488
  ref <309>: DATABASE ENTRY DATE: 2002-08-28
gggagagagagagagagagagagagagagagattgtggatgcgaaaaccgcagctgggggcggcggttctgcgtcctcggtcgctttccatccggtgggcgcatcgcgtttttgcggtttttgcttctcttcttctttataaggagcagccaatttggtgcggggagccgtcgattcgccacgaaacccaacccgtcaacgctgccgctgaatctcactttctctctctgttcttggtgcttccgccgccatggctgctcccagcgtcgccgtcgacaacctcaaccccaaggttttgaattgtgagtatgcagtgcgtggagagattgtgatccatgctcagcgcctgcagcaacagctacagactcaaccagggtctcttccttttgatgagatcctatactgcaacattgggaatccccagtctcttggtcagaagccagttacattcttcagggaggttattgctctttgtgatcatccatgcttgttggaaaaggaggaaaccaaatcattgttcagtgctgatgccatttctcgagcaacaacaattcttgcctcgattcctggaagagcaactggagcatacagccacagccagggcatcaaagggctgcgtgatgcaattgctgctggaattgcatcacgtgacggataccctgcaaatgcagacgacattttccttactgacggagcaagccctggagttcacatgatgatgcagttactgataaggaacgagaaagatggcattctctgcccaattcctcaatatcctttgtactcagcctccattgctcttcatggtggagctcttgtcccgtattatcttaatgaatcaacaggctggggtttggagatctctgaccttaagaagcaactcgaagattctcggttgaaaggcattgatgttagggctttggtagttatcaatccaggaaatccaactgggcaggttcttgctgaggaaaaccaacgggacatagtgaagttctgcaaaaatgagggacttgttcttctggctgatgaggtgtaccaagagaacatctatgttgacaacaagaaatttaactctttcaagaagatagcgagatccatgggatacaacgaggatgatctccctttagtatcatttcaatctgtttctaagggatattatggtgaatgtggcaaaagaggaggctacatgg

SEQ ID NO: 27047 - DNA, 1361 bp, Oryza sativa
  ref <308>: DATABASE ACCESSION NUMBER: AK102489
  ref <309>: DATABASE ENTRY DATE: 2002-08-28
gctctctctcttccgtttgctatatattggcacttaattaacacagtggcctaagcagaagccatgtgctagggaaagcaagtcttcctcctctctctctctctctctctctctctgcttctctcacactctactgctgctcatcaccatcatcaccaccatggcagtgctcctctccatcctctcctcctctttcctgctgctcttggcggcctcctcctcctccacgccacgcgcgtctgcgtgcgagaggtgcgtgcgcaacggcaaggccgcctactcgccctcgctctcccctctcccacctggtggtggaggaggatgtgggtatggggccatggccatggagatggagctgaatgggggattccttgcagccgggggtccaaggcagcacaggggagggcttggatgtggaaggtgctttcagatgagatgcagaaatgcagaggtgtgcagtaacgcaggcgtccgcgtcgtgctcaccgactttcacaggagcaacagtacggacttcctgctcggtgggcccgctttcgcgggcctggccaagcccgggatggcccacaagttgaagaagcttgatgctctgtcagtagagtacagaagaattccctgcgactacaaggacaagaacctgtccatattagtagaagagcagagcaaaaggccaaacaatttggtcatcaagttcctttaccaaggtggccaaactgatatcttagcggtggatgttgctcaggtgggatcatcggattggcggttcatgacccgggtctatggacccgtttggagcatcgaccgggcccccaacggaccgcttcagttccgggctgtggtgaccggtggttacgacgggaagtgggtctgggccgaccgggaggttcttcccgccagctggcagcccggccaggtgtacgacaccggtgcgaggatcgccgacgtggcgagggaaagctgcctagactgcgccacgctggactggaagtgaaaggtgtgctagacctgacgtatctggcactgcaaagaccaggtacatgtagatacagtcctcatagggtgaagggacagcgctggggttggaaaaaacagaggctccccttccctgtcaaaacaaagagatacaatgttttttatgggggatagctgtgatctccctgtttagccccttgatttggtctcttcttccaatatgcatgtgttcactgaaccatgcatatgcatatgagagatgtgtcatcaggatctgatgagatggtggtggtggtggtgggctcaggggaatgtaaacaaatgtaacctagctacccccatactaattgctagaataatgaacatagttccagtgttttgtccttggc

SEQ ID NO: 27048 - DNA, 1831 bp, Oryza sativa
  ref <308>: DATABASE ACCESSION NUMBER: AK102490
  ref <309>: DATABASE ENTRY DATE: 2002-08-28
gtgtagattatgagcagtacaaccgctgccgatgtttaccgtgctcacacaggtcacagcctcctgagtcctgacctacttattccttctgccggctgcaattcgtgtttgatttatgtgagttttttttttatctgtgcgatttctattcgtctcccttttctcttttccgttttggtttctatctctcagtccgtctgtgtagttctaaacctctcatatttgtaatatctgattttgtgttttctccgttttacgtgatgagtcggtcgctcaatcggatttacgtaccaaattgggatttacgtaccaaattatgttgcgtctaatataccaaactggagtagtattaggtgtgggttttttcgtggatgcggtgaaaaagaaagagcgacggacaaaaaaaaacacatgaaaagatgtgacgattgggaaaatatgaatctttttaattagttattattattattattattaatattattattattattaagaaatatcgtcataacgttggtacgggcatatcagtagctagtaaacttaaccgaaatttgttgaaacttggcggatcagtcagaaaggtgaattgcggagttgggactcctcgggcccaacgaggtccatccggttcgtgaacaatcttcctgccaataatccatataaatctctccatcaaaagccctaattcaattgccagcgagggactcaaatcggtggtgggattatcgacatcgaaaagctagctaggcagctaattatgggatctgtgatgggctccctcgccctcgcctaccacgatgcgagggagtttcggatggagacgaagcggaaggcggagcacgaggttaacctgctccggccgccggcgttgctgcactgggacggcggcgacggcgagcagcctccgcccctcgacgagcggcgacggatcgtgcaacgctggatcgaatacgaaaagcgcaaaggccctcgccgtttcgaatatctcccagggttgagaggatggtgcaaatgatgctcggccaaatgtccgcatcgccctctattattacaactgcaatcatccgggtgctgagttcgattgtgtcaggtccctgagtgctcattttgcttctttcagaggtgaaatttggtcccacgtcaacttcctggctcgcaggaggggttgtattgatgcccccgtacttcgcttcttcgctgagctattctactatggccctctcgttgaaacacccgttgtcgtatcatgcatcgtattacgggaggaaccactgttcgtcgtcaggagaatagaaggtcttcaagagccagtacaccacaccactaaaagggaactgtcgataacagaagagccagggagaacagaaacggttcaagaggcgccgctggtccagtacagaagcagttgtgcgttttgcagcgaccggcattacgaggttttgcaccccagcgaggaggaattcgtgtgtggaaaggagggccaggaagtggagccatccgggtggttctactggatgatggacatcggcggaaggttacccgatcgcatccttgtcagaccaagatgttttttggatgatgtgagcgatttttgctctttcgtattttatgtatttttcatatggctcgccagactagcgagtgcaatcaaagtaagtagcataggttagttgatgtaccaagttatttacccggcccgctcaatctacggatgaaaacggattgaaattggatggaaattagctctagctgtattatattcattttcatatttttggaaacagaattgaattaaaaattcccagttgaatcaaatattattgaatac

SEQ ID NO: 27049 - DNA, 1310 bp, Oryza sativa
  ref <308>: DATABASE ACCESSION NUMBER: AK102491
  ref <309>: DATABASE ENTRY DATE: 2002-08-28
aaaaccgatcgcacacccatccgccggcgtcctcagctcgatctgctgccgaaattcggcgcggccgccgcagcatacacactctcctccccttcttgactcccaactcgccgtctcctccctcctcgctgctcttgcccccgccccacgcgcgcggtccactccaccatcccttcctcgtctcctccgctcctcgcgcgtcaagacgagccaccgctgccgatctccatctggcgagcagagcagaggaggggatcttggtgtaagtttgtgaagcatcagaggacagttgcatcaataaagttgtctcacgatggcctatgatggagatgaggaacaaagccaggattatctattcaagattgttctacttggtgactcttctgtcggtaaatcaaatttgctggcaagatttgcaaggaacgagttctatccaaactctaaatctactattggagtggagttccagacacaaaagttggtaattgatggcaaggaaatcaaagctcagatatgggacactgctggacaagagcgcttcagagcagtcacatctgcctactatagaggagctgttggagccctacttgtttatgatattagcaggcgtcagacttttgatagtgttggtcgatggctgaatgaactgcacactcattccgatatgaatgtcgtcacaattcttgttggcaacaagaccgatctcaagcatgcgcgtgaggtgagcaccgcagaaggcaaagctctggctgagtcacagggcctcttcttcatggagacctcagccttggactcatcaaatgtcgcggaagctttccaaactgtagtgaaagagatatacggcatactaagcaggaaggtatttcaatctcaagagcagaagagaagcgagcagtcattaagcaacgggaaacccgtgatgctgagcgactccaacgaaccaaccagtggtgggaggtggtgctgttcttcatagagcctgacctgatgacagagccctggtgtaatgccatgggattgggagacacatctgtccatgtactgcttcaggtttggtttagtgaaacaaacagtggttcccaccttcttctctagaggtaagctggctgagtgaggttggttgtatgaaaaaggcgtgtgtgcttgctttccatcagaggaaaaatctcaatgtatagttcgattgatcccctttctgaggtattgggtatacgtgattgtgtaaaggaaaaagtgtgaccaactgggctgttgtgtcattctctctacatcattctagccttagattacttgcttttttgccgtgcttt

SEQ ID NO: 27050 - DNA, 875 bp, Oryza sativa
  ref <308>: DATABASE ACCESSION NUMBER: AK102492
  ref <309>: DATABASE ENTRY DATE: 2002-08-28
gactcccactcccatccccatcaccaccttccccctcgtctctctcactctctcctcgccatggcgctccacctcttcctcctcctcctcctcgcggcgagcctcgccctcgccaatgccgccccgccgcccaacgacgagggcgccaccaccatcgtgctcaaggacggcaccacctgcaagctctgcgcctcctgcgacaacccctgcaacccctcctactacccgccacccccgccgccggtcgtcacccccacgccgcagtgcccgccgccaccttcctacccctccggcggaggcggtggcggaggcggaggcaccgtcatgtacacctcgccgccacctccctacagcggcggtggaggcggcagcagcaccggcggtggaggcatctactaccccccgcccaccggtggaggcggcggcggcggtggcggctggcagcagggcggtggaggaggcggcgcctacccgacaccgccgccgcccaacccgttcctcccctacttcccattctactactacagcccgccgccgccgttctactccagcggctcgtctgtcgccggcgtgtcggccatttcgtcggcggcggcggcgacattcacgctgctcctcactgggctcctactgtggtgagaactgagaatgggatagatctgctgagttaaacctatgtctttctttacactaggtgggtaatttgattgtggtttctgtaatttaattttttattttttattttttttacttctctctcttggtgatttatgtatcgatcaggtataagaaaaaattgtaccaaactgtaaaacatgggcaagtaataagcaccagtacagttgtactactacaaatagatggatctgctgatt

SEQ ID NO: 27051 - DNA, 1850 bp, Oryza sativa
  ref <308>: DATABASE ACCESSION NUMBER: AK102493
  ref <309>: DATABASE ENTRY DATE: 2002-08-28
gggagtaaaactgtgcttcaaaccatccgcggcggcgtcagtgcaccagacgctcaggatggcggcggcggcggccatggccgcgagtcgccgcctgctccatctgcggccggagctagggctgcgcctgcgctcccgtgccctaatcccctacccttcctggacgaaggcgatgggtcgttgccggtatgagccgtcaccgcggaggctctcgagctgccggcgagcagccaagaatgagcggccatggaggtcgagttcaaatgagcagctgactgatggcgatggcacagccaagtacatgggcaggaatttccccgatgaattcgcacagctttctttggaagaggaggaaagcgacgatgaggtgcacggaatcagcgaaaccatggtgaaagatgtggagaaggctgcggtcgagttgcttgctggcaggtaagaattagcaagcgattttcaactcaacatccatccagaaatattggaggaatatcactgaagcactgctaaagcgctaattataaccaacattttctctgagtgttactggcccttctcgtttggtggtattggttgttgttctaatataagtggttgttttctagttggtgtattcccatgaacttgtttctgtaggtgtcatgtcgccacgaacaatgtgaagatcttccttgccactgtaaaaaaagtacttgaagaaaagaatcacgcctttctgttgtgcaaaaatgcaagcctttatttcaggcaagcatggtttatgcacaatggtaaggaagccaaagaactagaacataacatatgcagctagctgatttgctcatttctgctatcatggtcttgtcttgttttaagtagcttacatagtccaaaggaaatttctgcgctataaattctgctcacttatcacagaagtatatctttagtgtgttgtttaccactgttgaaattgaaatctgaaatgcacatccttgtttattttgagcagagcattcacagttcatttctgctatcatggtcttgtcttgttttaagtagcttacatagtccaaaggaaatttctgcgctataaattctgcccacttatcacataagtatatctttagtgtgttgtttaccactgttgaaattgaaatctgaaatgcacctccttgtttatcttgagcagagcattcacagtttcagatcttaggaagaaactacgtgctaagaagtttcctgataatgcagttgattctgtaattgctgatttcaagtcaaggggtctgttgaatgatggttattatgcggaatctttttcacgatctcgatggttatcatcaacttggggcccaaagcgtataaaacaggcacttcgccaaaaaggggtgcaagatgcagaagtagaccaggcgacaaggagagtattccaagatggtcattcaaaccagacaatgtatggcatttccgaggattcaatggatcatctctttgagcaggcagctaaacagtggcagcgggggcaaagcttgccccttgagaatcgccgtgcacgcgtagtgaggtggcttcagtaccgagggttcaactgggctgtaaccaatgccattgttaggaagctggaagcacagaaacctccctgagtatggaattgatccttctcctttgctgcttttcaactttgcaatttacaatggtttgctatttctgtcgcaagtttagcttgcaggttccttctatagttatgaatctggtttctgattaacatgccattttgaacaacggggaacgatgattaacatggtcatcatccaacttacattaactcatccaattgcatgattaacatggtcaatcaacgcataggaagc

SEQ ID NO: 27052 - DNA, 2224 bp, Oryza sativa
  ref <308>: DATABASE ACCESSION NUMBER: AK102494
  ref <309>: DATABASE ENTRY DATE: 2002-08-28
ggttttccttcccacacgcgcacacacacagacagacaagaggagtgagggggaagaagtgcttgacttcaccaccaatggcggctgctgcggcggcgctcttggccttcgtcgccgtcgccggcgccttggttgcgcaggccaccgacccctacgtcttcttcgactgggacgtctccttcatcaccgcttccccgctaggccttccccagaaggttatcgcaatcaacaagcagttccctggccccgtcatgaacctcaccaccaactacaatgtggtcgtcaatgtgctcaacagcttggatgagccattactcatcacttgggatgggatccagcaaagaaagaattgctggcaggatggtgttcttggcacaacctgccccatacctccaggttggaactggacctacaatttccaagtcaaggaccagattgggagcttcttttacttcccaccccttagcctgcagcgtgctgctggtggtttcggaggtattactgtcaacaaccgcgccgtcatttctgtcccattcgacacaccagatggagatatcaccttgttcattggggactggtacaagaagagccacacggacctgaggaagatgctcgatgatggaaaagagctcgggatgcctgatggagttctgatgaatggcaaggggccgtataggtacaatgattccctcgtccctgctggcattgaacatgagactatcaaagttgaaccaggaaaaacataccgtttccgtgtccacaatgtgggtatatcgacgagcttgaacttcaggattcagaaccacaatttggcccttgttgaaactgagggatcatacacaatgaagcagaatttcacaaatcttgacatccatgtgggacagtcctactcatttttgatcaccatggatcagaatgcaagcagtgactactacattgtggccagtgctaggtttgttaatgaatcactgtggaccaaagttaccggtgttgcaatcttgcagtattcaaattcaaagggaaaagcttctggccctcttcctgatccaccaaatgatgagtacgacaaaactttctcaatgaaccaggcacgctccatcaggatgaatgtgagtactggtgctgctcgtccaaatcctcaaggttcatttcactatggctctatcaacgtcagccaggtttacaagctcaggaatgaaccacctgttactatcaacgggaaaaaacggactacactgagtggtatctctttttccccacctgatacccctatgaggttggcggatctctatgacaagaaaggagtgtacacgcttgacttccctactatgccaattgatggaccgccagtgatgaaaacttctgtcattaactccacatacaagaatttcttggaaattgtatttcagaacaatgacacgaaagtccagacctaccatatcgatggatatgcattttgggttgtagggatggactatggtgagtggactgagaatagccgtgggacttacaacaagtgggatggtgtttctcgttgcaccacacaggtattccctggagcatggactgctgtgatgctgtcacttgacagcccgggtttttggaacgtacgcaccgaaaatctggacacatggtatcttggtcaggagacatacatcagggtggtggatccagatggaggctataatgtcactgagatggtggctccagataacatgctctactgtggcctcctcaaggataaacagaaggctcagaagcctcatggttcatcaagttcatcatcctctgctgcatcaccaaaccgctattggcttgcagttgtggtgtctctggtagcggcggtgttcgtccaatgaaaatatttttcctgttagtgccctgttggctgttgtttgcaaattaggaaactgacagaattcgggtaggtcgaaaaatttgtaggttccatgattcgtgtggaatactgtcattgtgcatcggcaaagtttgtcggaatttaacagagattgtgtaaaccattgcattgagtctgtgtgtcggcacctgcaaggagtggtgcctgagagtgtgttttctcgcatcgatcgacttattagtagagatctggatattgatgattgtcattccatctcaatttagtactactagctagagaagtttgtctctcctgttcctgtctctctgtatgaagttgcagatactataatattttggggcttgc

SEQ ID NO: 27053 - DNA, 1310 bp, Oryza sativa
  ref <308>: DATABASE ACCESSION NUMBER: AK102495
  ref <309>: DATABASE ENTRY DATE: 2002-08-28
gacctacttcgagctgagcctgatcgattcgcgagatttccgttcatggcggcgaagtctttgagggagatcaggagagcggcggcggcggggattgggagtaggagatgcttccccggcgacgcggcggcgacggcggcggcggcggcgggggtggcggaggggaaggtgggaggaggagcggggaaggaggtgaacctgttcacggccatcaaccaggcgctccacatcgccctcgacaccgacccgcgctcttatgtcttcggggaagatgtgggtttcggtggtgtcttccgctgcacaacagggctcgctgatcggtttggcaggaatagagttttcaatacgccgttgtgtgaacagggaattgctggatttgccgttggtctagcagcaatgggtaatagagctattgctgagatccagttcgcagattatatctttccagcttttgatcagattgttaatgaagcagctaaatttagataccggagtggaaatgaatttaactgtggaggattaacgattcgatcaccttatggcgctgtcggtcatggtggtcactaccattcacagtcaccagaggctttcttttgtcatgttcctggactcaaggtaatcatacctcgaagtccacgtgaagccaagggattgttgttggcaagcattagagacccaaatccagtcgtattttttgagccaaagtggttgtaccgtttggctgttgaagaagttccagaggaggattatatgctgcccttgtctgaggcagaggtgattcgtaaaggaagtgatataacactaattggttggggagctcaacttgcagtactggaagaagcatgcgaagatgcagcaaaggatggaatatcttgtgagctcatagatctaagaacactgattccatgggacaaagaaacagtagaggcctctgtcagcaagacaggaaaacttcttgttagccatgaggctccaatcaccggagggtttggtgcagaaattgccgcatccatcaccgagcgctgcttccaaaggttagaagcgcccgtcgcaagagtatgcggcctggacactcctttccctcttgtttatgaaacattttacatgcccacaaagaacaaggtcctggacgctatcaaagcaactgtaaattactgaggtgctggagcaagctacctatgcgttgttccttgacagtatagacaaaaattatgtgcaccttattgctggttgtagcctgaatatgcatctccataaaagcattgtatttgataatatagaattatagatcaataaagccgtgaagatgc

SEQ ID NO: 27054 - DNA, 2186 bp, Oryza sativa
  ref <308>: DATABASE ACCESSION NUMBER: AK102496
  ref <309>: DATABASE ENTRY DATE: 2002-08-28
ggcagccgagaccaccctgctgcagctgctgtgctgcgcgggttaaaaagagagagatctattaactggccctcctctcccacagcaaacacactcgtgtcgtactgagcatctgagctcggtggttgccgaggaggattcgccggcggcggcggcgggggggagatgtcgcagcatgcggtgtgctgcggggcgatgttctgggtgtacctgatgtcgtgcgtggggctggtgatgttcgccgggctcatgtcggggctcaccctcggcctcatgtcgctcagcctcgtcgacctcgaggtcctcgccaaggccggcaccccgacggacaaggacaacgccgccaggatcctgccggtcgtcaagaaccagcacttgctcctctgcaccctcctcatcggcaactccctcgccatggaggcgctgccgatatttctggactcgctcgtcccgtccttcggcgccatcctcatctccgtcacgctcatcctcgccttcggtgagatcatgccgcaggccatctgcacgcgctacgggctcagcgtcggggccaaggcggcgcccgttgtccgggtactcctcatcgtcttcttcccggtcgcctacccaatcagcaagttgttggattgggtactcggaaagggccatgttgcacttatgaggagagctgagctaaagactttagtcgatatgcatggtaatgaggctggcaaaggtggagagctgactcatgatgaaaccactatcattacaggagctttggagatgactcaaaagactgcaaaagatgccatgactcccatatctgaaaccttctcacttgatataaacgctaagctggacctgcacacaatgggtatgataatgaccaaagggcatagtcgtgttccaatatactctgggactccaaacaatattattggccttatattggttaaaaacttaattacttgccaacctgaggatgaagtgcccattcgaaatgttactatcagaaaaatcccaagggtgtctgatgatcctcctctctacgacattctaaacgagtttcagaaaggtcacagtcacatggctgtggtggtcagacgcataaaagaaccaggagcatccattgaaaagacttatagtgacagatcagattacaaaactaacagcgacagatcagattacaaaattaaccacagagatgcccatgctgatggtttgtcaccctctcgtgtcagcattgctggaagtcgtcgaagtaacattgaaaagaatggagaggtgcgcttatataagaaatcagaaaaaaagcgggacaatattcttgattttaatagcggtccacttccaagctattcattggatcaagaagcagtggggataatcacaatggaagatgttatggaacaattgctacaggaagatatcttggatgaaacagatgaatatgttgatgtacataacaagattaaaataaacatgctacctctgggcaaatcattatcaccaactatatctccaagtaatgggccccattcccaaggactcaggaggacccctatgacttctccattgtcatcataccatcatggtggctccatcttacgttcccctgcttcaaacaatcctcagtctcctgggactttgccgacaataatttctcctgaaagatcgcctgcttctcaagcaccttcgcgtagttcacctaattcaactcaggtctcaaggaattcgtaaaacggcgttgagagctaaagagctctaaggacaacgtttcctgagaaatggtaaaatgtcaacataaacagattaagacattttgagcttaggactgaattatacagatcagcatatctcttgtactgttgatgcttatttgttgattacatgcttgtatatacgtatggcttagcatctggacatcgctatagatggaagtctcactacctactgtagatgtatttttgtcagcttgcaattaccattgcagaggaaagcttgaagataaaaatgtaaaaggaatgcactagtatgcatttgtgctgttcttgtatgcatgcccccatcattttaatgatcagcaagcagatgttggtgcattcactgatggctatccacaccatttaagcactgtacaagtcctctcatattgtatcagaaattcagattagtgataaggcgcaagcttatgtttgtgatgc

SEQ ID NO: 27055 - DNA, 867 bp, Oryza sativa
  ref <308>: DATABASE ACCESSION NUMBER: AK102497
  ref <309>: DATABASE ENTRY DATE: 2002-08-28
gagtgtagttgaactgtttgttgagagttgagacccgagagagcaccggagagagagggcgccgcaatggagggttccggtgctcaacctgtcggcggcgcggcggcggcggcggcggcgccgaagcggaacaacatggactacaccctcgcggcgctgaagctcttcggttgccagctggccggcgccaccgaggcccctccctcggagtcggacggcacctcgcaggcccagatgctctacggcatccgcttccagcgcgtctggctccagggcgtggtggtgctggcggactaccgcgacggcgccgggcacattcttgtggatgacggctcctgcgtcgccgagatcacgctcacaccgaaggaggccgaggggcagccatggcgagaaggcatgtatgtgatggttcttgggtcatatagtggaaaggaatctcttcctcgggccaatcggccagtgattaaggtgcataagctagtcgatctttccgcgcagcccgaccgtgaatcaatgtggtacatggaagtagttgaggccttcaacttcttttacttgcagttctcggctgctagcccactgatgaagcgctagtgtccctgacctcttgttctctccagtgctcagatgcttcgtttggctgtaggcctgtaggctgtagcccttcctaacacttgtccagtgcctatttttaacgggtagtttttgttagggctaatatgtactccttcgagcatctcacattgtggtcgttcatgtcgtggatgggtttatttgggagacgtaaacttttatcccaaggaaacttgtccagagtaatactaacctttcatgttggtaaaagagaatgaattctcagatgcactc

SEQ ID NO: 27056 - DNA, 3458 bp, Oryza sativa
  ref <308>: DATABASE ACCESSION NUMBER: AK102498
  ref <309>: DATABASE ENTRY DATE: 2002-08-28
gtctctttcctcctcctcctcgcgcagccgcgctcagatccaaagccgcgcgcgggggagggagggaggaatcgcggtgccaagaaacgaagccctagccccccctagatgcgcgccgccgcttgctgctgctgctgctgctagggttcttgtacggagatgcggggcgtcgagtcggatggcggcggcggcgcgcctttctcctcctcctcctccgcggccgctccagataatttcgatgccgcgcagtactccttcttcgggaaggagccactggaggggctcgagctcagttgcttggaggatggcggcggcggcggtggtgatgccaatggcggtagattcagtggaggagcagaagaagggctgtaccggctctcctctgttggagaagagattgataatctgagtaacttgtccgatattgatgatcttgcgagcacttttgcaaagttgaaccgaaccattagtggaacacggaatcctggtgttattggtgacagacgatccatctcaagaggaagttctctaactgttgattgggctgaagatgtagaatttcctaactgggtagatcaagacattttagaggatgaggaatttcaggaaagtaaaagatggtggtcacagtcacacactctggtgcagcaaggggatgccaaaccattgagccgaacatcttcctatcctcagcaaccactgcagcaccgggcaagtgaacctatcattccaccaaaatctccttcatttacgtcctttccaccgccaggtggtagatcaccttatacttctcaaggccttacacgccatgggagcattccatcacttggtgctggcctgcaaatgggttctccaagcatgtcccttccaagttctccatatcatatagctggactatctcatggactaccgtatggagggagcatgtccttcggcacttcaaatctgcctgtaaacaatccaatgcaaaatgacggccaagccaagccaatctttatgctggggagtaatttaatctactgccgaacatgttacagaaacaaatatcacttccaaatagcccgatgtcatcactgttattttctcaacagcagcagagattggcacaagttcaagtccaaccatcccatcagaattacctaaatttaccacctcacatattttaccaacatcactccccagaattaacaggaagatttgattctgttagcagtgttccttcatcaagagacaagagatcaaggtcaggaagaggaaaacacaacatacgtttttctcaaccattgcctgatactggtaatcaaaatggtgatagtggaggaataaaattcagatctaagtacatgtcatctgaagagatcgaatctatcttaagaatgcaacattcagcaagtcacagcagtgatccttatgtggttgattattaccaccaagcttgcatcgcgaaaaggggtgccaattctaggccaaaggccaattttgccccaacgtcaatgaaagacttgccttccaagtcccgatccagtggtgaccatcatgcatatcttcaggttgatgctgtaggaagagtttccttctcttccatacgtaggcctcgttctcttcttgaagttgaccttccttcatcaagtgatggttctcatgatcagaagtcttctctgagaccattggagaaagaaccaatgctggccgctagagtcactgttgaagatgccctctgccttcttcttgaggtggatgatattgaccgtctgttgcagtctagtcaggcacaggataacagtttccaactgaggcgaagacggcaggtcctccttgaaggtttagctgcatcacttcagcttgttgaccctctcgggccgagcacatcaagccattcatctggattggctgctaaggatgatcttgtttttcttcgcattgtttctcttcctaaaggacgcaagtttttgtcacgttaccttcgacttcttacccctggaagtgagttgacccgtatagtatgcatggctatttttcgacatctgaggtacttgttcgggggtttaccatcagattctagtgcagcagaaacaacagttactcttgcaaagactctttcatcttgtgtgcgccatatggaactaggtgctcttagtgcttgccttgctgctgtggtctgttcacctgagcagccacctctgcgtcctctagctagctctgctggtgatggggcttctcttattattaaatcagtactggatcgagcaactgagttactgactgaccagcatgccgcagccagctatacagtgtcaaaccggactctctggcaggcatcatttgatgctttctttggacttctggcaaaatactgtctcagcaagtatgaaagtattaggcagatgtttaccatgcagtcaccaggctctgtaattggatctgaggtctccaaagcaaccagcagggagatgccggttgagttgctacgtgcaagcctccctcatacaaatgatcagcaacgccagctgctgcttgattttgctcagcgaaccatgccagtgactggttttaatgccagcggtgcaaatggtgggcacatcacctccgagtctgttcctggttgatttagctcaagatgccaaaaagtgtagattgtcaatgcttaaaggacttaaatgtgcttgtctttggatgataattcttttatatctggagacatgcataaccccttcataagggatgaactagccgtctcgttggggcgaattttagcttttaacataacattcatatgctcccagtgaagaagacatccaagactagtgggtttagcagcagtggttgtacaggctctggtactttgaggccttcctgtctgtctttttactagtgtggaaggttcctagcgtcaagtgcgtagtagtctggtcttatcatgttttaattaggatcaaaagtgtgttggggataatgaagtggtgatgtttgttaggtttctggaaagatatttaaaatgtcatggagatggccaatgtttccaggtacctactgacactatagtgaggatactggaagctggggctatattatctcttatttatacatggttacaatttgttgtcattttatttcttgcctccaggttactctttgctcaaaaacatttttttagggggaaactctggttgcatcatatactttttaccaggattaaggctgcctgcctttgttgtaagtttgtgtacagtagttattagttgcagccttaaactggatcatttgaatgaagtagttgcagttaacctcgtgtgatggttagatgtatcagtaattctgcatgaaaccctgagcaaatgttagcctcttctggattggacgaattcatggaaattttatggaaattaagctgtacattatgcgattcttgcattcggaagaagccaatatcaatgtgtgacaacagttctcggtttatg

SEQ ID NO: 27057 - DNA, 2043 bp, Oryza sativa
  ref <308>: DATABASE ACCESSION NUMBER: AK102499
  ref <309>: DATABASE ENTRY DATE: 2002-08-28
ggcctgcagcatagtgcaccacactacaccgtccgctcagcgaaggcgatataacagcaatgcaggtgcagcaacgcaagcccaaggcttgcgccgagagcgccgcggcggcgcgaggagcggatcagcagcagtgcgacggcaggccgctggaggcgggcgaggagtccctggagcgctccgtgccgcggaagaggaagccagctgcggcggtggctgctgccgagaagcgatggagctccgtggcctacgtcgtgctcgccgcctttgtcatggcgacggtcttcgccgttcttggcgggcggcgccccgccgtctggatcgccgccaccaaggccctgcgtcgaggttccgacgataaatcgattccattggcacgaagcgccgctgacaaactcctcggcggcctcttgcccgaaggattcgacgagaaatcatgtcgcagcaggtacgagtcatacctgtaccgccggaacccgggccgacgaccatctccgcacctcgtggcgcggctgcggatgcacgaggagctccagagacggtgcggccccaacacggagtcgtacaaccgcgccgtgcaacggctgaggggcggcggcgccgccgaggccgacgcgcactcgccggacgacgagcagtgcaagtacgtggtctccatctcgtaccgcggcctcgggaaccgcatcctcgccgccgcgtcggccttcctctacgcggtgctcaccggccgcgtcctcctcgtcgacccgagcaacgagatggacgagctcttctgcgagccgttccccggcacgacgtggctgctcccacgcgacttcccgctggcgtcgagctacgcgaacttcagcgccgacaccgccgagagctacggcaacatgctgaagaacaaggtgctcgggacggacgggagtactgacggtgacatgcccgcggcgcagatgccggcgttcgcgtacctccacctggaccacgactacggcgacggcgacaagatgttcttctgcgacgacgaccagcggctgctgtcgaacatccagtggctggtgatgaggacggacacctacatcgtgccgtcgctgttcctggtcaccacgttccaggacgagctcgacgcgctcttcccggagcgcgacgccgtgttccaccacctcggccggtacctgttccacccggccaaccatgtctggggcctcgtcgcgcggtactaccgcgcgtacctcgcgacggcgcggcagctggtcggcgtccaggtgcgcgtcttcgaccaccggcaggcgaagtcgccgcacgtcgtcctcgagcagatcacgtcgtgcgcgtggaaggagaagctgctcccggaggtactcgacgcggtggaggacgcggccatgcccacgccaccgacgacgccgcacggcgggagcaacaactccaaggccgtcctgatcacctctctccggccgtggttctacgagcgcgtcaaggctatgtactgggagcgcgcgacggcgaccggcgaggacgtgagcgtgcaccagccgagccacgaggagtaccagcacttcggcgagaagtcgcacgacggcaaggcgtgggcggagatgtacctcctgagcctgtgcgacgtgctggtgaccagcggctggtcgacgttcgggtacgtggcgcaggggctcggcgggctgaggccgtgggtgatgtacaagccggtgaacatcacggcggtgccggacccgccgtgcggacgggacgtgtccatggagccgtgcttccactcgccgccgttctacgactgcaagacgaagcgcggagtggacaccgggacaatactgccccacgttcggcactgcgacgacgtgagctggggattgaagcttgttgatccgaatggaagtccgaactagtacaactgtataaggcttcatgctgcaaaagcaaactttacaaagatttcatttgcatgttttttttttgggccgggatggccgaagaaaagaccaccggaatgttattaaggttgagggaaaaattaaaagagaacaccataaggatattgaggtc

SEQ ID NO: 27058 - DNA, 3655 bp, Oryza sativa
  ref <308>: DATABASE ACCESSION NUMBER: AK102500
  ref <309>: DATABASE ENTRY DATE: 2002-08-28
ggaccggttttcatctgttcttgtcctgagaggaggcgagcagaaggctcgtgcgaccgccacgagaagggcgacgacggcggcgggatcaaggtcactctcgactcgacgacgacggcttgctcgacggcggcggctggcggctcatccccaaaccctaggtccgtcccaacactccaagaagccggcgcgcggcggcagcgggatcagggtcgctctcaacggcgacggcggctggcggcttgctcgatgatggcggctggtggctcatcatcaaaccctatgtcgagagaagcctcgtcctcggcggccgccgcggcggcgggggtggctgtgagggatgttggggatgacaagcccttgccgtcggcggaggttgacatcacctactgggcggcgcaggaagaggcggctgcgctgcttgagtcgatggccgcgagggctcgtggggaggacgacctaccggaggagcagctgcaagccaataaccaactacaggaagacgaggtaatgcttagtactagtactagttactagttcgcccattgcactagaatgtgtgtataagttcccaaacagtatcagtatgcagaaccatcaatcatgcttatggtgaacaaatttcgaagttactgtttatttgtgcgaagatttattccggatgtactgtgcgcagtagtactcaagtctcctaagacagatattgcagtgaaattacacctatataactttctggtttctctcggaggtcctaaaatctgcccagcagttctgatgagcgcatcactttcaattaggataccaaaatatggagatatatttatcaggaaagattaggatcactcaacttatacgtagctattgcctggcgtaatggattagcacattggaatactgccagttcaaatagcctaagtagtgttatgtttaggtaatagcactgcaagctatttttggtgatgatatggtgatcttggagaataaggacaatcttcgatttattcaggtaacataagtttcttttgaatcttctgttgtcctcaacttctatcttttgagaagattgttcatgaattattccacagatttttgtgcattatacacttcctgatagtatccgtgtgttcttgaatcttcgtcgaagtggagctatggttggaactgatgatagtgaaaaccacaatggcggagaactctatcatcttgcaggttgcagcatttgccacctgttgtgctaacatgtttgttgccacggtcatatccaagtatatgtgctacatattttaccatttcagctaaatggttggatgaaccaaaggtctcatacctgtgtgctgcgcttgatgaggtttggacagagcttccagggcaagaagtcatatacagatgggtggattggctgaatagctcttcgtggtcttccattgctttgaatgatgaaatagtgttagatccagataaaacattaaaaattggagatgaacgagctatcgcgagaagaattttagttgagtctactattcctcttatgcagagttacagtgagaagagatctcataagatatttttggaaagccttctcgtgtgtggaatttgtctaagtgaggatgttggtaattctcttgaactattaacctagttgctttgtcatttgttacttctgctacatttttttaaaagtttctattattgcactttacaaggcagaaatttcatcaagctcccatgccatcattccttttgtttgaagtgtatggagtctcactgcaaaatccatgtgaaagaagggaatttaatgcagctggcatgtcctgatacaaattgccgcaatccacttccgccatccgtattgaaaagccttctacgagatgatggatatgcacaatgggaatcatttgctctacagaaactgttagatgcaatgcctgatctagtttactgccccaggtgttctgctgcttgcttggaagttgacaatgatgctcaatgcccgggttgtttttttaccttctgcactttgtgcaaacgccgccgccatgtgggggatacatgtattactcctgaagaaaaaatacgcattttgaaggtaacaatagcataatctgttaagaatttatcattgttgtgaaatccagtaatactgtatgcattgagtatctatagattttttttatggttgttaattatcatatggagctcactttatatggtcatatggttgcagtgcttatctacagtagttcaaagtattgtaaaggttcccatgtaataattctgtttgaatttatttcatgtatgctgctttcctttcacaagatgttcacatgaacttttgtgggtgcatgagtttattattgtactagggcagatctttctcagtgacaacatgcttatgtatctgatttaataatgaaagggcctgacaaggatgtcatctatgcgagtaggccccagaccccaagttgtttccccggtaattagctagtgttagtgagctaaccagggtacacaaggcattccattctgcccactgcctcttctttcttttgtttcctttttctttccctacaggattgctttaagctaattgtaatgttttttcccttctgctataacatacacacagctatgctgtttttttcataaaggaaaaaaatgaagaatgaaaatgccatggtctatttgatggtgtgaatcaaatttcctacatcctttttttaaatctatttaatgttgttcactggagtactttataacaggaacgacagaaattgtattccataccagaggaacaattgttgaaagaaaagagggaaatagacgagttgataaatatccaggaagcacttcgtgattctaagcaatgccctcgttgtaagatggctatctcaaaaattgaaggttgcaacaagatgacatgtgggaactgtgggagattcttctgctatcgttgtaacaaagcaattggaggatatgatcatttctggtatgctgttgattaatgtgcaaatatttcatattcgattttctgcatattgagctagcaactgaagttattcctaccgaaggaatggaaactgtgatatgtttgagagggaacaagatgaaaacccacagcagcaggatgatgaaaattttggtggcgaccctgacgaagatgctgaactcttagaacctgaatgggtgctgttaacttatccctgtccaaactgtggccgtcggaatgaaaagctcggtaccaacaatcatatactttgcatcggatgccgaggccattattgtgcgttgtgtcggaaaagagttttgaggggcgagcaacactttggacctagaggctgccagcaacacactgaagattgatagagatctcgtatgttgatcgctatgcagaatgttgttttgcctattccaatggcatactcgtacctctgtttctgacacccgctttgtacccaaaattagagttttcctgtagctgtatcatttaatttgcatcaggaatttcataacacttaccagttataggcagttacactgtttatgtttgtggaaaaacagataccatgcacctgatttgaacaaaacaggttttggcttgtaattagtgaacagttcaggtgtgtggagaatgaaaattcaattatccattttaagc

SEQ ID NO: 27059 - DNA, 1415 bp, Oryza sativa
  ref <308>: DATABASE ACCESSION NUMBER: AK102501
  ref <309>: DATABASE ENTRY DATE: 2002-08-28
atttcgattttggatctagtcgctgcgaagttgagtggacctaatcgtgaatttgtagaaaatcttggagaattcttactgattttgttctatatccatcgaagaactatcttttcgttgcgaattttaggagagatacatggcctactggtcctggcttgtaacgctgtacatgtgagtttgggcactaatcctcttttgctcgatgagtttttttgtttgatttttaacccaaaaatttggaccatatgaaactgtcagagtagataatggttgcctggttggtattggattaaaatggggaatggcaaggaattgaggtcatatgaccttgtgtggtgatccaagttttttctcccctgcattctgtgtgtgctgtacacacctatctaattatttgatcaattacagatttactcctttttatgtaggctagttgattgaattgatgtgcaaagtattgattagcagtaagtttcagagctttcaggattttgttttgtataagagagttgtgggggtgattcttgctctatcctatgagaacttactggatcagaattttggagtttcaggttaagttgctattaatgcttgtgaagagtagatagctatatggaatgtcagatgttgagtaatgaatgtacaaaaacaatacctttgtaaaaaaccttgcctataacatgaactacatttctgacgctgtttatgtcaaattaaccacatggactagtttagttacctagaactttttatccaacttgaaaccttttgggaggttatgttgtcatgtgctacagtgacaagggcatatggaactagaaccattagtgatctgatgatttcccatctcacactatccttgtgatattatgttgtctgctggattcactgttaacttggagtattccctattggtgttgcatgacgaagtgccctcaataatatacattgattgcatatgtagctattttgtttatttgaacctagccagtttgcatggtctcgtcagtttgtgatcaagaatgtatttatattatgatagatagttctttatattctacatgcaagattgctcacagattccaaaccattatttttaggtcaaaatcggaagggctgctgaaattgttctgctaaagatgtcacttgtcccagaaattgtccattgaagagttttttgctgatgctcttgtagacttgtccattaaagatgtcacttgtcctagaaattgtccaatgaagaaattgtccattgtccattgaagacttgtctgtactcttgtgtgcatatgctctatgcagatgcatatatatattgctatcctaggtgcaacagaactgtttttttttttacctgagatgcaacagatgttgaatgcatattgatagtctatggagtcttgaattgctgg

SEQ ID NO: 27060 - DNA, 2359 bp, Oryza sativa
  ref <308>: DATABASE ACCESSION NUMBER: AK102502
  ref <309>: DATABASE ENTRY DATE: 2002-08-28
gtgaaaaaccccccctctcggtgttgctcaccccgaccggcgggccgccgctccaatccaccacccctcccatggcggcggccaccgagcagcactgcggcggcggcggcggcgacaaggagaaagacctcctgtcggcggtggtgggcgacatccgctcctattccggctccgaccccctccgcccatggctccggggcatgaggaagatggaggcggcgctgccgcccgcgacgctgcgggcgaagctgcccaggttcctgcagaagtgcgcccaggagttccaggacgacgcccgctaccgcgacgattcccgctacctccgcgtctggatccagctgatggactatgtgaaagatgcaaagccattgctaaagaagatggaaaagaacagaataggccttaagagatcagcattttatatggcttatgcagtgtattatgagaagcacaagaggtttgaggatgctgagaacatgtaccgcttgggaacccagaaccttgcagagcctgttggggggctgcagaaagcacatgaacaatttattcggcgcgtggaactatacaagaggaggaaatctagagtgcagcaggaacgaatgcctaacaaggttcagtccattgctatatcaaagaacgaagttgaaggtcaaagcagaagttgtacaaaaccgaagtccaatccagtgcaaagatcaggaagtggttctaatcctcatttgggttttccgcatcccttagggcgtccactatctagaggcacttcaggagaaacaatgagtttgtctcgtcataatagtgatgatactgtagttgtaaggtttgtaggctctgcattggttgggaaatcagaaactgaagatgcatgccatcatggccttgttgaacccactataaacactaaagaggcaatggatgctatcagtagcatgtttttggagccattggaaccagaaactaagctcaagaggcgctcaaatcgtgataaaccaagttttaatcaggaagcaagtgcatttgagatctttgtcgatgaagataacctaacaagagtggacccagcaaactccaggacaaaaacatgaagcaggataatccaaagttaagtcagcaggcaagcgcatttgagatctttgtagatgaagatgatccttactgcaacaaccaaaatatggtgcagcataggcactttaataaggagaacacacaggtaaatcagaatgcaagtggatttgaaatctttgttgatgaaaatgaggctcatggcaatggtcgtaatgccatgagccataagagtagtggatgtcctccaaagccatcgcgtgattcaaagcagcaagccaattttgacttccagaaaccattcgtgggagggtttgcaatactgcctgatgatgaagatgaacagcttgagaaaaatgataatggtgttaagatcaattctggaactgtgcaactaactgatgataaggacacttcactctgttcgagacaaactgattcaaaaataagatgtgatgacttacgtcctgcaatatctggacttcgagaagacactgtctttcatagatttgttggatcagctgttgttggagagcctaaagtggaaaatgcttgccaccatgggttggtcgaaccaactgtcaatttaaaggaggctatggatgatataaataacatgtttgggataccactgaacttcaaaggtgataaacctaaaaacaagaaaaccactgcattgtcagagagaaaagcggcactgctcagtggtttctccatattagctgatgatgaaccaggcgaaaatccagcagcccaagttaaaccaagcaatgcttccaaatttgaatgtcagagtggtctctttgagcccactattactacccgcgatgtgatggctgagatcaatgacatgttcggaatgccactggacttctaagactagtgcttaaatggaacagaataactcttttgacagaagagttttcctttaccctctcactcactccttgagagtgaggtaaggttcccaagatgtcagaatatgaaatgaagtgctatgtagtatattggtgcattcttgatgataagaagagcttggtttttttttgttgaatcctttgatgcacagctgttgtgtctagtgaatatttacatgagttattgaaattacaattctcaaagctttatctgattcatatttccctgataaaatttgaagtgtagcaaatgggcattagtttgctgatttatactcttggtaaatgagcactatctccttgaattgcaaatgtatcttacttttgatgccctgagttgttttgctgtatcacttaaatgagaattcctttttcccgct

SEQ ID NO: 27061 - DNA, 1158 bp, Oryza sativa
  ref <308>: DATABASE ACCESSION NUMBER: AK102503
  ref <309>: DATABASE ENTRY DATE: 2002-08-28
tggcccgaagaagaaaaaaaaaaggaaggaaaaaaaaaaagagaaggcgacgcgaaaagcagaaaggaaaaaaaaaaaactccgttctctcctggaagaacaggttggggaaggagaggagaggagaggagaggagaggagaatccgcgtaggctgccccccgcagatccgatcgatcgggcctctccggcgaacccctcgtcctcctcgcggtgcagttggtgttccttacaatggcacaagagagctggaaaaaggaggcagaggagactggagtccacacacctgaggcccctatattgtgcgttaacaactgtggcttctttggcagccggatgacagaaaacatgtgctcaaagtgttatagggacaccgttaaggccaagacagtggccactgttgtggagaagaaacctcttgcttcattgtcttccacacctttggtgacagaagtcacagatggagggtctggttcagttgcagatgggaaacaagtaatggaggaggatacaccaaagccacccagtaaccgttgcttatcatgccggaagaaggttgggttgacaggattcaagtgccgctgcggaggcaccttctgttcaatgcaccgctatgccgattcacacaaatgcacatttgattacaagcaggtcgggagggagcagattgccaaacagaatcctcttgtgagagctgacaagatcaccaaaatctgatggcggttctagaggagcgatgctcgtttatttcctcatggtgttacttgatctgtcaagtttacttcaagattatacttcaggggttggatgtatctatcattctcctgggatttgctttgccaatgaacgccttcgacaaaccacggattgatgtctctctagcactggagcactgctcaatgcgcttgggcacgccttcaaggctatatttcttggtgtttgcgtgggaactttgattggcacaggtgcacttctccttatttgcagtatgaataatgtaaatatttatattttattcagtatgcaattctactgattatattattatgcccaaggttcgccaggcttccattatcacctgctacagtttgtttagatagattactgtgtgtattgtagatataatacttttggtgccataatgttgttatccagtgtc

SEQ ID NO: 27062 - DNA, 2366 bp, Oryza sativa
  ref <308>: DATABASE ACCESSION NUMBER: AK102504
  ref <309>: DATABASE ENTRY DATE: 2002-08-28
tggagctgtcccctacctgtgctctccctctccatcttcctctctctcccagtgggtgcgtttgtgcgagacttgaggctgagcgagaggggaggagagatcgtgctccgcgagggaacggcggcgaggagctgggtgcatctcggttggacttttcctactggaactgcagtactttcaacatgctttttgcaaatgcctgcattaaggatgaataaaatgttaagcaccgactatttagggacgcaggagcttcattcattttgcaagaccaccgaaatattggaagactcacagtctcaagagattgcactcgatagaacagcggtggggtcaacacttctaagtcatcaaaatgtttgctctacttctgaagtatcagggggaaactttggaatcgctgaagtcagttttttacaggatgaatatgatgcagaaaccaccggcgtactgccaccatcatttttgtcctgtggctctagatctatgctccctatatcagtaccatcatcatcatcatctagtctggagactgtcctcttttctgactcaacgtacagcgatcttcaggtaaaagagacgaaccacaatactacagcaatggatgaaaacaatgagttccttcagctgattcttagtagcaatgatgaaggatacaatgctggaagtgaattccaagtttgggatgttctggacttctacttctcagaaagcttttcagctgtgcagtttgatagcttgatgggttttacaaatgatgttagttcttcccatcacgattgtatgaatcttgttgacatggtagagcggcctgttgcgctcctgtccctaaatgataccgaggagcaaaataactctactgatgagttccctgatgatacatcatcataccttcaaatgaaaccctcagattccgaaactgaaagtaattatgcctctcgagatgttgcggtaactgaatatgttgatgaaaagccactttctagaggcctgcctgatttaatggatgtcgactcacccggtcgtctatcaaaatcagcaagatcaaaacaaatcactcttgttctggatttggacggtaggctggcagtaacttcacatcattcaatcttacctttgattgagtgttcttgttctgaatttgtgagttattctacatcagctggaaaacagttgatgaccagctattgaacaatatcccaccaaaataataaaatgaaccagaagaaaaactttttgactatgttctataatgatgaagtttatctaaagcagtcctgttctgtcctcattgatatctcggatgacatggatcctgtgcttctgctttcttggaagttttaagtggcatttcgacttaacttattttataaaccatctgtacatttatgaggatgacatatatttgagctcccaatacatagtttatggctaatgctctttcttctgggagtgatagcttttactatttctttctatgggataacaagttagccactgcctgctgttataggatgctctcgaggataatggaattcagttattatatcagcatccttactaccataattttcttttctgacataatcttaactatttctcatatgcagagactcttgtacattcaacattggatcattgtgacaatgttgatttcacccttcaagttttctttaatatgaagaaccatacagtttatgttaggcaaagacctcatctgaagatgtttcttgagaaggtagctcagatgtttgatcttgtcattttcacagctagccagagaatttatgccgagcaactaatagatagactcgaccctgatgggaggttgatttcacaccgtatttatcgtgagtcatgtatattctctgagggttgctatacaaaggatctgacaattcttggagttgacctggcaaaagttgtaatagttgacaatactccacaggttttccagttgcaagtggacaatggtataccaataaagagctggtttgatgacccctcagaccaggaattggtcgagttactcccattcctggagacacttgttggtgtggaggacgttaggccaataatctcgaagacattccaccatacacttgagcagaattagatctagagaattcatgattttcctcgactgagcctgtcactgaagcttactaggttcactccataaggtgcaccccactattgggggggaattaggcataggatcaagattcaccatttatgttatgttagctgttacaaatagcgagcataaactgcagtcgtcgccatggcttgtatatgtgtgcatcagttttctgtttcagatccttgtacaggaacaatagtgttgaataaaacggttctgaatc

SEQ ID NO: 27063 - DNA, 1166 bp, Oryza sativa
  ref <308>: DATABASE ACCESSION NUMBER: AK102505
  ref <309>: DATABASE ENTRY DATE: 2002-08-28
gatcacgtactaattaagccatcgtatcatatcagccatggcgcgccaccagctatgtctcttgacgacgacgatgctagtagccgtcgtcgtcttcctcccgtgcctcgccaccgccaccggaaagaccggccagatcgccgtcttctggggccgcaacaagacggagggctcactgaaggaggcctgcgacaccggcctctacaccaccgtcatcatctccttcttcagcgtcttcggccacggccgctactggaccgacctctccggccacgatgtctcccgagtcggcgccgacgtcaagcactgccagtccaagaacatccccgtcctcctctccgtcggcggcgacggctaccagtactcgctccccaccgccaattcggccaaggacgtcgcggaccacctctggcacgcctacctcggcggcggccgcaggggcgtgttccgccccttcggcgacgccgtgctcgacggcgtcgacctctacatcgaccacggcgggccggcgaactacgacgtgctggtccggcgcctcgccggctaccgcggcaagccggtgctgctgacggcgacgccgaggtgcgtgtacccggacgcgaacgcgggcggcgctggggacggggctggtgcggcgcatccacccgcggttctacggcgacgcggcgtgcacgaacaagaccgacggcgaggggcggaggagcctgttcgactgggaggactgggacgcgtggacgtcgcggttcccggcgagccaggtgtacgtggggcttccggcggaggagacggcggcggactggataaacccggagtcgctctactacgccgtgatgcagagggcgcagacagcgagcaactacggcggcgccatgctgtgggaccgaggcgccgacaaagcctacgataactactacggcagggcgctcaaggacttcgtttgatcgattctcacattcaatccggccgccattgctgcttcatcggagcttcaattcgatcaacttcttcttcccaatagtatatgcatgattgtgtataataatggagccagctttgaatttgtttgcgtagcgtgtgtacgtgtgcgcgtatgtaatttgtgagtgtctctcagggtgctgtatgcttgaattaaggtacatgaacaataaattcaagtatgcact

SEQ ID NO: 27064 - DNA, 1140 bp, Oryza sativa
  ref <308>: DATABASE ACCESSION NUMBER: AK102506
  ref <309>: DATABASE ENTRY DATE: 2002-08-28
gtcagcagcccggcgtcggatccgaacgccaagcgccgcggccggccacccggctccggcaagaagaagcagttcgaagccctaggctcatggggcatcgccttcactcctcacatcctcaccgtcaaggccggcgaggatgttgcttcaaaaattatggccttctcacagcaaggccctcgcacagtttgcattctctcagcgaatggtgcaataagcaatgtaacacttcggcagccagctacatctggtggacttgtgacttatgagggccgatttgagatcatctctctatcaggttctttcctgcttgcagaggatggcgacactcgcagcaggactggtggcctgagtgtcgcacttgcagggtctgatggccgagttcttggtggatgtgtagctggaatgctgatggccgcaacccctgtccaggttgtcgtggctagcttcatcgcggaaggtaagaaatcgaagccagtcgagacaaggaaggtcgaaccgatgtcagcgcctccacagatggcaacctacgtgccagctccggtggcgagcccgccatcggagggcacatccagtggatcgtccgatgactcgggcagcccgatcaaccacagcgggatgccgtacaaccactccgggcagcagcagcaacaccagcagcaccagcacatgccccctgcttacgcatccggtggctggtcgctctcagctcatcatcagaacaggcacgactctgacatgaagatgatgtcgaactaacactctgctcggcctcgaggcgccccatttgtttggttgggctgaagaaggagctgatgatggatggtggatcgtgttcatacccccctctgctagctaagagatttaggaccatggtgatgaatgatctcagagagatgtgttgttgctgttgtttttccttggagtaagattaatttaggcgctgttgtaacgctgtagctgtcataattaagccgcctctaacgcaagagtttattatgtgttgtactaccggtggatatgccttctgcttgtctgtcttgctgagatcttcacctccttagtaggctagtagtagtctacatacagacttgtatgaatttacctgaatgctttgatttcaattcgagaacttttact

SEQ ID NO: 27065 - DNA, 2590 bp, Oryza sativa
  ref <308>: DATABASE ACCESSION NUMBER: AK102507
  ref <309>: DATABASE ENTRY DATE: 2002-08-28
gacctccacttcctccactcctccaccccacaatctctctctctctctctctctctctctctctctctctcctcccaaattcatctccttttctcatcttttctcatgctttgacgccaccattaagctttggcttttctctgcctcccatctcctcctctgccactagttaaagcagagagagggggagaagaaaggggaggagaaagaagcacgggagagaggaggaggagaaggagaaggacaagggaacgaagatgttcgacagcctgctcaactccaagttctacaacaaatgcaagcacgcaatcaagtgcacccggaccaggctggatctggtgcggcggaagaagcaagcgatggtcaagttcatgaagaaggacgtcgccgacctcatcggcaatcgccttgaatcgcacgcctttggacggatggaggcactgattgttgagatgaaccaagcatcctgctatgatatgatcgagcagtactgcgagtacatagtgaagcagctcaacaacctgcagaaacagaatgaatgtcctcaggaagccttggaagctgtgtcaactctaatttttgccactgctagatttcctgagttgcctgaactgtgcgacctcagacatatgttcacggagagatacgggagttttgtcgagccttttgttagctctgagtttgttcagaagcttcagaacaagtcatttactaatgaagagaagttgcaagtgatgcaaagcatagctgaagaattctcggtcccatttaattccaaggcactggagcgaaagatatctggtgtacctcaaaataaacatgatcttcaaaacaagagttcttttaagcgtgtggaagttgaagcatcagcatgcaatgaacttaaggtggataggcatgctgtgcatgaaagaaaatctaaagtgacacctgaagtccatgagaggaagcaggagatgccggtaaagcctaaagatattcatgtcatccctgatgccattggtaaggttggggagaaaagcaggaagaaccgctcagatataccttatgatgtgcctccttcggacttgaagcaaattaatgatcaggagttaaagaaagaccacaaaaaacatagtcaccaccagagggaactgaggaatgcagacaagtcagctcctccatacgcagaacccaaggaagatgttgctgaaaagtctgatgggaaaggctaccatgtccatcgatcgcgcatggctggtggccttgatcacaattggggacatgccgacttggggcttaaaactctgggcctagaaaagcaaggaattgagccagctagttctttggatggtaaaacactgaacaaagctcctccttattctaagccctacaaagcaagtgatgagtatgggcagtctgtgcaagacaggcagaaaatgccagagaaggcagttaacatgcgtccaccttatgtcaaaccaaactctacaaatcaagctgttgatgattacaagcatgccggcactggggaaattggtcaccagagagatggactggctgatgataatacccttcagcccgtttctgtcagaaggaaaagtgcaaagccacctacacatggtgatcgctatgatgatgaggcaaagatgacaagccaaactcctggtggccgacgaaggcattcaagcagaagaaatggttcagatgatgattatgaccagagagttggctatatgctgcccccagatgatgatgctgtcaataatgcgagacactttaagagaatgagtgaacgaagaaaacatggaagcaggcagggtggatcagcaagtggcaatgactacgagtctgatgaggatgagactaacagtgtgattgattttggcaatcttttgccccgagcacctagttctcatcggaaacacaggagtaggagtgctcacccacgcagcggaggccgtgatgatgaggaaagggtgatggataagcttctgatgcactacagcaagaaaggcattgatagggaagagcataaaacaagaacaaaatcaaggacccctcgacctcgagctgatcagcctgctgatggagtcggagaacggtctaacagagaagtggcaccccaacatcctccagaaagaactgtatctctcccttcagactctggcaacctgggtgtgaagcctaaggctcctgctcggtccatttcaatgcagccagacaagtccagggggattgtacaccctagcatgccggatttcgacgaactagctgctcggatcagtgctctgaggaaggaatgactatgagctgccacaaaactgtattcaggcttcagcaggttgtgttctttcatgaacttctctcaaagcaactttcaatgtcagtggtggtcacaggaatcaggggatctctcctggtggtggtaatcttgcttgcagtgctatatgcctagatagaatagtaccaaattaaatggcaatatttaggaataccatacaatattggtttgggtgtggtcctttgttgtgctcatatttgaaagtgaaacaatcttgtatagatgccattgatgaggctataatgataagtgatgattctttctgct

SEQ ID NO: 27066 - DNA, 1977 bp, Oryza sativa
  ref <308>: DATABASE ACCESSION NUMBER: AK102508
  ref <309>: DATABASE ENTRY DATE: 2002-08-28
gagcgaaggctgactggctgagtagagctcgagcatgactgtactggtggagcttgagctctatctctactaaaaccaactagccaggtatgtgaatctcaatctgaaggtagagagagtgaggaagcagagctggaagaagaacactaggtcctaagtgtaacattttgtaaaaattactagcccaaagtgaaaataatagcttgttcctagtccaagctgcgaccatgggaaggattactgaagatggaagagatagtcggttctgctatcgttcaagagacggtaaacaggatcatatctgggttgattgaccggtgtgagcgaaaatcaagtgcacgggatcacctggagaggctggagatggcacaaatcaagttggagttcgcacttgagacatccaataaatggcagatcactagtggcccgttgttacgttggcagaagaagctgaagcgtgctactgaagagtgtgatgacacactacggaagtgcaggcaacatatccaggaagaagatgaggtggaacaacaagtaaggaattcttcctttcctaggcgaattgcccatgccaccaagacactggtatcttccatctttcacagcaatagtgatgagctgggtagatcttctgtccaaagattcgagtggtttgcagatggagctaatgattttctaagatctgtggaatttggaggcacaccacgccgttacttgttctttgaccctcttatcgggcaccttatttcaggtgaaacgttagagtacaaatcaatacagggaaacaagcagcattggttttgggtacggcccaataactctgcagagcgaggaatagaagctaagttgttctttgctttcaatgatggcagtgcacctgaggacaacttttacattgatattattctacaactttcagagagtacaaacatagttggtactacaattaagtgcttgcagttgtttactccttattttgagtctacagctgaaactgttaggaaagaacttattcaactacctacacaagacttctccagggtgtcacattctcactcatacggttgggagaacattcatagtatagctactgaatggttccgcccaaatccactgtgttgcaagcatcatggtcagaaagtatgtggtagtgggaacttgcacaaggtagaattaacagatatttctctagaacccatcattgaagtgagtttactgtgccaagtttcacctcctgggttcagagaacagggaacaattgttgagggtaaatcttcacttaaagaatttccgcatctgaatgttatccttgtctatacgccccatggctcttcagaagacctattcccagcagttgatagtactgtgattgaggtgattaatggtaacgagcaacattgcttgcacacaaatgttcatgctgccaagggctgtagattgttttcgtcagaatgcaaaagcaacagcgtatcagatgctttggaagtctaaacatggtggtgcatttcttcaggctgtgaaggcaacaatgaacatgcggagcacacggagaaccattcgaggagccaggaaagcaaagatgttgcgacgacatgatcgccggacacacaatcacagacatgaggtcgctgacttcctcagcctttgggctgtgcatgcacctgtccggcttcagggctcactccttgactggattcggaaggagaagaaagtagcaggtcctctactgacattttagatgatgtaatagggactagaagggaaacagggataattaaaattaaaagaatgggggagaaaagtaacatgtagggagttggtttctaagtacttaggagtgtattcatctgaaatgttctacatatactgctgttgtttgtctcgtcagttatgttggcaaatggtgataacatgatgttcttgccctagaagtctaatgtaccagccttgctcattcgatgtgtctggtttcatttg

SEQ ID NO: 27067 - DNA, 3252 bp, Oryza sativa
  ref <308>: DATABASE ACCESSION NUMBER: AK102509
  ref <309>: DATABASE ENTRY DATE: 2002-08-28
gggctgctggacccgacgccgccgccactgccctttccccatcgcgcctgctggacccgacgccgccgccctttcccattgctcccgctggagcccaacgccgcaggctgtagccccaccctgtccccaacgtagcgcccggctgttggagctcgacgccgtcgcccttcgcccaacgcggcttctggagcccggcaccgccggctggatcccaagccccaccccatccccaggagctcgatgccagcttgctgcagctccaggacgccgggcttcatgggcacaactgctgggaacgcccccaagagcccgacgccgacgacagtagcccgcccccgcctctaggatctcgacggctgggccggctggctgcagatcctggccgctgggcttcacgggctcaaccgctaggaagcccccaagagctctagcctgggatcactgccgacggcgggtgaggtcgaccagagactgccccatccccttcaattaggaaggaaagatggaaagaacttggatgaattgtaagttgtttagcaaggagcatcgggagggggtcactgagttcatggactttgtttgtaaaaatttgagtggcagtcagaagatattatgcccatgtcgtaagtgtttgaatcggttacatcaatataaaggacgtgtggaggatgacttacttatgtacgggatgtctaacacatacactcggtggatacatcatggagaaccattggtcattgtcactggaaatgttgagcatttgaatgaagatattggctgcaatgttgagcatttgaatgaagatgttagctgcaatgttgaatttgagacgaatgagcctccggatgacccagaagatgatcaaatgtaccgtatggtacaggatctgtacccagatcaaaatcatggaccaagaacaaagtcaaagtttgccaccatattagaagagatgaaacaggtgctacaccccggtggtccctatactaggttttcttttgtggtgaagttgctccacatcaagtcattttacagaatcagcaatgttgcattcagtgctttttttgaccttttaagttcagcatttccaaattgttctctccctgcatcctatgctgaagcgaagaattttattcgtgcattaggacttggatatgagtcaatacatgtgtgtccgaataactgtgttcttttccgaaaggagttggctaaaaaggatgcatgcccaatatgtggtgcttcaagatggaaggatgcagatagccgaaggaagattccagaaaaggttctaaggcattttcctttgattccaaggttgaagaggatgtttggatcgaaagaactttcagctgaggcacaatggcacaagttgaagaggaaaccagtggacaatgagcttagccatcctgctgatggtgaggcatggaaagattttgatagaaagtatgaatggtttgcaaatgatgcacggaatgtccgacttggcctcgctactgatgggtttaatccatttgggaagatgagctcctcatatagcatgtggccagtatttcttatcccttacaactttcctccgtggcaatgtatggagcaatccaacttcatgatgtgcctacttattcttggtccgacatgccctggaaaggatatggatctcttcctgcagccactggttgaagaattgttaaatctttggagtggtgtccctactttggatgcattgaccggcaaagaatttgatcttcacgctgcaatcatatggtgcattcatgattatccagcattgagcacactttcaggtagagtaactagaggctactatgcttgcgtttgttgtgataaaaatccttgctacaaaagacttaggaacaagatttgctacattggccatcgccgttttcttccagtggaccatatttggaggagaaagaaagattttaatggtcagactgaagaacgtgcgcaaccggaagaatttactcaggatgagttgatgcagcaattggcgagggtggaacatgtaagacctgggaaccatcctaataacaaaaagagaaagagggtagaagaaggtcaatgctggaagcgcaggtcgactctgtgggatttgccatattggtctaatttaaagctacgacacaatcttgatgttatgcatatcgagaaaaatatatgtgaggcccttcttggtacatttctcgacatcgcaggcaagtcaaaggactctgttactgcgaggctcgatttagaagatatgggcataaggaaaaatttacacttgaaggatgatgggaattcaacatgcactgctccacatgctccatatgtgatgactaaagcccagagaaaagctttctgtgctttcataaaaaatgtcaaattcccagatggatatgcctccaacttagcaaggtgtgttagtgttgatgaatgcaaagtacaggcattgaaaactcacgactgtcatatccttctgcaaaggatattaccagccggtctccgaggaatcatgcataaggaaatatatgaaacaattgctgaattaggtaactttttccagcaaatttgtgctaagaaattgaagttagatgctttgaacaagatgagaggtgaaatcccaataatattgtgcaagcttgagaagattttcccgcctgccttttttgatgtgatggtgcacttatgcattcatttaattgatgatgcaatcctaagaggtcctgttcaatatggatggatgtaccctgtagagcgtaggttgctgaccttgaaacgctttgtaaggaacatggcaaggcctgagggctccattgcagaggcatatgtcgcaaatgagtgcttgactgcttgctcaaggtattttgctgatgttgacactaggcacaatcgtgagggtaggaacaaagagcgtgttcctatgagtagatgtggtttatctattttccagcatggagcaaatctgttgggggcaccaaggcttacatatgagtagaaggagtatgataggatggtttggtatgtcctcaacaatactaaggaggtcgagccatttatagagatttacatgaaggatttacaaactgctggcagtcatgatgttgaggggaaccttgctaaggaatttccaggatggtttaggaaacatgtgagtcattatttaggtattttcagttttgactctgtgataatatatcattatttaagtatttccagtatattgcaaatgaatatatctcatacatatctcatttactc

SEQ ID NO: 27068 - DNA, 1284 bp, Oryza sativa
  ref <308>: DATABASE ACCESSION NUMBER: AK102510
  ref <309>: DATABASE ENTRY DATE: 2002-08-28
ggctcaccacctgcctcggcatcctcgtcgccgacgtcatcaactacttcaccgacaagatccacccgtgggggtggaggctgtcgctggggctcgccatgggccccgccaccgcgatcttcgtcggcgcgctgttcttgccggagacgcccaacagcctcgtcgagatggggcggctggaggaggcgaggcgggtgctggagaaggtgagggggacgaggaaggtggacgccgagttcgaggatttgagggaggcgagcgaggcggcgagggcggtgcgcggcacgttcaggagcctgctcgccgcgcgcaaccggccgcagctcatcattggggcgctcgggatcccggcgttccagcagctgtccgggatgaactccatactcttctactcgccggtcatcttccagagcctcggcttcggcaactccgccgcgctctactcctccatcatcacgggatccatgctcgtcgtcggcgcgctcgtctccatggtcgtcgtcgaccgcctcggccgcagattcctcttcatcgaggccggcatccagatgatctcctccatggtggtggtggcggtgatcctggcgctcaagttcgggcacggcgaggagctatcgaagggcgtgggcacggtgctggtggtggcgatctgcctgttcgtggtggcctacgggtggtcgtgggggccgctggggtggctggtgccgagcgagctgttcccgctggagatgaggtcggcggggcagagcgtggtggtgtgcgtcaacctgttctggacggcggcggtggcgcagtgcttcctcgccgccatgtgccacctccggtggggggtgttcatcctcttcgccgcgctcatcgtcgtcatgtccatcttcgtcatcctcctcctgccggagaccaagcaggtgcccatcgaggagatctggatgctcttcgacaagcactggtattggaagcgcatcgtcaggaaggaccccaagtatcagggccaccaccaccaccagatggccgccatgccaaccgccgccgccaagtccggctcgtcggaggtttagatgatgatgataatgaattgatgatggtttaataaggttttagtgggtggtgattaagacttgatcttgaattgttcatgtggcagtagcttttttgatcttcgattgatgcaaaagaagaggtcagagggttaatgcatgtgtgtgctcgtgtgtctatagttttagtcatgttcttcagaattcgattcagtgtagtggtgggctgattaatggatcttgatgatgc

SEQ ID NO: 27069 - DNA, 1575 bp, Oryza sativa
  ref <308>: DATABASE ACCESSION NUMBER: AK102511
  ref <309>: DATABASE ENTRY DATE: 2002-08-28
gaattaatccgatcaaaattaaagcccaaaagttgagatagctagctagctcatcaggagagagtgagagacagtatccagcttgctaggtagctagctgccgtttgcgtgttcttctttaatttcttcgtcgcataatctgtctcgtctctgataaactttttatcttctttttttgggtggtcatgcatgctgcggccaattcgttcttgaattcgttagctactccattccatatatagattcgatcttgtcctagctagatacctagctgctgctgctgcttcttcttcttccttggtgttgaatttggttcagccgctgctagctatagctttgcgcggtgttcgtagggttagggtttttgctgtgtgttcgacgatggctatgggaatggaaggatcgggaggaggagggtcggcgaagaagaaagaggagagcttgccgccggggttcaggttccacccgacggacgaggagctcatcacctactacctgcggcagaagatcgccgacggcggcttcacggcgagggccatcgccgaggtcgatctcaacaagtgcgagccatgggatctcccagagaaggcaaaaatgggagagaaggaatggtacttctttagcctaagggatcgaaagtacccaactggcgtgcgcacaaaccgagcaactaatgctggttattggaaaacaacgggaaaggataaggaaatcttcactggacaaccaccagcaacaccggagttagttggaatgaagaaaaccctagtgttctacaaaggaagggctccaagaggtgagaaaaccaattgggtcatgcatgagtaccgactccactccaaatcaatccccaaatcaaacaaggatgagtgggtcgtctgtcgcatatttgccaagactgccggcgtcaagaaatacccctccaacaatgctcattcccgatcccaccacccatacacactagacatggtcccacctctcctcccagctctattgcaacaagacccatttggtcgtggacaccacccttacatgaaccccgttgacatggcggaactctcccggtttgctagaggtacgccggggttgcacccacacatccaaccacaccccggttacatcaacccggctgcgccttttacactatcaggccttaacctcaaccttggatcctcgccagccatgcctccaccaccaccaccgccaccacaatccatcctccaagcgatgtcgatgccgatgaaccaaccaagaagtactacaaaccaggttatggtaacagagcaaatgattccaggactagccaatggtgtcatcccacagggaacagatggaggttttaccacggatgttgttgttggaggcactggcatcagataccagaatttggatgtagagcagctggtggagaggtactggcctggtagttaccaaatgtagtcctgaaggaaatgcttggggtactgccaagcaattgttggtctattatgtaggaagacataattatttgagctaccttaatttagtctatggatattgtatgattacttagctaatgttgtacccttgcttttt

SEQ ID NO: 27070 - DNA, 1436 bp, Oryza sativa
  ref <308>: DATABASE ACCESSION NUMBER: AK102512
  ref <309>: DATABASE ENTRY DATE: 2002-08-28
gagtgagccacagcaccgccggcagtgaccaacagcaaccaatcagcaaatcagcaatggagagggctctgatgagcctcatgaggcggcgctccctcctccagagcggcggacgagcaccgccggcgatggccgccgccgccggtggctcaccattcttctccaccctgcagcaagcagccgccgcagacccggtccagtcgcctggcatcttgccagggctcaagatcagggactctgcgtcacagctgattgggaggacacccatggtttacctgaacaaggtcactgaaggatgtggggcccggattgctgctaagctcgagttcttgcagccgtccttcagcgtcaaggacagaccagcaatttcaatgttggaagatgctgaaaagaaggggttgatcaccccaggtaagaccacactgatcgagccgacatcagggaacatgggtattggcctggcattcatggctgctcttaaagggtatgaactcatactcacaatgccttcatacaccagccttgagaggagggtgaccatgagggccttcggcgcaaaactcgtccttaccgacccaacaaaaggtatgggaggcacggtgaggaaggccgccgagctgtatgagaaccatcctagcgcgttcatgctgcagcagtttgagaatcctgcaaatgtcaaggtacactatgagacaactggtccagaaatctgggaggatacacttgggcaggttgatatttttgtcatgggaatcgggagcggcggcaccgtcactggtgttggcaagtatcttaaggagaagaaccccaatgcaaagatctatggagttgaacctgctgaagcaaatgttttgaatggtggcaaaccaggtcctcacctcatcactggaaatggagtgggatttaagccggaaattttgaatatggatataatggaaaaggttattgaggtgaaaggtgaggatgctgttaagatggctcgagaattggcactgaaggagggtcttctggttggaatatcatcaggagctaacacagttgctgctcttgaactagcaaagaagccagaaaacaaagggaagctcattgtgactgttcttccgagtttaggggagagatacctgtcatctgcattgtttgaggaattgagagcggaggctgaggccatgcagccagtgccagtggactaacttggataatcaacctaggcattgagtatttgatgaacgaaattgctatactctaaataaattttcaatttgtactttaattccccattacaaattatgtatcttcagattgtctgtcactgaactatatagatggactctctctatgtaattccacatttatcagaataacctatgatctccctctcctttctttttaagttcgggtttctattttccaattttaatggaacaggttaaaaatgc

SEQ ID NO: 27071 - DNA, 1534 bp, Oryza sativa
  ref <308>: DATABASE ACCESSION NUMBER: AK102513
  ref <309>: DATABASE ENTRY DATE: 2002-08-28
gatcgatgaacagaaatataatctggctttgccatggctctcttcctcctccaactctgcctcccctaatttctatttctctaatcctagtctcatgcttctgccttctctatgttgctcttcccaatccctgattctactctcttgattgtatccctgggcacttgtattcttgagtggatttgcaatatattggtggcactgtgtgtgagagatttggtgtgattgtgttggttcgtgacagatcggggcgacgtgggggtgggaggagagagcgccgcccaacccgagacggtggaggacgccggcggcgagggcatcatggcgggcgccgccgccgccgccgccaagggttccagatataagctgcatggcaagaagagcaaagttgacaatcaacctcaaattaaggaaatccacgataaatgtggaacaattaatacatgtaagactaaggcagatactaaacttcatggggggaaaaactgcatatatcaagtttgatggaacggtgggagtgccaatattgagatccaaaagggttccaccatcagaggactaaatggccaagacaatatttttgaatttcaaaacttttacatccttgatcctggatgtatcgaatacaccatgcgaaggtagatggtcaaagttgtgcctaactgcctatgacccctcgctggaggattcagatgcgatggagtcgtaatacatcaagagaatcgtttgttgtccttgtggcagaattcgcaagtcaaggctaaccatataatgcttatttgttctggtttttaagagcctgttctttatggtgcaaacttcaaaaaaaaaaaaaaaaaaaaaaaactttgcctcaaaaagaacttcagaaaatgcatctccaacttcaatggtcaagctaagaagctaggagctagaggttggagccgtgccaaagagtcctaactttcgttgggcctggcttatgatacaagattaacatgattttatctggttcatttatttgatgtattttttggtgtggttcttgttggaaaaagagatgaaccgcagagtgccttgttctctcgcagtactttgtggtagctgagaacagtactgagtacgactgctgattacttaattggatgctgacagcacttggttattctcttggtttgcactaatatgaatgtttttctttggacgtttttgggcagatgatggacattggtggtgaaggagatccgtaggtgcaagatgaggaccatatgaatttggtgagacagttttagctttatcatcttagcatcagtcaagtctacagagtggagttgaggtggtgattgatgtttgaccatcaagcaggtggtgcttttcgcaacttcacctgacctttttttttttgtccaattgctgagtgaaaacatatgtgatgtctcaagtctctctaccaatgccagctttcaatccagaacttgaacatgaattgcaaaactgtaaatgaatttgctaggaatttaccatttcaagaaatcttggagtattaacgtgc

SEQ ID NO: 27072 - DNA, 1670 bp, Oryza sativa
  ref <308>: DATABASE ACCESSION NUMBER: AK102514
  ref <309>: DATABASE ENTRY DATE: 2002-08-28
ggttccccacactctcctcacagtcaccaatgccgaagcccaaccatcgtgcccgctccgccgctgccggcggcggcgggggcggcgggggcccgatagacgcggattggaagtacttcctcgacaatgtccgcgaggaaggccactcctacgccgtccgcgtccctgccgacggcgccaacccttcctactacctccaatacgagaagcccctcaccaacggcgccgcctccacctcctcccggggcggggctgcacgcaagcgctgccggatggaggaggaggaggaggaggagagctcgtccggcgaacccgaacccgcacccgaccccgacattgaagaggactaccgcgtgttccttcagaacgtgcgcctcgttgggcatggcggcttcgtgctggagcatgagggcaatgtgatcaggtacgatgcttcgggcgcggcgctcagctcggatgagtcttccgatgagtccgtgatgggtgctccggagcccgatccgcgtcgacgaaaggcgaaaattgtggaggaggatcaggaggaggaggaggatgtgaagaatgaggttgccgttccgtctagaaagaaagattttaccatggtaaaagaggatcaggagaagaaggggaagagagtggtcgaccttcctgctaggggggaagatggtgccatggtggcggaagaggatcggaagaagaagctcagaaaagagttcaactttcattcctttcattctaaggggaaagatgatacaacaccagtgaaaaatctgaaggataagaagaaagaggttaaaaatccaaaggataagaaggttcatgggaagaaagaggttgccctttctgctaaggggaaagattgtcaattagcagagggtgtggtgatcaaggtggaagaggaagatggggcagttgcagattgtgccggctgtggagaaactagcgactacaactagactgacaaacttaagcaatggccacaaaaccgcccctcgtatcgcttcggggtcacatggagttatatggccaatacatataaatgatagggaagaatcggatttcaagcaaagattgatacatgttctcaacaaaccctttagccagggagaatatgacaaactctttggtatggctactattcgcaatccattgacaagggaacgtcggacacgctgtggtgtgaagtattactactctcaacatgagaaggcaaaatcatattttgattgttacccagatcttgccaaacaagttgaagaagccagctatcccaatcgcttggctctgttgcgtgggcttttcttctggttggagaatattgggcaagatgatcaattcaggccgtggagagacgatcacaaacgctacaaaattatgtctctctgagaacacataacaaagttcttacttgcatgtgattatctgcagcatctcgcccatcattgttgtaaatacgtacccagtaaaaaaccgtagaatggaaatggcactgaatttaggcccttctctagtctccatagataggataaccttgggttctctcaccttctctttgtgtaactgagtatggggttgactaaaatgtgtttagagaatgtttacttgtactaactcagtccgaattctggaacaccctatggctcatggctttctatcggaggagcaaaacg

SEQ ID NO: 27073 - DNA, 1652 bp, Oryza sativa
  ref <308>: DATABASE ACCESSION NUMBER: AK102515
  ref <309>: DATABASE ENTRY DATE: 2002-08-28
ggctgtcggcgcgcgggacaacgccgtcaccgccgccgcttcccaccctctctctcgattccctgcctgagccggaggcacgctccggccgggccctctcccccgccacgccgcctcggacgcgcgcggccgaggagctcctcctcggcgttagcaccgctgctcctgcggccggttggatcatccgcgggaggcgacgccggcgaggtgtagcaagaggcgacttggggatatggaagctagggcaaggacatacgggtcttcaggagcttccccaggaaatctgggtgatcggtacgacaattatgcgaactactcaagctacttaaatgatgagccaatgcctgatgccgcatcagaaaaggaacagggtaatgagtatttcaaacagaaaaagtttgcccaggctattgagtgctactcaagaagtatcggactgtctccttcagcagttgcttttgcaaatagagctatggcatatcttaaactaagaaggtttgaagaggcagagaatgattgcactgaagctctgaatcttgatgaccgctatgttaaagcatactcacgcagaattacagcaagaaaagaacttgggaagcttaaggaagcaatggatgatgctgaatttgctgtcagtattgatcctaacaatccagagctcaggaagcagtattctgagataaaagaattacacatgaaggaagtggctaacagaagtaagccaaccaaacatacagtttttaaatttgataaatctggagataaaaaggacacttcccatgcaccaagtagttcccagaaggacagtttcatggaagttgatccgcctagtagagttgcagtggagattagagagaaagcagatggtacatccaaaggtggatctggagtaatcttcaaagacagtaccgtacagccatctcgagatgctaaacagaagcctggaccagaagcatcaatacaagatcttgcatctcgtgctgcttcacggtatatggccagcactgtaaaaagtgtgaagacaccaaaaacagcatatgattttgaggtttcttggagagctctctctaatgacactgccaagcaaacacagttattaaagtcaattccaccatcaagcctaccagagattttcaagaatgcactttcagctgcttttctgattgatatcgtgaagtgcacaacctcaattttccgggaggacacaatgttagctgttagcattttggagaatttggcaaaagttccccgttttgacttgataatcatgtgcctttcatccatgcataaatctgaattacggaaggtctgggatcaaatattccttgctgaaactgcatcagcggatcaggttgaagccctcaggcaacttcgagccaaatatattcaggaaggattgcaggataacatgttcacttcaaattaatgatgctgatgctgagacagctcgttagaaaccttttacgctctagccaattgatattgtgtaacacccttttcctgtagaaatgaaatgctaaactcagtgtggggggtagtcaattaatggtggaagttataaagttgtctcagaaacatccatcaaagcatgcgattgtgaagctcatggacctttgctggctgaaaaggctgtaccttcatattcttgatgc

SEQ ID NO: 27074 - DNA, 906 bp, Oryza sativa
  ref <308>: DATABASE ACCESSION NUMBER: AK102516
  ref <309>: DATABASE ENTRY DATE: 2002-08-28
tgagatccaccagatccaacaaatagcaccctctcctcctccctccctcggtggcggctctaacggtggttctggtcctcgggtggcggcgcgcggcggctccagcagctgtgtgtggcggcgatggcgacggaaggagagtgcgcagcggcgacaatagcaatgcatgcggcggtgatggcgacgaaaggcgagcatcggttctcgggcggtgacgcgcagtccctttgcctccctcctcttgccgcctctttccctcctcccttctctctccaccgccaccagcctcccttccctctccaccgccgtgtgggggaagagggcagtggcacggggaaggaggtgtggcagcggcgtggcgtatggcgcggcggaggttcttgacagcaagcgggcggcgccggagctgaggacaggcaactacgacgacgacaaccacgaacgcggcggcgacgacgacgacaacgacgctaccggccgggagcgtggatccgccatcgactatcctcaggagcatggctctggcggcggagaggctcccaggcggtggatctaaggtggccgggctcggcgaccttgaccacgcacggttactccccaacctctatctcttctggatctggcttggggccgaggggaggagaccggcggcggcggcaacagctgctcctccagtcccaaatctggcagcggcttctttatgcatttgatttgaatttggggagcgcttgggaactacggttgctagatgtggatttttctcaatgcactatcttcccattctattgcagatttatttgatgtagatgatttatgtattacgtaatagagatgatgtagatgctttgatttgtatgtcatgtttgatcagtggaaataagcagcaaaggaaatgctttgatttgt

SEQ ID NO: 27075 - DNA, 692 bp, Oryza sativa
  ref <308>: DATABASE ACCESSION NUMBER: AK102517
  ref <309>: DATABASE ENTRY DATE: 2002-08-28
gactcatctgtctcttttaggccttcacagtaaagcttggtactggtgctggtgcctgctccagagcaagatggcaagaggggctcagccatctgcatccctcctgctcttctccctggggcttgtgctcctctacttctcctcaggaagcaccattcgacttgctgagggacagaaaacttggtgcgtggcgaagccgtcagcagatgacaaggttcttacggcgaatctcaactacgcctgctctcaggtgaactgtggagtgattcagcaaggtggcccgtgcttcaaccccaacaacctggtgtcgcacgccgcagtcgccatgaacctctactatgctgcccatggcaggaatgcctggaactgctacttccagaactcagctctcgtcgtgcagtctgacccaagttatggttcctgcacgtactactgattttaaaactgaggtcgaggtcgaggcagggcctacgcagctgagtttgtattaggatgtcttttactcccatgttagcagtgccgagatttcgtggcgatgccctagatcctctgatgcttagtttattgataagatgaacattgatttgctcggatcttggatgctgtttgtggcgtccattcccatcaaccttcattggatgtttggaaattcagacttgttgatccacatgcttcattgcttcctgtttcct

SEQ ID NO: 27076 - DNA, 1767 bp, Oryza sativa
  ref <308>: DATABASE ACCESSION NUMBER: AK102518
  ref <309>: DATABASE ENTRY DATE: 2002-08-28
ggccctacctgtctccgctcctcctccggcaccgccggcggcggcggcggcggcggcgctgcctagcaagtagaataccaagatacggcacagaagagcgatgaggagccgcagccccagcaagaggagaaggcatggcagcaggggaagaagccctccaagctcacgacatggctgtgccaaggataaggaaggtgctgctgtaagcctcttcgtcagcaaccttccgcgaagctgcagacctgaggatgtccaagttccatttcaaaagtttggtcctgttcgggatgtttatctgccaaaagactacaacactggggagccaagaggatttgcatttgtggagtttgctcactcttctgatgcttctaaagcgcgatatcacatgaaccgtaagatgctttctggacgtgagatcagtgttgcttttgctgtgcagacacggaaaaggcccgaggaaatgcgaagaataattggagccaggcataattccccacagagaaaggaagagtgccgaacaaactctccaggacagcctaaaggacatgatgagaagcggaagcgcagatcctatactcccaaatataaggatcggcagtatgctgacattggtcgtgatgagacgccgcctgcacctgatagtgagcgaccctgggctctgtgcaggtcacccaggccatcccctccagggcaatctcattctcgctcatactcacgttcccattctcttcatctccatgaccatgctagaacacggtcatgctctcctgccccaggaaggcaagatgaccagtatgcttccccgcagaggaaggagcaccaaacaaaatcatcaggacagacaaaaggacatgatgatatgcgcagatcctatactcctgaatataatgaatgccaggatgctgacaatggttttgatgagacacctccggcacctgatggtgagcgatcctctgtgctgggcaggtcaccccggccatcccctccaggacggtctcattgtcattcacactcacgttcccgctctcctgaactccgtggccatgctagatcacggtcatgctctcctgccacaggaaggcaagataaccagtctacttccccacagagaagggagaagcaccaaacaaaatcatcaggacaggctaaagaacatgatgagaagcgcagatcctatactcctgaatataatgatcgccgggatgctgacaatggttatgatcagacgccgccggcacctgatggtgagcgatcctgggcactgggcaggtcaccccagccatcccctccaggacggtctcattttcattcacactcgcgttcccgctctcctgaactccgtggccgtgctagatctcggtcatgctctcctgcccccggaaggcaaggagatgaccagtatgcttccccacagagaaaggaggagcagcaaacaaaatcatcacgacagactaaagaacatgatgaggagcgaagatcctgcactcctgaatatagcgatcgccgtgatgctttcatcggtcatgatgagacaccgccgtcagccgaatgggggagtaaactgggcactgtgcaggttatctccaacaccgccgccagcagcaactagactcttctgtttatagctagactagattgaaggtgcgctcaatatttatgtcttatctcttgtacatgttgcgtgcatttggattgattattcacacatagagtatacatagcagcaaaatgagggatggtcgacgatgaacgtttcttgtttgtttc

SEQ ID NO: 27077 - DNA, 2914 bp, Oryza sativa
  ref <308>: DATABASE ACCESSION NUMBER: AK102519
  ref <309>: DATABASE ENTRY DATE: 2002-08-28
gcacgacttacttccagatgaaactacatctttggaggacacggtagatgttttgttcagtgacaattccccgggagtagtgggagctactgctgttgcctttaactcagtttgcccaaattgtttacccttgatatcaaagcatttccaaaggctatgtgagacactcccagatattgaagaatgggctcagattcttctaatcgatatcatcttgcgatatgtaatagctagacatggattggtgaaggattcttcaatttttgcttcaaatttgactttgaagagccagggcagtggagattcagcccttattggcaatgaaacttgtggcactacatcaaccatcacattgttccgacattacattgaagaatattcggaatgtttagaaggtgacataatcaactgttcatccgtgaccagtagcacaaacaatgatgttgcactacttttgaaatgtacatcgcctcttctgtggagccgaaacagtggagtcatacttgcagcagcaagtgttcattggatcatggctccagttgaccaactgaatagagttgttgggccaattttatttactctacgctcatctcctgatgcaacatatgtgatgcttggcaacatactagtttttgccaagacagccccacaattgtttgctccgttctatgaagatttcttcatatgcacttcagatccatatcaaactaaggctttgaagcttgaaatactgaccaccatagccacagagtcctctattccagcaatttttgaagaatttcaggattatattaaagaaccggataggagatttgtggcagatacagttgctgctattgcgctgtgtgcccagaagcttccctctatcactaccagttgccttggtgggcttttggcactagtattttatgaatcatctataagtgattctgctaactttgatggagaagctgctgttttagttcaagcaattttgtctatcaaagcaatagtgagaacagatccagcatctcatgaaaaggtgattgtacgcttggtccacagcctggacaaaattaaggagcctgcagcacgatccctgattatttggatatttggagagtatagttccataggaaatatcattccaaagataactcctgctgttctcaagtatcttgcatggtcctttgctgctgaaatgcttgagacaaagcttcagatcttaaatgctgctgcaaaggttatcatacattctcctgaagaacacttagaagaattcaaaaagataatggcccatgtcattaagctggctacatgtgatttgagttatgacgtccgtgatcgtgcccgttttatatcaagacttttgccatacagcacaacctatttaaatggaaacaactcctcatgtcaatcacataatgaagatatgtttaaggaactggctaatcatatatttgatgggaagatgccatcaacattccatccaaccaataactaccggatttatcttcctggttccttgtcacaggtgattcttcatgcagctcctggttacgcaccacttccaaagcctcagagtatggaattaattcataagaccatggaaccaaccagaggagtaggcaattcttctgaaagcattaattctgatgctgaatctggatcttcaacatatgatggtggttctgtttatgattcagagagtgaagttgatggctcatctgacaggaatgctgctgattctaacacaaaagataatcaagaagatcccctggtccatgtttatgatgcaagtgtagatcaaggtcagacggctagggatgtcgaggataattttgcatctctcatcactactgatttgactgaattaatgtctaagtcagccttggaaacatggcttgatgaagctcctgctgaaccagttcaggtttctacacaagcatcctctgctagagtgtcttttaccaatcggagctttgagcgaaaacctaaattgcacatgttgttagacccatctaatagtaatggtctaagtgttctttatgccttttcatctgaggtttcacccgtatcacgcttgctagtgtgtgtagacttgttatttgagaatgtttcaacaaaccaactggcagatataacaattaaatccgaggaggcttctggtagtgaggatggcttggaccaaacattacaaggatctgcaagtgttccaactattgttcttgataaagagatacaattattggctcccgaacaaacggaaaagatggttcttcaggttcacttccatcaccatctattgccccttaagttgtctgtgctctgcaatgggaaaaggcatccagcaaaacttcatcctgacattgcttattttgtgcggccactgcccatggacctaaatgcttttctatgcaaggaaaaccaactgaggggaatgtttgagtatgctagaaggtgcactttcaaagatcatcttcagaagcttgagcacaacgatgatagtgaagagcacactgataagaaccttctgatagcccagagcctcgcgtcaaaaatactcagcaatgccaacttccacttggtttcaatggatatgccagtgaccttcagcattgaggatgcttctggcttatgctggcgattcagcagtgagatcctgagcacttcaaacccttgcctaattaccatcctcgcggaagggcatatctcggaaccacttgacctcactgctaaggtgaactctgaagatacagcgtttggcctaaacctcctaaacagagttgtagcaatcatagaatgaagctttacgttttaacacctgtgcatttagtcttaaatgtcactttgtggatactgtaaattgttgtacattatttgcaagctatgaaggttttatagtaaaggtatccagcaaatgaattgaaatgtt

SEQ ID NO: 27078 - DNA, 687 bp, Oryza sativa
  ref <308>: DATABASE ACCESSION NUMBER: AK102520
  ref <309>: DATABASE ENTRY DATE: 2002-08-28
gggcccatcaaacacagagtgccatcgctcacacggccggcggcggcggcgatggcgaggggcgtctcctacgtttccgcggcgcagctcgtccccatgctccgggacccccggatcgccgtcgtcgatgtcagggacgaagagaggatctacgacgcgcacatcgccggctcgcatcattacgccagcgacagcttcggggagcggctgccggagctggcccaggccaccaagggcaaggaaaccctcgtcttccactgtgccctcagcaaggtgcgtggcccatcttgtgcgcaaatgtatctggactatttgtcagaggctgatgaagattcagatgtaaagaacatcatggtccttgaacgtggatttaatggatgggaactttcagggaggcctgtttgccgctgcaaggacgctccttgcaagggtgtgtgctcttgagtatccatatgaaactatgcatttacctgtgcatttcaaatttggttgctacctgcagacttcagggtagccatttatgctttatggtcactacagcacattaaaaaccgtgtatctcactttggtggatccgcaattgtgctattatgtggctctatcaattcagtggccgttaatgtcacttcacgacatgtaaactgaaaaccacattggtaattattgaaaatcttctgcttccgttcc

SEQ ID NO: 27079 - DNA, 2538 bp, Oryza sativa
  ref <308>: DATABASE ACCESSION NUMBER: AK102521
  ref <309>: DATABASE ENTRY DATE: 2002-08-28
ggccgcctctcttcttcttcttcttctctcctcacttcgctcgctccctcggtcgctcggccgccatgtcgtcgcaaggagcaggaggaggggtaggggacccggagctgttcgcggagctgtggcgggcctgcgcggggccgctggtggaggtgccgcagcgggacgagcgggtgttctacttcctccagggccacctcgagcagctgcaagagccgacggacccggcgctgctggcggagcaaatcaagatgttccaggtgccgtacaagatcctctgcaaggtcgtcaacgtcgagctcaaggccgagacggaaaccgacgaggtgttcgcgcagattaccctgcagcctgacccggatcaagagaatctgccaacattacctgacccgcccctgccggagcagccgaggcctgtggtgcactccttctgcaagatcctgaccccatccgacaccagcacccatggcgggttctccgtgctccgacggcatgccaacgagtgcctcccgccactggatatgtccatggcgacaccaacccaagagctcatcacaaaggaccttcatggatctgagtggaggtttaagcacatctacaggggccaaccccgtaggcatcttctgactactggatggagcacgtttgtgacatcgaagaagctgatttctggcgacgcgtttgtctacttgaggagtgagacaggagagcagcgtgtcggagtgaggcgtcttgtgcagaaacagagcacaatgccggcatctgttatatcaagccaaagcatgcatcttggtgtgcttgcaagtgcatctcatgctatcaagactaattcaattttcctagtgtactacaggccaaggttaagccaaagccaatatattgttagtgtgaataagtaccttgcggctagtaaggttggatttaatgtgggcatgaggttcaagatgagttttgaaggggaagacgtcccggttaaaaagttttctggaactatagttggtgaaggtgatctttctctgcagtggtcaggttctgaatggaagtccttgaaggtccaatgggatgaagtcacaaatgttaatggccctgagagggtttccccttgggaaattgaaacatgtgatggcactgcacctgccatcaatgtacccctgcagtcagcaacgaaaaacaagcggcctagggagccaagtgaaactattgaccttcaatcactggaaccagctcaagagttttggctatctggaatgccacaacagcatgagaagacaggtattggttccagtgaacctaattgtatctctggacatcaagttgtttggccaggcgagcatccaggatatggtgccgtgagtagttcagtttgtcagaatccgctagtacttgaaagttggttgaaggatttcaactcttcaaacaagggtgtctcccctaccttgtcagagatttctcagaaaatttttcaggttaccagcaatgaagcaagaattgctacatggcctgcacgttctgcttaccaagctgaggagcccacttccaagttgtcttcgaacaccgctgcctgtggttaccgaactgaagaagttgctccaaatgcgtccaaggttgttgaaggaaaaaaggaacctgccatgtttcgtctgtttggtgtggatttgatgaaatgtaccagcatatctactaccactgatgacaagtcaagtgtgggagcaggagaagcttcagccaaaggtactggttctcacgaagactctggtcagctgtcagcattctcaaaagtgacaaaagagcatattgctgcggatgaaagcccccaagagatccaaagccatcagaattacaccgctagaactcgcataaaggttcaaatgcatggaaatgctgtgggcagagctgtggatctagctaatctagacggatatgagcaactgatgaatgagctggaagagatgttcaatataaaggacctcaaacaaaaatggaaggtggctttcactgatgatgagggtgacacaatggaagttggagatgatccttggctggaattttgccagatggtcagaaagattgtgctctatcccattgaagacgagaagaagatcgagcctcacccgaagttactgtcttcagctaatccagagcaggatcagaagactgggttttaggagggaggctagggctgaaaggtggattttttagcctttcaccattgaagcgttggtggctatcgttttgtcgttggagatggtcgtagctgaaaaaatggtggctactggctagttcatcgtattgatgcaacagatttgttgctggtgtcaaaactgtttcttcacaagcattttgaagaacaaattgatgtaacataggtttcaagaaaaaaaaagatttgacaatgtctctttagtagtttgctcaagtttagtcaaaaccttaatggtgcttaaggaataacgtgaagctataaaactggtgtgtaagttctgtaaatattataagggagattataattttgtgatattagctttcaccctttaattt

SEQ ID NO: 27080 - DNA, 2578 bp, Oryza sativa
  ref <308>: DATABASE ACCESSION NUMBER: AK102522
  ref <309>: DATABASE ENTRY DATE: 2002-08-28
gctctttctcattctctctctagggttgcggccgcaccaaacccccaccccccccccaactccggcgaccggcggccggcggcgcacgcccataaccctcccatgccgcctcaccggtgaccacctacccgcccttcccaagatcccccttcgattcatctgattagcgcgagcagcgaggttcggcgcggcgggatggggacggaggcggaggcggcggaggtggtggagtcggtgagcgacctcgccgtgcaggaccctcccggggaggagttctccgcggcggacctccggtgggtcaagtacgcgagctccgagcaccagcgggacgacgtggcgctcatcccctacgagcggatggacgccttcatcgccggcgaatgcagcaacccggagtgccccacgcgcttccacatcgagcgcggccgcaagcgcgaccgcggcaccctccgggaggtcaggagcgacgactaccttctctacaggatgtactggtgctcgttcggcccggagaattacggcgagggagggacgatcttgccgagcaggaagtataggctcaacacgaggaatcgtgccgctcgtccgcagtcgatgcgtggctgcacctgccactttgccatcaagcggctatatgcccgcccgtccctggtgctcattatctaccatgagaggcggcatatcaacaagtctggtttcatatgccatggtcccttggaccgggacgccattgggccgggtgccaggagggtgccgtatgtggggagcgagatccagcagcagaccatgtcgctgatttaccttggtgtgccggaggagaacatcctgcagacacatatggaagggatacatcgttactgcggctcggacgcgaaggttgatagcctcgcttcacagtatgtccagaagcttgggatgatcatcaagaggtctacgcatgagctggatcttgatgaccaggctagcatcagaatgtgggttgataggaacaagaagtctgtgttctactaccaggattcgacggatacagatgcatttgttctagggatccagacagagtggcaactgcagcagatgattcgctttggtcatcaggatcttttggcttctcattcctcgtttggtgttagcaagctgaagtatccattgcacacactccttgtctttgactcaagacaacatgctctacctgttgcgtggattataacccgatcagttaccaagcaagacactttgagatggatgaaagcacttactgagagaatatattctgttgattccacctggagaatcggtggatttgtaattgatgacccagcttcagagctggatccaatcagggatgtattctcttgcccaattttgttttctttatggcacattaggagaacctggcttaaaaatataatcaagaaatgcagcaacagtgaggtacagcgggaaatgtttatgcaactaggaaaagttatgtacagtatctggagtgagaaaaatcccatggatgctcttgagcaattatttcaagacttcgttgaccaaaccaccttcatacaatatttcaagtccttttgggttcccaaattggagatgtggattgacaccatcagaagtcttccactagcaagtcaggaatcatcaggcactattgaaggttaccatctaaagctcaaggttaaagcatatgatgactcacagcttgatgctctccagcgtgtggactggttggtgcataagctcacaacagagctccattcgagttactggctcaatctgtatgcggatgaaagcggttcatttcctgaggtgaaagcagagtacattgcgtccacttcatggcatagagcgctgcagatacctgacgatgctgttatatttgatgacaaggaaccattttcagcaaaggtgacaagccagaaggatactagtcagatgtggactgtctggaatcctgggtctgagttttctctttgtgattgttcgtggtcaatgcagggcaacctatgtaagcacatcataaaggttaacatgatgtgtggaccacgcaaggatttccagccctcgctctcatttcaatcgtttcagcgtgtcctacttgatctgtggcaaaaacccatggatgattcattctcactcgatctgtcagtagcatgggttatgcaaatgcaggagaggatccagaaggtgactgagcttgctaccgctgacggcattgcggaagtatctaacagattgccgattcaatggacaaacaagaaagggaggaaagtagctgcaaagcgcaccagccctttacgtgttcttcctcactccaatggtattgtgcaaaaggatttcacacccaagaagaacagaaagagaaagaggttgtcaacagtctcgggttaacagtactccaattgttcttgtccagagagttatttttctctctgtgtaattagatggctaaccgtcttttgtttgttttctgtctcaactagttacttttggtataggcattggttactaggatgatcacctcacgtttctgaaaccaattcttctgttgtttagttggatataattattcaggcagcataag

SEQ ID NO: 27081 - DNA, 1974 bp, Oryza sativa
  ref <308>: DATABASE ACCESSION NUMBER: AK102523
  ref <309>: DATABASE ENTRY DATE: 2002-08-28
gactctccccaccaaattcccccaaatcgcagctgttcgccacccgcattgcgccgccattgcctccaaatccgagtactccttgagtaatctcagatccatctcgggttcctcccgccgttggcagcagccggagcttttttccgcggaagaaatggcgccgtttcggtgagttcttggcagtttgggatgatgcttggtgggtaggaggactaggagtgcggcggctcggggagaggctgcgatggagagcgccgccggggaggaggggaaggctgccccgtcgcttcccctggcgaccctgatcggccgcgagctccgcggcggcggctccgagcggccgctcgtccggtacggccacttcggcttcgccaagcgcggcgaggactacttcctcgtcaagcccgactgcctccgcgtcccgggcgacccttcctccgccttctccgtcttcgccgtgttcgacggacacaatggcgtgtcggcggcggtgttcagcaaggagcacctgctggagcacgtgatgagcgccgtgccgcagggcatcggccgcgacgactggctgcaggcgctgccgcgcgcgctggtcgcgggcttcgtgaagacggacatcgacttccaacgcaagggggaggcatcagggacgacagcgacgctggtcgtcgtcgatgggttcacggtcacggtggcgtctgttggggactccaggtgcatattggacacgcagggcggtgtgatctcgctgctaaccgtggaccatcgtctcgaggagaatgtagaggagcgggagcgcgtcaccgcgagtggaggggaggtcagccggctcaacctgtgtggtggacaggaggtgggacctctcagatgctggccaggtggattgtgcctttcaagatcgattggggatactgacgttggggagttcattgtgccaattccacatgtcaagcaagtgaagctatcaaatgctggagggaggctaataattgcatcagatggaatttgggatgcactgtcctcagaagctgctgctcaggcatgccgaggattgcctgcagagctggctgcaaagcttgtcgtgaagcaagcactgaagacaagtgggctgaaagatgacaccacctgtgtggttgttgatatcatcccatctgatcattcttcaacacctccatcactatctccaaagaaaaaccagaacaagttgagatctcttctttttggtaggaggtcacatagttctgttggaaagcttggaaacaagtctgcttcatttgactctgtggaggaattatttgaagagggttccgcaatgttggatgaaaggttgggtaggaattttccatcaaaagcaaactcgtccccatctcgctgtgcaatctgccaagtggatcaagcaccttttgaagatttagtgacagataatggaggtggttgctgttctgccccatcgacaccatgggttggcccttatctttgttcagattgtaggaaaaagaaggatgcaatggaaggtaaaagatctagtcgctcaacagcgtgcaggtgaaattgccaataggactaactggtccttgttcgtgcaaactggtctcctggttcggttgtctgccacatgtaaaaagaggataataatctgtttgctgctggatccaagtattattggtgaaactaactgcaatctagcctgaactgaacaaattgggctactaacaatcttgggagtctatcaacagcgcagatgaaaatttctgtttgcactgggaagatagctcacaggatttcaaccccgtagtttttttttttttttttttgaaccttagtatgtaaagtgaaatgtctagcttaacaatgtttgtaagagatggcaattggcaaggctccttgttctaccttggaatgtatatgcttgtggagccgaacagactaatttatttatctcatgctatcctaatcaatggtaatgtctttcggtgttct

SEQ ID NO: 27082 - DNA, 2725 bp, Oryza sativa
  ref <308>: DATABASE ACCESSION NUMBER: AK102524
  ref <309>: DATABASE ENTRY DATE: 2002-08-28
ggcttccgtctcattctctcgtggacgcggcagtggcgccacgaccacgcctccactaccgcctcaatggccaccgtcatcgtcatcctcctcctcctcccgttactcccgtccaccgccctcgccgccttcccctacttcctcgcctgcggcgccgcctccaacgtctccttcccaggcgactccccagcgcgcaccttcgtcccggacgctcccttcctctcgtccgccggccgtgtcccggcagtgacgagcaccggctccaacacgatcccccctctctacgctgccgcgcgcgcggccggctcggggttctcgtacagcttcgccgacccggacaccgccacggtcaacgtgtcccgcgtcctccgcctccatttcttccctttcaccagttcctcctctgtgaacctctcgtccgcgagcttctccgtctctgttcgcgatgcctacaccctactctcctccttctcgccgccgcgcgacggcgtcgtcaaggagtacttcgtcccgggggacggctccggcgagttccgcgtcaagttcacgccggacgccggctccaccgcattcgtcagcgccatcgagctgttcccggctccgccggagctgctgtggagacgcccggtgaagccggtgggcgccctggtcgacagcgtcgacgtgaacgcgtggccgcagcaggcgctggagacggtgtaccgcctcaacgtcgggggatccaaggtgaccgcggcgaacgacacgctgtggcggacgtggctccccgacgacccctacttttccagccccagggggctctcgcaggtgaactcgacctcgaccccgatcatctacggcacgtcgatcgggtacacgagggaggtggcgccggacagcgtgtacaagacgcagcgcgccatgaacatggcgagccagcagttgttcctcactccggggcctttcaacttaacgtggaccttcgcgcttccgccgccggcaccggggtccgactccgactacctcgtccgcctccactggtgcgactactcgctggtgagctccgttgtagcaacgggcatcgtcttcgacgtctacgtcgcgcagaggcttgcttccaaagacctcgaccgaaacgcggcggacgcggcggagcagcccaacgaggctttttacctggactacgcggccacggccccgaccaccgggaacctcaccatcagcatcggcaagtcggacaaaagcgatgcaggcggcatgctcaatgggctggagatcatgaagctgcggcgcgccgataatttgaactccgccggatcgcacggcaggaggaagaagattctcatcggcacgctctcggcggcgctcggcgtcgctgttcttgcgtgcgcgctgctctgcttgctcgccgtgctgcgcaggcgtagacaggcgccgactccggcgccggaggagaaggagagcacgcagctgccgtggtcgcagcacacgcaggatggctccagctgggttgacatgtcgaacgcgtcgggcgcgggcatgaccggcgggctgcacaggatgagcatgcagctcaacatctcgctggcggacatcacggcggccacggagaacttcaacgagcgcaacctcatcggcgtcggcgggttcgggaacgtgtatagcggcgtgctccgcgacggcacccgcgtggcggtgaagcgcgccatgcgcgcctccaagcaggggctgccggagttccagacggagatcgaggtgctgtcccgcatccggcaccgccacctggtctccctcatcggctactgcaacgagcagtcggagatgatactggtgtacgagtacatggagaagggcacgctgaggagccacctctacgggtcggaggagccgccgctgtcgtggaagcagcggctggagatctgcatcggcgcggcgaggggcctgcactacctgcacaccggctactccgagaacatcatccaccgcgacgtcaagtcgaccaacatcctcctcggcgacgcgttcatcgccaaggtggccgacttcgggctgtcgcggatcgggccgtcgttcggggagacgcacgtgagcacggcggtgaagggcagcttcggctacctcgacccggagtacttcaagacgcagcagctgacggaccggtccgacgtctactccttcggcgtcgtgctgttcgaggtgctctgcgcgcggacggtgatcgaccagagccttgagcgcgacgagatcaacctcgccgagtgggcggttagcctgcagcagaaaggggagctcgccaagatcaccgacccgaggatcgccgggcaggtgaacggcaactcgctgcgcaagttcgccgagaccgcagagaagtgcctggcggactacggcctggaccggccgtccatgggcgacgtgctgtggaacctcgagtactgccttcagctgcaggagacgcacgtcaacagggacgcgttcgaggacagcggcgccgtcgccacgcagttccccgccgacgtggtcgtgccgcgctgggtgccgtcgtccacgagcttcctcatggatgacagcgtgaccgactcggggatcgccaacagcaaggccttctcgcagctcagcagcggcgatggccgttgatcaatcagctggtcagtgaaccgacagtcggtcagactcagatagagaagtttgtaaccataatttttcctctctttttttttatgctgatctattctctgaatccaaaacc

SEQ ID NO: 27083 - DNA, 1846 bp, Oryza sativa
  ref <308>: DATABASE ACCESSION NUMBER: AK102525
  ref <309>: DATABASE ENTRY DATE: 2002-08-28
gagaaaagcacacagcaaaaaaaaaaagaaatccaaaagggtggagttggagctcaggaatccatccccagacagaggaggaggaggaggaaggggtggtcgcctcgccaagtcggtggcgattttgacccctcttcgccgctggcaaggtattaccgtgctaactggttaaaggagaagggttgaaaggccaatatgggcatttcagccaagtggattaaatcacttgttgggataaaaaagcatgaaaaagcacaaacttctgaaagcagtggagtgaggagctctactgcgcagttgctacacaagcgaaaacattctattgatactgaaagtgctgctgcagtcgaagaactcagtgtacaaactgagccattggcatgtgacaccaacattcaggcaatatcaaatatcacctcctcacccggtacaactcttcaagtatctcagattgaattggatacaagggagaatcatgctgcaatagttattcaatctgcctttcgagcgttcttggctaggagggctttacgagcattaaaaggattagttagactccaggctcttgttcgtggccatgctgtccgaaagcaagcagcagaaacacttcaatgtatgcaagcattggtaagagctcaagctcgtgtcagagcaagacgagttcgaatttctttggaaagtcaagtgacgcaaaagaaggcttcagaacagaatgttcacgaggaccatgtttgggaaattgaggaacgctggtgtgacggtattggctcagcggaacaaatgcaagctaaagtattaaaaagacaggaagctgctgctaagcgggaaagagcaatggcatacgctttaacacaccagtggcaagcaggttccaggaaacagaaagcagcaaccctccaagggcttgaggtggatgagaatcagtggagccagaattggttagagaggtggatggctgcacgcccatgggagaacaggttgcttgatactaatgccaaagagagtgctccaactggtgatgataaccatgctgatgaaaatgaggccaaggctccgaacaaaccaaaaggaaaagtgtccatttctaccactcatccgaatggctcaaacaagaagaacggtgcaaatcataagaagtcgcattccgatataagtggctcttcatcagggcaatctgcaggtgttctgcccacaaattctttgggatcatccaagctaaaaccaaagccatcagatgaaatctctgaggaagtcaattctcaaccttcgaatttggcttcgcggtccacaagtaatccaaaagagaggccaacacaagtgaatgcttcatccaagaagagactgtcactgcctaacaatggaacaatgggtgggggcgtaggaaaaggcgcaaccaacggcaggacaaaccaatccatgagctccaagaatgcagcaaaaggatcatccaagctggaatcaaagcagcaacaacgaccaaaccctcctaacacgactgtgaaacgagttgaggtaaaggcctgagaaagtgaggaatccacccaactcccatttcattcagacgcttggtaatagccctgttgtcatgtgtgctgttgcatccgtgtatataaaccaagaaaagagagagagaatcttgcatctacattgatgccatgcttcatgtttctattgtgcaatatttatgttgtcagtattttctcttcgcgcttctgcagttctgctatatttctgtaagttatcttccttctactataaccagagaactgtatgtgcaaaactgtgaaaatatgcacagtacaataaaccatatgccctattgtttcatgacatggtcttcagcatc

SEQ ID NO: 27084 - DNA, 2409 bp, Oryza sativa
  ref <308>: DATABASE ACCESSION NUMBER: AK102526
  ref <309>: DATABASE ENTRY DATE: 2002-08-28
ggtcacgttatgatgtagctcagctcacacttgtcttgttcatagcatgagcatcgcacgcctatttaaagatgctatagcttcgattccctcctgagctctaacactatcgaagcttcacaaattcagttgacgaattgtagctgttctctctcgtctccaagtgttggaggcaaaggaatccttcgatccataggcaggacgcaggacagagaatgggtttcgaagaaacatatttttctgccttctgttacttgcttcttttccctgtcagctggaaatgccaagctgcagaactggacatggctcagacagcagtactcgaagttgatgcttcatggaacctttctcgaaagatccctgacacgctatttggattgtttttcgaggaaattaaccatgccggagctggtgggatatgggcggagcttgtcagtaacagagggtttgaagctggagggccccacaccccttcaaatattgacccatggtctatcattggagatgaatcctctatatacgtcacgactgattgctcatcttgtttccgccaaaatattgttgctctaaggatggagattctctgtgataattgtccagccggcggtgtcggcatttacaacccaggattctggggcatgaatatagaagaaggaaaagcctataatctagtcatgtatatcagatcattagaatcagtcgaattgacagcttcgctcacatgctcagatggaatgcaaaatctggcatcagtttctatacaaggtattgatctgtcaaattggacaaagatagagttgcaattactagctgaaggaacatgcagaacttcaagacttgaattaacaagtatgaaaaagggaataatttggtttgatcaagtgtcactcatgccttcagacacatacaagggccatggctttcgcaaggaactactatacatgcttttggaattaaaaccacagttcctacgctttcctggggggtgctttgttgaaggcgattggttaagaaatgctttcaggtggagggaaactattggtccctgggaacagagacctgggcactttggagatgtttggaattattggaccgatgatggcctaggatattacgagtttctccagctttctgaagacctgggtgctgcccctatttgggtgttcaatgttgggatcagccaccatgatgaagtcgataccaccataattgaaccttttgttaaggatgtattggatagtcttgaatttgcaagggggagagcagaatcgacatggggttctgttagagctgcaatggggcatccagaacggttcccactgaagtatgttgctattggaaatgaagattgtgacaagggattttaccgaggaaattacctcaagttttatgatgctatacgcaaggcctatccggatattcaaatgatttcaaactgtgatggatcatctaggccacttgatcatcctgctgatttatacgatttccatgtctataccagtgctgctaatctttttatcatgaagaataagtttgataggacatcacgcattgggtctaaggtatttgtcagtgagtatgctgtcaatgaacaaagggatgctggtaaaggaagccttcttgcttcactggctgaggctgctttccttactgggttagagaaaaatagtgatcttgttcagatggcaagctatgcaccgctcttcgtaaatgacaatgaccgcacctggaacccagatgcaattgtattcaattcctggcaacagtatggcactcctagttattggatgcaaacatatttccgtgaatcaagtggttctgtgattcatccaattacgatcggttccagctactccgattcactggctgcatctgcaatcacctggaaagacacacatgatatctttctgagaataaagatagtaaactttgggccaaatgctgttaacctcgcaatatcttcaagaggacttcaagctggcgtcaatacggcaaaatcaactgtgactgttctcacatccggcaatttgctggatgaaaattcatttgctgaaccaaacaaagtcgtaccggttaaaagcgagctgccagatgcttcagaagagatggaagcagcgctctctccttattcattcacttcatttgacctcgctctagatcagtacagcaagctcgtggcagagatgtgaagcaatgatgcacacttataccagagaatagaacacaggatgattacgtgaggtgtggtacctgaatttcagaaagctaacagagtgtatatactgcattctggcatttgctaatcacacttcgtgtgaccctgttgtttatgacgctgtaagagtagtttaaggttgtcacattatcgaacctagcggtaacgctaattaatatcattgtcaataagct

SEQ ID NO: 27085 - DNA, 1845 bp, Oryza sativa
  ref <308>: DATABASE ACCESSION NUMBER: AK102527
  ref <309>: DATABASE ENTRY DATE: 2002-08-28
gggttactagtggtactggagtacctcactctcaccacactcccttcgtccctttctcctctctcaccaactcaaagctctcgccgaatcccacccaaagatccaaacccttttccatccaagaacgcgagaatccacccacccaccccgccgacgcccggcgatgggcgccttcgcggcggcgctgctggccctcctgctggccgcgatggccgcgcccccggcggaggcggcggtcggggtgaactggggcaccctgtcgtcccaccgcgtcccgccgccggtggtggtggacctgctccgcgccaaccggatcgggaaggtcaagctcttcgacgccgacccggccgtgctgcgcgcgctcgccggcagcggcctccaggtcatggtcggcgtcaccaacgccgagctcgccgccgtcgcgggatcccccgccgccgccgacgcctgggtcgcgcagaacgtctcgcgctacgtcggccgcggcggcgtcgacatccgatacattgccgtgggaaatgagccgttcttgacgagctaccagggtcaattccagtcatatgttattccagcaatgacaaacattcagcaatcgctggtgaaggctaatcttgctagctatgtgaagcttgttgtcccatgcaatgctgatgcttatcagagtgcttctctcccatcacaaggagtttttaggactgaactgactcagataatgacccagctcgccgcttttctcagttctagtggagcgccatttgtggtcaatatatacccttttctcagtctttatcagagctctgactttccacaagattatgccttcttcgagggatctactcacccggttgtagatggtcctaacacatactacaatgcttttgatggcaactttgacacattagttgctgcgctgggtaaaattggatatggacagctaccgattgcaattggtgaagttggctggccaactgaaggagcaccgagtgcaaacttaactgcagcaagggcattcaaccaaggtcttatgaatcgtgttatgaacaacaaaggaactccgcttcgtcctggtgtacctccagctgatgtctatcttttcagcctttttgatgaagagcaaaagagcatactacctggaaactttgagagacactgggggatcttctcatttgatggacaagccaagtacccattgaatcttggtttagggaatccggtacttaagaatgctagagaggtgccatatcttccatcacggtggtgcatcgcaaaccctgcccagaatcttgataatgttgcaaatcacttaaagcttgcttgctctatggctgattgtaccacactcgactatggaggttcctgctatggcattggagagaaggccaacgtttcttatgctttcaacagctactatcagcaacagaagcaggatgctaagagttgcgatttcgatgggaatgggatgataacttaccttgatccatccatgggcgagtgtcgctttcttgttggaattgatgatagtaaaagctctgcagtttcctcctgtggctgcggttgtggggtttgttgtggggtgtgggttctatttttctgggtgttcatgtaccttagaatgatgggttctgtctgacgtcgaaaatgatctgttaggacacatcggcatactttctgtggccttgtgttatagaaggtattcttctagtagatttaggaaaccacggcattctagccatatatgaaaattagattgtgtgagattaggaaaagagattctagccatatatatatgaaagttgatttgtgctgaaatttctcctgattctgaagaaacatgtttttgccagc

SEQ ID NO: 27086 - DNA, 1865 bp, Oryza sativa
  ref <308>: DATABASE ACCESSION NUMBER: AK102528
  ref <309>: DATABASE ENTRY DATE: 2002-08-28
ggccgccaccaaagtcacgccgaagaagaaccgcgttagggcttcctcccccgccgccggcgagagtgggctttgactcccctcggagccgcctcctcttcgtctcatctccccgcggccttgttcatccccttctacgagccttagcgccgcaccgcaggttccagctcggtggctggagtttaatttttatttgttctccatggcgcttcggttcgaggtattaggaagattcaatcgtgctcgtgcagctcgattaacactaccccactttacttgtcagacaccactgtttatgcctgttggaactcaaggtacaataaaaggcctgactactgaccagttagaggaaataggttgccagattatacttggaaacacctaccaccttgaacttcgtccaggttctcaacttattgacgacttgggtggccttcacaaatttatgaattggaaaagggcgttgctgactgactctggtggtttccaaatggtttctttgctacatttggctgacattactgaggaaggagttacatttcagtcacctgttgatgggaagcccatgctcttgacacctgaggaatctatccatattcagaacaacattggagctgatataataatggctcttgatgatgttgtgaagaccacaattactggcccaaggatagaggaagctatgtatcgtacccttcgttggattgataggtgcattgctgctcataagaaacctgatgtccagaacttatttgggattgtacaaggaggattagatccagttcttagagatatctgcgtgaagggcttggttgagcggaaccttccaggatatgccattggtggtcttgcaggtggtgaagataaagactcgttctggcgtgttgttgcccagtgcactgctggactgcctgaagataaaccacgatatgttatgggtgttggctatccacttgatattgtagtatgtagtgctttgggtgcagacatgtatgactgtgtttatccaactcgtactgctcgctttgggactgcacttgttcctgagggtgttctgaagttgaaacaaaacgcaatggcaactgatgaacgaccgatagatccgacctgtccatgtatggtctgcaaaaactatacacgtgcttacttgcattgtcttgtcacaaaagatgctatgggttcccaactgctgtcgtatcacaatctatcatttatgatgcggttaagtagagacctccacatgtcaattctggaaggacgattcccagaattcgtgcgaggattcttgaggatgcagttcccaaagggcgatgttccgaagtgggttcgcaacgcaatggttgttgctggcattgacatatcggagtgctgcacccccgcgaagtatcctcgtgatgcaatggatgctccgggtactgacatacctgagctcttgcctcctaccaattgctcctgaggcagagaaccaagaattaagggactaaccttataactgtttaccacgacacgcgcgattggagtgctgtcgcatgaaggtgatcccacttctttaacaaagtcaagttttcacaagaatcttattggtcatcaactcatcataggtgtaggcctcactgcttcatcagcatataattttccaacagtatatgctgaatatagctgattggattttgaacttttgataattacaaaggtttttgtactcctatcttttggaaccatagggttattatgcggattgatgcatgaatatcagaatatgcatcatgtcgtctgtagtgtaagctgttgcaaaatgatttctactggttttaatgtagaagcattatctactcattttgttaacgaagaacattctattccat

SEQ ID NO: 27087 - DNA, 1328 bp, Oryza sativa
  ref <308>: DATABASE ACCESSION NUMBER: AK102529
  ref <309>: DATABASE ENTRY DATE: 2002-08-28
accatactagagaaagccatagaaaggagataagaagaaaccaagaaaagggagaaacaaaagttgaagaagactttctgctgatatttttgcacatatatataattttttctcctccatctgcactctctggaaagaagaagaagaagaagcagaagaagcttggagcttgagctttctgaatttgtcttgtcttgcaaactaggataaagatacaagttagtagtacaagaaacagtaaagcagtcggtgtaactaatgggggagatgaaccagccgccgccgccgccggtggccgtgccgccgccgatggtgatgcagccaatcatgcatccgcccgtcggcaccggcgccgtcttcccgccgcacgagcagttccaccatctcgcctactgcgtccactccaacccttcctgggttcaggtggccgcacttgcattcctccactatcttgtgatgctgggttctactgtcatgcttgcatcaactattgttcctgcaatgggtggtaccccaggggataaggctcgtgttattcaatccttcctatttatgagtggcatcaatactctcctccaaacacttgttggaacgcggctccctacagttatgaatgcttcctttgcatttgtcgtcccagtactgtcaatagccaaagactttgaacaaaataactatgcgagcagtcaccagagatttactcacacaatgagagcaactcaaggggctctgattgttgcttctatcctcaacatgattcttgggttcagcacaatttggggggcattcgccaggaaatttagtcctgtaataatgacccctgttgtttgcgttgttggtcttgggctatttgcacttggctttccccaggttggaaagtgtgtggagatcgggctaccaatgctaatccttgcagttgttgtgcaacagtatgtgccatattacttccatcattaccatgagcgaatcaccttcttgtttgagaggtattcgttgcttctttgtattgggattgtgtgggcctttgcagctatccttactgctgctggtgcatacaaccatgtttcactcaagacccagcagcactgccgcactgacaagtcctatctcatatcatcggcaccatggatcaaaatcccataccccttccaatggggtacaccaatcttcactgcaggtcattcatttggaatgatgggtgctgtacttgtttctgcttttgagtccactggtgcacactttgcaactgcacgtctagctggtgcgacaccacctccagctagtgtccttagtaggagtgttggtttgcagggcattggaatgttcct

SEQ ID NO: 27088 - DNA, 1914 bp, Oryza sativa
  ref <308>: DATABASE ACCESSION NUMBER: AK102530
  ref <309>: DATABASE ENTRY DATE: 2002-08-28
ggtggagcctaggttttccttccaatccgccgccgctcaccactcgaccgagcggggcacccacctccggaaccagatccctcctctcgctccgagctctctcgcggtctcgccactgtgccggccggatctgaaatgtcctcgagtgaaggatctaagtgggtttcgcgatgtgtctttggctcccctccgaatctttctgagctagatgagttggcggttctttatcatgaacaagctgcaaggaacactagagactacgttagaagctggatctgccccgactgtaggaaggagtacaagcctattcaaaacatgcttgttgatttgccgcctttcagctgtgatgactgtgggttgaagaatgatgctgcttatgagtggagaattacccaatgcctgatcaatggagtttcgttggacttcaaggtttatgaccaaaatcgtaaaccacactgtaccctatattcagttgctgccacaattgacgccactcgtagggtagaaggggccaagaaaggattgataatctccactccacttgacgtaccagagatggctaaaacatatgagcaagtcactggttttgagcttgggaaagaacccccggaggagttgtttgagacgatggtgaaggcagtggtgatgaacatatctctgaggaagatagcagtgatgatgagattgatcttatcatttatattttgaagaaaagagaaatggacaggagaagagcatgtatgcttgccgccatgattggtacgtattacttggaactttactctaataaggctccaagaaggggagcacctgagtctggacatgattgggttatgagaacattagccaatagaactgcttgttacaacatgtttaggatgcacaggccagtttttgagaggttacattctgtgcttgtggaatcatatgagttgaagtcgacaaacaacatggattccttggagtgtttgggtctttttttatggatagtaggtgctccccaattagttaggcaagcccaagacagatttgttaggtctcttaatacagtacatagtaagttcaaagcagttttgaccgctctactgaaacttgcacaagatatcattaggccaaaagatcccttattcacaacagtccataagaaattgctttctcctcagtacacaccatatttggataattgcattggagcaatagatggtactcacatccaagttgtggtgccaaattcagctgctgttcaacataggaatagacataaggagaagagtcagaatgttatgtgtgtctgtgacttcgatatgagatttactttcgtgcttgctgggtggcctggttcggttcatgacatgagggtattcaatgatgcacaaactagatttagtgccaagtttccaaagccacctccaggaaagttttatctcgtagactcaggatacccaaataggccgggttatctagcaccatacaagggtataacatatcatttccaagagtacaacgaaagcacattgccaaggggaagaagggagcactttaattactgccattcttcgtgtcggaatgtcatagagaggtcatttggggtcttgaagaacaagtggaggattttgtttagtttacctagctactcgcaggaaaagcaaagcagaattatccatgcatgcatagcacttcattatttcattagagacagtcaaatggctgatacagagttcgacaattgtgaccatgatgaaaattatgatccattgggtggaacctcttctccatctagcgaaccaacaaacgaattggactcgcgtgtcatgaaccaatttcgggactggattgccgatggcttgtggtatttgaaaggaatgtaatgaatggttcaatttttcttgtgaattgtatttggtttaacttgtc

SEQ ID NO: 27089 - DNA, 2237 bp, Oryza sativa
  ref <308>: DATABASE ACCESSION NUMBER: AK102531
  ref <309>: DATABASE ENTRY DATE: 2002-08-28
gctctctctctccaccctcagccgccacactcccatgtcccatccactctcctctcctctccggcggtgggtacaggcgatgacagcgtgcggcggcgtcctcctcctctattgccgctcgcggtgccggcttactctcccccaccgcttaccacgccgcctccgtctccgccgtcgccaggctcgggagcggcggatctgccgccgatagcgccggcttccgggccggcatccgtctccgccgctgctgggcacgggagcggtggatccgccgccaccatccactcccccaccaccgccgatcccctctctatgcatgcctcacgccgtcgcataccctcccgatttccctctccaatgatggatggtttggtttggtttggtttgtctgcttgcgagcagcttctggttgctgtgcgtgttcggatgtttctagtttctctcccccaatttcgtgcgttctggagataaattagcgggaggctgtttctagtttttctcccccaatttcgtgcgtttctagtttattatttttcgcggaagtctgttcggatcaccactgggagccaggcacttgatgaggtgcttggcggtaacatagtaacatatatagtcctccgactttgttatgatcagttgttccattattttgttctaatctacttgcatttttcaaattttcaaggagggattgaagcactgcatcacagaggcatttggagagtttcggtgcgtagatgctcatgttccttttaatttttttgccctcgtttacaactgcagcttggttgtatcaatgaaatttatgatgtgtggccatacctgtctaataaatatggtgaaatctagcttagtaatactattagtattctggtttaagttaatttgctaatgccttttcaaacctgttgtgcacccatttctatcttctattcatgccagtgcatacagtaattcctaaacatgttctgtattctgctaaaactaagagattaatattgtatttctcatttgtaaacttcaggtatataaatatcaatattgtcgaactattttactatttaattttaatatgagccagccaaacattgaaccttgatgtactctggaccatcccttcccatcgacgaaaaggacaacctggttcttaccaacctcctgacattagtcactgtagctcaactccataagtttaatcttccattttgttttttacacaattccagatctagctagctcaaaacaaatatctacgttatgttcctatgccatccagcataaccaatgtatagtgcttcttgttagctttaagatacatttacatcccctgctgttacatgctatttgctgcagctgcataagtgccatttttgcccctaatgaactatccaaaaactatatagtctcaccaaacagtcttgtatacaaatgcaaatcatacaccttcttggttactataccttctttcatttgtatacaaaaaaagctgtttctgcttactataccttcttggttgttcttccttttgtatacaaatgctattaacaactgaacaacatacatataatttctgcccttcagttctcatgcggcagaagaaacatggaaataataccatgcctcagtgctgtgcctattttcatatatcgttctcattatatacaacattccaatgtataatggttcattcttcattttatttgtggctgccaaactgatggacaaccttcaggtgagcaacccacataggctgataagctcattctgcctcacacttcttccatggccacagaaacagctagccagatgaaagaaactgtatctgctgatgctaaaaaagaaaagaagcaaactaagtataaggatgctccacccactgcatttgatcttttcaagatgtgccattgcaacagcaatacgagttttaatgagcctgtaaagaatgttattgctgagatgggagttcattgataatcctgcacaagaagggcaagatatgattggactttgtagatatggtcagtgatgtagaactttgttttgctatctaggatatggtggtactgttatgttttgctcacccgactgaacctagtttggttgtaagatttgtgttgtattggatgtttgtcgggttgtgctatatgggttgttattgtgtttgattgttgggcctatatgggcttagcacacttgttatttgatactaatataaatgaatataatatgatgggctg

SEQ ID NO: 27090 - DNA, 1798 bp, Oryza sativa
  ref <308>: DATABASE ACCESSION NUMBER: AK102532
  ref <309>: DATABASE ENTRY DATE: 2002-08-28
gtgtgcgatactgctgtttctcctcttcctacacgcagcagcgccgcatcgatttgggcgctcactacgtacggtgctcgccggattggccggcgtccctgccgccgtacacggtagtggaggtcccttgatgaaaactcctctctgctggtccgtagacgcctcctttcgccattctctcctcttcagttttttcgggatttcttcaccgtccggttgtgcattggcttcccctaggaccttcttgcgtcgcctgattgatctgcagggtgtgccgccgtgggagaccctaggcctccacttcccgtgctaagcttccaccatggaagggggaagcaaaggagatagcaacagcttaggggcacaaccagaagatcaaccggttcttctcccatctactgatctacatgtccataaagctgtggaatcacaagatcaaccgactattctcctatgcactcatccagatctcctacaaaattaggaatcaactaccaatttcgtctagcagatccaaacaagtcaaccaatactgcatattccacccacacatgacgatctgtcacagctattggatctgatgaatctatcctagatccaaccgtacacggcaaccctgctccagagcaatatgtctacctcccaggggtaagtcaaaagaaaagaacactcacaagttttttcccaagcgtgcaatttaaacttaaactacctacaccacattagctcaccctctatctgcttgaaattatgatgcattcactgctttagtcatatagttcaaacatattacaatataattggccattatatatatgcaaagtaaaatatcattgcagtaaacatatagaagaataacaagacatattgcacccatatgaataataattttaacaaacaatactaatatatatatctacatgtacatctttattttttagacaattgtattaaggtatttgtatccacacacaacccaattgtgctcacaaatgtttttttagtcaccttgatataaataggctgcaactaaagtctatatctcaaagcagctcctgctaacgcgattacatccaagcctggcttagtcatacattcgtcatagatcaagttcgaaggaccagatcagtatagggccaatttaaacatggatttaccaagagtaggcattcgggtataaaaaaatgagatacattctatggtgaggtagcagacacatcctacgaagctaaagagagtaccacgcatgcagccattcaatgccttcagagaaagaaaaatattgcaataaaggatctactgagaagaaactccacacaaccaagcaaatgttagacctgtttgcacatagtctagaactccacagaaacgaaggtcacctcctccaacagaaccaacagaaatataacatgttagtgaatgagatcaacatgatctgtgcccaaagtgcattataccttcccaaacatgtcaaatggttgggacaaccagcatggccaaacaaatgatatctctgttgcatacattggccattctccacctgtcacatcaaatgagatacttgcaaagcatctgatagctcttacgcagtacaagcatgattgatcatccttccttcccacataggataaacaaatgtgtatgtcacatggctaggaaatccaaatgtggctaaaccatcaaagtgctgtgtccacattgtgctagcttgcatttgcccctttttgtagcatatgttcaaaccgcttggaccatcataattgatgagcaaaacaatatatccctatatgttatcacc

SEQ ID NO: 27091 - DNA, 3213 bp, Oryza sativa
  ref <308>: DATABASE ACCESSION NUMBER: AK102533
  ref <309>: DATABASE ENTRY DATE: 2002-08-28
gagttctccgataaactaaaccacaccaagacaccaagttgatcgtcggcgacatgtcgtccccaattgccattggtcgtcgacacgggccaccaccactgctactacacctgctcatccttcatctcctgttaggcttccaacacctctgctactcccttgccacgtacagcaaccgaagtactgctgccatgccggccccgtgcttgcccgaccaggcagcggcgctgctccgcctgaaacattccttcaacatgaccaacaagtccgagtgcaccctcgcatcatggcgcgccggcacggactgctgccgctgggagggcgtccgctgcggcgtcggcatcggcgttggccatgtgacctcgcttgacctcggtgagtgcggattggagagcgctgctcttgaccctgcgcttttcgagctcacttcgctcaggcaccttaacctcgcgtggaacaatttcagcgggtctcatattcccaccattgggttcgaacggctcactgagctcacctacctcaatctctccaactccaaatttgcaggccagataccaaatacaataggacgtctcactaatttgatatcccttgacctctccactgattttttccttattgatctagatgatgagttcttatcagttgccacctattcacccgcttggttacttgtggcaccaaacattgtgtcaatagtcgcaaacctccacaacctgaaggaactttatatgggcacaatagacttgtccagcaacagcatggtacagtggtgcagtgccttttcaaactccactacccctcaacttcaggtccttagcttaccatattgctacctcgaggttcccatttgtgaatcattgtcgggtatacgctcactgagtgagattaacctacagtacaacttcatacacggtcccattccagagtcctttggagatttaccttccctaagtgttcttagtcttacacacaacagtctagaagggagcttcccaagtagaatcttccagaacaaaaacttaacctctgttgatgttaggtacaacttcgaactctccggttcgttgccaaaaaatatctcatcaaatgacattttggtagatcttcttgttagcagtactaacttctctggtccaatccctaactcagtaggcaacatcaaatccttggaaaatttgggtgttgcatcaagtgacttctcccaagagcttccctcttctattggccagctgagatcgttgaattcgttagagattacaggggctggtgtagtaggagcagtaccatcttggattgcaaatttgacttcattgacccttctcgacttctcgaactgtggcttatctgggaagataccatctgcgataggtgctatcaagaatctgaagaggttagcgttatacaaatgtaacttttctggccaaatacctcaagatctatttaacctaactcaattgagagtcatatatcttcaatataataacttcattggtacgttggagctcagctcattttggaaactaccagacctattttctttgaatctttccaacaacaaactatcagttgtagatggtgagaaaaataattcttcatgggtgtccataaactatttctacaccttgcgcctagcatattgtaacatatccaatttccctagtgccttgagtctcatgccttgggttggaaatcttgatctttcaggaaatcagatccatggtactatacctcagtgggcgtgggaaacttcgagcgagttgtttatcctcaacttattacacaacaaattcgacaatataggatataattatcttccattttacttagagattgttgatctcagttataacttattccaaggacccatacctataactggacctgacacttggttgctcgattgctcaaacaaccggttctcatccatgccatttaacttcagttcccagcttagtgggatgtcctatctcatggcctccagaaacaacctatctggagaaattccactctcaatttgtgatgcaagggacattctgctccttgatctttcttacaacaatttaagtggcttgattccactttgtttactggaggatatcaattcccttagtgtgttcaacttgaaagcaaatcaacttcatggtgagttacctcgtaatatcaagaaaggatgtgcattagaggcattagatttcagtgagaacatgtttgaaggacaactacccacatctctagttgcttgcagagatttggaggttttagacattggaaataatcagattagcggtggttttccatgttgggctagtatgcttcctaaacttcaggttcttgtcctgaagtccaacaagttcaccggagaggtggggtcttctgccatcgaaaaagataacacttgcgaatttgcaaatctacggattcttgatttggcttcaaacaacttttctggtactctacatcacaagtggttgaaaaggttaaaatccatgatggagacatcttctagtgcgacattgcttatgcaatatcagcacaacgtgcatagtacaacatatcagttttctacttcaatcgcatataaagggtatgaagtcacatttacaaaaatcttgaggacccttgtagtcatcgatgtttcagacaatgcactccatggtagcattcccaagtcaattggagagctcgttctcctccgtgggctaaacatgtcacataatgccctcacaggaccaattccatctcagcttggtgctctgcatgaactcgagtcattggacctctcatcaaatgatctttcaggggagattccacaggagttagcacagctacacttcctctcagtgctgaacctgtcctacaacggtttggttgggagaataccagattcaccccagttctcgaacaatctctcctatctggggaacattggtctatgtgggtttccattgtccaaggaatgcagcaacatgacaacaccaccaagctcacatccttcagaggaaaaacatgtggatgttatactgttcctctttgttggacttggagttggcatcgggtttgcagttataatcgttgtgacatggggaatccgcatcaagaaaaggtcccaagacagcagatttccgttttggaaaaaagttctctgtatgtaagattacttgttagctgaaaaaacgtatatgctttagttaccacagctacgttaaaact

SEQ ID NO: 27092 - DNA, 1199 bp, Oryza sativa
  ref <308>: DATABASE ACCESSION NUMBER: AK102534
  ref <309>: DATABASE ENTRY DATE: 2002-08-28
ggccgccgccgaagcagctgcgaccgccgccgccgcgattcgagccccagccatggcgaagaagcggaagcgctcctccgatgcggcggccgcggtggagaagcccgacgagttcgcgccgcagcgcccggagcgcaccctcttcggcttcaaggagaagcccgcggacgacgaggaagccgaggccgaggccgcctctgagggagaagaggatgccgccgccgccgccgccgcggcgccgttccgcaacaaggagaaggtgctcgtgacctgctcccgccgaatcaactaccggtatcggcatctgatgcagaacgtggtgtcgctgctgccgcacgccaagaaggacagcaaggtcgagtcgaagcagagcaagggcaatgcgctcaacgagctgctcgagctcaggaactgctccagctgcctcttcttcgagtgcagaaaacagaaggatctttacctttggatggttaagtcccctggaggaccatcagtgaaatttctagttaatgctgttcacaccatggaggagttgaagcttacagggaaccatctgaaagggtcacggcctcttataacattttctacaaattttgatgaacaacctcactggcagcttgtgaaagaaatgctaacccagatatttgctactccaaaagatcatcgaaaggcaaagccttttcatgaccatgtgtttgtcttctctatcgttgatgaccatgtttggtttagaaattatcagatttctgttccccacaatgagattgacaaggttgataaaggaggtctggacaagatgacacttgttgaggttggcccaaggttctgtttgaacccaatcaaaatatttggcggtagtttcggtggccctacattgtacgagaatccattctatgtgtctcccaatcagatccgtgcactagagaagcggaagaaggccggcaagtatgccaagaaggtcaaggctaaggtgaggaggaagatgcacgagatggagaacactctggagcctgatgaatttgctgaactttggaaaggggaggactagttcagctatagtgattgaaccatcaacccccgttaaactagttgctctcgctgtcacccgacacgagttttgtttactatatctcgtggaatttcttgtatgacaccatgagtctattatttacatgaataagattttagtgtcctatcct

SEQ ID NO: 27093 - DNA, 998 bp, Oryza sativa
  ref <308>: DATABASE ACCESSION NUMBER: AK102535
  ref <309>: DATABASE ENTRY DATE: 2002-08-28
gggctggggggcgcgcgggggagggggaggcgagcgaggaggcgcgttgggcggggcgtggctagggagtagcccaagggcaccgctctgtcctcctgttttttccccttctaccctcgccggccgctggaggaagagagaggcggagacgagagagagaccgaccgcgcgccacgacgatggatccgtgatgaggccaccgcgcgtcgcggcagccgtcggcccagctcgccttagccatcggtggagggagcggcgggatctcgagctgtggccgaaaatagcagcggagagagagagagagagagagagagagagagcggcgacggatcagcgggcggagtaggcggctctcctcgtcgccctcaccgacgaagctccggcggccgcgacggtcctcctcatcaccctccgttcgccgctggagagagagagagcgccggggtggatggtaatgatggcacgacggaggaggccgaggtggatggcgacgggagagagagaggtgtggcggtggacaccggcgacgggagaggcggccctcctcgtcatcctcgcgaccgctggcgacgggagaggcgagcggcggcgacggtgagagagagaggcaagtgcagcggcgaaaaaaggagaatggggggcgggagaaagagattagggtagggtagtaaaaataaatatggggctttgtaggctgggatacccattatgggttggagtgtctctattaaggccctgtttgtttcagcttaaaattactgtaatctagattatagaactagattactataagctggattataataaatcgacatagaataagctgttagctgtttgtttctctgaattattagttgtttgttagctgttagccacccaataatctaaaaaaacacctttatgccctgttagtttcagcttaaaattattgtaatctagattattgaaccagattactataagctgaattataataagtcgacatataataagctgtg

SEQ ID NO: 27094 - DNA, 1689 bp, Oryza sativa
  ref <308>: DATABASE ACCESSION NUMBER: AK102536
  ref <309>: DATABASE ENTRY DATE: 2002-08-28
ggttttgctcctcacccgcgatctcctctcctctccgcctaaaccccctccctcctccgcctcgttcactccgccgccgccgccgccgccagatccagcagcttcaggtcggggctgaaccttggacttggagcggccatggcttcggacaacattggctcgagagatgtatgtgttgttggggttgcacgcacccctatgggtggtttcctaggtgccctgtcttccttgtcagctaccaaacttggttccatagcaattgaagctgctctgaagagggcaaatgttgatccagcccttgtgcaagaggtcttctttggtaatgtgttgagtgctaatttggggcaagctcctgcaagacaagctgctttaggtgcagggataccaaacacagttgtttgcagcgcagttaacaaagtttgcgcatctggcatgaaagcgacaatgtttgcagcacagtcaattctattgggcatcaatgatattgttgtagccggtggcatggaaagcatgtctaatgctccaaaatacattgctgaagctagaaaaggatctcgttttggacatgacactcttgttgatggcatgcttaaagatggcctttgggatgtatacggtgattttgccatgggaaattgtgctgagctttgtgctgacaatcatgctctgacaagggaagaccaggatgcctatgctattcaaagcaatgagcgtggaattgctgctcggaacagtggtgcttttgcatgggagattgttccgattgaagttcctgttgggagagggaaaccaccggtacttgttgacaaagatgagggcctggacaagtttgacccagtgaaactgaagaagctccgtcctagtttcaaggagaatggtggtactgttactgctgggaatgcttctagtataagtgacggtgctgccgcattagtattggtgagtgggcagaaggcacaagaacttggactgcaagttattgcacgaatcaaaggatttgcagatgcagctcaagctcctgaattatttaccactagcccggcacttgccatacctaaggctcttgctaatgctggcttggagtcttctcgtgttgattactatgaaattaatgaagccttttcagctgttgcacttgcaaatcaaaagcttcttggaattccttcagaaaaaattaatgtacatggaggagctgtgtctttaggacatcctcttggatgcagtggtgctcgaattttggtcaccctgcttggtgttcttagggagaaaggtggcaaaatcggagttgctggtgtttgcaatggcggaggcggagcatctgctctcgttctcgagcttgcataagaagccttgtgatccatctccagttctccaggacgtttgtgtactctagtttatttgattttctgctttagctgtttggacattcttttatcttaataattgggtaataaagtgtgtttgtggtgccaaagttaatctggtttgtactttttgtcaaaatatttctcctgtaagtggtaataatgtggtatgcagcagtctttaggctcaatcaattgtctatagaagttctagattcttttttctgctacacaactggtaacgctcaaatgaagcttttgtgttagccagcacatttttagtggactatatctatcgagaggcctatctacacaggaattatgg

SEQ ID NO: 27095 - DNA, 4694 bp, Oryza sativa
  ref <308>: DATABASE ACCESSION NUMBER: AK102537
  ref <309>: DATABASE ENTRY DATE: 2002-08-28
gagcgccaatctcaaatcgaaatcccgctctctctctctctctctctctccccccccattcctccgcctcaaatcgcaaaccctagccgtcgccgtcgacgagaggtcgacgagaagtcgacgagaagaggaggaggagaagctgctgctggtggtggtggtgctccgccatgaacaacttccacgtctacgaggccatcggccgcggcaagcactcgacggtgtacaaggggcggaagaagaagagcatcgagtacttcgccgtcaagagcgtcgacaagtcgcagcggtccaaggtcctcaatgaggtccgaatgcttcattccttagatcatccgaatgttctgaaattttactcatggtacgaaacctcagctcatttttggttaatactggagtactgcgttggtggagacctaaagggcttgcttgagcaggataagaagctgcctgaaaattctatacatgacttggcttatgatcttgtgaaagctcttcagttcttgcattcacaaggaattatatattgtgatctgaaaccatcaaatgttttacttgatgaatctgggtgcatgaagctgtgcgattttggattagcaaggcgtttgaaagacatagagaagaccaatcctggagatgtgccgcaacctttgaaggggactccatgttatatggctcctgagttgttccaagagggaggagtgcattcatatgcttcagatttctgggcacttgtttgtgtattgtatgaatgctattcaggaaggcccccttttgtggctaatgaatttacccagctagtcaaatctataatttcagatcctacaccacctttgcctgataacccctcaagatcctttcaaaatctgatcaattgcttactcatgaaagatcctgctgaaagattacagtggtctgaactatgcgagcatcacttttggaggagcagaatgtcaattattcctttacctcctcagcctgcctttgacaacatggtcgacctttctgctacaccatatttagttgagagaaatggtgataaaccttctagacagtccacaccacccaagccccgtgatggcctacggaagaaggacgaaaattctgctaaggtgttcacccctgttaagaatatgctaagtggtaagaaaaacaatgcaaaaccttcctgtaaggctgatggattgaagggtgtaaatatcctcaggatgtctcgtgtagctaagaggaatttgcagagagaaaaagacaaggagaactacaggcgacaccctacagaagcttctgagaatgatacagaagttaagattgaaaacaatgatatggaacttgattttggtgaaaatccagaaggtgatgcacctgatgacaatgatggatcagacaatcctggatccgcagaagatgaaaaactttccactcaaggcactgatggtaatgaagagaactgcatgagtaatcagatggatatgctcacagatgaaggcccagttaaggctgaaaccatgataaaaactgaacataattgttcagaaaatcttgatgtggtggccactccaccaagtatttgtatgaggaaagcacaacgagcaaagacaacttcaggtgccgcagctggttccgagccatctgacatctctgcagcattctggcatccaacagatcttgctgttaaaccagttatgcctggtaggaaaggagataaagctgtagagacagtccctatgcttccgtttgaagctcttcctgctgttgattatattaagttgccacgggaacaaatgaatgcattcaatagtcagatacttcagagtttaagtggtacttttcaggtttcagagaaacagaatatcatcaaatacctggagatgttaagcatcaattctgatgctgcaaatataatcacaaatggtccaattatgctgttgcttataaaaatgctccgtctgtcaaaaacttcagtattgcgtgtccaaattgcttcacttatgggattgttgatacgctactccactatccttgatatagagctggcaagttcagggatttttaatgcactatcagatggtctaagggacaagcatgataaactcaggcgattctgtatggcaacactaggagaattactgttctacatttctactcaatctgatcaagataccaaagaaatcaatgcccaagaatcccctttgaaggataacagggccacagcttcttggcaggttccaagttctgtaattgcgctggtgtcatcaatcttgcgtaaaggtgaagatgatctagcccagctttatgctttacgaaccattgataacatctgtagccaagggacagattggacttcacgtttcgcttcccaagatgtaatcagtcacctgtgctacatctatagagcaactggtaagcaggagaatacaagacttattgcaggatcttgtttggcacacttagctcgcttcagctcatcttgtattcatttaatactggagaggctggccttcaaggatatcgcatgcacactcattaaaggcaattcacgtgagcagcagatcagtttgaatcttctgaattcagcactagttaacagccaaatcataccaaccatgaaccgctacattcagtcgttaacagaagagaagcagttggttcctggactcatctctcttattgaacagggaactgatgttctgcgtggcaaaacccttctatttgttgctcttctttgcaagaacagtcgaagatggcttcctcatttcttttgcaatgcaaaactactatcagcagttgatagattgggaaaggagaaggaaggcttcattcatcaatgcacagaagcatttgtgcagttggttgcttcattggtcccaggcatccttgacactgtctctagtgatatacaacaggttatgggaggcaagcgtcatggagctgctactgctttaactggacgagctcatccaaagagcataattcatttgtttcctgttatccttcatcttcttgggagtgtttcattcaatcacagagttgtgacgagccatgtattgcttcagttggcaaatcttatgaaaattttggaagcaccatttcaggctcgggatgattttcaaatgacactattgagggttcttgaggcagccacggaggagccttctgttatacttaatgaacacaaaatattcacaagtcgaatccttccaagcttatccgtcttgtacaagggcaataaagatggtgatgccagattcctatgtttaaagatactgtccgatgtgatgattgtgatcttcagtgactcttcattgacgtctaatgagcaaacagtatctgacctggaaaagatctctcagaagtattttctccccatgtatccatcatttgcagaggatgaagatccaatacctatatatgcccagaaacttctggtaatgctgatggagcatgattatgttaaggtttctgatattctcaatgaagcaacagtatcccggtgctttgaatttttgctaggagatttgtctaatgcaaatgtaagtaatgtcaagctttgctttgcattggcatctgctcccgatatggacaccgacattctttctcagcttcaagttgtcagaagaatagggaacctgctggagtttgtgactgcaaaagatatggatgattttctagaaccaaccttggaactttgcagagcattcattatccggggcatcggcagtgacaaaattgtggccctttccaaagagcccgcactccttgttgatagtgccttcagcatgagcattgctgtcgatcaacaatcatgcgtcatggatatatgcgactttggtggcaacatgggcattttcctcgacctagttggaagttcagatccacatataagcgatttggcatcagactgcttggtgctgttactcaaagcagcacctcgggaggctacggtgggcttgctgaccaatcttcctaaactgagcgttgttctggacctgctgaagcatggcacctgcctaaggctgactcgcctgctgtattgcctggccttctcctgcaggcaatatctagcgcaaggaatgatcgtgtcgatatctttgtcagccttgatgcgagtagaagcactcgtgtcggcattcaagggttcacatgatggctgccttgctgacgccgcctcatatttgggcgctgaactgcagcgtttacctcgctgtggttgagccgaagtttggtcaggtgctggcttggttggcattgtgcaagtgatgttcatagggatcataagagagggcctcagccttgtatttcttcaccgtttcttgcaccaagctatgatcatgggttctcaccatccgaagtgatgactgatgaaccatccgattggctgtgtgatcatttatctatatgcaacgtggagctgctgttctttcagtataccatttctggccaaatctggagaggcagcttgtggccaaaacccttcctgtatttcccctgtgccaattttggttggcgtttcatcggttttcagtttctcaccatgtaatgctgtagagtttcatagcccttaaaatcatgtatatttgtacactcccttttactttaccaagcaacggggtggaaatttattgttatgaatgcctgtaaagctctgtgaatctgtgaaccaacaggactatattggagcatggtgctatcaacct

SEQ ID NO: 27096 - DNA, 2599 bp, Oryza sativa
  ref <308>: DATABASE ACCESSION NUMBER: AK102538
  ref <309>: DATABASE ENTRY DATE: 2002-08-28
gcccggcgcgcgtccagccccccagatgaacaaacaacagcaaaccaagcgcgacgcgagacggaaatggggcggagagagtagcgcgtaacccgcaagctccacgccaccaccaccctccccgaatccaatccaagccctagcgccaaccgccgccgacgaggacgccaaatccctcgatctcctcctcctcctccgccttccgcccccccaaaaccctagccccggcgggaggaggcggcggcggcggcgggggtgcagatcttaggatgtcggactccgcgtccatggccgccgccatcgaggcgcggttcagcggccgcgacctcatcggccgcggctccttcggcgacgtctacaaagggtttgacaaggaactgcataaggaagttgcaataaaagttatcgatttagaagaagctgaggatgacattgaagacatccaaaaggagatatctgttttgtcacaatgccgttgtccatatataactgactattatggctcatatcttcatcaaacgaaactgtggatagtaatggaatatatggctggtggttctgtcgctgacctactccaaactggccctcctctagatgaattgtctattgcatgcattctgagggacttgttacatgcagttgaatatcttcattcagaaggaaagattcaccgtgacattaaagcggcaaatatcctcctgactgaaagtggagatgtgaaggttgcagactttggtgtttctgcgcagctgactaaaacaatgtcaaggagaaagacatttgttggaactcccttttggatggcacctgaggttattcaaaactctgacgggtacaatgaaaaggcagatatctggtcgttaggtataactgctattgaaatggcaaaaggtgaaccccctttggcagatatccatcccatgagagttcttttcatgatacctcgtgaaaatcctcctcagcttgatgagcatttctctaaaccgatgaaggagtttgtgtcactatgtttaaagaagaatccagcagagaggctaagtgccaaggatcttcttaagcaccgctttgtaagaaatgctagaaaatctccaaagcttctggatagaataagagagcgaccgaagtttccagtaaaaagcagtgcggatgccacacaaaatggtcgaacacatgttgaagaagatgatggtactggtactatcaaggttgagagggctacaagggatgtagtctctccttcaagtcaaggaactgttaggaaagctgctggctggaatcttccagacagatcagagggcacaggaactgttcgaggtggtttaaagccatcacaagtcacctccaccaaggatagtagatccgatgcttctcatagtccaaacacaccaaaacgtacagctgatcgagaaaatcaatggagaacatcatggacggggtctgaagagtcgatctcaacaaacccgtcgcagagagatgcacaaagtgaatatggaagactagagagttctacagaagataatgaccaatctataagtgggtctggaactgttgtactgcgctcgccaagagcatctcaggtgtaccctgcagctactaaccacagttccaagcctcccagtagattctcctcgtatgaagacacgtctatcagtgggacagtcgttcggaatcaaattgaagaaccagaaactccacgatcttcaaggtcgagactgggaatccaagaaaagtcaccaaatgcttcactggaggacagtgcaactaaccttgcagaggcaaaggctgctctccaggctgcgtttaaaaagggtaatgctcgtgaaagacatgttatcagcaaacatgaaaaggaatcacatgaacccagaatttcggcagtaaacagtcatgatgccccaagtgagaatgctgacatggaaaaaggtcgcaaaccacgccagatacatgatggacaatcagctcctcaagcttctggttctgtatcttcacctgcactctcgtcattgataattccttctctaaaagaggctactggtgacaagtttaacggaccagttgttcatacattccttgattccttgatgcatctcgaaaaagagctacctggatcttgtgaggtgctgattggcagaatgctccatcggctagggagctcgaaggagtcctcgctgcaaagtcttcaagagacggcgacatcagttttcgcaaagaaatctgaacctccctctgaacctccaagtaacaagaaaatggctaatacaccttccttggctgcccctaccgtaagccctttggcgaggttccttcttacaaggtggcaaaaccaagtttcccaagatcttaactccgtctgaagacaatacaaaaaaaaaaaaacccgtcatgattcaatgtataattaattttgagtgtacataacgctatggttagaaatctctttgttgctagctgttctcagcagcttgtgctgctaccggttgtttcatttgtttgtgttcgcggtgaataacacattttctacccattttataatgtaactttgcacccactgtacctgtatatcacctgaggaacattaataacacatcaatttttttcc

SEQ ID NO: 27097 - DNA, 1088 bp, Oryza sativa
  ref <308>: DATABASE ACCESSION NUMBER: AK102539
  ref <309>: DATABASE ENTRY DATE: 2002-08-28
gggtcggcacccgaattgctctctgctcgtccatcgtcgtcgtcttcatccaacgctccaactaaccacccctcccgtttcgtcctcccctctgcgttgcgtcctacttactctctccgattctctcccctccttccccgataggggagagatccagcagcggcagcagccaagcccaagctctcccaccgagatcccccgcgcgccgcgccccgtcggccgccgccgccatggaggcgtcttcctgggacgccctccgcaagcaggcaaggaggctagaagctcagttagatgaccaaatgagtgcttaccgtaaattgatttccatgaaatctgatggttctgagaatgatatcgagtccgatatagaaagatcgctgaagcaacttcagcaagtaaattctcaaatgcagacatgggtatcatcaggaggctcagaagtcctttctcatacattgactcgtcatatggagatattgcaagaccttacacaggaattctatcgcctccgatcaagccttagagcaaagcaacaacatgcttctcttcttgacttgagagattttgacagagcgaagtttgatgttgaagagggtgctgactctgatcaagctctgctcaaagaacaagctgcgatcagcaggagtactgggcagatggataccgtgatatcacaagctcaagctacattaggcacacttatgttgcaacgatcaacatttggtggtattactacgaagataagcaacgttagcagtcggctccctacgattaatcaaattctttcatccatcaaaagaaagaaatcgatggacaccattattctatccctggttgcatctgtttgtgcatttcttatttttatctattggatgtcaaagtaatcttgccaaataaaggcgttatagtgttgtatgtttggaaaagtagtagtatacatgcttgccgtgtttgtacaatatcgccccatgttatatcttacctgctgttctagctacattaactatcattctgattgagctacttcaaccccatctgtacatgtgagccatgacgaagaaaaataagtttctggtattgatttaagt

SEQ ID NO: 27098 - DNA, 2363 bp, Oryza sativa
  ref <308>: DATABASE ACCESSION NUMBER: AK102540
  ref <309>: DATABASE ENTRY DATE: 2002-08-28
gcagatggcttctatgatgcaggacgagatatgcctttcatgccattagaggagtatgagcggagtattggactatatgcacgtgaagttattctcttggaccgagaacaagatgaagagttggatgcaatcgcgtcttcagcacaaatattgctgtctaatttgaaaatgccaagctgttttgtagctgatgaagatgcaggccaggacttactaagggcatctgtgcttgctttgtttgtttctgactgctttgaggttgtgatagaagtgcttctctcagtagaacacggagagctattgttagcttgagaaaggagcaaccttttgtttgcacttgttctgctgggagcatatgtgacagcactgaagcatctaagcggatcaataatctttacggccactttgattttactggcctgtgcgataaatcaatacatatcatcaaagaaaggagaaattcaggaattgtaccgataggagcactgcaatttggtgtttgtaggcaccgagctgtcctaatgaagtacttgtgcgatcgagcagaccctccaattccttgtgagcttgtgcgggggcatcttgactacacacctcatgcttggaatgttgttcctgttagaaaagggaatacatgggtaaggatgatagtggatgcatgctacccaaccaatataaaggaagagacagatccagagtacttttgcaggtatgttccactcagtcggcttcagatcatacttgatgatcagggttatactccacggtctccctttccttctgtctcactgtgcaaagaaatagaaactacagcttctagttcagtctactactgcaaaattggtgctgttgatgcggcagcaaaggtaagatatctagacactcgatgtgcttctagtgatgaagttaaaaattttgaatacaagcttctcgcggaagtaagaatgctgggtgccctaaggaagcaccaatccatagtggaaatatatggtcatcagctttattctaaatgggttcaagctgatgatgataaggaatacaagatattacagtccacaattatgatggagcatgtgaaaggagggtctctgaagggttatttgacaaaattgctgaaagagggcaagaagcatgcacctattgacctggcattctacattgtacgagaagttgcttgtgcattgttggagctgcacaaaaagctagttattcatcgggacataaaaagtgagaatgttttggttgatctggatttagagagaagtgatggcacaccagtagtcaaactctctgatttcgacaacgcaattcctttgcattctctctcccacacatgctgtatagctcaccttgggacatatccacccaatgtttgtgttggtacaccatgctggatggctccagaggttcttcgtgccatgcgagacaaaaaccaatatggactggaagttgatatctggtcatttggctgttttttattggagatgcttacacttcggataccctaccagggcctacctgattcagaaatatatgatctcataatgaggaagaagcaaagaccaagactaactcaagaactagaagcgttctggacgttagacaagccaattacgaggctggagttgggtatcacatctgatgctcatgcagaaaaactaagactgttgatagatctcttctaccagtgcactaaaggaattgcatctgagcgcccaaaagctgaggcggtttacaatttactgtgctctctacccacatgctatgacatgaggtgaaagtgtggatcttaaatcagtatgacataaggtgaaaatgtggaccttgaatcaggaacctgttgatgagacagccagccagatcggcctgcgccaggatggcaagttatgctgggtggttttagcaggtcaacagatctggcctcgcttggtttgaacttctgaccagcatgccgcttattctttgagtgctggcgatgcggaacacgagaaatccaaccaaaaccaaagccggtggcagcattgttctgagttctctggagttcatcctgtgtcagttttgtagcagccagccccgtttcccgcctcttgtgttgctgcggtgttggcctgaccatgtgttgcttgtcgtgtcatttgtttttgtttttcattattgcgttaatttattgatttaggccattcacaaccccaaggcgtctgtctgctgcacatgacccattctgtatttgtatctgtatctgtatgtacaagtgtcggtccatccgtgatccatgtaaccctctactgttgagtcatgtaacaataacagatactgttttgaggttatttatcatgagggattgtttttccatttaaagtttc

SEQ ID NO: 27099 - DNA, 998 bp, Oryza sativa
  ref <308>: DATABASE ACCESSION NUMBER: AK102541
  ref <309>: DATABASE ENTRY DATE: 2002-08-28
ggtggattgcagaagatgatgctgcagtgatcccgtccactagctggtgaattggagagacggatggagctcgagctcggcctcaggctcgcgctgccgtcgccgtcgccgtcgccggcgacggcgacggcggctgggagtgagcttgaccttctcaacagcgcgccggggtcctgccgcaagaggggcttcgaggaggcgctcggtgggttcaaaaccgacgacgacaacgacgacggcaatggccgcggcggtgacggcgattccgacggcgaaatgggcaacaagaggaggaagctggtggggtggccaccggtgaagtgcttgcaccggcggcgcgacggtggctgcggtggcggatatgtgaaggtgaagatggaggggttggccatcgggaggaagctggacttgtccatcctcggctcatacgctgagctgctcgacacgctccaccttatgttcccctccactaaccaagaggatgggcacgatcgtcgtcgacgtcacccatacgctgtcacctacgaggatggggaaggagactggatgcaggtcggagacgtgccatgggaggcctttgccaagtcggtgaaacggctcaagatactggtgtaactgactgcaaattaagctactagtactagtctttactacttcgaataaaattgtacgtgaacgggattattttgttcacgtttctctcatcataaatgtgtagtgtttcagcaatttcataagcatgacgaatgaaatctcgtagctgttgtcatcaatcaccttgcatttcgtgtcaaactacatctgtggccagcgcacagtagtgttagtatagtgtacaccgtagagtcacctcgctgtgatcagcacgtgcatgcatctgtataatacaccgccacatatgcacaggatggtactgaatactgagcatatcctgtacggggagttcagatatgggtgttatggcctaccaaagtgaatcttatcacatttttttaatc

SEQ ID NO: 27100 - DNA, 2815 bp, Oryza sativa
  ref <308>: DATABASE ACCESSION NUMBER: AK102542
  ref <309>: DATABASE ENTRY DATE: 2002-08-28
ggccgttgaggtccgtcgtctcgtccgagtccggtccggcggaagtaggggcggaagtgcgggcgggagatgggggtgaagaacctgtgggacatcctggagtcgtgcaagaagaagctcccgctccaccacctccagaacaagaaggtgtgcgtggacctgtcgtgctggctggtccagatgtacagcgccaaccgctcgccggccttcgccaaggacaaggtctacctcaagaacctcttccaccgcatccgcgccctcctcgccctcaactgcaccctcctcttcgtcaccgatggggctataccttcacttaagttggccacttaccgccgtcgcctcggatccatttctcatgtctctgccactcactctctacttctgcactgcaaacaaccttttgcttaattacttgtactacattgcttgcttcccctgttgtttaggctgctaaagaatcagatcagcccaattcacacccatccatttcactgcgtcgcaacaagggttccgagttctcctgcatgattaaagaggccaagcgtctcggcatggccctcggcatcccttgcttggacggattggaggaggctgaagcacagtgtgcatccctagatctagagtcactctgtgatggctgtttcacttcagactcggatgcttttctttttggcgctaggactgtttatagagatgttttcataggggagggtggctatgtcatttgctatgaaatggaagacatagagaaaactcttggctttggcaggaactcgctggtaagttgcaatgaatttgttctgcccgagtttcagcttatgggatctcttctgaacaaatgttttgactgcttgtgacatatcacaaagatgtaaaataaacttacttaaatatgccccttatgctcctagaaagatcacttagacttttgtcagttaatggcttaacacggtcaaagcaactaatagataaagacctttaagagtagactgcactgcaggcacaacagcttagtaagtgaatgcaatgtgctgatttaaaacaagaacttgcaagttgtatgcatagagcaacaccattttctcaactctgatatcacaagaaaatgtctcagcgcactcttaaaaatcctttgggtaattatcatgtattagtcagagattacgggatgttgcatgtaattgctgatgacttgtatgacaatatgatgcaataacaatattacatctcccaccaatgacttttttttgggcttctgattctcaggattttttttttgtgtgataatgcgtaaattcttattgtcctgacttgacaacctttccagatatcacttgcagtgctccttggtagtgattattctaatggagttaatgggtttggcccagtaagtacaaaaaaaactgtcattttcattgtcttagtataacatgcatctgttcttatatgtttctatatgaaatctgacactcgacgacaagatgggaatcatggagcttatcattatatttgtaatggtgctcttttaatgttccaggaaacagcatgccggcttgttaagtctgtaggcgacaatttaattcttgatcagattttgtctaatggagttaaagctactagaaaatgtaaagggaaaaatagtggaaacaaggtggacgacatgtgccccaaagcaagttcctgcgaggttggcatgactcaagactctgatggtcaatttcgtgacgtcataaatgcatatctggagccaaaatgtcactcacctgattcggaagctgtgcagagggtatgcggacagcacccatttcttcggccacagcttcaaaaaatatgcgaggaatattttgattggagtccagagaaaactgatcaatatatacttccgaagattgctgagagagaacttcggaggttttcagaccttcgctctgcgtcttcagcactaggaataaaacctttgttgagtgagataccagtaccatgccctgtactggcgattgtgaagcagaggaaagttcatgggaatgaatgttatgaggtttcatggagaaatatagaagggctccaagtttcagtagtccctggggatcttgttaaaagtgcgtgcccggagaaaataacagaatttttggagaagaagggtgaggagaagaagcagaagaggagagcaagtaaagaaatcagggcaggctgcagtgaaagatgttgatgaacagctccaagagttgctgcttggtattgaagctgatagtggtggcatattgggtgctacagccagtgtgtgtcagactctgacagcagcctacactgtggctgtggaagatgtagttgatctgtcgtctccttctcctcctcttcggaagctctccaagtcccaaaagaagatgatggccgaggatgtcaatgtggctggtatgaacatgaacaagatggagtcagaaagtagttttagcacgcaatcaagtactagtgatgttgacaaccagctgattgatctgtcttcacccctggctggtggtgataatggtatgaaaggtggaagaagagccctggcagacataagcaatgttggttcacacagcactgagacagacggaggaggaggaggtggtggtggtgtggcatcggtcggccatggaaccaccatcgacctatcttctccgtcgccggccataggcgacagatcaagggttcatcacgatgatgatgatgtaatacacgagaggaaagcaagggacctgagaatgttcctggacagcatacggaacgagctgtattgagtgattatttatgaatgtttggctggcgttttttg

SEQ ID NO: 27101 - DNA, 1816 bp, Oryza sativa
  ref <308>: DATABASE ACCESSION NUMBER: AK102543
  ref <309>: DATABASE ENTRY DATE: 2002-08-28
ggggggtgaccttgtggttggggtggggagcattggaagcggcggcggtgaccccatccatcccggacgacgacggcgccgatccctcccggcctcctccccgtcagccgccaccaagatttggatccgagtctcgcgaggaggggaaccaagccggattagtagtaggagtagtatatttcttcttcttatagatatggacggactgggacggggttgagcagcaaagcaatggacacagcaggcgccgccgcccaccaccgcagtcttcataggtagtagcatgccagccagaagagcacacatggaggatgggatctgtccagtaaacaaaaggaggagattggcgctcagcccatgtgctgaagtatataacagcaagcggataatatcacaatgggttgattttcaatctctccctgaggacattctgtcaaggataatgtcaaaactaacattgaagcaagctgttcagatgagcatggtatcgagtgtgttcagaagagcttggattttccatcctgatcttctttttggcactgaagaattgtttggaacttctgatcgacagttgagagcgctgagcaccaatgggtttattgacacaatcaattttatcttgaggaaacacagtggtctaggagtgagtgattttggtgtgaagtttgagctgtggaaggagcatgcacgtgacattgatggatgggtttcctttgctattgcatcgaaagcaagggttctcgtcctgaacttttctccatatataggattgcgagaaaacagttacagctttccatgtcatcttttcaatgacagaaatggatcccactttaaggttcttcaacttgatactgttacttttggcccaactcctgacttttgtggctttgctaatcttacaatgcttactttgaagcatgtgcttgtattggacaacttccagtacttcttaccgaaatgccctgccctagaatggttggaaatcctaatgtgctcccagctacataatttgcatgtttctgaaccattgccgcggctggaatttttgcgtgtacaaggttgtgcgattaacaagattgagctccatgcccccaaactcaccacatttgagtatagaggttgttttaaagtgattattgcacttcacaaatgcttgaagcttaagactgcaagcattgcgtctcatattgaggacaaccttgagtatgttttcactgggcttccaaatggattacctcatgttgagagactacatgtgaaagtgtttgtgaggactcagatacctggatttacacagccccctcttaaatttatcaatttaaggcatctgatcatgaggataacctttggaagtgctaaacgttttggaaaaaacgcagttctgcagctagcatatcttttggaagctgctcctttgttagtggaccttcatttggatatgacgtgtgcagatatttgtgaggacccccctgctagggacgtgattatacatcgcccctactacaatctcaagagagcttgcatgaccggatttaatggtaatggaggtcaaattgccctagtaagatttatcctcaggaatgcagtaaaattggagaaaatgactatagttccaaaagggagaagaacgggcaaaatgatgggagaatacgaattaagccttagaatgatcagaaaaaaaattgttccaaaagacaagaacggtgtactcgtaattttgtagtaattctcaagttatgtatgtactattataggaagggctggacttacatgcccttgtactttttcagaaacaataataatagtgcatcttttt

SEQ ID NO: 27102 - DNA, 1063 bp, Oryza sativa
  ref <308>: DATABASE ACCESSION NUMBER: AK102544
  ref <309>: DATABASE ENTRY DATE: 2002-08-28
ggtctttcccatctcgcggcggctgcgtctctctctcgatctctcggcggcggccatggcggactaccacttcgtgtacaaggacgtggagggggcgagcacggagtgggacgacatccagcgacgcctggggaacctgccgccgaagccggagccgttcaagccgccggcgtacgcgcccaaggtcgacgccgacgagcagcccaagtccaaggaatggctcgacgagcgggagcccgacgagctggaggatctcgaggacgacctcgacgacgaccgcttcctcgagcagtataggaggatgaggcttgcagagctcagggaggcagcaaaggccgcgaaattcggctctattgtgcctatcactggctctgattttgtccgagaggtctcccaggccccatccgatgtctgggttgtggtcttcctctacaaggatggaataccagaatgtgggttgcttcagacttgtctggatgaattggctacaagatacccagcaactaagtttgttaaaatcatctctacagactgcattcccaactacccagatcgaaatgtccctactatacttgtgtacaataacagtgctgttaaagggacttatgtcggtctgcagaagtttggtggaaaaagatgcacacctgagtctgttgcattggccctttgccagtcagagccagtcctgaatgatgggcagagcggcggtgattcatcccgggacaatgtcatagaaggcgttcgcaggaagttcatcgaaaaggttgtcgcccagcatgaagagcgggaggaagatgacgatagtgactaaacatactctcctagtatgtctcagttcactgatactattgatgatgtgggtcaagttttgcctgagatcactaattgtactcatatttggttctgttctgaaaatgctgaattttctctctacgatgagctgcaaaaactcaggtttagcagcagcttgttgtggtacatgtggtaaattggtaatgtatcctggtgttccttgtattgattgtggcactttcagctaaaatgaaaatggataaatttcatg

SEQ ID NO: 27103 - DNA, 1187 bp, Oryza sativa
  ref <308>: DATABASE ACCESSION NUMBER: AK102545
  ref <309>: DATABASE ENTRY DATE: 2002-08-28
tttagttctggcagtgagcttgctagaattgcttgcatggcagtcttccggcatctaagattcatatttggaaatttgccatctgatagtagtgctgttgagacaacgacaaaacttgctactgctgtatcaacctgtgttgttcggttggagttgagtggactaagtgcttgccttgcagctattgtgtgttcttcgttgcaaccccctctgcgaccccttggacatgctgcaggtgatggggcttctttcatcataaagtctgtactggacagagcaacagagcttctcactgatcagcatgtggcctctacctacagcatgcaaaacagagctctatggcaagcatcatttgatgccttctttgggctgcttacagagtattgcatgagtaaattcgatagtgtgattcatgcattgcaaacacaacctgctgtggcagcagttataagcagggaaatgccagttgaattgttgcgtgccagccttcctcacacaaatgagtatcagcgaaaacagttgctcagtttttctcagcgcacggtgcctgttaacaaccatagttctcatgggtccaataatggacctatgacatcagaatctatcccaagttcagaaagccggaaaatataagttaaatcatagtgtttttgcttctttgggtaatcagtatacttgatacaatggctctttaagatggagactctttccccaatttcctagtaaagaaaagtctatatgaatccaggaaacaagatcgagagggttggagcatcgataaacagcggtaatataaggcaccgagtttactatcgtcgcgacatgtctggtttattatgtactgtagggatgcagtctgttttgcatgcattatgcagatggatgtgtttttgttactgggaagtttcttcctgagttttgttgctcatgaaacctgcctggtatctatctctggctgtagaaggtgcttcttgaagatgctgtttgattgttcttcaagacaagtgtcctggaatcatcaaggtggaatttcaatcaggccgcctttttttcccattttgttttgttcaagggttgaaatgtaactgtcgatcatgccctcatattgagaaaaatcctagctgtactgaatgttgagcattggtttatggtactatgttttgttattattatttattaatttgtct

SEQ ID NO: 27104 - DNA, 3042 bp, Oryza sativa
  ref <308>: DATABASE ACCESSION NUMBER: AK102546
  ref <309>: DATABASE ENTRY DATE: 2002-08-28
gtttcccgtccgtaaaccctaactgacttatactcatcaatcgtcctcctcgattgctcctcccctgattccgatccactccgaggcctcatggcggcgaccgattctcgtcgccttgcagacctagatgtcgacgagctggaccgcctcctcccgttgatcaaggtcacccccttcgccgcgcaccgcacttctgcccccagaggatgtggttgtccttgtgcggcgccgaggcggatggaggagtctcaggcctcgtcggagaggactccaaatcccccccacaatcgctcagtcgcctttggacaattccaagaaagactccgagaaagctttacgcagtaagtacatgattttatcatacaagaaaagaaaagcaagcaaataataaagccaataattgtgggaagttaatttactcacttatgggggtggcatgtattacccgacccatcattaataaaatggttataaggtagagtttatctaccttccagcataaaaaaaaacttatgggggtgccattgtacaaagaatgagatatggggtagaagaattacgattgtttgtctgtttttttttctgtaaacaaatgtagtctgcttcctagattgctttgctggactcgtcatcttgccggcagagcaagaacaacttgtggtgctcaaagccatccttgatcccttctccgaggccactgggctaaaaattaattttcacaagagcaccttcctccctatcaatgtcctgcatgatgaggcggttcggctggctgggactctcggttgcccgatagcttccttcccccaaccttatttaggcctccctctctctgttaccaagctatgcctcgcggacttccaaccgctcatcgctaggattgacgaacgtcttgccggttggcgcggtcaccttctgtcttctgatggacggctcactctcatcaattcggtgctctccgccctcccttcctatatgatgggagccatccttctccctaagggtgtgttgccgccattgacaaatgccgaagagctttcttctggacaggggatgaacactgccatggtgacaactgcaaaattgcgtgggacattgtttgttctccgaaggaaaaaaggtggtgctgggataaaaaatcttgaagtccagaacaatgacgaggattctgcgtcgtggattgactgttttcaaactgaacgggtctatagtgctttctcaggtgacaaaatcgaagggcctaatgaaacctttatagttaactgttgggcctgtagcccatctacagtaatttatctcagactacaaacctttccaagttggagatttttttttaaaaaaaggagaaaagcaaaagttgaagaaaaaaaatttccttaaaaaaaaaagaatagccggtctccttcgtcttcccgaccgtaaacatcgagattctagagagacgaggcgcgggaccagtgaaaccctaaccgagctactcatctctcgtcctcctcgattgctcctccacccgattccgatccactccgaggcctcatggcggcgaccgattctcgtcgcctcgcagacctagatgacgacgagctagaccgcctcctcccgttgatcaaggtcacccacttcgccgcgcaccgcacttccgcccccggaggatgtggctgtccttgtgcggcgacgaggcggatggaagagggtcaggcctcatcggagaggactccaaatccccccacagtcgctcagtcgtcgttggacaattccaagaaagattcagagaaagctttacggaaacgcagtataaagatggcaatgaagattatcaattactctgaagactgtatgagaaagattgtagagttgaatgccactctccctctggatcagcatttcttccctgcctgcatctggccacgggaccttgaggacttgcgtttttccaagattgggttttacgttgactatcgcttgaatgacacttctccaaccacttgggggtgtaagcgctttgcacatgaagacaagtatgttgcatcaactatgctgcggatcaatggactagtgtttactggagatttcccacatggccggtccatgcatgtttatggttttgtggctgtgagggatgataaagagccattgaggaactatatcttcaatgtcagcagggagaaggcttgtcaattgaacctggattcgccttcattggagattagtccccccatgcgtggcatctccatatgggacagtgctttaatcgagtttcacttgaaggttaagggcagtgacagtgatagtagttcagatgatgacatactcattaacgcctgtatggagttcgactatgagaccattgagcatgacaaaaagttgatatcaagaattgatggcccgttcggtccacttgatatgcgttatatcttcttaaagaatgggattgaggccactatcgatattgatctgggcagcacatctgaagcttatgatattttgcttgtagcattttcaggcgaggattccatgacgctttacaaggaccgtgttggacagcataccaagtttacagccgttgtaattgttcctttagacgagttgttacatatcaaagcatttggcacgtatggttcgtctcattttgatggcaatattgctgtgcctgtattaaagcatggaagctgtaagaaaccgttttggtttcagttggcagagaagaagtcggggcataagaatctgcctagagcttgcctggaggtcacgttttctacgatgggttactataacacgggagagatgtagaacaaatgactgcaagaactgctattttgctctagagcatttcgttttcctgggctgtgaaatgtttaagagttgtgatttgatactgaaatccgtaagttgtattttaactgaaatcgataatgatgttttatcgatcgtcagtttctttcgctgtgatatggatgcttgtatgttttccaaagtttgagtcacccgttgaagtagggactgaccacagacgggcagtcaaatcttgtttgtcatgaattc

SEQ ID NO: 27105 - DNA, 964 bp, Oryza sativa
  ref <308>: DATABASE ACCESSION NUMBER: AK102547
  ref <309>: DATABASE ENTRY DATE: 2002-08-28
ggcggtaccgccgccgacgccgcacttcccctcgcgccgcgccgctgttctcttctccggccgcgcttctgccgcgcggagaggttcgccgcctcgatcgacatccgtcccccctccagatggcgtcccggggccgcgggagaggccgggggaggcggggaggagggtacggcttcgaccacccggccaagcacaccccccacgaggatttcccggacatcaccctgccggagatgacgtgcgccagggcgaccatggaggagaaggctctgatacagtccaccttgaaatttgaggatttctggaagacttcttgctaccacctggaggaggatgtccccaagaaaaagaatgatgataaagagattgaaaggtattctgataggaaacgtaagacacattccaaacgtgaagctcttgcgtcatatcttatactaactcctgcaaatttccctgtggaactagtgcaaggttctaagcgaggacagccaagcagtaagaagctgcgttgggatagaagctcagatgatcaggcatttgaagtttttgagaagcttgaagagaagcacaaggacggagacaagaaaacagaaaaggatggggatgatgaggatgaacatgaagaggaagaagtagaagaggagaattcagatgatgattataatcagaatatcgagtttgatgacgacgatgatgactggaaccaagaggaggaagcacatgaagactactatgattagagccactgtctacaaaagttgtccaatatcaagttttgtttctgttcatttttctctatagtacttgctaggtgattagaggtaaatgttttcctgtcaatatgcggtatcagaaactaggatctgtctgaattctgaaatatggagtaggctgctgctactgttcctattgtactgaagactggcaagaattgatttatatgttctgggatgtgcttcgttcg

SEQ ID NO: 27106 - DNA, 1498 bp, Oryza sativa
  ref <308>: DATABASE ACCESSION NUMBER: AK102548
  ref <309>: DATABASE ENTRY DATE: 2002-08-28
gtgagagagagagagagagatagggggtgcgggaggtagagtgagagagagatttagaggcgatttcgccgcggtgaggagtgcggctcgccgtggcggagatttcgtcgtgccggtgctgatctgtgtcgtgtttgagtttgtttttcgccggtgaggagctcctgctcaacggatttttccactgtgtcgagttattcgtcgttgaagattcatttggccagttttttttttgttttttttcatgttcatcactgcctcctcctctattttttcgccatgccggtgccgatctgttcgttgacatcgtttttgtcggtgaggagggtatgatgtaccacgttttccactgtgtcgagctggtcatagacgtaggtttttttttttggcgatttgttcatgtcgttctccattttttccttccaatagatctagcttggacatgcaccatttatgtttgatttttttgattttttgtgaataggttgtgttctagattcatttgtttttgtttttttcatgttcctccccacgtccttcttcatttatttcttcgaatagatctagctaggacttgcacaaattatgtaaccccatctcatttgctacttccctaacctatttgtttttttagatctgctttgtttcatgttttcaatgctatttttatttttttttcatgttgtttaatgttcgatttgcagctgttttctggttttttttttgtcttactttgtgtatttgttatatgaggcgcagatctgcttaattcatcgaagatgggtaatgataaggacattgaggatattttgtctgattctatttcttctgagtctgatagttctacaaatgatgaatgctattctgatagtgatctatatgcctgtttcttaagaaaattcaaaacaagttagtgtctgacatgacaatctaccttatatcaatctcatttgacagaaatgtagatcaatattcagaagatttgagttaagttttgtgatttattctgatgaagattcatatcaagaaggttcaaagaagattcagaacaagaatcagaagactaaaccaaagaagaatgaattttaatttggatgcaatttgaagatcaagaaacaaatgaacaagtcactggattcagaagaagaagatttgttaaatagatttgatgcatcaaccagattcagaagattctttttcttcttgaatagtgttttgggttatctatctttgttagtgttttgggttttgtatatattgttagttaagttgctgggctaaatttgagtcagttcttttgttttgggcctttaaattgactacagtgttaatttgggctttcatttgatgtaaattttgtatttgggctcaatctggactatttgattgggtcgagttgtatttgagcccttcgaaaatgggcttccaaacctatttgttattgtttatctatgtatttttaatttttatttgtcaaataatagtagctgttggatct

SEQ ID NO: 27107 - DNA, 2063 bp, Oryza sativa
  ref <308>: DATABASE ACCESSION NUMBER: AK102549
  ref <309>: DATABASE ENTRY DATE: 2002-08-28
gagtgcagtgcagtgcctctgaggtctctctctctctctcacacacacacacgtcctctggtcaccgacgctcctcctactactagtacagtgtgatcgagcccctcctcacttaccttcgccgaagatccatggcggaggactaagctccggctgctgatttcttcgctttggacgcccgcaaaagttactgctgctactgccggtaccggctgccgaggaggggaatgaggatgaagacgctggcgtgctgccggcggcggccgcaggacttcagcatcgacatggaccaggagcctgacagggtgatgacgtacaatggccttgagagctgtattatcaacagttcctcttatgacgatgatagtggccttagtgcaacaacgggagcagatgggtgtgtaaccactgattccgttgatgatgaagtctcaagttgctcctcaagtaaagatgtttctagctcttcgttctcttcacaatgccatccactgagaaagcaagaggagcattcactttacgagttggatacactcagtgctgtccatctacttcctctcaaagggaagaagccaatcacgtataccttgagtgcttcagacattgaaaccatgaaggagaagtttgggaagctactgcttggtgatgatgcttcaggaggagctagaggtgtttgtgctgctctggctttgtccaatgccattattaatctctcagccactatatttggagaactctggaagctggaaccactctgtgaagagaaaaaagtcaggtggcggaaggaaatggactggttgctttctcctacaacctacatggttgagctggttcctacaaaacaaaatggagcagacgggtgcacgtttgagattatgaccccgaaagcacgttcagatgttaatgtgaaccttcctgcccttcagaagcttgattccatgctaattgaagtgctggactcgatggtagacacagagtattggtatgtggagagtggtagccgagctaatggccggggcaaaaagaatggtctgaggcagacgaagaagtggtggctcccatcacctcgtgtgccagatatagggttgtctcaatttcagagaaataggcttgtttttcaggctaagctggttcatcaaatcctcaaagctgcgatgtcaatcaatgaagaagtcctgcttcagatacctattcctccagctgtcacggatgctcttcctaagtctggcagagctggcttgggtgaagacttgtaccatgctataaccacagagtacattcccatagaggaaattttcctctctcttagtttaaaaacggagcataccgtgctcgagactatgaaccggttggagggtgcagtttttgcatggaatcaaaggatctcagaggaaaagagcaagaaatccccaggaaggcattcctggaatttcatgaaggatagttcatcagaactcgataagatgtccatgtgcatagaaagggttgaaacacttatgcagcttctgaaatccagattcccgagccttcctccaacttttatagaagttgtaaagatccaatacaatgtggacgtggggcatgccattgtggaggcctactcaagggttcttgttggggtggcattcagcatactgtccagggtagcagagattctgctggaagatgacctgatcaagaagcccaacacccctctggccacactcaagttcgacctctcctccgacgtgtacctcgccggcatcaccgagacgccgccgggccacatccggcggtcgctgatggaccagatcagcctggtcgacggcagcctcgacgcggtcgtcaggaagaagggggtgaagcagcttaggtggtgaaaaaggacatgaagctgtgaagtttttctttttggcagttgtacagggtttgtgatgatgatgcatgctgtgctgcgcgctggctggctacataaagttggttaagttcaccttgctaatacgtcctgtatggaacgggctaaatagtgtatgcatggtaaaagctactagcattggccgcatcgtacatcaacgtttgcagcg

SEQ ID NO: 27108 - DNA, 1324 bp, Oryza sativa
  ref <308>: DATABASE ACCESSION NUMBER: AK102550
  ref <309>: DATABASE ENTRY DATE: 2002-08-28
ggggcagagatggagaactacaacagagaagaaggagatccatctacacatatatgaagaacacacgcaagagaaaacacagggcctcggcggaagggcacgccaacgtgtgcgcggccggccggccgaaggcggcgcagcatggcacaccaaaagtgtggcccgccgggggcgccgctcgatgctggaagatcaatctacccggagacgaaggctgcgacaagatcgacgccacgccgtccaggacgatttcatctaacattgtccagttcttctgtttatctctttctctctctacatgtatatttcaggctttcagcacatatatgcatggacagtcattcaactcccatcaatccatccattggcggcggctgcgccgaaggcagaacacggagggaggaagaacacgacggcacgagagaagccggtggctgccggccggcgcatccgacgctcggcgagggtacaggcggtcacccaagagacggcgccaggcgatcgacattcgtccagccatccctcttcctgatgagaagaacatgcatgcatgcgtaggagatgtacatatgcgggtgctgttgctgccgtagtagttgcatcctctgtacgtgctccccgggaagtaatcgtatcggcgccaccgcccaccgctcatccgagtcgacgagatgctggttatccctggagtcgacaccgccaatcgagtcgccggtgatgcatccacctgaaactgcggcgtcgccgagatgccgagatgtcgggcgtcctcgctttgtcggctgcaagtttcaccgcggcggactgaccatgtcggagtcgtcgtgacgctgctctgctggggcacgccaggatcgccggaggcccggagccaccgtcgactgccaagactcctgcttccaccacgcacagcgtatcaaatcatggccgcagccctttcccccgacgcggccgatgttcggcgctgctactgttctcacgacggcgatactatcttcctcacgatggcagcggcgccgcgtgcagatgatggtggttatcgatctacatcaacaaatatcgtcgggctacagatcagatcggcgatcggcggcctcatgtacacacatcgcatggcagcaacacaagccgaagcaaagcagcagcatgccgagtcaactccattcagcaaatacatggtgtggcaacgtggccgaccaaccggagggtgacacatcatcaccatgcttcagtgccatgcataagaagttgtcaatgcgatggctaaacaaatcctgttgatttcaagctttttcaattcgatgctgagctgtggttaaatggc

SEQ ID NO: 27109 - DNA, 1741 bp, Oryza sativa
  ref <308>: DATABASE ACCESSION NUMBER: AK102551
  ref <309>: DATABASE ENTRY DATE: 2002-08-28
gacggccaattcgatccaacccgcgaagagagcccccgcttctccccatccaattccgccacctgctcgttctcccagttcctcctcgccgccccagctgacgacggccacctctgttcgatccaccgctgactggtcccccccgctcctggtttcgggggcggttcttcgattcttgagatcttagctccttcttcgacggcctcaccgctgccatgggcaagagtaagaaaaacaagggtggtcgaggaggcggcggcggtggtggagaggaccaatttgacggaggtagtgacgtggatagcgtgagttcggtgtcgacggcgctgtccgacctccagctcgcgcaggccaccgagcaagttagctcgcaggattttgttcttgacaaatacatcgacgatctctatgagaagaggggatccacaagagaggcagcattaggcgctcttgttgatgcttttgaaagttttgtgctacttgatttagtggaaaacaagtatgccacacttttgagccaatttatcaattcaataaaaaaaggatccataaaggaggtctgtctggcttgtcacaccactggcttactggccattacacttggtgctggaagtagttctcatgaaataatggatgaatcccgtctgcagcttctgagagtcctccaaacttggcctgatgcttcaaaaatgatatctgcacttgattgcttagctgttgtcacatttgttggtgcaactgatctatctgaaacccagctatctatgaaagccatctgggatgtgattcaccctaagtcaggatccaatgttggaattgtcagaaaaccaaagcctcccttgttagcagctgctgtgtctgcatgggcacttcttttgacaactattgtttcatcaaaaagaaacgttgactcttggaaagagtcaattacatttctttctgctcttctagaagcggaggaccgtgctgtgcggatggctgctggtgaagcattagcactgcttcgagttaaaactgcttgatgttttctccaatgaagaagttgaggtggacactgcagaagctagtggttctaagaaccaacttttcttgaatatgcaagcattgaaggccaaaatatctggtctagtctataatctctctatggaagcggggggaagaggtgctgacaagaaaaatctgaatgatcaaagagacttattccaacgaatctcagattttattaagactggtgagtgccttgaagaatcacttagaattgcaggcaagcatggtattttaagagttacatcatggcgtgaatcaatacagttgaactatttgaggcggttccttgggcgaggatttctgaagcatgcacaagacaatggattgctacatgatatctttgacatcaaaatggataaaactgaaaacatgtcaaccactgaaaagaaaatctataggtctggagaagagaaaggaagagctctaaagttgaataaggagcgtcgtttagcccaaatgaggaagcaaaatatcttaaacgagcaataaaggatagggatgttctattcttcctggaattttgtatagccgaaatcctatcagatattgagtgtgtttataggccaatgttaattcattcaagagcgttacaaacttaatacaatatacaatgtacttataaattagaacacaatgttactgaaaaaacacttctgaagaattatttgtaacttcctgctggtacagcagattt

SEQ ID NO: 27110 - DNA, 2807 bp, Oryza sativa
  ref <308>: DATABASE ACCESSION NUMBER: AK102552
  ref <309>: DATABASE ENTRY DATE: 2002-08-28
gatttgccactgatcccgaaacaaacagttggcggcggcggcggcgcgaggcgatggcggcgacggcgttcacggaggaggagaaggcggtggatgactcgctcggctaccccaaggcctacgcgcgcctctgccgcggcggcggcggtggcggcggtggactcccgtacggccacggcccgccgcacggcttcctcccctacgtcctccacccgcacgaggcgatgcgggcgaaggatctgaacgagatgttcccggtggccgacgcggaggcggcgccgacggcgaacccgcgggggttcgcgaacctgctgtggaagcagctcgaccacctcggcaacgccgggttcgacccggcgctgttccgcgtcgacgcctacggcaacgtgctctacctccacgccgactccgcctcgcctctcgcgtgggacatcgaccactggttcccctgcgcccgaggtgggaggacggtgccgagcaacctgaggatcgtgcaggcgcaggtgtgcaggaagaagcacaacaagctggagttcctcgtcccgtggtgggatctgcagctcggcatctccgtcaaccagttcctctccatcttcgcctccaagaacgccgacttcaggaacagagcattcacgttcttgttcgtcgacggggccagcgaggagctcacctcgatgcaggctgtggaggcgcacgcgtttccgcaccatttctccgatttgaccaagaaagttggccttgcccctgctgccattgtttcctccaggggatccgatagctcggtgctcaaatctcttgatgcaaaccggccgctcaggcctaattatcctctcattgctgccaagaaattcacgggagaaaaggatgagaattttaacgtgccaatgtccaaccatgggcctaattcgactaaggagaacaataatccggatgctgatggctacattagcaacccttacctgtccattgcaacggctagggactcgctgaggcaaagggaagaggccaagaagaagcaagctgagctcactgagctggagaacgaggccactgagctgaagcagaagaatgaagaggagcgggtggccatccaggacatggaggccctcctcatcaagaggcggcggcgcgtcgagaagtgccgccgcttggcggaggctcagtcgaattacaaggctgtgctggagaagatgatcagagacgccatgcaccagtctgttgtgtacaaggagcagcttaggatgaaccaagctgcaacgagcactctcatggcgagactcgaggcccagagagcaatgtgtgactcatccgaaaccgagctccggaggaagtaccagcagaaggatgaactggagaagcagatcaagcctttcaccgatcaagcaaggaagcggtatcgtgttgacgatgatggattgctagaggaaaggcacagcttagaagaaaggcacagtgaaagggtgaagtattttccaggaataagactgaggagcagaaaccctctcaagcaggagctgagggttttcctggaggaggaccagagggcttcagatgcatacatctccctagaggaagaggaaattgcaggtgaaacttcaacaatgggaaatttcaggaattcacctttcaaggtgataaacttcccaaggaggtccatggaagacaacacagttgacactgagagaggaagagcatcagtgagggagaagctggagcatctggcgatcaaagaacggcagcgcggcagaaggagagaaaggaccatgtcatcaaggggatcaagggcaactagcactcctgtgaggtcaagagatggcaatggcaagggcaaagcagccatggtgcaatgtgagtctgagactgaaagatctcagacagtttcagtgccaaggacatcctcagttcctccaagtcctccttacagagtaactggcgtgtatggaacacctagatatcctgcagagaaatcggtgctattgaaaaagaataatgtgattcatcggcaaggcgtcggtcgatccgaaggcgacgcaaacatgaaccacaccggcaaaggaactgtggataagtggcttcaaatgctcatggaggatcagcagcagcaagaagatcctgcagcagcatatcattcttctgaagatcacaacactgctgatgaaatcgcttcagacgagcaccaaatgcaaagcagaattgatgatgagagctgcaggaatgagatcaccgaatgctccgatgagatcgtcgaggtcggtggcgatggtgctactgagcagcaggacaggtgcaggaacagctttgagatcaaggagaggggagaggagaagaagatctggttcccaaggtctgacagctcaggggtttcaggtctctgccttcctcaccttccaagatccttggaatgagaaggggtgtggagtgcatgagcaggaagcccaaggtggtcggcgacgacaatggcagatacggctatgaagattcagtgtccacaagcagcagcaagttcctcaccaggtgcaagcaagccatcaagaaagcagtgaacaaataaacaattctttgcaccatgatgcagcacatttcaacctgtttattcttcaaatctgtgtgtttaaattcgtgtcaaattgctagttttgttttctgtagctgaataagttagtactcaagtgaggcatacatagctttgcagagttccttctgcaactagtgagacagacatttactgttcatggtcactattatgtgatcatactggcgttgtacaactatttgttgatttatttatgaagagaaactaaattctt

SEQ ID NO: 27111 - DNA, 2305 bp, Oryza sativa
  ref <308>: DATABASE ACCESSION NUMBER: AK102553
  ref <309>: DATABASE ENTRY DATE: 2002-08-28
gagcaacagcaacagcccagtactactagcaccgagacgagacgagagagagacggtcgccctcccagtccagtacagtgactcactctcactccagactcctccctctctctctcgtctctctcctgccggcggcgccgtggcggcgagcggcggagcactaggggaggagggggctcgtgctcgtctgtcgctgggtgtgtcgggggcgccgcggatcactctgcctcgagctgcgcgctcgcattccgctccttcgatctgggttcatctgttctgagatggctggcgacattacgtgtggatccttgctgcagaaactgcagttgatatgggatgaagttggtgagagcgacgaggaccgcgacaaggtcctgtaccagttagatcaggagtgcctggatgtttacaagaggaaagttgaccaggccaccgactctagggatctccttatccaggcgctggatgactcgaagattgagctggccagacttttatctgctctaggagagaaggccatagcaagaactcctgagaagacgtctgggacaatcaagcaacaacttgctgctatagcgccaacactcgagaagttgaacaagcagaaaaacgaaagagtgcgggaatttgttaatgttcagtcacaaattgatcaaatatgtggtgagattgctggcactacggaggtgggtgagaaggtggcaacgccacaagttaatgaggatgatttgacacttgagaggcttgaagaatttcgttaacaactacaggagctcgaaaaagagaagagcaataggttggagaaggttcttgattatgtgagcatgatacataatctctgtactgtcttagggatggattttcttagcacagtgactgaagttcatcccagtttggatgactctattggtgacaactgcaagagcattagcaatgatacactgtcaaaacttgacaagactgtagccacacttaatgaagacaaaaagtcaagactaagcaagcttcaagagcttgctggtcaactctacgatctttgggatctcatggatgcccccatgcaaaaaaggagcatgtttgatcatgtcacctgcaacagatcagcctctgtagacaaagtcactgcacctggagctcttgccctggatctcattgagcaagctgaggtagaggttcaaaggctagaccagctaaaatacagcaagatgaaggaaatagctttcaagaagcaaactgagttggaagacatctatgctggtgctcacatggtaatagatacagctgctgcccatgaaaaaatattggcgctgattgaggcagggaacatagaaccatcagaattgattgcagatatggaaagccagatatcaaaagcaaaggaagaagcattgagtagaaaagaaatattagacaaagttgaaagatggatgtctgcttgtgaagaagtaagctggcttgaagattataaccgggatgacaacagatataactcaagccgaggtgcccacctgaatctcaaacgtgctgaaaaggctcggattcttgtcaacaagattccagcacttgttgaaactctggtggcaaagaccagggcatgggaggagagccgtggtctgtcctttatgtatgatggtgtacctcttctagctatgttggatgaatatgtcatgctaaggcaggaaagggaagaagataagaaaagaatgagggaacaaaagcgctacatcgagcaacaactgaacaccgaccatgaagggccatttggttcacgtgtgagccctaacagaccagtcagtgcaaagaaggtacctggtgcaaaatcaaatggcagtgctaatggcactcctccgaataggagactttcggtcagcggtcaccagaacggaaggtctggaggaaaggatggcaagagggactctgccaagacagcttcccccgggaatgtagcagctgctaaggaagatgcatcctcacacatttctggcaccgatccggttccgagcacaccatgatctttaaccttatggtatattagataaagagaggacagtttctgatgtttccattgatttgtggctatataatgtattgtgtttgtagcgaggagtaattatataacgtccatctttcaggcaggatcttttgcttctgtggagtaagtggagttcaacttttgattagttccctcagctgtactatttccccttctcatcagactctgtagtatagcctttgctggtatgtattactattcgttaacctgtttgctacatgtacaagttcttggaatgcctttcccctgccc

SEQ ID NO: 27112 - DNA, 3764 bp, Oryza sativa
  ref <308>: DATABASE ACCESSION NUMBER: AK102554
  ref <309>: DATABASE ENTRY DATE: 2002-08-28
ggctcttgcttccggagttggcgtctcggacggcaaggttcgagctatcctgttgttttacaaaatgccccctgattcatgtctatactctataccaattctcttatttttgcaaaataacccctactagttctatcggtcctgctattttgcaaagtagtcctcctctcttccgcctcgtccccgtcaaacccttgccggcggcggccgccggccggagaggcggatggcgtcgtcgatctcctgcgcgcggccctcgcccgccgccgcttcatcgcctctagctccggcagcctgacgtcaccgtccctcccctccttggattgcagcagtaggctaacaagatcatgaaacgagctccccctccaccccacattccggcgatcccccccaccctacctgacctaggccaatgagagtatcgtccccgtgccgtcggtgaacggcggagtaagattcgccggcgaggttaagtattgttcctgactttcttcttccaaggtgacagcctcgagaagctgtccccattgaatccatgttactgctacccaacaaatgtggctgggtgatgaacagaaacagtgttggcgttttctcgattaagatgagatcagtgcgggttcaaggtgtgaaagcggaggatttgaagatgcagttattcagctattttttccttgcatgatcttctgattcaggccccacttggaacgccgggaatttcttttttcagttccagttaaattcctattgttaaaacgaggccttcagtatgcaatagatttgctggttaggatccaacctttcactccaaggaaaaaaattataagcatatactggaaacagaggcattttaccactacatgtttaattagaactgggtgttcatacaagttggtacgatttttacacgtagggataagagaatgctctcgacaacatttctaagggctcttattcaactagttaaagcacatcacctagctgggagccatgaaaaatgtcacctagataattacagtgctggccattattccaccagttaaagcagattttgaaccacttggctcatgcttggtctttggctcctctcctcttccacgcatgaaactgctatctttaacatcttgactgcttgtgaataattaaactctccttccagtctgccatcaacaaactccaagagccatgactgatcttcgtttaccaatttctctttgagaatatcagcagtgcgtttaacgcccagttccaccttctcaccctcaaccatccatcttgaaacccgaatccccttcactaactcaagaagcacaactccatagctgaaaacatcaggccttgcctgtgatcggaagatttagaacccattctggtgcaatgtaccctctagttccatgcactcttgacaacattagtgcagttccttgcttaagtagtttgaccagtccaaaatctgcaatctttggctcaaagtctttatctaacaatatgttttctggtttgatatcgcagtgtacgatccattcaagacactcatggtgaagatatgccagtccttttgctacgccaattgcaatattgtaccgttggttcctttttagcaaaggaaataagttctgatggtcaaacacaagtctgtctaaagaaccattctcaatgtactcagaaaccaagagcctacttgtcttctctgcacagaacccccaaactctaaccagattcatatgatatattcttcctatgacacttagctcagaccttaactcctgctctccatagatcacatcatttagctttttcactgcaacctgcctttcatcatcgaggactcccttgtaaaccacacctgatccaccattcccgctcttcctgaaaacaattggttgccttgtgtaactccttgtagctgaatcttcggaattggctagaaatgatcatgtaaccttcgtcagtaatctctgatattgtctcccattttttaacaactgaaaagccagcaacaattaaaaccacttcaatcaaaagcactgttaacagagaagaaaggaagtaaccaaacatgaacttggatgggacatcttcgagcatttgtgatgaagggtaggctaatttttcagtaactccacaagaatgggttagtctagaatctgattctttggtaaacggcacccccttaggaactttcaggtagatgtcattgtaaggatctgggaagctcctgccattgaaaagcgtgtactttgggtaacataggccagttctccttcggtaaccgaaggcttggcatttagcgttggccaggcacatatttctacagtttgagaacggcactgactctgcgtagtccatgtcatatccccagaagtcagttccagtgttctttctgaatgaaaagtcccggctgatagtgttgtttgtatttgttctattccctttatcccagatgactgtcatgtctgccttgcgcttgcaccctttgctccagtcactcggatcaatcacctcgaagccttggagtcaagaacaatggagtctcgggatgtaattgcagatgctgtttataccacacactccatgcatttggcataatctagagaatgccatccaagaaactgaccagttgccactggtctcgtttaggctgtacagcctaagatttccatcgtaatccagagtcaacctcctcatgacatgatcgccaagatcagagtcttcaaacttaaataggtcacttgatacaaaacgacctgtctgatttagaaccccatatcggcgactgtcataagttgtccttccattcttccatggcaggtgaaccgaaggatttggccaatatatgctggcagtgtcagggccattgtagacgagagtcaaaatattgttactgtcgaagagaaagttgtagaagcctgaatataaccaacccctggcagatgcagataccagctttacattcctagttattggttgcaacggcagaagtgtgtctgttggcgagtcgaagctcctccatagatgctggccttgtaggtccatgacaacaaggtttccattgttgagaagctctgctcgatttgcttgagtggctgttgtgttggtgctccatacaactttgccattgtagtcaagaagggccaaggtcccgtcgttctggaaggtgagcctggagcccttgccattcaccggagcatcgcggttcgccgtccaagcgacagtcttctctgacgacctggaaaaccagatggagaaggtgaaggcgttggtggccaccttgtagaagccacaggagaaatcgtcattgggggacactaggatggcggtggtgtcatcctgggttgaaatggatgaacgcctagtaagaaagctcttttgatcttttgcaacagcagtggggagcatgagaaggaaggatatcactgtggtgaaaatgcagaagcctctcacggcgacgttttgctacggcatgcatgaacttaaacatgaatgatgaaagcgagcaaacggccagtcgttgattcagcatgtccaggacggcgttgccgagtaccacatgcctgcttggctccgttgctgtctgattcccccaggtgtctggtgacaaacagaacgttgtattggacagggttatggcattcaaaccagaatatttgactggtaatttctatgtaatatgttaggaatatttatagaaccgttatacttatgatagataagtattatgaaagtgatgtctgagaaatatactgggataatttccctgtacc

SEQ ID NO: 27113 - DNA, 2162 bp, Oryza sativa
  ref <308>: DATABASE ACCESSION NUMBER: AK102555
  ref <309>: DATABASE ENTRY DATE: 2002-08-28
gactcggcggtgactagtacaccttatctcttcgaaaccctagctaagagccgtcgctttatctcttttctcttcttcttcttcccttgtactcctccgatccccaatctcatctatcaccacctgacctgatctttccctgcagatctcattgagaaagagaagagaagagatattcttttttccaaagaagaaaatcttggccgcgcgcgcgagatctttgcgcaaaagatgatatatgatgcctgatcgatcttctcgtttcggatcttattattgctcggctaattagtattattaacgctgctagccagggcctttgatccgcgtggtcgtggtcgtcggtgaggcagccgggcaggccgactcccatgcatggaagctcgcttcagggtcaagtcaactgattatgtttttcattaatttgttggtaattaatttttttatatgtacgtacatatatatatagctcggatggtttggtatttctttctcagatctatatatattgcaaggggatcggagtgtcgttagttacacggtatttattatagagtttttgggatagagagagatttctgactattagctagactagactgaaggcttttgtttcttttcttctttgatttgatctgatctgttcaatggagaacatttttatggaagccgagggcaggggatagctagccggaggtgctcctagtccgtgatatggaaggggctatatattcaactgcaacgctattggtcctccaatccattttatctcggcccctgaaactcaagttgttttgatacaattacaattaataatcaacaactgggtggttgtggtgaaaactctcagcattgcaagaccaatgcccctcagcctggacagcacaaaggcacattacaccatgatgatggcgcccactaaataaatttgttaccacctaccatttttcatcgttgtgtgtttggattactgagcgtgaacaaaggggtcctatatatctgttggactgagcagggaaagatagatagtacttgagggggatggtgctctatctttgttggattgtactgtcttactgattagcgatttctattcatgtgtcggttagctcaatagctgttaaactttatatttgataactattttatatatattttgggctgataatactaggacttctttgggaggagggcttagctattcctcaagtttagagttagttttgttaagatcacagtagttggattttcttgacgatggctcattgactactgtattttattacaactagctttctcatgtaacttgagttggatcattgatgatattctgtttgtttgatttttgacaatgacaattacttctgttacaaaatcttttttgtatttgatttttgagattcacattttactttttgcaatttaatatttgatttgcgttttatctgtgagatacttggattttaatatttgatttttaagatagatttctaggtaggtaggtagataaataggttttgagagagatggaggaagagcgagagggagggcgaaggagagggattgttttgatcatcaccatgtatgttgttgtgtgtgagttttatactgagtgtagcgaagaaactgaccctaggttaacttttggtcgttagtcttcttctgcgtctacatttgcttgtagcagtataatagagtctgctgcttcatgggttttgatgtcacttttgcttgccaaattctttctactcatgtttagagttagggtagagcaatgacagctctgctagtgcaaacaacaatgtggccagtactgtatctgtatacagtacaagttttgcctagtagctagtgtggctcctcctgactgcatctaatttgatttctttccccatttgtaattttaactctatactctgacggtgcaatatggcgtcaattgaaacaatttttactagtttttggattgagcctgtgacctgtttggatgttttctttattttgaactgttttgcagatatgggacacttcaatctttgtggctgatttcttgtttctcaagattgtacatccatgagacaattgaatccctagactagcacaggccatttccagtgtatagtagagcagtgataaaaatgcaagacatgcagaaatggaat

SEQ ID NO: 27114 - DNA, 2777 bp, Oryza sativa
  ref <308>: DATABASE ACCESSION NUMBER: AK102556
  ref <309>: DATABASE ENTRY DATE: 2002-08-28
gttccatccatggagatacttagcccgtcgccgccgcccagccccggccccgcctccgcctccgcctccgcctccggctccgccatggattccttcatccacagaggtgccggctggcatttcccccgccgcgacaacgtcgacgcgcgggtccatgtcgccgtcgggaggtcgccggagaagacgttgggcctgctgcgatgggccttccgccgcttcgcctgcgcccaagtcgtcctcgtgcacgtccaccaaccttctccgctcatccctaccctcttaggcaagattcctgccgctcaagccaccgaagagctcgtgctgtcgcatcgcaaatccgagaaggacgaaatgaacaagatcctcctcacctacctcactttctgtcacagggcacaggttcaggcaagtcttcttgtcacggagaatgaacaaatccatgatggtattatcactttggtcaaagatcatgggattacaaagcttgtcatgggttctacacctgatacttgcttcaagttgaaagcgagctatggcaaagcatcttttatggcaaggaatgccccatcattttgtgaaatctggtttgtttggagaggaagacacatttggaccagagaagcagctgcagccattggcaacaatatctcagtttacaatgaagatgatgttatgatcaggaaaagaatcaggttcagctctactagtaacaatgctgaatccatacttgatgaaggatacatttcatacgaggcacaaacacctgctgatcgttatgaaatcaccatttcagataatggtcaaccgaatgattatgaatctcttgttgatgccaaccatttctgcaatattattgtaccaaatttgcaaaatgcacagtctgcatttaactcaacattccagcctggttcttctgtagacatggaatcattagtgttatatcctcaggaaatcttggataaaaatttcaagcaggtcattctagaagcagagagatcaaggaaggatgcttttgttgagcttctcaagcgcaaagatacagagtcaagagtagccggtgttattgccagggcaaaagcttctgagttcgctcaaaaacaagaaatgaaaatgcgggaggaacttgaagctttgttgacagccacaaaaaagcagcatgaagatcttgcagaaaataaagaaaaggctacagaagggttggactcttcgatgagaaaactagccatcctagatgcacgtgctaaaagcatagcttttcggatgaatgaagctgtggcagagctgaaattgattcaatcttccataggaacactcaatcaggaaattcccaaaagagagaagctagaacttgtacatactgaccaggttgaaaggtgtgcatataaccacattatgttaccaaattgcagttcaactgtttgtgctgatgacttgtacaactttagagaattgactttgtcagatattaaagctgcaacatgcaagttctcagacagcttaaaagtactgccacgaggtcttggatgtgtttataaaggagagattatgaacagaagtgtaatgatttataagttgcactcgtgtatcattcagagttcgatgcagttccagcaagaggtccacctcattagcaaggtgaggcaccctcacctggtgactttgattggggcatgcccggatgcattgtgtcttgactatgaatacgtgccaaacgggagccttcacgaccgcctttggagcaagtgcggcattcctcagttgccatggaaaatccgtgcacgtattgttgctgaaatctcaagtgctctattcttcttgcattcctgtaaacctcagatgattgtccacggtgacttgaagcttgaaaacatccttttagatgccaacctgcactgcaagatagctgattgtggtatttctcaattattcatggaagatgccaaggacgcagacccggaataccggagaagcaaaccattgacacccaaatctgacatatactcctttgggattgtgatactccagttactaactgggaagcaggctgcaggccttcccagcgaagtaaggcgtgcaatgtccagtggaaagctatggtcattgttagatccaacagctggagagtggcctctggaggtggctcgaaggttagcagagttggggctcaagtgcagtgaggcagcaagtccagagctgctgactccagaaactgtgcgagatctggaacagctccacctgatgagggataatagacaagtgccctccttcttcctgtgcccgatcctcaaggaagtgatgcatgatccccaggtgggggcggacgggttgacgtacgaagggcgcgccatttccgagttgatggacaatggccctccaatcacccccaaccacgcccttcgttttgccatccatgactggctctctcagagatcaactcctttctgattttccccaaggatctggattttgtatgtacacattgtttatttcatagtcagtctgtttgttagtagcacatgcatgatgtaacgaaataataatagagtaaatatttcaagtttcatgtatcgagcaaatgtcactgtacatatagagtgagttaggagctatgttcagggcagtcggagtatcttgctagttgcccgtttggtctaagtagcagttgtcatggggttgacaaactaccccctccgtttctttacttatgtaagatgctttgatttttttatcagttaaagttcaatcaaatttatagaaaacatagttacatttttaac

SEQ ID NO: 27115 - DNA, 1951 bp, Oryza sativa
  ref <308>: DATABASE ACCESSION NUMBER: AK102557
  ref <309>: DATABASE ENTRY DATE: 2002-08-28
ggctcacaaatctccgcttcgtcccccacccacccaccactccactccccgcagttggtggcccgcggcggcgcaagccctagcgtccacgcgaagcaaaccccccaaaaccctagctccgccgccgtcggcggcgcccgagctgcaacccccgccacgacgccatccgggtggctagcctaagcccctaaccaaaccctagcgaccggcgccgcagtcggggggagagatgccgcgggagatcatcacgatacaggtggggcaatgcgggaaccagatcgggatggagttctggaagcagctctgcctcgagcacggcatcggcaaggacggcctcctcgaggacttcgccacccagggaggagataggaaggatgttttcttctaccaggctgatgaccagcattacataccgagggctcttcttgtggatctagagccgagagtgatcaacggaatacagaacagtgagtacaggaatctatacaatcatgagaatatatttgtggctgagcatggaggtggtgctgggaacaactgggctagtggatatcaccagggtgagcaagttgttgatgatatcatggatatgatagacagagaagcagatggaagtgatagccttgagggttttgtgttatgccactcaattgctggtggaactggttcaggtatgggttcttacctgttggagactctgaatgaccgatacagcaaaaagcttgtccagacatacagtgttttcccaaatcagatggaaacaagtgatgttgttgtccagccatataattcgcttttaactctgaagcggctgacactgaatgctgactgtgtggttgttcttgacaatacggcccttaataggattgctgtggaacgtcttcatttagcaaatcctacttttgcacaaacaaactctttggtctcaacagttatgtctgcaagcacaactactctgaggtatcctggatatatgaacaatgacctggttggccttcttgcctctttgatccctactccaaggtgtcattttctgatgacaggttacactccattgactgttgaacgacaggttaacatgatacgcaagacaacagtattagatgttatgaggcgacttctgcagaccaaaaatataatggtgtcatcatatgctcgaaataaggaagctagtcaggctaaatacatctccatacttaacatcattcagggagaggtggatcctacacaggtccatgagagcctacaaaggatacgtgaaaggaagcttgttaacttcattgagtggggacctgcaagcattcaggttgccttatcaagaaaatctccatatgtacaaaccacgcatagggttagtggattgatgctggcgaatcatactagtatccgtcacttattcagcaaatgcctgggacagtatgaaaagctaaggaaaaagcaagcttttcttgacaactacagaaagttcccaatgtttgaggacaatgatctctctgaatttgatgaatctcgagaaataatagagagcttagttgatgagtacaaggcttgcgaatcaccagactacatcaaatgggggatggaggatgctggagaggcaaacgttgcggccgcacttgattcgaagttagtggtgtaaatatgaaggtcctacaagaatgcaactctaattgcctgatggtcatcagttcgatggcagctgctcgactcgttcccactctagtgctagatgcgtttcctcagcattcttcaagtttgcttctcgtgttagtgttacagcctgtgcgacatgagtgtatatcttgacccacttcgaactggccgtagtttgtgctgttccgttttgggttgcaatcccttctgggatgctttgtatgtgtggatgcgtgtgatgtactgatactgatgggttttgtgccagaatagcatgcagagctctaattgttggtgc

SEQ ID NO: 27116 - DNA, 2562 bp, Oryza sativa
  ref <308>: DATABASE ACCESSION NUMBER: AK102558
  ref <309>: DATABASE ENTRY DATE: 2002-08-28
gcttgagcgacggcgccacatcgtcttcccttcccctacttctcctcgccgccgacggcttcccctcgcggtctccccgccgtcccccatctcctgcccacccctctccccttcaccctcttccgagtcaagcaaaggagagagaacccacgcctcctagactcacgaaccagtcgccgcctccgttcttattgttttctctttttcccctatttctctctacctggggaggtgactctaccattgcgccgccgtagttggtggtgatagcctagctggagtggcgatggaggcgggagatggttcatggacctgcggcggcgacgcctacgaccgtcgagctctggtacccatggaccgccgacgcttccattggaagggcatgagccatcagtgctaagctccaatgctgattacgaagaatcccatgtaagccatcagttcttgagcctaagctgctagatctccttttcccctgtattcctacgctgtcatgcatgttctgcctgcaatgcgaggaggcttgggatgaccgccacagcggctgcgaaggagccacttcccgagcagtcgtgccatgatcgataagagtgatcgatggatgcgagcgtatggtgtccattgtgcagtcgtgcaggtatttacctttccttctcttcgatttggttttccctactcatatatctgtctgttaatcttccaacttttctgacgcaattttggaatagaaaattttaccgcttatctaagcccattttctggatgaacctttctagaataaatgttcttgaattgatttgactaacctgataattcattctaattcgaccaaagactgcaccacggctgtgccgcaggaggtgcacaactgaatttattttttggtaccgaccattttatgatagacaacatttgaagttgcagtatctgcattattaaagcgatcaactatgtttcagaactcattatctaaaagctatctttcagaactggtattaggacttcttggaccttactggactgtaaggtgctttggattaatcgccacttcatttagtgaatcatttcatccctgaattttggacactactgaactgctatcttgctaagtgctttggaattatgctggtcatttcattcaatctcatgaataaatggctgcattgagtactaggttgtgcttgaaaacccacctcacaaggtgctagcctggttgagcagctttgagagttagacactggttgtggcgtgctaagttctgcataagggaaattttgcaactctgtttgtgcagagaataggagatattggattttgggttgacgaattcacttcgttgcccaagcaacactatttgatctcttcaggttttctgtcctcaatcattctaccatttattccttgctattttgttaggttatctagctagcaattaaaatttgtgcccttctataattttgtcaaatgatggaaactcctattctaattttctatcactgttggatctgtgtttggcaaagtttcattttccactgtttgttggtgattactccaatactatctaatcatgttcttatttagtgaaaaaatgatgctgccatcgcaccacctgcaaactaaatcagggtagcgattcagtctatataaatataggtgtatgtttcccagattcaaatctttgtgacctagataatggcgaagtatgcttatccaattgaatcaacataaaatgagattatgttttatgtgtgatggttgaaagaaacttactcctttctccatctaacttattgatatgaagtacagtcctaacaaacacgtctacagtaacctagctaaattatatgtgatttcatatgaactattctagcaagaaggagagcatggagttggttgatatgaagtaatgctttagtgttgtgcgttgacaagtgagtttaatcaatctttggaaatgtgagaattgccagttagctttaagttttctttgaattccatgacaaatgcatgtttgtaaatatagcgcgggtatcgctacatagttgccaacataataacaaatcaactgacataagaacttggtgcacgaattagattatctcatccttttattttgtttattgtcaggctttccctataaattaattgacaggaggaagaaatcacaggtggtttaccaatttcaatgacattttatagttcatcaaagaattgaacttctatatggtagccgggcaaatagcagggatgtttctttctctacacctgtatcttggctgatcatttagtttctttctatatatatatgctgttaattgctctatgaagcataataagttctcatggcttctggatttacacttagctgattttatctcgcagaattcaaccactttttttttttatcgtcacatagatgtaagatttcaggttatgtgatggtcacaaacttcagaattcaagttgtattagcctatgttggaacgaagaccttcagaagaactatatgtaatataaacggtgtaaatgatgtaaatgttgtgacacttagtctttccaact

SEQ ID NO: 27117 - DNA, 1058 bp, Oryza sativa
  ref <308>: DATABASE ACCESSION NUMBER: AK102559
  ref <309>: DATABASE ENTRY DATE: 2002-08-28
ggttggtcggtcgcgaggatcgatggcggcgggggaaggagacgtggggatggaggtggagacgaaggcgccagcgatgccgccgccgccgccggcgtcgtcgagcgcggccaggaagaagaagcaagctcgcgcgaagaacggcgacacgcctgagcctgacgccgccggcggtgcccgtgcccgggcgtctcggcgagcgaaacggggaccgggcagctaccgcggcgtgcggcagcgccggtggggcaagtgggtctcggagatccgcgagcccaaccgcgggaagcggcactggctgggcaccttcggcagcgccgtcgacgccgccctcgcctacgacaaggccgccgcgtccatcctcggtccccgcgcggtcctcaacttcccggcattcagccctcctgccgccgccatcgccgcgccggagcaatgcgaacccccgttctgttctcctgccaccaccgccgccgccactgcgccggagcaacgccaaaccccgggctgttctcctgcagccgtcgccggcagcggcggcggcgcagtgttcgaggagcgtgacgtgaagccggtggtgttgccgttgccgttgccggccatactccaggatggcggcggcacggaggcaatggcgcagcattgggattgggagtgggacgcgtcttggcctgagctggagatgttcgagtgtctggatgacatcgccatgtacctcgacgtcgacgctgtgatgacgactcgggattgcaaggttgaggagctcgacgccgacatcgtcgactcgccgctgtggacactgtcggactgaaatggcaaatgtggcagccatctagacaggtttcttttggtgagagattttccagtagatgagttagctttcgttttgcttagctgatagccatgtagaccgttaacaacgcttatatgtagtttactaatatattattagtcttcattttgcattaggaaaaagtataactgatagcattcaaatgtaaatagtagaactgaaaccaaaatactactatatttatccggagagaattgcactttggact

SEQ ID NO: 27118 - DNA, 1760 bp, Oryza sativa
  ref <308>: DATABASE ACCESSION NUMBER: AK102560
  ref <309>: DATABASE ENTRY DATE: 2002-08-28
gtgagagaaaggcgtcttcgtactcgcctctctccgcgccctcctccgccgccgctcgccgccgttcgtctccgccgccaccgccgccgccatgagggagtgcatctcgatccacatcgggcaggccggtatccaggtcgggaacgcgtgctgggagctctattgcctcgagcatggcatccagcctgatggacagatgcccggtgacaagaccgttgggggaggtgatgatgcttttaacaccttcttcagtgagactggtgctgggaagcatgtcccccgtgctgtcttcgtcgatcttgagcctaccgtgattgatgaggtgaggactggtgactaccgccagctcttccaccctgagcagctcatcagtggcaaggaggatgcagccaacaactttgcccgtggtcactacaccattggcaaggagattgttgatctgtgccttgaccgcatcaggaagcttgccgacaactgcactggtctccagggcttccttgtgttcaacgctgttggaggaggaacgggctccggtctcggttcccttctccttgagcgtctctctgtggactatggcaagaagtccaagctcgggttcaccgtgtacccgtcccctcaggtctccacctctgtggttgagccatacaacagtgtcctctccacccactccctccttgagcacaccgatgtcgctgtcctgctcgacaatgaggccatctatgacatctgccgccgctccctcgacattgagcgcccaacctacaccaacctcaacaggcttgtgtcccaggtcatctcctcactgactgcctccctgaggttcgatggtgctctgaatgtggatgtcaacgagttccaaaccaacctggtgccctacccgaggatccacttcatgctttcctcctacgccccggtgatctcggccgagaaggcctaccacgagcagctctccgtggcggagatcaccaacagcgccttcgagccgtcctccatgatggccaagtgcgacccgcgccacggcaagtacatggcgtgctgcctgatgtaccgcggcgacgtggtccccaaggacgtgaacgccgcggtggccaccatcaagacgaagcgcaccatccagttcgtggactggtgccccacggggttcaagtgcggcatcaactaccagccgcccagcgtcgtcccggggggagacctggccaaggtgcagagggccgtgtgcatgatctccaactccaccagcgtcgtcgaggtgttctcccgcatcgacatcaagttcgacctcatgtactccaagcgcgccttcgtccactggtacgtcggcgagggcatggaggagggggagttctccgaggcccgcgaggacctcgccgcgctggagaaggactacgaggaggtcggctccgagttcgacgatggtgacgagggtgatgagggtgacgagtactagagaggttcagggttcttgcctggtgccttggcaatgcttgattactgctgctatcctatgatctgtccgtgtgggcttctatctatcagtttgtgtgtctggttttgaaaaacatttgcttttcgattatgcagggtttgcttgtagctttcgctgctgtgacctgtgttgtttatgtgaaccttctttgtggcatctttaatatccaagttcgtggtttgtcgtaaaacgaagcctctacttcgtaaagttgtgtctatagcattgaaatcgtttttttgctcgagaataattgtgacctttagttggcgcg

SEQ ID NO: 27119 - DNA, 4865 bp, Oryza sativa
  ref <308>: DATABASE ACCESSION NUMBER: AK102561
  ref <309>: DATABASE ENTRY DATE: 2002-08-28
ggcatgtctttcccggcgacccggccctgccggctgccgcctctccaccctccacacccccgcctccccaccctccacacccccgcctccctcccctcaaacgcggcccttccatcctctagatctgtcagtccacggaccacacggaccccgcttggcgaggcgatgcgttcgtccaacgcggaccacgaactgtgtctccctgccgacgttaccgcgcatcaagattaggtgcaagctcgggggcacctgcctcaacgttggatgcatcccctattcccctccaaggtattgcgttctccattcgccgtctccgtgcgcgatctatatgtccattggtaaaaattcgagcacgtcgatccgtgaccgtgttgagcactttacaacgaatcttgggggttaggattttgcggtgtacaggtgcgtaagctgtagtgttgtttgatgcggtacaggggtagaagagtgggacggtttgcacattttaattgtccatctgaaatactagtaaagaaaagttcgaccatctaaatgccacgtttggctcctctcaccaagctatttattagtgtgcagatgtgaattctgttatggtttctacttattgtgatcattaggttatgcaatttcttaactcttcatggtgataacttgcgctaggggtggtttggagtagcactaattgtgggactgtgggtgtagtttcagtttctttttctctgctgctgtttgtggaagcctgagaggtgatacaaaccttgggtcccaaacacccaatgtgtaattggctaattgcattcccagaaaagacagagtttagccagtccattgactggtaaataacttgatctactcataagcatggagtgttgtctgcaatttactatatatagtagttgtagtaatgcgcacttttaccagaaagattttactgagttaatagattcacctgggaggtgacaaatgccttgggtaccaaactcccaattgtttaactttgtcatatcatgtgattgaactggatgctaatgagggataaattttgttagaaataggatggagttatttctgggagacaaatttctgattgcaatgcacaacaaattcgaagttcttttattttccccatttagctctcacactccagttagaagttgtttttaaactctcatatccaattagtgtgtggtaaccttggggtctgctagtatatgttgctgatagccacatgaggtgtttgacaaacataccaaattttaaaaaaattatataggagcctctttgagtaaactgactgtttatcttgtgatttcttctgttattaaactgctagtctgcataaatgcatccttcctcttagctaaaatagttgagactttgtagacgtagggatgtttaattgtttattattgagcatgttgctgggaagtttactaatggatctcatctgtgtcagtttaggtgataaggttcatatctcacttggaacaggtatggcaggagaaatatcgtggcttcaacttatccaatacaatacaaaagttggaacgttgttttggtgttctaataaacctagaagctagtgatagataattggcctcaaaggttggtggggaatgcagtattatatttatccaatacaatgctcgcttgtttataatatactagaagttatcctgcgcattgctgtgggaattcatggaacaatagtgggtagggaaagcaaaacggtgtattgctttaggacaaccttttggtgtgaatgttatggttttgttcaacatttaaaaaaatcagttgtggaatcggatgatatatatatcttggtaactgacagtgtagatattgctgtgggcaatagaaaaaaaaatctaaatatgaaaatctagcattgatcagtcttggtataggaaagaaaaatgtttagtgatgctgtgagaactaggctaacgataataattcaaaatcatatactaccttcttttcaaaatgtatgacgttgttgacttttcgcacaatgtttgaccattcgtcttattctacatgttgaaatggagggagtacattgctccccaagtcgaataacagagttagcaaaaccaattcatagcaggggtttcataacttaaacactaactactttataagaatgttagcagaaggtcctgttcaagtaagtcatcggaactgaaaaggaaaaaaaaggatttaccccacatctgtgcctcatgaatgcaatatttcagttacttgttcagtcttcatctctctcaggaggcaaagcaggctactttcaaaattcaaagattaccaagctgaaatatgggcatgatggaatacatctctatcagtggcacatgaatataaagtgtttaggtgttcagtaaaggtaagatagacactttcaccagataaaatggtcattcaaatacagatagaaaaaaaagctgataaagatgataattcatattcatataaagatcgctattaaaattcagatatcaaagaagtttgacaaactaaaaatttccatcaaatttaagagttttaccacctcatatagccattatgcttcgcctatgagtgaaccaacagatgatcttgtttcctgcattcttcaattgcttgagaagaagaaaaaggatctgacaatgaaagcaccataggatatacacataactggaagggccagtatatatgaagaaacctgattgaactaataagactaaaacatattgatttgaacctgtggtggcgtatcctgagaggctagttgagctgtggaagctcatcatcttgtctcttctttctccctgtgatgaagattgattggtctgggagtgcctgagagcacgttggtggtcatggcctcatatttgataggaaaaggaaaaggcatatatattgagggaaatgaatggccatggcctatattatattgctgtcgcttcaactcctagctgttacagaatttgatagcgcgggcgcagcaaatcgtttcaggtcaggggggacaccttttgcgctgatagtgcaagtgaaacgatagccagtgagatgggctgggccaagtaggaaagttgggctgggtttaatttgctgggtatgagacagtaatgaatgaaatagatgctcgggcatgcaatccgatgccgtcaatcaaagtaatccaatggatggaaatgaaggggtgacgtggcaaagcgtgaaggcaggaaaataccttaattgcactaagtgggggatggattggaataaaaaacatcaattgtattatccttgaaaagaaggcacatcacaaaattacacaatagttacatggtttcagtttctctcatttagagttgacactttcttgctctttcttctaaatgatgtgtgatcttttctcaaatagtatctttatgttaagtgttttctttaaatagtgttcaagtgtagataatactgtgcacatccattagattgtgccatggttaccattttgaaggtcattttaattgtttagtttttctggcaacctgctgattgaaacatataaagatttgaggtcaccttattcggtattgttcttgtatttatagtatttttacccaggtgtaacaaaatttccctgtaaaccttggtaaagccagataaatacatcacgaggttcttgctaaaatgctgatggaaacccagctgagttaccaaattattacttgatttctctgttggaagatgggtatatttcgagacctgctaattgtaaatgcattgtttggcttgctattgcattgcacctgacttgggattcttcttcatgatttcaggctttactgcattcatagtgaggcaaagtcttattttgcacaccatgggattaaattatcaaatagatttggctgccatgatggcacaaaaggacaatgtgcctgctaaaaaagaacaaggttgagtatgccagaggtttttggaagttcctgtacccttcagaagtacctgtggacttgcacggtaacgtagcacaatcttcaaagggaagaatataatgattgccacttgttcagatgtaaaatctctccctgaagttacaatagatgagaaaaagattgtcacctactgcctactggtgctcttttctttcagaaataccaaagaaattggtgattgttggagctggatacataggtttagagacggttctttctggaacgggccaggtctgaggttagtgttgtcgaatttgcctctgacattgtcccatcaatggatggacaaattaggaagccattcaagcatatgctggagaagcagaaaatgaaattcatgcttaagacaatggtagttggggttgacgcctctggtagttgtgtcaagttaactgtggagcctgcagctggtggagagcagagtattctggacgttgttgatgacaaatgttaagcgtgtccacacaactggggatgctatacccggacccatgcttgcacataaagctgaagaagatccattgcctgtgttgaattcatcgcaggaaaaggtcacttagattatgaactgtacccagtgtggtgtatgcacaccaagaggtggcctcctttggcaagatagaagaacaggtgaaggcatcaggagtggcctaccaggttgggaagtcctccctgttagcacacaggtgttcgaaggcgattgatgatgctgaagagctggtcaaggtcatggctgagaagcagtgatgaggtaacattccatggctcgtgcagatctgagcatgatgtggtcttggccacctgtcctttctttcctatatatgaatgtctggcagatttttgtctactacgaataaagattcacaaataaactttaataattgtttactcctt

SEQ ID NO: 27120 - DNA, 1467 bp, Oryza sativa
  ref <308>: DATABASE ACCESSION NUMBER: AK102562
  ref <309>: DATABASE ENTRY DATE: 2002-08-28
ggtggttctcttctcacaggtagaaggaagcaatggcgatgccgcccaagcccggcgatcagccctccccggggcggagccccaaccccaacctcaacctcccctgcccgctcccgcccatccctagctgcggcggcggcgcgccagatctgaggtggccttccgcttcccggacgacctgggcctcgggggcggcgcggacggcgggggcttcgacgagatcggctccgaggacgacctcttctccaccttcatggacatggagaagatcgccggcgccgaccgcgaccgcgccgccgagacctcctcccctccccgccccaccaagcaccgccacagcgcctccttcgacggcttcgccttcggggccggtgcgggtggccccggccctggccttgggaagcagcaagacggagcaggaggcgtgttctccgaggttatggaggctaagaaggccatgtcctccgagcagctggccgagctcgccgccatcgaccccaagcgcgccaaaagaattctagcaaacagacagtctgcagcccgatcaaaggaaaggaaggctcgatatataacagagttagagcggaaagttcaaactcttcaaactgaggctaccacactgtcagcacaactgacactatttcagagagacacaaccggactttctgcagaaaatgctgagctcaagattagattgcaagccatggagcaacaggctcagctgcgtgatgctctcaacgatgcactgaagcaggaagtggagaggcttaagattgctacgggtgagatggcaaagtcaaatgatgcgtataatacaggaatgcagcaggtcccgtacagcccttccttcttccagctatctgaccaacacgcagttcagcaccatgcaggcgttcagcagctgctacatcaattccaacaacctcatccaagtgtccctagccaccagatgctatcccacccaaattccctctctgatatgatgcagcaagactcgcttgggcggctccaagggctggacattggcaaaggaccagtggctgtgaagaatgaggcagaggtagtggtgaagtctgagggtagttcaatatctgcaggtgaaagcaacagcacattctaattatagacctacatgtcaacaaattgctccgtccgtttagttttctttgttcatagtctgacatgccttcctgaactgcttccctctctcccactagtttttttttttcaattcaattctttcaattttagttacattgtttgtttgttgatcatcgtgtggctgatcatgtagagacttagatatgctcgtttggaaacatcgggtttatttcttgtgtgttgtgtgttgtttgatttagggggtgaggggcactgagtgggtttccagtgacttttatgtattcttttagttatgttgtagacttgttgtctttgaaaatatgtacatttttgtgttactatgct

SEQ ID NO: 27121 - DNA, 1530 bp, Oryza sativa
  ref <308>: DATABASE ACCESSION NUMBER: AK102563
  ref <309>: DATABASE ENTRY DATE: 2002-08-28
gaacgcaaaactctccccgcgcgccacggcgcgtccgagaatagccacagccaccccgcgcgcaacgccgcaacgcccgcccgtcgcgcgcaccagcgccgtcgcgcgcggcgcgccaccccagcccccaacacacaaaagcaacgccaagcctcgcacgcgcgcgaggccgacgcaaggaggagaggctgccccggggtgagagagagatcacccgcctcgccgcccgcccgcgccgcggcggatcgatggagctgttcgagcgcgcgaggacggtgcggctgcgcggccaccatgacaagtacctgtacgcggaggaggacgagtcgcgcgtctcccaggaccggagcgcctcgtccccgaacgcgcggtggtccgtcgagccggtcccccacgcccccggcgtcctccgcctccgcagccactacggccgctacctctccgcctccaacgagcccttcctcctcggcgtcaccggccgcaaggtcctccaggccctcccccaccgcctcgactcctccgtcgagtgggtccccgtccgcgacggcgcccacgcccgcctccgcacccgctacggcaactacctccgcgccaacggcggcctcccgccgtggcgcaactccgtcacccacgacgtcccccaccgccacgccgggtggatcctctggaccgtcgaggtcgtcgaggtcctcccggaatccctcgtcccgcccccatcgcctccgacgacgaccccgccgcgccgcattacaagacaccttctcgcgggccctctcccgtgccgacgccggcgctggcgcctgcttcgccgccgcggcaccgtccggcgagcccaccttcgtacttagcgcggccaccgccgccgccaccgggctacatcgagccaccacagggatacatcgagccacctccaccggagcccaccctggcgagaattgagtccacagaatccttctcgctgccgctgcacaaggtggatgggcgggcgatccactaccacattggggatgacaacggcgacatcggcgatgatcaggaaggacactcattcacgttcaacgggactagcctggaggagcttttggagaggttgcaggaggagacggggctcaacgacgtgattatctgctctcgtagcccgatcaatgggaagctcatgcccctccgcttgcagctgccgcccaacaacgccgccatgcatatcgtgctcgtgcgtgagtcatcaaaagtggcaaaatcatttccatgaccatgtggtaaaatttgaagagggtggtgtcagcgactcaaatcaagcaagaactgtgcatctgttgtatatattgtaatccctgtttattatcagttccactggctaccataatcaagtattattcttccatcttcaggagatctcattcttgtaagtatttgcttctgtcaacttttttatcatttattcaacaggtagagtgatctctggtagctaaagacccttcaaaatgcctatcctgtcattcctcagttctatagaataaactattctctagg

SEQ ID NO: 27122 - DNA, 1299 bp, Oryza sativa
  ref <308>: DATABASE ACCESSION NUMBER: AK102564
  ref <309>: DATABASE ENTRY DATE: 2002-08-28
gagacggcttccttcttcggttcttcctgccgccgccgccgcctctcgccgtcgccggcggcttctacctctcgtttgcccttctggtgcgcccgatctcttgcatagcctacgacaatggccacctccgcctacgcagccaccgtcgccggggaagcagcggcggcggcggcgtcgccgtcccgtcgtgtccttgccggtggccgacctcctccgccctgcatctccttcctctccaaatcgccgtcctggtgcgcctcgatctctctccctccagggccccgccgcgccgccgccgcggccgaggagagggtggaggaggaggagccgacctgggtggagctggagccgatcggcagcgagcagcagctggagcgtgccctcgcggaggcgcagcagctcggcctccccatcgtccttctctggatggcaagctggtgcaggaagtgtatatatttgaagcctaaactagagaatttggcagcagaatgctatccaagaattcggttctactgtgtcgatgtcaatgctgttcctcaaaagcttgtcaatcgtgcaggagtaacaaagatgccttcaatacagctgtggagtgactctcaaaaacaggctgaggtgattggtggacacaaatcctggctagtaattgacgatgttcggaggatgatcgatcaggaggaatgatccattatgtcctttagtgcaaatgatgatgtgatgatgtccaacaggaagaatctttcagtatagcaaatggagaaatcagaaatcaaaagccagtatgaactcctttcaagagatcgagccatatatttaagtatcgaatcgacgaaattactacctctacagtcaaataggcactactacacaaggcagcatttcaatcgtgttctctccaaatttggggtcgacagaatttcacaacctgtggctgcattcctgtggtgtccttgatgtatccatgtgtcttgtttggaaatctatgcaattaaaggcaaagacttcttgctcatgtactgtcacagtacgggcaagcatttaaattagtcattagatgacaataatatttagtcaatgagccttcagagggcatgttgaaagtgttatggttccaaatccatatgctgcacaactgtgattgacttgaactactagtactacaaaagatagctacagtgtcagccttttgcaaagcaggtgttgctagttttgttcagaatagaaaaacaagcatgtatgtatatgttcctgctgaacaaagtatagttatccttaaagttaattgggattagtggaagc

SEQ ID NO: 27123 - DNA, 1585 bp, Oryza sativa
  ref <308>: DATABASE ACCESSION NUMBER: AK102565
  ref <309>: DATABASE ENTRY DATE: 2002-08-28
gatcctcatcacatcctctttctcattcattctctccctacttttgcctggcatttgctttgcgttcgttaaccctagattatcttagatctggaagaagctctcttaattttatagagacttaaccttaatacaaataacagattgtttgttcccccaaagtttgggggttcaactgaaaccccatgcccccccatgtcccaagttggatccgccggtgagggatccaattccatggcggctgctcctcctcctcgcctcctcctcctcgtcgtcctcctcctcgtgccagtctccaacgccatctactgcgaggaggatgattgctatgatcttctaggagtcaagcaggacgcgaacgtatcggagatcaagaaagcctactacaagctctctctcaaacaccatccggataagaatcctgatccggagtcacggaagctgtttgtcaagattgccaatgcttacgagattctaaaagacgaatcaactagggggcaatatgactatgctattgcacatccagaggaggtttctacaacactgctcagtactatagggcatactatggccataaaacggatcctcgtgctgtgttaattggccttcttctaattatttcagcatttcaatacttaaaccagttcggaaggtatagtaaggccatagaaactgtgaagcaaactcctgcttacaaaaataggttaaaagcattggagtttgagcgaacaggaggaatttcaagcaaaaagaagggtcacaagcagatggataagaaagttgaagaagtgctaagtaacgaagttgagttgcagatccagggggttgaaaaaccttccttatggagactctatggtgttcagtttatacttctgccatattccataggcaaggtgctcagttgggaattttgttggttttggagataccggataaagaaattaccatatgcatgggaggatgcatgctacttgactcggatgtctcttaagatacctgctaatacatgggaaaatattgatgattataggaaggagaatcttgtcatgaaacgcctctgggaaaagaacaatatggagaggtatattgcagagatgagaaaggaatcaaagcgtagaagatagctgtagcatattcaacaagaacgtggaccgagaaccccctggatgtcagcaacccaactcctatttgtcaaagcttgtgtcacagtacgttgctttgttgcccttttagggattaaaacaaagagattaggagctagtttagcaatcgtcttcccttgcagccatctgtcactccaaaacttggtaatttctccatttcaaactgtagttttgaaaacatcaaaaagggagttttgatggataaaccagcccaaggccttgaagagtctgttttttttaaccaaagccatctcatgtgcaaagcccaccccatcttttcaagattaagaataccaagttctcccaaagataggggccgacacactcggtcccaacaaaccaagcagttcccatgggttccatgtacaatacaaattaactacgtaattaattgagacaatacaaattaattatttatgttc

SEQ ID NO: 27124 - DNA, 1770 bp, Oryza sativa
  ref <308>: DATABASE ACCESSION NUMBER: AK102566
  ref <309>: DATABASE ENTRY DATE: 2002-08-28
gtgaagagagtgaaaaaaaaaaaaagcaaaagcggcgacgccacactagccagcggcggaggcggtggagaggagaggagaggggagaggggggaagcaaagcgcgagcggcgatggcggcgaggaggagcagggtggcgttcgtgctggtggacgggatcggggacgtgagcatcccgtcgctccgggggcggacgccgctggaggcggcggcggcgccggggctggacgcggtggcggcggccggggtggcggggctcatggaccccgtcgagccggggctcgcctgcgggagcgacacggcgcacctctccctcctcgggtacgacccccgcgtgtactaccgcggccgcggcgcgttcgagtccatgggcgccggcctcgccatggcccccggcgacatcgccttcaagtcaaactttgctacgttggatgaaagcacggggatcattgtcagcagaagggcggatcgacactttgaggaggaaggcccgatactctgtgctgcattggatgggttgaagctcccatcgtttcctgaatatgaagtgagagtcagatatgctactgaacacaggtgtggtgtggttgtgaaaggaccgaggctgagtgggaacatttctggaactgatccattgaaggacaaccgcttgcatctaaaggctgaacctttggatgattcagaagaagctaaaaacacggcagctgtggtcaatgagctttctaaggagattacacgtatactggtgtcccatcctatcaatgcacagcgctctgccgaggggaagaacattgcaaatgttgtgttattgcgaggctgtggtatccggattgaggttcctgccttcgaaaccaagcatggacttgcaccatgcatggtggctcctacaaagatcatagctgggctggggctctcactgggcattgatatccttgaagcacctggagcaactggagactatcgaactctcttgacttccaaagctaaagctatagccaaggcactgtctgctcctctggatacgccacctcgtgtttttgtgcctggagaggatgaatataaatctggaaaggaaaatggatatgactttgggttcttgcacataaaggccatcgatgatgccggtcatgataaggctgtcaagcttaaggtactaggcctagaggctgttgatcgggctatcgttcagcttgcaaggctcctgtgggaagctgaaaagtctgggaaataccagtatttcctttgtgtcaccggagaccactctactccagttgagtacggtgaccacagttttgaacccgttccttttgtgttgtgccgacttagagatttcgtaggagctatgggggaggacaatgttatcaacttccccctggacgatttcctgcttccttcagttaaatctggagaagatgtggcagaaaacatagatgtagctgatcgcaagtctgatcagcgcaaagctttcagtggcgattctgtctttgaattcaacgagattgccgctgcaaggggctgccttggacgtttccctggaagtgagatgatgggcatcatcaagaagttcatcaaagcgaagaacgattagtgccagttcaacatactgacgtttgtgtaatctgttgaccttgaggcttccatgtctgtaataattgcaaacaaggatgtattcagagaaccagctcagtctgagatgaataaggcttctcatggatcttgaatcttgcactgaaaagcataaataatctgacctgctgtgtacatttacc

SEQ ID NO: 27125 - DNA, 3006 bp, Oryza sativa
  ref <308>: DATABASE ACCESSION NUMBER: AK102567
  ref <309>: DATABASE ENTRY DATE: 2002-08-28
gatgccaggaaagagaagaagaagcaattggggagaagccaagccaaggttggggaagggaagggaagggagaggagaggggctcgccgatcgatccctctccgcctccgccgtcgaaccgccgcgtcgagtcgagtcgaatcgaagatcgagccgctcctccacatctcccactcgcggtcgccatcctccagcgtcgccgcgcgcggctgctccgcttcccgacgccgctcgccgctcctccagctcagctccccctcgcgcgcgtctccttctatctctctctccagcgaccagcggtggtggccgtctctagcgccggctgtcgttaggggagaagccgggtactcgtagtaggttctggcgtgacgttttgaaggactgtgatgtgtgatccccactggcatgttgcatcctaggttcctggttgcttgctcaggctccaagttgtgcttcatctccagttgccgtggtagctatggggacatggctaggcgtggcaggatgatacctttccgcctcatgggctcgagcaggctgtacgagtgtagctccaccctcccggtgttgatcggtttcagttgatgatttctttggagactgaaagaaagattcttagggagttcatcagaaaggattggataagtgcattgtagttgtaggagtgctaggagcccaaatcggtgacatttctttcagcgtttcgctgaacatagtgtagatttgcctgcaatgggtttgcctcaggttaatccagccgaggaagcgcctacgccgtcaagtaggcctgtgtcgagccctcgtagcttcgagggtgttggcgcctgtgatttggatgggcttcttggaggaagctcaagtagcagggtattcgaatacccgtcaatcggtgattctgatcggaagactgcattagacatcccgaatggatcaactgagtattctagagacagccattgctttgatagacctgcaggtctccgaggactaagaattgattcgagggatgcagattctagatcttctcataaattggatcctactgtccatgttcccacaatgagggttgtgggatttgagtcgggttctgttggaggttctgctataatagaaactgataattgtcatactccattcgatcagcatgaacttcaggcaaggaaaagactgctctcaccattgaaaaacgttcttaatagacagttccacggtgatatactgaatatttccgctggtgatgctagatttgaactttctgattcagccaggaaacttaacatttcgtgcttccaagatagtaaaaaagcaaacactggtatgctcgattcttttgagccacaagcctggacaaattctagatgctccaatggtagtccagaatgggatgccaataagattaattctaatttattcactgatggtcctttacttgggagcaaggagtccttagcttatcttgatcatctagctgctagtgcaaaattagcacattctccactctccttgtccccgcttagccctaaatttatgaacagaactaaggctacaggagctcaatgccgtacaatgagagatattgaacatcattttctagattcaagggaaaaagggggacccgatggaattaggatgctgagtgtgctagaagaaactaacatattacatgatgaatacaatgtcatgacccctaaaagaagttcatgcagaagatatcaaatctggggtcctgaatccacccctacttctccccgggttggttatggtcggagtttgagtctcccagtacgacggtcactagttggctcctttgaggagtcccttctatctggccggctttcttatggaaaagacaatcagataattgatggattcttagctgttctaaatattactggtggaaacttctctcctccaactcagaagctgccgttcgcagtaacaagcattgacgaggatagctccttattgtactattcttctattgatcttgctgggaggtcgtcagcaactaactgtagaagcccaaaactcgaaagaagcttaagcaataatgattcacgatcagccaaaagtcgcttacggatccctgttaagggcaggatacagctggtcgtgagcaaccctgagaagactccacttcatactttcttctgcagctatgacttgacagacatgccttcagggaccaagactttcatgcggcaaaaggtcactctgtcccccactctttcctcctctaatccaatgaaagaaggaagtaatgccggtgacattaatattggccccaaggctgagtctgtctcatgtggagaagttacagaacgggaaagttcagaatgctcatctgatggatcagaggagaaagacgcaaatgcaaaacgttgttcgttggacagtaacatgatggaatcaaataaacataactctcctgtgaataagaaaaataacaccgattctgatgattgttgctgtcagatggacaatttaggtggcaagaattattgctgtgcatcttctaggattaatgatagctcgggtggaggtgtgattcgctatgctctgcacctgcgctttctatgcccttcctccaagaaatcctcaaaatcgatgctacgatgcaaatccgatccatcatcggtgccatatgatagtaatgccgcgaaagaggacgatcgcagattctacctttataatgatcttagagttgtatttcctcaaaggcactcagatgcagatgaaggcgagctgcgtgtggaacatgacttccctgctgatcccaagtacttcgacataagcaattgacacctctgcttctcctccttgtgcatgcagctaagctctcatgtcatttgtgtacatagcatgcgctttcttgcgcacaaaaaaaaaatgtaaatatctttttaatccttcttaacttgtcatcactcatcagcccccgatgtatttatcagtcgcaaccaactgtacagtttcagtcttcaaataaaatgcaacttttagttc

SEQ ID NO: 27126 - DNA, 1593 bp, Oryza sativa
  ref <308>: DATABASE ACCESSION NUMBER: AK102568
  ref <309>: DATABASE ENTRY DATE: 2002-08-28
ggtctgcttaccgccttctactccgtcttcttcctcctctctctctctctctctccctcgttgccgtcgcgactcgcgaggaagactggtgttttgggggtacagggtttggttcatcgaggcgatggagagcggagccggatccttggaggcgcggccgggcgtcctcgtcgtcggcgcgcctggcgtcggcaagagaaccatcctctcccgactgcttgcagctgaaataccggacacacatgacttgtcatcaggtgtgctgtgtcaggggtggaacattgacacaaagtactactcagcagatctttctgtttggacggcacatcttgggcaagggttttctcttgattccctccctcatctcgaccagttggatgctcttgttatggtcttcgatatgagtgatgaatcatccttccttactctccagaactgggtttctagtgttgatgttcagaggtttgaaattctgttgtgcattggaaataaagcagatcttgtgcttggccatggtgcacacgtagaatataggaggcgtatgcaaaagattggcgagtcaagtactgatccacatcctgaatatttggattttgggataaacgaaagtgaaggttgtggattgttatcagaggaagaaccacaaatagagatcagagactccgcttcacattggtgcattgaacacaatattgagtatgtcaaagcttgtgcttccaatgctgactttgataaatgtctatcggtgaatggagatagtcaaggcttagagcgactccttggagccctttctgcacacatgtggcctggaatgattctgaaatctggaaacagaataaccgttccatccttggttgagaaagaagaatctacagatgatgaatccaattacgaatttgagtacgaagttctgtcccatggatctgatgaacaatgggaattcattggtgagtcaagtacgtcaagagacttggagggattgaatgaagatacagctactcatgataaaactaatcaggttgtggatgctgatgctaattcagtggcatccaatcctcttccaaatggcagaatgacagaaactgctgaggaaaaactggtacctcagagccacaaaagcgaggttagtaatgatatggataacacacaagcagatgcttcagagaaactgcaagctggtatcccagagggtaacaagctatttgaagatgagcattacggtctagatgatctggagcggctaatgtcagagattggcaacatgcgctccaatttaaggctcatgcctgacttccaaaggaaagagatggctgccaagcttgccatgaaaatggcaaccatgtttggtgataacgacgaagagggctctgaagatatctgattcaattcacggagcccaccttttgcatgtcttcaaacatatgttcccagtttatggcgtgctgatttgtacaggcagatgggccgcaggccgtgtaggcatttccatcggctatcataattcccagtgaaattttgtaccttagtagttccatatttaccattcttactgctgtaagttgtatactgtattatttgaaattaaagttctct

SEQ ID NO: 27127 - DNA, 1212 bp, Oryza sativa
  ref <308>: DATABASE ACCESSION NUMBER: AK102569
  ref <309>: DATABASE ENTRY DATE: 2002-08-28
gagaatgctgtgttaggcaaggtagagtacactagtcacaaggctcgctctcttgcttaagcttgtgagcttggaaaagagtagtatattgagctgttgcttcgcttgctttagtttgcttgcttaccaggagaaagatatgaggaaggaaattgtcatcaggctgcagagctctgagaagggccacaagaaagctatcaaggttgctgctgcagtctccggtgtggaatccgtgacgctcgccggcgaggacaagaacctgctgctggtgatcggcttcggggtggactccaacgacctcaccgagaagctgcggaggaaggtcggccacgccgaggtggtggagctgcgcaccgtcgacgccgacgagctcatgcgcgtcgccgccgccaaccagtacccgtaccgctactaccccggcgcgccgcccccggccccgtactacggcaacggcgggtaccctcctcctcaccagcgcggcggcggcggcggcggcagcggcggtggctactacacgccgatgacgatggccacgggtggctactacggcggcggcggcggcgggtacccgcagtacgggcagtcgtcgtcgtacccgcagtacgggcagtcgtcgtcgtactacccgccggcggcggcggcgacgacgaacacgcacaccgtcgtgcaccaccagtacgccaacaacgacccggacagctgcgccatcatgtagctgcaccagctagtgtacgatcgatgctgcttctgctcgcgcgcgagcatgccggccgtcgtcgtctcgatcgtcacgatgatcggatgatcggaggacatattgcgaccgaatctagtagctgattgtcccaatcgataactggcccaaagtacgtagatataccttgaattttctgtgtgatgatgaggccgatttgattccgtgtgattactgaacaacagacaggtacgtacctgttgtctgaaactctgaagtctgaacgttatatgtgcagtagtatatgtgtagtagctgctcccggcctccaagtgtatacggtgtgcaagtgtaaattaggtgtactagggagatatatataaggtgcaagcgactttatagttcatcaaagtgtgctcatttgtacatgcaaattaaatctgtacatgcgactttatagttcatcaaagtgagtaattctgtagtacggagagcttgctgttcttccctctttggcc

SEQ ID NO: 27128 - DNA, 2251 bp, Oryza sativa
  ref <308>: DATABASE ACCESSION NUMBER: AK102570
  ref <309>: DATABASE ENTRY DATE: 2002-08-28
gctttgtttctcttaaatgaagttgagtttggatttgagatttggtgagaatgtatttcatatctacaccaatctctagtaattttttttcatgaatttacaaaacttttaggtatgattttcacgagtttccaacatttagatcattttcatcgatatgtcctctctctctctctctctctctctatatatatatatatatatatatatatatatatatatatatataattttatttttttgtgaagtttgtcattgatgtttgagtgttactttgagttaacaaacaatatgtttgtgcagttgttgaatctatttgttgtattacattggaggccggagaacttcattgcacctaacaaattgttggccacactttgtttgccatgccacacctatggcaaattgagttgtggcaatgttaggcaacaaacaaacagaccctaagattcttaacatgggacaagcttagagagaaacgcaggtgcatgattgatctttcggtggtgttgtagcaacactcatgtcaagattgctttgttcgctgattttttttttttttggtgttacccccttgataataacgccacaagtttggcattaaaggctcacctggttccatcaaatttgagtagttgggttgactggtcaatgattgtttcataaaattaataatgcacaacatgaaaggaattatatcatttttataacttgaatttgctgttacctaagaataatatggctgaggaactatgctggtttctagtgtacatagttcatattgggttaaatggccacagtgcatatacacataagcagataatgtagtcatttatagaagacaatacaagtgacacaccaatgtatatgtattttcatccacaagatcagggttgtggaacctaccagcactaacagattcggcattttaagatttgagtggtatttcctcttgtctcttccatgccctctctcctctgtcccctactcccctttgttgaactggacttgactcgtgaggatggtcatagtcaatggtaaatattggttcaataagttacacctgtgatgttacctggattttttattttgcgctggtcaattttcattctgtttaattgctttgctcatttgtagtgtaagtgtcctttctaacacagacgtgtctggtaactgataaaggttctagatgaagctgatcgaatgctggatatgggttttgaacctgaagtcagagcaattttaagccaaactgcatctgtacgtcagacggttatgttcagtgctacatggcctcctgctgtccaccagctagcccaagagtttatggatccaaatccaataaaggttgttattggatcagaagatcttgctgctaaccatgatgtgatgcaaattgttgaagtattggatgacaggtcaagggattcaagattagttgctttgctcgataaataccataaagcacagagaaacagggtgttggtttttgtgttgtacaagagagaagctacgcgagtagaaacaatgttacaaagaaggggttggagtgctgtttctgttcatggagataaggcacagcatgacaggacgaaagctttatctttatttaaagaagggtcatgtcctttgatgattgccactgatgtcgcatcccgtggacttgatattccagatgtcgaagttgtcattaactatagctatcctttgactacagaggattatgtccacaggattgggaggaccggtcgtgctggcaagaaaggtgttgcacataccttcttcactcaagagaacaagggacttgctggtgaacttgtcaatgttttgcgggaggctggtcaggtcgttcctcctgcacttacaaaatttggcacacacgtcaagaaaaaggaatcgcaaatatatggatctcatttcaaagaaatcaaagcagatgctcctaaatcaacaaagattacgtttggtgattctgatgaggactagcaacatttgctggtcttttcttcgttgcgttctgaagttttgatgcttggagtaggccaaatattcgacagcaaaatattgcctttcttgaagggagaacccctctaacagtatcattgtatacctaggttagtttagtatcagtgatttcctaccttgtccagaccatcttattttatacttggttgtatgtactgcaatttgcttctcttgtgttggaaaaaacagtaaaatcagatatgtgctaaggcaccattggcagtcc

SEQ ID NO: 27129 - DNA, 2001 bp, Oryza sativa
  ref <308>: DATABASE ACCESSION NUMBER: AK102571
  ref <309>: DATABASE ENTRY DATE: 2002-08-28
gagatgccaagcatgcgagtcaccactgacacctggccccgccgcgccgcccaagaacctctccttcttctcctcctccggtcctccctgatgaaaagcgcgtcactgcaagcactgaacccaaaccgagccatggcggccatggggcgatctgtgcgggtggtgctggactcctccgtcctcctcgacccatccggtgttacagcggaggaggaggaggtggtggtggcgctgcggcctggggcggaggcgctgctgcggcgcctgcgatactccaatctccgggtggcaatttgccatccggagggcttgccaactaatgagtcaggttttcttgagaagactgcaaaattgtactcctttggatatatgccacttacatctccaagtgggagcaatttactaaatgagttgatgttagaatggagtggaacgaatttttgcttctatgtgacttcaggagttcatgaaggtctactatctgaacttcagaatcacaactgggaagttattgccatgggtaatgaagatgtcataaagaactctggagttatacatattagcatgcttcaagagttacttatcactttggcaacttcaataaaaaaggaaataggaaactcatctgctttcgtggttggctatgttatgaaacaatcccgtgaggaagactttgccaagagaggagcattccccatttatcctagtaaaaacgatcttatctttgttccactctcttttgaacttcccttagcttctcaattgcaagaagttgatctagtgctacacaaaataactgatgagatcatcaacattgatccaaactcttccatcagttttccgaaggggatttcattttctccgggaatgtctgaaattataaggtttgtagaagagcactgtgatttttgtgtaattgatccattcaaaaatatttatccattgctggatcgcatccaaattcaagaaattctaatccgactggaaggacttagcgccgaaggaaggccaaaactccgagcaccatgctttttaaagattgaaagcttttgtggcagtgaattacagaaacaactagcagaagctaagttatcctttccgctcattgtgaagccacaagtagcatgtggagttgctgatgcccacaatatggcattgattttcaaaatcgaagaatttagcaaccttagtgtgcctcttccagctattctacaggaatatattgaccatggatccaaaatattcaaattttatgcaattggagacaagatttttcatgctattaagaactcaatgcccaatgcaagtcatcttaaatcatcatcaggaggcaaacctcttacattcaacagtttgaagactcttccagtggctacaaaggagcagctgctgcaaaacgaggtgcaagatagcaaattgttggacattaatctagtagaagaggctgcaaaattgctgaaggaattgctagggcttacaatatttgggtttgatgtcgttgttcaagagtccagtggagaccatgtcatagtggacctaaactatcttccgtctttcaaagaagttcctgacaatgtggcgatgcctgcattctgggatgcaatcaagcagtcatatgagtcaaggaagcagatgacacaaacttagttcaagttctcaagcaaatgatttgcatacaggcgacaacattcatactaattggaaagggagaccgctctttgggatcgaattaactctgacctctagcagaggttgcttgtcacttagatttgtggaactgcttgcgatgaacattgctggcagagatgtacacctagcgctaataatttggggaacaaagtcttttgtgttccctgagttaaaacccttagcagaataagcatgcagaagcaactctcccgtgttaaactaattattctgttgtgcagtgtaccatttacatgtgaattttggccactctgtaaacactctgctgaaatgagaaattgcttactgatatgc

SEQ ID NO: 27130 - DNA, 2393 bp, Oryza sativa
  ref <308>: DATABASE ACCESSION NUMBER: AK102572
  ref <309>: DATABASE ENTRY DATE: 2002-08-28
ggctcgtcgtcgcgggcgcaatcgggtaggtcgccggcggccgcggttgggtgcgcgagagcggcggcggggtcgctctctttggcctggagtatcctcggttggaatcagattctgacggtgcgtgtggtctggtggcaatcctagagacagtaaagttgatgatctcatcataagagatgtttattcctgaattagataaccggtctgatcctcaggagccatcaagaaatcctggcatttggcaatgcaccatttgcgaacacggaaatgatgcaaaaaaaaaatcatgtgagcaatgcggtgttcttcgatatttctcgctgtatttcaataataccccttgaagttgatggcagagctaaacggagagacaagcattatgcggtatctgtactggcaagaactcttttctcaccatccagtgccaagtcaaaagacgttgttctttctggtggctttaaagctagcagaaatgcaacaggaagtgcacgagctacgttggatgcgctgcataagacatacatgacccgtaaagaacgccacattaacatagtgcctttcaagtttgatacaccatctccggatgacgtggtcgctacaggactaaaatcgtcgagaagttttagaaaagttgacacagatgctccccatgtcactgaaaagagggtgatggataatgatagttctacacctgagaaggatacaactgcagactcaaatttgcctgtaaagtcgaatgaattcggtgaaagtagtgagagtgtttctgttggtagtcaaaatgaaacactttgcttggaccatgagctacagcatttgagtttggagaggaagtcacaaaaaagtaaagccaatattaaaaagccagtttcttcatccctgtacaagccagaaccatggatgctccagcatgaagatgaaggcatccctagacaattaaatcttgctattgttggccatgtcgattctgggaaatcaactctatgtggtcgtttgttacatgccctggggaggatttcaaaaaagcaaatgcataaatatgagaaggaagctaaagaaaaggggaaaggatcatttgcatatgcttgggcaatggatgagagtgctgatgaaagggagcgtggcattacaatgactgtcggtgttgcatactttgacaccaaaaattaccatgttgttttgctggactcccctggccacaaagattttgttcctaatatgatatctggagcaacacaatctgatgcagctatcctagttattgacgcttctataggatcatttgaagcaggtatgggcatcaatgggattggacagacaaaggagcactcgcagcttgttagaagctttggcgtggataacttgatagttgttgttaacaagatggactcggtggaatattcaaaagagcgatttaattttatcaaatcacagcttggtgcttttctgcggtcatgcggttacaaagactcagcagttgcctgggttccaattagtgcaatggagaatgagaacttaatgacaacagcttcagatactcgactatcatcatggtatgatggaaattgcctgttgaaagccattgacacattaccgcctccttctcgtgatgtttcaaagccactgcgccttccaatttgtgatgtcttttcgtcacataagctggggcaagttgcaattggtggtaaagtagaggttggagcaacccgaagtggttctaagatcctcgtcatgccttttggggagttagctgtggtgaaaactattgagcggaattcctctagttgcaatttagcaagagctggggacaatgtcgctattggtttgcaagggattgaccctagtcatatcatgcctggcggagtcatatgccatccaggttatcctgtgtccgtggcttcttgcttggagctaaaaattttggtcctagatatcactgtaccaatactggttggcttgcagtttgagctccacatccatcatgcgaaggtgtctgcaagcatggtgaaaatactgtcattgctggagcagaagaccggcaaagcctcaaagaagataccacgatttctcacctcgagacagactgctgtaatcgaggtgaagctggagaaagaggtatgcgtggaagaattctcaaacctgaaagcgctaggccgagtgttcctacgatctcagggaaacaccatcgcggttggcattgtgagccgagtacgagagcaggcttagttccagtggtttaatcaaacataacatgtatacaagttgtatgtggtagatcagtacgttataatcagtaatacggagtagaaaacgtgctggttattcacgtcgaggtgaaaagggccctgtcatgaaacaataacaaacttcatcgtaactaacttaacgcc

SEQ ID NO: 27131 - DNA, 1973 bp, Oryza sativa
  ref <308>: DATABASE ACCESSION NUMBER: AK102573
  ref <309>: DATABASE ENTRY DATE: 2002-08-28
ggtctcgtctagggttaggttccccccctcccaacgcccaacccaaccccctcgcccttccagaaccttccagaaggaaaccaaccgacccccgccgcgatgtggcacgaggcgcggaagtcggagcggaaggtccacgacctcatggacgccgcgcggcggcgggcgcagcgccgggccgcctacctcgcgcgccgccgcggggacccgcaccagtccctccaggtctccggcgcgcgctgccgcgtccaccgcgacgacgcgctctaccaggccaccgaggaccagcagggactgataccatggaatggaaaacaagatgttttgattgacagatttgatggccgcgcactacttgacttcatccgtgactctagctctcggcctttccgggtccaagagaagtctgaagaagaggaagagttagaggagtttgttaattttgaacgttaccgggatttgattaagcatcgacgtagaggattttctgatgaggcgggtttgcagcatgtttcgcaagagttggaggcaaaggctattcttccttttagctttgagaaacctcaatcctcacagacccctgctagcaaaggcacatattcacaggtgggttactcatataaaggggatggaaatgaagaatctgaagatctaaagagtgatgaggaggatgaagaggaagaagatgaagaggatgaaaagggcttcagtagtgatgacagcagtgatgaacgaatggaaagtatagccaaggaatttggtgtaaaacgatataactggcttgtttacatggacaagaaggccaaggaagaggaaaagcgccagaaagagattatcaaaggcgatccttccattaaaaagctgagccgcagagagagaagaaaagtttctcaaattgagagggaaagagagcgggaagcagcacgttctgttggaagggtatcttatcgtgatccttatagggaacaaaggagaagtccgtcatatgattcgtattcaaggggcagaagatcaaggtcaagatcaagatctcgttcaccttcgtattctagacgccatggccgtggtacacatgctgaaagcaactaccgaagcaagccaaagactccaagggttgaatacatcactgaatttggaggttcagatgacaccagtgacctgaaagttgcagggatatctccaccttcatctccaatacgagttggcatacctaaccggtcatcaggtggccaaattcttgaggcacttcacagtgatcctgcatcttctttgtctgtggagcaggagaaaagtacaaaaaatttgaaagcgcccaccagcacatcagcactagtcaaactaagcaagggtgccactggggggcctggcaaaaccgtccggactgaaaagaaagaaacaccacaagaacgacttaaaagaataatgagcaaacaacttaacaagcaaattcgaaaggacactgctgctgagatagcaaagaaacgagaacaggaacgccaaaggcaggaaaaacttgcggaggtaggtcggtacaggggtcgaagcaggagccttagccgatctccaccaagaaggcgacattatagcagaagccgtagtaggagtagaagtccaaggaggtaccattcacgatcccagtctcattcccgttcgccttctcgctctccaaggtacagaagcaggtcaaggcactgaataccagctgcaccaatcaccaatgaagtaacccgtctctgtactctatatattcacattgtggtgtttttagattttatttgcttttgcttctccacgttattatgttttaattcttcttgactgttagaagcaccctggatccctttcaaccttgcttggtgtacgtagctgtatctcttggtttaaataagagggtcccttggctacaagacgcatgcacttgtcacttatcagctttagggtacggctttttattgagcacgaggcacaatttt

SEQ ID NO: 27132 - DNA, 917 bp, Oryza sativa
  ref <308>: DATABASE ACCESSION NUMBER: AK102574
  ref <309>: DATABASE ENTRY DATE: 2002-08-28
gagggtttcctctccgccgcgccgcctccctcgtacctcgtcgcggatctgtgctcgcaccaccggcggcgccatgagtaagttgcagagtgatgctctgagagaagcgatctctcaaattgctaatgactctcgtgagaagcagcgcaaatttgtggaaaccattgagctgcagattggactgaagaactatgaccctcaaaaggataagcgtttcagtggttctgttaagctgccccacatccctcggcctaagttgaaggtttgcatgcttggtgatgctcagcacgtcgaagaggcagagaaaatgggcctagactatatggatgtggaagccctcaagaaaatgaacaaaaacaagaagctagttaagaagcttgcaaagaaatatcatgctttccttgcttctgaggctatcatcaagcagattcctcgacttcttggtcctggtcttaacaaagcaggcaaattcccaactctggtgacgcatcaggaatcacttgagtccaaggttaatgagactaaggctacagtgaaattccagctgaagaaggttctctgcatgggtgttgctgttggcaactgtgctatggaggagaagcagatcttccaaaatgtgcagatgagcgtgaacttccttgtttcccttttgaagaagaattggcagaacgttaggtgcttgtacctgaagagcaccatgggaaaggtgtaccgagtgttctaagttattttctttaggcttctagatgttttggagactaagctacttgaaacttttgctactttcccagtcatcaaattttgtgcaacagctgaggattaaggaattcggatttaattgtcctgtactaagttgcctctctctttggttgaacatcattacattttatccatcgagatcattctgtgatgaccct

SEQ ID NO: 27133 - DNA, 1548 bp, Oryza sativa
  ref <308>: DATABASE ACCESSION NUMBER: AK102575
  ref <309>: DATABASE ENTRY DATE: 2002-08-28
tgggagcggagaaagggggggaaaaaagatggaaactaaccctaatctcgatctcgacggcgagggcggcgccggcgccggcgcctcgtcgggccgttctttgctgccgaaaggaagtggtaggttccgccgctcgtcggcccgttgttcgctgccgaaagggagtgataggttccgccgctcactatcgccggtgaactcgcggtcgctcctagaaggacgggatgtgcgggacgctgttttccccaacaaactcttcgataaagccttcggccagcctcttccagcgcccgtaacgccgtctctggtaccatcgcccgcttacatcgtgcgccccaacctgccgaccccttccgagccacacggattgaatttcaatgccccacttgttggcgatgggaagatgcaaatggatgtggagggtgccccacttgttggcgatgggaagatgcatatggttgtggagagtaccccacttgttggcgatggcaagatgcatatggttgtggaggaggaaatgacaacagctctggctgttcatcagccttcaagtcagagaagtcagaggatcatagtgattgagatgatggcagatgttggctcaccttcctctcctggctccccctactcccctagttccccttcttctcatcgagacgctccctcggtccgcttctcctctcgaggcatccgtaaccataagatgcctcagtgtgatatagacagatcagacactgaagaagatctatattcatcgtgtgaggaggatccctacttcaatagccttgtggatgatttcatcggtgtagttaccagcaccgatctacttgcatcatcacctgaaattgactatatggcagctaatcaaagtcaatctcttttctatgctgaaagtgcattaaaacattataacaacaatgatgagaacaagataaagtatgagttaatcagtgccattacaagcaatgcaattatagaccggagtggttatggtcatgtaaactttgttgcaaaaggggatctacctgattcagtggatgagttctttttcgcagaagtacgttgggacattgattcttatgtgccagtttgcatggtctccttagaagggaaggaaaaatctggtggttaccgtgacattgaagtcgactatccaagaggaggttttgtgggtgttcccgtcgataagaatcattgctatgcttgtggcgatggactcaagcatccagaggatggaacgttatatgagagtggtcatatcgcttccggcagttattatgactagcagttttattgaaattgcatttttagaactttatttagctagactagaagtgtgcaatcctttatatctatgctaaactaaattagtacggagtatactcaccattctactttgtatacatcttgtttgatttgggttgaactccgagttgtatgtgatacacccgaaggcgttattatcgttgcaaatattgaaaaagtcatagaaggtggcaatccactcctgggagtggggatggatatatgttgtcacaagtatgatcc

SEQ ID NO: 27134 - DNA, 973 bp, Oryza sativa
  ref <308>: DATABASE ACCESSION NUMBER: AK102576
  ref <309>: DATABASE ENTRY DATE: 2002-08-28
gctttccctccgtttccacacacctctctctctctcttcttcttctccgatggcctcctccgcgcgcgacctctccggcgacccaccggagtccacccggctgcggatcggcgacgacatcgcctggtcggacgtgggcggcgtctacgaccgcgacgactcgctcaaggagaacaccaaccccaagtgcatcctcaagaaccacctccccggcgcccacaacggcgggtcgcagaggttctccggcaacctcaagcccacggcggcgcccatcatcgggatatcggggaagctcgggcagggcggcaagaaccgccaccacccgtcggcgatgttccccaagaaggtggccgtcacgggaggcggcggccgcaaccccaaggcggccgtccccgagcacgagccgacgtcgcccaaggtctcctgcatcggcaaggtcctctccgaccgtgagcgcgcgcgccggggtcgccggccggcggggcggatggtccccgccggtggctgctgccccgggctcggcggtctgttccgccggagtcactcgcggaagaagaacgccgtggagtgcgtcgaccagtccccgcctccgctgcctccatgggcgtcgaggcggggagagccgaaggaggtcaaggaggcgacgccggcggcggcggcggcgatggcgccggggttgggagggatgatgcggttcgcgtcggggaggcgggcggcggattgggcgaccgagatggagccggatggacgcgtggcgagatctgggccgttgtagtagaggactatttgggtttggtacgagtctctgttgctgttagttggtgccagtgctttcggtgtagttgagatgtgtacatactgcagttaggacacatttttttgggctccttctccatttaatttttgtttaatttttttggcttgtttttgtctgttgagatttgaatagtttgttgggttggagtgttgtatg

SEQ ID NO: 27135 - DNA, 1773 bp, Oryza sativa
  ref <308>: DATABASE ACCESSION NUMBER: AK102577
  ref <309>: DATABASE ENTRY DATE: 2002-08-28
ggcctctctcctcgtcggcgggaagggccgcgacgcgacgacgatgtgccggtgcgcggcggcgatcgcgagggcggtggtggagttcctcgacgccgtcctcgtcggcttcttcctctccttcttcggcccccacccccgcgaccgcgaccgcgacgacagccccggctccggccgccgcgattcgctcgcgcacaaggatcggctcggggagctgctctcggacgacgatgagctaggattgggagggaggggaggatctcatgaggatttggctgatgattgtggcagcgatgaggagcttcgatccgaggcaaatttcctcaagttatgtggcacactatttgaaacaccagctgaactccataacatatcctatcaaatcaatatggaaagttacattgagcatgataaaattcccacaaatgtactggcagtggaagcaactccagcatttgaatctaaatcatctggaggctttgaatatggggaggatcatatcttgacgcctcaacttaacactgaagatactgaacatcttccactagttaaatcagtttatcaatcagctatccgaggcaactcccccttccagaacatcaaaagcatcaacgatggttccagtgattcaccctttcatactcctctagtattgagagatgatatgcagacccccagaactgtttatacttcacataaaggatcgtctggaaagcgtgtgcggacccgcaaacaattcgcatatcccatctttagaccaacagagaacaagcttcagaagatgcaactttcagattctgccaagatgacacagcagatctcttcagattcagtggttaaaggagaatcactcaattcttcacatttccctcttgaggtgtctaagtatcagctcgaccgccaaaggctattggatgctggagagagatcaaagtccaattcagatgaaaatattgaggtgtgcagtctatcacgctggcttaaatcttcacccgcaggaaacacgaaccaaatgtacgatgagaacaatcttatcgaagagggacatgcctttatgacttctgaggataatgtggatgtggacaatcatactccgaggttgtccaaggctcgggattgccactgtattccaaacacaagtagaaaatatggagaggatcaacatgtcagctggcattccacaccctttgaggaaaggttgataaaggttttgtctgacgaggaggtgccccctacaaggaaacttgtccctggaaggcttctctatcttgaggaaagagtttgagcctgaagaaagagtgttgtggcgatatttgagttcaaacgtggatgaaatcgtatcatcgaactctgaagttgtgcactctcaaatgtggaccagcatgtcattgcacaaagtggactgaaacacaacttacagtactgcgttttctcttgcatcatcatcatatacctgccactgtgcttttgcttgctccctgttgttacgagacgtgatgctctgtacatatggtatgggctatacctgctatgatttcttaactgcttctacttctagacctttaggttgacaatgtaagtgtttttacttagctgtcctctagtttctagagccatttccccttcaggtacaagggatcaaattcaaatggcgtcgtatagcatagagcaatctgaccttctagttaaggcatttcatcgtgtatgcaacatgccctcacctctccttgttaatagatactgtcatatccacttaatatgtaatcatttgcg

SEQ ID NO: 27136 - DNA, 1798 bp, Oryza sativa
  ref <308>: DATABASE ACCESSION NUMBER: AK102578
  ref <309>: DATABASE ENTRY DATE: 2002-08-28
ggaaagcttaaccggtgatgagagctgctgcttcttccctgtccccggcggccgaccgcgccgcttcttctgcgccgagtcgtccatccctgagccgccgccaaccatgtcggcgccggacacggaccccatcctcggcggcgcgctcagcatctgctgctggtgctgcgcggcggcggcggtggacaccttcatggtcccgtccgggccgtacttgcgcgggcggcctcgcttcctcttgaccggctccatgggcgtcgcggacggcggcacggtgggtgagccggcgccggcggaggcggagacggaggccatgctgttgtgcatcaatggcggcggcggcggcgcggcgtccatctggaactgcatgccggcgagcgggcccgggccgatggactggaggatcgcggtggggctcatccccatgttgggcatgggtcggatgaccgacgggccgccgtgcatcccggcgagcggcgacgcgctatgcccgccgccgcctcatccgcccccgagcatccggtgttgctgctgatgctgctgatgctgatgctgatgctgctggtgcgcatagtatgacagttcggacggtgagaggagttctttgccatccatgcatggatcaccgagctccccccaacagaaacagatcaatcaaactgcttcttcctttctttctcctgttcttgaacaatcagcacgacgagacgaggacgaacagcaaggtgttgaagatgaagagtgagttggttgggggagaaggaaaaggaggggaggaggagatgagatactagatcagatgaaatgatggggggagagagagagagagagagataagatgacgcggttggcctacatgctatcgcagcagccgcaacgcagacgatgcaactaggccaagcgcgcgcaggcgcaggcaaacccaagccaagaaggcacaagaggacggcgagcgtgagagagagatgggcagcggacggagggacggatggcgcccacacaaggaggcgataagatttggttccgtttccttggcccaacgacgtcgaaagggaaaaaaggcggagccgagcgcgagcggcgcggcgcgggggtggatttgcttgtgatttgccttcctttgcaatttgctggctgcggcttccgtttcgttcggcgcgcgccactccattttgcgtccacgcgcgcggatgggctgggtgggcggtggcctgtcgctacccgcccactcgatccccgcccccacgctacagtccgatcgggacctcccctcgggtcccacctgtcagctctccacaagatgttttcagatatttatggcgctcgccctgtcgcccacgaccttttcttggttttcaaggttgatgcttcccaaagcttcacctcacctcacctcacctgaccaccaacggcggatatctcatgaacctttgtgttgggcggttcatagttcacgtaagacttggttgaattgttatatcgagatagtatgtctaagcaggagcggagctagaacgaaatgaagagagctgccactcacttattttactctactttagactgatataagtgcctaaatttggattgagggaggtgcatatatggtgaaaatagatgaactatagcttaaaaaaatttcttaaccgggttcctgggcacaccctatcctacctagctccgctcctgtgtctaagtgaaaaatatgcatataggtttctcacacacaccaactagcaaatgtcataaaaaattagaaaaaaataaacagttatttctaatagtactacacatatatgcg

SEQ ID NO: 27137 - DNA, 1164 bp, Oryza sativa
  ref <308>: DATABASE ACCESSION NUMBER: AK102579
  ref <309>: DATABASE ENTRY DATE: 2002-08-28
gacacccatcctccccaccccccaagcggcggcgagaccaaatcccccacttctctctcaatctctctctctgctagggtttatccctccgcgccgccgcccccggaagacgagagagcgccatggccggcggtcccgcggcggtgtcgttcctgaccaacatcgccaaggcggcggcggggctcggcgccgcggcctccctcctgtcggcgtcgctctacaccgtcgacggcggcgagcgcgccgtcatcttcgaccggttccgcggggtgctcccggagaccgtcggcgaggggacccacttcctcgtgccgtggctccagaagcccttcgtcttcgacatccgcacgcgcccccacaacttctcctccaactccggcaccaaggacctgcagatggtcaacctcaccctccgcctcctctcccgccccgacgtcgtgcacctccccaccatcttcacctccctcggcctcgagtacgacgacaaggtgctcccctccatcggcaacgaggtgctcaaggccgtcgtcgcgcagttcaacgccgaccagctcctcaccgagcggccccacgtctcagccctcgtccgcgacgccctcatccgccgcgcccgcgagttcaacatcatcctcgacgacgtcgccatcacccacctctcctacggcatcgagttctcgcaggccgtcgagaagaagcaggtggcgcagcaggaggccgagcgctccaagttcctcgtggccaaggctgagcaggagaggcgcgcggccatcgtgcgcgcggagggagagagtgagtccgcgcggctcatttctgaggccaccgccgccgctgggacagggctgattgagctgaggaggatcgaggcggccagggagattgctgccgagctggcccgttctcctaatgttgcatacgttcctgctggggacaatggccggatgctgctcggcctcaacgctgccgggttcggccggtgatccgtcactccaattttacccctttagttgcccaggcatccgctctgtgttacattaaactggaatgatggtatggggaattatgttatctgctacttttggtaatatttagtctggatgtctttgaacggaatgtgctaatctttgtgatccaaataagttctgggtctaagactcatttatgttc

SEQ ID NO: 27138 - DNA, 1555 bp, Oryza sativa
  ref <308>: DATABASE ACCESSION NUMBER: AK102580
  ref <309>: DATABASE ENTRY DATE: 2002-08-28
gagggtttaagccggcggcggcggcgaggttgtgcagatggcggaggcggccgtgaggtgcctccgggacgggcgcctcgacggggagcacgctccggcacttgccgtggcgagtaatatccagtgcggcccgctcgccgccggcgccatgctccacctcgcggccgccgtggcctccaacgccgccgcggggaaggcgcaggcgaggggactggtgatcgtggcgttcgatcggagcccggaggtgtatctcgacttcatgcggcgccgcggccttgatccaaatgctttgaatcgatgtgtacggatattggattgctattcagacccaattggatggaatcagaagattagaagtcagcagcaacaagaaagtggtgcagatctctgctcagcgaacaaagagaatgttacaattttcagaaatgtgaaggatcttgataaattgatgtgctccactattgatcttggaagagggtttgcaggagaaggcaaaatctatttttcaattgctgttgactcaattagttctatgttaaggcgtgcttcagtgtcatcaatttcaagcttcctcagtaatcttcggagccatgatcaaatatcatcaatattttggctaatacattctgatctccatgaacccaaattttcccgagcctttgaatgtctctctaccatggttgcttcattagagccagctgtggttgattctgtttatgaggaagaaattccagggaatatttctttcctggaggaaaattattctaaagcaaagttttatttacgcctaaaacggcggaatggacgggtcaagcacctttacgaggagttacatgttgagggaaatgatgttagatttgtttctgctccttctgtaagtacagaagtgagccaaagtctgttgcctaaggttcagttcaatcttgagctgtcagagaaggagtgcagtgacaaggcaaatgttgttcttccttttgaacatcaaggaaagggtgagcctatcaatatatacgacggacggagatctctcccagaggctcaacaagatagcaatttaactgcatccgctctcctggatgaagtaaaatttcctaaatctgcagctccaaagggtgaaattcattactttcgtgattctgatgatgagcaacctgactccgatgaagacccagatgacgatttggatatttgagttccacccatggtgtgagcaccttatctgcatacagaatgccttgatcgtacttgcgaggtaaccgatagccccgatcagaacttataatcatgagtagtattagtatttgttacacctctgttttctgttctttacactgatggtagtgtttttgtgacaagataatagaatgatagtccgtccgtgctacacactaccttgtactgttagtgcatgcattcagttatccccaaaatgtttaaaaagtgtttacatatgcaaaacagcaacaaactacaatttcttggggaaactaaaatggaagcaggcgaccttttttttccctttattaaaggatggtagacaaggaaagtttttatg

SEQ ID NO: 27139 - DNA, 1152 bp, Oryza sativa
  ref <308>: DATABASE ACCESSION NUMBER: AK102581
  ref <309>: DATABASE ENTRY DATE: 2002-08-28
ggaaggcacgcgagacggtcaagaaacaaacgggagttgcttccaaggcgaaggcgacccggtgacccacctctcctctctcttctcgccgtcctagcaagtagcaaccctcctcagccaagaaccacaagataacgcaactcacaaggcacgcacccatagattgatagagagagggacagagagagagagagatagagctcaggttgcaagcagatagaacgggtccaggtagcttcgcaatcaagaagaagaagaagagtgaaggaggaggaggagcaagagcaagccatggaggagccggcctcggctgatcccccgcggattttctggaagtcgaggaggagatcagcctcagccaatggccggagcttgcaacaagaacttaacaaagaggctgctgatgaacaactgaacaatcaggctcatgaagaggccatgaaaatagatgatgcaaatgcagtaagtactgacgacgatgttcatccagatccaaaagctaacttatctgagaagaggaaggcgctgtttgagcctttggaaccaatcaacggcaagcgcagttctgctgaaatgttgctcccaccaccagactttgagcccgcgtcatatcccaagggatggctggttggcaagaaacgcaagcttgtgaatgttgatgtggtggagagcatgaggaggatagcaatccaagaaatgaacagaaaggaccgtgagatcaatggcctgaatgaacagttggaagaaccccgagtgcttgagcttctacaaaagcagctcgcagatgagcgtaagaagcgaacggagatagagaaggaaaattccatgcttcatgagcaggtatctatgctgatgaacatgctcgatgaaaatgaagcctttgatgaggagggagaagcaccaccacctgataccttataggcttagattaagtaatattatcaaggttccaagttctacacatcttcggataccagtttaagagtattcccagatgtctttatcttgtgtaaaattcaatttatcttattttattttatggcttgtgtgtagatgaaggggttctgtttgctgtacctatttgtttctaggctgcaagtgtatgcgagatgcttgtaatgtattctatttaaatgcaagtgtttacatgtt

SEQ ID NO: 27140 - DNA, 910 bp, Oryza sativa
  ref <308>: DATABASE ACCESSION NUMBER: AK102582
  ref <309>: DATABASE ENTRY DATE: 2002-08-28
gacacacacacacacacaccggcgccgccgcccctactccgatggctactccggccagcgagcccgccggcgcagggacgccggagccagcagcgccgttctccgccgactggaaggagcggatcttgctgcccgccgcggtcgccggtgtggtcggagctggattcgggctgctgtcgcggcaccgggctcgccttggcgccgcccgcgccaccgccacctacgccgccaacctcgccatcgtcgccgggtgctacggtggagcacgtgaacttgcaagagatgctcgggcttcaacacctgatgatcccatgaactccgttgttggtgggctagcaagcggagctgttcttggtcgattacaaggcggacactttggggcagttaagtatgcagttacctttgcagctgctggtaccgcattggactatgctgcactgaagctgagtcctcaaattaatggcaaatggcatgccctgaaagaacatttttctggagacaaagactggtttacgctccccgaatggtcgcctattcaggtgttggatgaggaggccttggcgaagaaacgagctcgagaagagaagttgttcgctcagcgagctctcagtaaacttagcaaggaggaaccatagttacagtgctacagtactgctatagacttgatagttttgtcaaggcgctatgcgtcacgtaaaccattatagttctagactgttagaacattcaaattttggagttttttttatcttttcgttatcctttgtaagcttttcacggaaagggagaaaccatgttggtcattgttgtactggaaagggttttagcttccaaaacatttgcttgtctgctgtggtgtttgtaatactgctggtaatctggcaccttttggaagtaaactctttgaatc

SEQ ID NO: 27141 - DNA, 2750 bp, Oryza sativa
  ref <308>: DATABASE ACCESSION NUMBER: AK102583
  ref <309>: DATABASE ENTRY DATE: 2002-08-28
gagatatccaatccccaaagcctccactaaagtagtactagtattctagaagcttcggatggagcgccgccaccgtcctcgcgccgccgccgccgccgccgcttctgcctccgtctccgccgccgcccaccacccggggggagtgcgtgtacatccctaccatacgtcggcaggggtggtgaaggggaagctccacacccgcaaggccgcgacgacgtagtactaccacgtcagttcgaacaactccatccaggaggttcatcaaggagtagttgggggtcagattccaaggattggttggcagattgatccaatttcgcactctgcaattcaggattactgcctaggaattgatgattttttttctcggggttgattaccaagatagtgatacgcggaaagggaacagaagaactcgaggttgtgagaggggctccaagactctcggctcgtcagctgatttaagcaaatattatgacgacaaaccatgccatgattacaatggatacagacttcaaaattcaattatgatttatcattatggataaagttggttcagaatgatggacaaactaattcattatgtcaataaggttaaagatgatcattaatattactaatactgactattgtttagtttctttgttttggtttcaccatgaagttgcagtcatggcattacataatgcagatatcttgaacttgtgatatgatgatttcaacgtgtttattccattcccttaattggccatgccaatgctctctattccatgtcttccatttatactgatgcaaaatatgcttaaatgagccatggcctctcaagacaaatgatttctacctgtatgttctattttcatattcataattggtatgggtaatttcactttgtttctttcacatgcatttgactgtatttcttacacctggtatgcggacaacccgaatgcctggactggttccttcacaagaagaccttccttaaaacaacagtccgtgctatgattggtggttttaccacccttttcattattctggctttcacatgtccaatttaaatgtgatatattttcttgttcccttggtactttgtggtgccatatgcttaatatcttatttcttttcacttttcaggcatcttggcttctggaattcttttaaggggaaagcaaattaaatctcacaacagatactttagctgatgctctagctcttgctcagcaccatgatgctgttacaggaacagagaagcaacatatcacaaatgactatgcgatgagattatcaattggctatacacaagtgagctctcaagaatattcttattcatatttgatgtcttcctttgggatttgatctcttcaatgagtcaggctcaaaatagcgtgtccatcccaaacaacaaaaattggtcagtgcctgctctgtacatccccatggattagcaggaggaagaagaaggaagaggcagagaagaacagctaattccctcattcattgcttaacagcgtatatgtggcttcaactgacaagtatgaaagattggatgcatcaggctgccctctggatgttgtaatttgtatgcatttggaccatttcgagcaagaacatcataggggccgagaatttatagacccacttaagatatgacatattgacaactgaagattgagtataaggttgcagcttgccagcctcagatatacactggcgattcagtataaggttgcagcttcagatattctttgtcacccacaggaaactccagcagatatgtgcttttatcagcaatattcttcattctcaaatgttctctagccaactgattcttcaaaaattcagaataagcagcccttgttgtcagcatatcagtggcttcattatcagctgaagcaactaggttcagtgccaaacaatgtcttgtgaggggagctacccaaggctgtggatggagtgcggtactaggttcaattgagtatcaagcttcgcaagcaagtcgttccaaaattactgtatatccctcaatgtgaggcaagccctctataaaattcatggataaatcttaccaagcagtgaagaaccttcagtgactggtggaagggtgagaagtccaggtaaggactccattcatcaacagacaacatgacagtgaggaatcctttaccataaatgaaaatcttctgattttgtgggctaaaggctgttcaattaagccactggatgaccattttgactcagcgcaaaggttgaccgttggatttgccactgggaattcatgctgccttgtcctggagaaggcatgatatcacgctgtccccattccacaatgccttttggcggtgctttccagcccagattggtcgattctgcacagtgagaagtaatcaagtaaagatgtggtgcaggccatgaaatgtacaaacaggaagacagataaatatattgaggcataattgcgtcgaactctcagcttttctgagattatattaagtaaattttctcacctcttttgccgtggataaccttctgtgagtgtcagatcagaaatcagttgtgttcagatgaaatctgcttcatgtaaactcaggcatgagactgtagcatatgcattctctagcaaaagcctattattagccttagatggcaggatttttgcttattttctatgttttcttatctctcttacgtgtttcttttgtgttctctcttttatattattcttgaatcttgacttctcttaaaagtctggc

SEQ ID NO: 27142 - DNA, 1794 bp, Oryza sativa
  ref <308>: DATABASE ACCESSION NUMBER: AK102584
  ref <309>: DATABASE ENTRY DATE: 2002-08-28
gagtcgacgggacgggaggcttcctcctcctcctcctactcgagactcgacgccgccacctccacctcccgtctcgtctccagaagcttctggaacacccttccggcttcaattcccccctgctcgggtcgggtagctcccttccatcatccatggccgacgccaccgccgccctctcagctcggagcaaggtgcaagctttcctcgaagcggctcgtgccggtgatctcgactccctcaagaagctcgctgcggcgctcgacgaggagggcaagggcgtcgccgccgtcgctgctgccgtcaaggacgccaacaagcgcaccgccctgcacttcgccgcccgcgagggccgcacccacgtctgtcacttcctcatctccgacctcgccctccccgtcgaccccaaggacgacgatggtgaaactccactcatccatgctacgcgccaagcccatctccaaactgtaacctatctgcttcaccatggagcagatccttccgttgcttcttccctcggagccacgccattgcaccatgctgccggcatagggaacctggaccttatgaaactatttctctccaagggggttgatgttgaatcagaaagcgatgccggcacacccctcatatgggctgctggtcatggacagcaagaggcagtcaaacttttgcttcaacacgatgctaagccaaatactgaaaacgatgatggtattacgcctttgttgtctgctgttgcagcgggttccctcccatgcttggatattctaattcaggcaggtgcacatccgaatatcagagctggtggagcaaccccattacatattgctgcagatggtggaaacatggaaataataaattgtttacttaaagctggaagtgaccccaatgcatgtgatgatgatggactaaagccaatacaggttgctgctttgaggaataaccgtgaagttgtggaacttcttttacctttgacatcaccaattccaggtgtttcgagttggagtattgatggaattatagaatacactaaatcagtcgaggaaaaggcacaggtaaaggaagctacaactcagaaagcagacagattacaagtaccacaacttgttgaggtgtcatctgaggcaaaagagagatcattggaggcaaaatcgagaggtgatgatgccttcagaaataaagactacctagtagcagtagatgcctacacacaggctattgagttaaatccaaacgacgccacgttgcattcaaacagaagcctttgctggctacgggcagggcaagctgaacgtgctctggaggatgcaagagcatgtcgagcgctgaggccagactgggcgaaagcttgctacagggaaggcgcggcactgcgcctgctgcagaggttcgaagaagccgcgaatgccttctatgagggggtgcagcttgagccagagaacggcgagcttgtgagcgcgttcagggaggcggttgaagccgggaggaaattccatgggacggacaagaagcaaaaggcagatgcatcaacgtgatgtgtttttggaatggcttagacctatacaaggaggaatcactgaatctgtaccactagattagtattagtttggcttggccaagaaacggagcagctgaaatctgaacacctcttttgatgttgctacaaatttattatattagtatcaattactatcagattgaattctgtttgtgtcgtggctggttctagattcgagtggctaaactgtacccatgttcttcagcatttctttaatctacggtattgagaaattc

SEQ ID NO: 27143 - DNA, 1635 bp, Oryza sativa
  ref <308>: DATABASE ACCESSION NUMBER: AK102585
  ref <309>: DATABASE ENTRY DATE: 2002-08-28
ggctggtccagcagctttgaacacaagcacggagacgcaattctggcatcctgcggggaggaaaatgcagcggcggtgcagtactctccccggatccgcatccagatcctcccccgatctcgatggcatctggacaaaactcccgcgggccccaccaactgatgccggccccaccaactgatctcccactgtgtaccagtcgctgtgcccgctagctcccccagtctccggggagaccgaccgtgcgagatcgcgaccacgtagtgcggcgctcgctctcgctctcccccgcggcagagtcaggcgccgcccggcgaagcgcgaggcccgcggagcaatggatttcaaggggttctgggagtccagattcgggggcaagaaggagcaggagccggagcagaacgggcacgccaatggggtggcgaacgggagcgtcaggaagaggacgtccgatttggcggtctacgagcagttcgagcagcaggccaggcagacggaggtgcgcgccgcggcgattcgcgatgggaatgctgatgcgatccagaagcccctcctaccttcgtttgagtcagctgaaatgcgtaatcttgcagagacattgttgcgggacattattcgcggcagtccagatgtgaaatggggaagcatcaaaggactggagaatgccaaacgccttctaaaagaggcagttgtcatgcccataaagtatcccaaatacttcactggtctcttgtcaccatggaaaggcattttactttttggtcccccaggaactgggaagacaatgctggcaaaggctgttgctactgagtgtaaaactacattcttcaacatttcagcatcatcaattgttagcaaatggcgtggggattcagagaagctagttaaagttctgtttgagcttgctagacatcatgcaccatcgacaatatttcttgatgaaattgatgctattatcagccaacgtggtgaagctcgcagtgagcatgaagctagtcgacgcttgaagactgagctactcattcagatggatggcttgacaaagacgaacgacttggtatttgtacttgcagcaacaaatttaccttgggaactggacgcagctatgctccgccggcttgagaaacggattctcgtacctcttcctgaggctgaagcaaggcatgctatgtttgaggaacttttgccatcaactacctcaaagctagaggttccatatgatactttagttgagaagactgaagggtactctggttcagatatccgtcttgtgtgcaaagaagctgccatgcaaccactaagacgtcttatgtcagttcttgaagccagagatgagctggtgcctgaggaagaattgcccgaggttggtcctctcaaacctgaagacatcgaagttgctttgaggaacacaaggccgtctgcgcatctccatgcacatcgctatgagaagtttaaccaggattacggaagccagatccttagtcaggagcaagcctgaacttctcaaagttcagacataccattttcaggacgcaacattttttctgcagcagtttaagttgtgaggcgaacgttacaaacggatgttgctgctgcagcagttatgaaataaatagcatcatgaatatcgaacgc

SEQ ID NO: 27144 - DNA, 2849 bp, Oryza sativa
  ref <308>: DATABASE ACCESSION NUMBER: AK102586
  ref <309>: DATABASE ENTRY DATE: 2002-08-28
ggcccatccctgacatctccttcctctcccccttcgcctgcgcctctgctcctcgtcaggttgccaagatggtgaggtttacggcggaggagctccgcgcgagcatggataagaaggacaacatccggaacatgtctgtgatcgcgcacgttgatcatgggaagtcgacgctcactgactcgctggtggcggcggccggcatcatcgcgcaggacgtggccggcgacgtgcggatgacggacacgcgcgcggacgaggccgagcgcggcatcaccatcaagtcgacggggatatccctctactacgagatgacggacgcggcgctcaggagcttcgagggcaagcgcgacggcaactcgtacctcatcaacctcatcgactcgcccgggcacatcgacttctcgtccgaggtgacggccgcgctccgcatcaccgacggcgccctcgtcgtcgtcgactgcatcgagggcgtctgcgtccagaccgagaccgtgctccgccagtcgctcgccgagcggatcaagcccgtcctcaccgtcaacaagatggaccgctgcttccttgagctgcagcaatccggtgaggaggcgtaccaggcgttctcccgcgtgatcgagagcgtgaacgtcaccatggcgccctacgaggacaagaatctcggcgactgcatggtggctccggagaagggcacggtggcgttttcggccggcctgcacggctgggccttcaccctgtccaacttcgccaagatgtacaaggccaagttcaaggtggacgaggccaagatgatggagcggctttggggcgagaactacttcgaccataccaccaagaagtggacgacgaccgcaccatcgacgtcgtccaagacgtgccagcgcgggttcgtgcagttctgctacgagccgatccgccggatcatctcggcgtgcatgaacgacgacaaggagaatctgtgggacatgctgacgaagctcaagatcacgctcaaggctgaggagaaggagctgaccggcaaaaagctgatgaagcgcgtcatgcaggcgtggctcccggccagcgacgcgctcctcgagatgatcgtcttccacctgccttccccagccaaggcgcagcagtaccgcgtcgacaccctctacgacgggcccctcgacgacccctacgccaccgccattcgcaactgcgaccccaagggacccctcatggtgtacgtgtccaagatgatcccggcgagcgacaaggggaggttcttcgccttcggccgcgtcttctccggcacagtggccaccggcaacaaggtgcggatcatgggccccaacttcgtgcccggcgagaagaaggacctgtacgtcaagacggtgcagcgcacggtgatctggatgggcaagaagcaggagtccgtggacgacgtgccttgcggcaacaccgtcgccatggtcggcctcgaccagttcatcaccaagaacgccacgctcaccgacgagaaggcggtggacgcgcaccccatcaaggccatgaagttctccgtgtcgccggtcgtgcgcaagtcggtggcctgcaagaacgcctccgagctgcccaagctggtggaagggttgaagcgcctcgccaagtcggaccccctggtggtgtgcaccattgaggagtccggcgagcacgtcatcgccggcgtggggcagctccacctggagatttgcatcaaggatctccaagaggacttcatgggcggcgccgagatcatcgttggcccgccgatcatcacctaccgtgagaccgtcaccaaaaactcgtgtcgcaccgtcatgagcaaatcgccgaacaagcacaacaggctgtacatggaggcccggccgctggacaaggaggacctgcagcaggatgaaccgtcgctgtgcaaggcgattgacgacgagcgcatcggccccaaggacgacatcaaggagcgcggcaagatcctctcggaggagttcgggtgggacaaggatctggccaagaagatctgggccttcggcccggagaccaagggccccaacctgctcgtcgacatgtgcaagggcgtccagtacctgagcgagatcaaggactcggtggtcgccggcttccagtgggcgtccaaggaaggcgcgctcgcggaggagaacatgcgcggcgtctgcttcgagctctgcgacgtcacgctgcactcggactccatccaccgcggcggcggccagctcatccctaccgcgcgccgcgccatgtacgccgcgcagctcacggcttcgccgcgcctgatggagcccatgtaccaggtggacatccaggttcccaagacggcggtgggcaacgtctacggcgtgctcaacagcaggaacggcgagctggtggaagagagcgagaggactggcacgcccttgtccaacctcaggttctacctccccgtcgccaagtcgttcgacttcaccgagaagctgcgcgccgagacgtccggccaggccttcccgcagtgcatcttccaccactggcagaccatgcggtctgatccgttccaggagggctccgaagctgccaaggtgatcaccgacatcaggaagaggaagggtctcaaggacatcatcaccccgctctcagactacgaggacaagctttgagctgcctctctacatacgtatcctagttttgagtttttgagttttgagtttggtctaattttgagtttttgagtatggtcttggtctttcaaattaagtgtgtctcctgtctcttcctctgctaactgtttcgagtctgatattggttagccagcctttgtgccagtcagtttaggatgaaatggtgagttaagtagttgcaagttatgtttacctttc

SEQ ID NO: 27145 - DNA, 2714 bp, Oryza sativa
  ref <308>: DATABASE ACCESSION NUMBER: AK102587
  ref <309>: DATABASE ENTRY DATE: 2002-08-28
gattagtaggctgtagctggcctgcactgcacgcctggagtcgtgcagccagaaaggcaaggctgcacacttgctgccgctctcgcctccccatactcagtacagtagctaggaagaaggcaagggaagggcatggcgacgctgccggacctgggtgtgtccgccttcatcaacatcttgggcgccttcgtcttcctcctcatcttcgccgccctccgcctccagcccatcaacgaccgcgtctacttccccaagctctacctcactggccagcgacgccaccaccctcaccctcatggcttcgtcaacctcgacctctgctcctacctccgcttcctcgcctgggtccccggcgccctccgcatgtcccagcccgacctcatccaccacgccggcctcgactccgccgtctacctccgaatctacacgctcggcctcaagatatttttgcccatcatgactgtcgccttgctggttcttattccagttaatgtctctggtggcacgttacttaatttacgaaaagaaattgtctttagtgatattgataagctttccatatcaaatgtcaaccctggatccaacaggttctttatccatctattaatggcatatgtgttcactttttggacttgctttatgctatacaaagagtatagcaatgtggcatttatgagattgcacttcctggcttctcagaagcgttgtgctgatcagttcactgtgattgttagaaacatacctcatgtttcaagccattcaacatctgaaacagtggatgaattcttccgtaggaatcatccagaccactatcttggtcagcaggctgtttataacgcaaacaggtatgctaaacttgtgaagaaaaaagagaggcttcaaaactggttggattactaccagctgaagtttgaaaggcatcctggaaaaagaccaattggaaggacagggtgccttggtttctgcggtagagaagtggatcaaatcgactattaccgtgctagaatcagcgagcttgataagaagcttgcatctgagcgtcaaagagtcctcaatgacccaaaagctgttatgccagttgcttttgtgacatttgactcgagatggggagctgctgtatgtgcacagacacaacagtcaaagaatcctacccaatggctaactgattgggctcctgaaccgcgggatgtatattggcagaatcttgccattccatttttctctctcagtatccgcaagttcctgatatccattgcagtttttgctctggtgttcttctacatgatacctatagcttttgtgcaatcacttgccaatcttgagggtattgaaaaagttgcacctttcctaaggcctgtgatagacacaccagtggtgaaatccttcctgcagggtttccttccgggtttggctttgaagatttttctgtatatcctcccaacggttttgatgattatgtcaaaggttgaaggttatgtgtctttatcatctctggaaaggagggctgcttcaaaatattactacttcatgctggtgaatgtatttcttggaagcataatcgctggcacagcttttgaacagctaaatgcatttttccatcagccaccttcacaaataccaaggaccattggagtagctataccaatgaaagctacattttttatgacatacataatggttgacgggtgggctggcatcgcgaacgagattcttcgagtgaagccgctggtgatataccacctgaagaacatgtttattgtgaagacggagcgggacagggagagggcaatggatccgggcagcattgggcttgcagagaacctcccatcactgcagctgtattttcttcttgggcttgtgtatgctgtggtcacccccattctcctccctttcattatcatcttctttgccttcgctttcctcgtgtacagacaccagatcatcaacgtgtacaaccaagaatacgagagtgctgctgcgttttggcctcaggtgcactctcgcataatagcgagcttgctgatctcgcatgtaactctgtttgggctgatgagcaccatgaaggctgcctactccaccccgctgcttatctttctgccactcctcaccatatggttccacaagtactgcaagagccgtttcgagcctgctttccgcaagtaccctctagaggaagcgatggagaaggacaatctggagcgcacgtcggagccaaacctgaacctcaaatcgtacctgcagaacgcttacctgcaccccattttccacatgtttgagcagcagcagcagcaggagcaggagcagcaacgggaggagaaggtagaggtgcgaatcgacaaggcgcagcaacatcatcatcggcaggtagaggaggaagaggaggagagcaagagcagccaggctacaacacactactaccaccatcaccatgagcagaccacaacgacgacacaccaccattaccatcagcatgagcatatgagccactaccacatgggcccctccgacacagctgactcaccctcgccgccgcactttgtctaccattatggcgtcgacccttgataatcgcccagatagtctcttagcttctgaatcactagattgtttgttcttttgttttttccttttgtcaattgggggtgatatttttattcctctaattaacgaccgactggctgctgataattatttaatgatctgttgtaaatgcg

SEQ ID NO: 27146 - DNA, 2276 bp, Oryza sativa
  ref <308>: DATABASE ACCESSION NUMBER: AK102588
  ref <309>: DATABASE ENTRY DATE: 2002-08-28
ggaccgagccaccaccgaggtccgacccccaaacgccacacacacgaaaacacatcccacgcggcggcgtgacacgcgcgaatcgccggagacctcgccggaggtggcgagctcgggtgccggcgatctcctccccgcgggcggcgtccgtccatggctcgtcggtcctcctcctcctcgtcgtcgtcgggggcgtggcggtacctcaacccggcgtattacctcaagcggccgaagcgcctcgccctcctcttcttcgtcttcgtcgccgccaccttcgccttctgggatcgacagtcgctcgtccgcgagtacgagtcagaaatttctcgattggatgataaagtaaatcagttgcgtgaccagttaagaaaggctggagttcatctggatgaaaatccaacaggtgacaaagtatccagagaaaagcttgtagaaattgatcctattaataatgaaaggagagaaaaggttaaggaggctatggcccatgcttggaattcctatgtgaagtatgcctggggaatggatgaacttcagccacaatcaaagaatggtgtcaatagctttggtggtctcggggcaactcttgtggactcacttgatacactgtatataatgggcctaaaggatgaatttcagagggccagagactgggtggccgattcactaagctttgacaaggattacgatgcaagtgtctttgaaacgaccataagagttgttggaggcctcctcagtgcatatgatctatctggtgacaaagtatttcttgagaaggccaaagatattactgaccgtctactacctgcttgggatacaccatctggtatcccttataatagaatcaacctagctcatggacgagcccataatcctggatggaccaatggtgatagtatccttgctgattctggcacggagcaacttgaatttatagctttgtcacagaggactggtgatcccaagtatcaacaaaaggcagagaatgtcatcagacagcttcagaagatatacccaagcgatggcttactccctatatacataaaccctcattcaggaactgcgtcgtactcaacaattacatttggtgcaatgggagatagcttctacgagtacttgctcaaggtttgggtccaggggaataaaactgagcatgtaaagcattacagacaaatgtgggagacatcaatggaaggcctactaagcttgaccaaaaaaactacaccctctaattactactacatttgcgagaagaatggtggttcattgtctgacaagatggatgagcttgcatgttttgcccctggtatgctggcactgggggcctctggctatgaggagactgaaaaggctgaggaaattatgaatcttgcgaaagagcttgctcggacctgttataacttctaccaaacaactcctacaaagttggctggggagaattattttttccatactggacaggatatgaacgtgggcacatcatggaatatcctgagacctgagactgtcgaatcacttatgtacttgtggcgtcttacggggaacaaaacataccaagactgggggtgggacatattccaggcatttgaaaagaactcccgcatagaatctggttacgttgggctgagagatgtgaatactggcgagaaggataacatgatacaaagcttcttcctagcagagactctcaagtacctatacctcctgttctctcctccatcagtcatatccttcgatgagtgggtcttcaataccgaagcccacccattgcgaattgttcctttaaatgacaatagcaaagcccactcagtaggcattgcaacaccgacggtacgaccgttcgggaggaagcaggggaaacaagagtagatttgaaccatagagcacaggaatttttcatctgccctctgatttttgacctgcctgatccaaggttctgacaggagcagcgattctgcctgtagcagtataagggctgaaagtcatggcaataggctgtttaggcaacggaattataggtagagcacgatgagatattctggggcacattgaaacttcagagtataaatcgaagaccaataaccccatgaaagtttatatttctgtacttgtttgcgctccctgcattattgatctgtcatgtaaatctaacagtgtccatatgttgttggttacacgggggcttccgtggagttgtattttcattacgtggcccgacttgtgacattttgaaacacggtctataaaaacggattgcattttacttccccact

SEQ ID NO: 27147 - DNA, 916 bp, Oryza sativa
  ref <308>: DATABASE ACCESSION NUMBER: AK102589
  ref <309>: DATABASE ENTRY DATE: 2002-08-28
tgagtggaatctgctcccctcaaaatcacctccccaccccccacctcctcgccgccgccgccggccaccgccgccgccgccgccggaggggggagggggacgacgacggaggcgcacatgctgggcacgacggccgcgcagccgacgagcaggcggggcgggctctccacacctcgcacgaggcatggatttgggtgcggcgtcgacaagatgaatcgtctgcggttggcgattccctccgcttcaaagaatgtgagccgctgtgggaagcttgctatctgcagagcacaaagtgaagattctaaaggtgggggaggattcttgactggatttcttatagggggcgcaatcttcggaacattgggatatgtctttgctcctcagatcagcaagacgctagattctttattagatgaaaatggacaagacagtgaatctgatgaacatggccttgtaaagccacggtatggtcgatattatgatgaaggtttagagaaaacccgtcaaacactgggcgacaagataagccaactaaccttggcaattgacaaagctgcctcccggttgaagcgcgttgctggcaatgtggaaaaggaagctattaatgatgaatcagaaatcgaaatatcttcattcaacgataatgagcttgtggcggaaaacttgaacgagcaaggatttgtgcaaggtgaaacagcaacgtagtgtatgtttaaaacaggcagcagagcagccgagtaaagccatcagcgcctttggaacagtaagtagactgcagaatcccaaattgaaaaaatgttgtagccaatccatttatattgtggctaattttggggacattttttctgcaaacatgtagctgaactggatggcctgtccaaccgattggcagcatgaaatgaatgaaacattttcg

SEQ ID NO: 27148 - DNA, 1918 bp, Oryza sativa
  ref <308>: DATABASE ACCESSION NUMBER: AK102590
  ref <309>: DATABASE ENTRY DATE: 2002-08-28
gaagcccatccagcgccacccccacccccaccacctcctcttcttcttccctcgagctcagcgcagaacgcacgcacgcggacagagagggaatccccccgttgcttgcgtccgctcgcggctcggagacgagccgcgagcgttccaataccaaaccagagcatcccccggccttgttggatctttccggcgccgcccgcagcgagcgattcgccttcgggcaggcgcaagattcaatgaagaacaaccttgtgaaaaacaacatgctgaaagagttctacatcccaacttatatattcgtgccagagtctccagtagagaaggtttctcaaatacctagttgtccagtgattgtttttatcaacaccaaaagtggtggccagctgggacatgatttaattgtcacgtaccgtaagctgctcaacaattctcaggtgtttgatctgcttgaggaagctccagataaggtcttgcacaaactgtatggaaacatggaaaggctaatgcgtgatggggatactgttgctgctgaaattcacagaagattgaggctaatagttgctggaggtgatggtactgcaggttggttgcttggagttgtttctgatcttaagctagtacatccaccacctgttgctacagttcctctgggaactggaaataacttgccatattcttttggatgggggaagagaaatcctggaacagatgaaaagtcagttctatcgtttctacagtcagtaagacaagcgaaagagatgaaaattgatagttggcacattgtcatgaaaatggaaagcccaaaaagttctacttgtgatccaattgctcctttggatttgcctcattcgctgcacgcgtttcaccgtgtgccaaacaatccacaagataaggaatattcttgcacgtttcgtgggggattctggaattacttcagtatgggaatggatgctcaggtgtcatatgcctttcattctgagaggaaattgcatccagaaaaattcaaaaaccagttgtctaatcagaaaacatatttgaagctggcatgcacgcaaggatggttctgtgcatccctatgtcatccaatgtcacggaacattgcgcacctttcaaaagtaaagataatgaagaaatctggaaaatgggaaacattggaaattccacagagtatccggtccattgtttgtctgaatttacccagcttctccggtggactgaatccatggggaacaccaagtgagagaaaacaaagaaaaagggatttagtaatgcctccacttgtggatgatggtcttctggagattgtgggttttaaagatgcttggcatggacttgtgttgctatctccaaaaggccatggcactcgtcttgctcaggctcatcgcgtccaattcaaattccacaagggtgcaaccgaccatgcttacatgagacttgatggggaaccctggaatcagcctcttcagaaggatgacggcaaggtcttggtggagatctcacatgccggccaggtgaagatgcttgctaccaaaaactgcattgctaaaggcatccatgaggcactgtctatgtcaacggttcatccagagtccagctcctccagtgacgatacggatgacgatgatgatttcgcggaggagaggaagaactttggtgctgcattgtcgtttcggtacatggatgatgtgaccaaagagtaaaaaagcttgcttttcttactgagccttgtacagcatgtttgcataggacgtagattgctgcactaactctggaagctgcgccacctgtaagatcctttccatgacgaggttttgtacgtatggctgagttgttgtgtgccgtacagagccaactggggtgctgactatcttgtaccatgaccgtgagcaattttccaatccagtttttcttctgcagc

SEQ ID NO: 27149 - DNA, 2163 bp, Oryza sativa
  ref <308>: DATABASE ACCESSION NUMBER: AK102591
  ref <309>: DATABASE ENTRY DATE: 2002-08-28
gtatctcgactcgagcagacaggaagaatggcttcctccacctccgggagaagaggacgaggacgactcctctcgcctgcggcggttgtgctggcggccgtggctgtgctgctgtcggcgtcacaggcactgggcgccgtgctacccgcgcgtgttcagcttcggggactcgctaactgacacgggcaacggccctttcctctacggcaacgagtcccgccggccaccgctgtggccaccctacggcgagaccttcttccaccgcgccaccggccgggcctccaacggccgcctcatcatcgacttcatcgctgacgcgctggggctgccgttcctgcggccgtactggggcgggcggaccacgggggacttcgccagcggggccaacttcgcggtgggcggcgccacggcgctcagcccggacttcttctgggagagaggcgtgcacgtgcgcgacaccgtgcacctcgacatggagatgaactggttccgcgatctgctcggcctgctctgcccagacgatcttgccgagaccgagggagccacggatccgggtgaaggccaagacccgcaagaccttgagcaagattgcaacgacatgatgaatcaatctctcttcttagtcggagaaattggtggcaatgattacaaccatcctcttatgggcggggtatccattagaaagattcgcagcttcactccgagtatcattgcaaaaatttcttccacaatcactgtgagtaatatgcctatggacatacatacatatatataaggtgtctgggcttcaaggtttgaaatacacgaattggctccaatttttgaaaattttcaacttcttgtttttatatacctagatgcaagaatttgattcaacccataattagcagtaaaacaactcaaattcatggatgggagagaacctttttaattttgacatggggaaaacatcttgttagtctataatttattgatgtcttattctatattttatggaattccttctttgtagctgtgacacatcttcttatttatgtgagagctataaatgtcttgatcatatttgctgtaatatttgtaaatggctcagaatggtctaaagataagaatttttggattgttagagatggactcacttcactcgtttgtataactagtcctttttcaccatcacaagctcatgtatcacaacatggaacaagtgtatatggctagtaatgcaatagagttgagtttgtaggaattgatcgggctcggagccaagacgttagttgttcctggtaatctcccaattggatgtattccacattatctcatgatattcaagagtggtaagaaggaagattatgagccagagacaggttgcctcaggtggatgaactagttctcgcaataccacaacagacttcttatggatgaactagaaaatttacggaagcttcatcctgatgtggccatcatctatgccgattactatggagctgctatggaaatcttcctttcccctgaacaatttggaattgagaatcctttggtagcttgctgtggtggaggaggaccttatggtgtatctgaaactgcaagatgtggaaatggtgaatacaaggtgtgcgatgacccacaactgtatgggtcatgggatggctttcatccatcagaagcagtctataaggccattgcaactggcctgatatggggttcatacacacaacctccaatcgctaccaccaccatttcgtgcctgcaaattacagagctcagttcttctgttgaatacaaggtcctctatgatttgtaattgtgtgactatattttgttattttcatagaatgtatgtgcggataaaaggttcatgtggaatcgtcgaaataagctggtattgtgctgaaatcgagttaaacttatgccatcgggtcttctaacggattagttctatgacttccatctcaagtgtgccacctcccacctccatgaatcaaagcacttaattttttttctattttccttcataagttgtgttttgtttagttaaattttttccatgtactgttcatcttgtctttagttcttgatggcttagtcaaagactaatcatttatatatctcagtagttcatttgtttgattatctaggttgatataatctaaatatattcgaccatgt

SEQ ID NO: 27150 - DNA, 2491 bp, Oryza sativa
  ref <308>: DATABASE ACCESSION NUMBER: AK102592
  ref <309>: DATABASE ENTRY DATE: 2002-08-28
aaaaaaaaaaagccaaagccccacccaaagcggcgacgcccctctctctctctctctctctctcttctcttctcttctctcctccacgtcgcggctcgcgcctccaaatccccccccgcgaggcgagcagggcgaggcggcgaaagcgcgacgcgcgagcggatcgaggcggcggcgtcggtgccggcatccaccgcgtgcataggttgcgtcggcggcggcggaagcggggcgcgatgacggacggccaccacttcaacaacatatccctcggcggccgcggcggcaacaaccctggccagtttaaactttattcgggaggacttgcatggaagaggcaaggtggaggaaagaccattgaggttgaaaagtctgatatcacttctgtgacatggatggcaatccccagatcctatcagcttggtgtttcaacaaaggagggcctcttctacaggttctttggcttccgtgaacaggatatcagttcattgactaacttcatggaaaagaacatgagaatcacaccagaggagaagcagctttctgttggtggacataattggggcggaattgaaatcaatggcaatatgcttagctttaatgttggttcaaaggaagcatttgaagtctctctagcagacgtagcacaaactcagatgcaaggaaaaaaagatgttgttctggagtttcatgtggatgatactactggtggtaatgagaaagattcattgatggatttaagctttcatgtaccaacttcaaatactcaattccctggagatgagaatcgtccttcagctcaggttttatggcaggctatcttgaataaggctgatgttggctcatcagaggaagctgttgttacatttgatggaattgctattcttactccaagaggtcgatacagtgttgaacttcatctgtcattcttacgactccaaggacaagctaatgatttcaaaattcaatatagcagtattcttcgcctctttgttttaccaaagtcaaataatcctcatacctttgtggttatcactcttgatccaccaattcgcaaaggacagacattatatcctcacattgttattcagtttgaaactgaagcagtcgttcaaagggatctgacattaagtgatgaggttttggctgaaaagtacaaggatagactggagaactcttaccagggtctgatacatgaagtgttctccaaggtccttcgtggcctatctggtgctaaagttacgaggccaagcacgttccgcagttgtcaagatggatatgcagtgaaatcatcactcaaagctgaagatggattgctctatccgctggagaagggcttcttctttctaccaaagcccccaacactcattctgcatgaggagattgagtatgttgaatttgagcgacatggtgctgggggtgctagtatctcatctcactattttgatctcctggtcaagctgaaaaatgatcaagaacatctattcagaaatatccaaagaaatgaataccataatctcttcaatttcatcagtggcaagcatttgaaaatcttgaatcttggagaagctcaaggtagagctggtggcgttacagctgttcttcagagcactgatgatgatgctgttgatcctcatctggagcggatcagaaatcagactggcgatgatgagagtgatgaagaggatgaagattttgtggcggacaaggacgacagtggatctcctactgatgattctggagaggagggttctgacgctagtttaagtggaggagaaaaggagaaatcttccaaaaaggaagctagtagctcaaaggcgcctttgaagaagaggaagccaaagggtggggatgcggcggaaggctcggagaaaagaaagccaaagaaaaagaaggatcctaatgcccctaaaagagcaattgcaccattcatgtacttctcaaaagctgagcgagctaatctgaagaacagcaatccggagctggctaccacagagattgcgaagaagcttggggagaggtggcaaaagatgacagccgaggagaagcagccatacgtcgagcagtctcaagttgacaagaagcgctacgcggaggagtcagccgcctaccgcggggcggctgccatggatgtggactccggccctgcttcggactgaagagaagagacctgaattgcattccagattacccttagtctaggagggcgacagacaggatacggctagtggcatctctatttccatgtaaataaaacttatgagttatctggatgtaaataaaactatcgtaggtatctttcgagtcccgttctatgagtgtcttatcgctttatcttagctatatatatagatagcagctatagtatagtagagttcttcccgccatttatgctggccggataacttaccttcacctatgtagcagcaataagcatgcttatctgcttagttaaattataaatgcgtgttctagctggagaatcacctct

SEQ ID NO: 27151 - DNA, 2662 bp, Oryza sativa
  ref <308>: DATABASE ACCESSION NUMBER: AK102593
  ref <309>: DATABASE ENTRY DATE: 2002-08-28
gctggggtgcacgacgtgtgcacgatgctgcccggatccaagcgcgacgcgcacctgccgctgccaatctacccccaaatcgccgccgccaatgggttcgcgacggcggaggagttcgacccgctgctgttcctttcgcccgatgcggtttgcggcggcggcggcggcgactacctgaatattgtctccgcgcagcccatctcggcggcctccaccaacggcgcgtcgccgccgagagatgtctcggtctctgcttcggcggcgtcgtcggcggcggcgcagcatgacgactccgaggctttctcggatatcgtcctggggtacatcaaccgcatgctcatggccgaggacatcgacgagaagttcgagcactacccggtgaacgccgatgatctgctcgccgccgagaagccgttcctcgagatcctcgccgaccagtcgccgtactcgggcggcagctcggtcgagagtcccgacggcagcagcgccgccaactcctgtaacaacctcagtccctgcaactgtagctcgtcctccgacgggcttggcgccgtgccgcagacgccggtcctcgagttccccacggccgccttctcgcagacgccccagctgtacggggatctgatccccacggggggcatggtggaatcgggcggcgcctggccgtacgacccgacggaattctatcagctccagaccaagccggttcgtgagaacctcccgtcgcaatcttcgtcgttcgcgtcttcgaacggcagcagtgttactttctcagaaggattcgagtcgttgctgagcccggctggtgtcttgcctgatgttagcctgaatgattttgttgtgcagaaccaacaggctttgcagttccgccgcgggtttcaagaggcaagcaagtttcttcctgatgagagcaagcttgtgattgatgtggataagctctacagtggagatgaggggagtaggttccttggtgaggttagacaagagaagaagcttgtgaaggtgaagacagaaacctctgatgttgaatcagcaggtcaccgaggaaagaagcatttctatggtgatgacctggatgcggaggaagggaggtgcagcaagcattccgcgcaagggattgacactgaccaccttgtgagggatttgatggacaaggtcttgctatgcaatggtgagacatgctcaaaaggtgttaaggagatgcgtgaggctctgcagcatgatgtggcgaaacattcaggcggaggccatggcaaagggtccagccatggcaagggtcgtggaaagaaacaacccaagaaggaggtggttgacctggagacccttctcatccattgtgctcagtctgtggccactgatgacaggcgcagtgcaactgagctcctgaagcagatcaggcagcatgctcatgccaatggtgatggtgatcagcgtttggcacactgcttcgccaacggcctcgaggcgaggctggcaggtactggtagtcaaatttacaagaactacacgataactcggcttccatgcactgatgtgctgaaagcgtaccagctttatttggcagcttgcccatttaagaagatctctcattactttgccaatcaaacaattttgaatgctgtggagaaggccaagaaagttcagattgtcgattatggcatatactatggatttcagtggccgtgtcttattcagcggctatctaacaggcctggaggcccaccaaagcttaggatcactggaattgacacacctcagcctggtttccgcccagcagaacgcacagaggagacggggagatatctaagtgattatgctcagaccttcaatgttccttttgaattccaagctattgcgtctcgatttgaggctgtccggatggaggatctccacattgaggaggatgaggttctgattgtcaactgcatgttcaaattcaagaatttgatggatgagagtgtggtggctgagagtccaaggaacatggcattgaagacaattaggaagatgaacccacatgtgttcattcatggggtggtgaatggatcttacaatgcaccattttttgtgacacgcttccgggaggccttgttccactattctgctatcttcgacatgttggagactaacattcccaaggataatgagcagaggttgctcattgagtctgctctatttagccgggaggcaatcaatgtgatctcttgtgagggactggagaggatggagaggccagagacatacaagcaatggcaggtacggaaccagagggttgggttcaagcagttgccattgaaccaggatatgatgaagcgtgcgcgggagaaggtcaggtgctaccacaaggacttcatcatcgatgaggacaacaggtggttactacaaggatggaaagggcgcattttgttcgcactgtcgacatggaagccagataatcgatcatcttcatagcttgttcagctctaattattgcatgatattgtaaatgtagacctgttcatatttttttggggggcatttggaccgattgttcctggtaggcaatatattgctaggtatgttatttgaacaaccaagtaatgggaaacttctgcttaggaattgtcttatatgatgatctggttcatctctgtccgtacataagatgaacccgcctgttcct

SEQ ID NO: 27152 - DNA, 1496 bp, Oryza sativa
  ref <308>: DATABASE ACCESSION NUMBER: AK102594
  ref <309>: DATABASE ENTRY DATE: 2002-08-28
gggactcctcttctcttctcttctcttctcagagcgctgcgaggttgccatggacgaggcggaggcggcggcggcggcggcgaagatggacgagctggcgggaggaggaggaggaggcggcggcgactggtcgtacctcgcggcggacgcgctggcggcggcgtcgttcacggcgttcccgttccaccaccaccaccaccaccaccaccgcgacgtgctctcggcgtcgaccccgtcgtcgctgctcctcaacatggacgcggccaccgccgcggccatgttcgacttccaggcggccttcccgtcgtcctccgtcccgccgccgccgcccacgacgacggcggcgctcccgccgttccacgacttcgcctcctccaacccgttcgacgacgcgccgcccccgttcctcgcgccgccggggcagaagctcgggttcctggggccccccggcggcgcgttcggcggcgggatggggtgggacgacgacgacgagatcgagcagagcgtggacgcctcgtccatgggtgtctcggcctcgctggagaatcccgcgcccgtggccgtcctgaggaggcggcggcggtggtgggcggcggtgggaggggcaagaagaaggggatgccggccaagaacctcatgggcggagcggcggcgcaggaagaagctcaacgaccgcctctacatgctgcgctccgtggtgcccaagatcagcaagatggacagagcttctatccttggtgatgcaattgagtacttgaaggagctcctgcagaggattaacgatcttcacaatgaacttgagtctgctcctagctcttcgcttactggaccatcatcggctagcttccacccatcaacacccacattgcagacgtttcctggccgcgttaaggaggaactttgcccaacctcatttccaagccctagtggtcaacaagccacggtcgaagttaggatgagggaaggtcatgcagtcaatatccacatgttctgcgcacgcaggcccggcattctgatgtccacattgagggctctcgacagccttggcctcgggatcgagcaggcggtcatcagctgtttcaatgggtttgcaatggatgttttccgcgccgagcaatgcagggatggtcctggactcgggcctgaagaaattaagaccgtgctcctgcactctgctggccttcagaacgcaatgtaatcagcaagtcagaaagcagtcaagaccaatgcactgggatttgatcagtgatcatttgcatcagatgatctggtttatcaaaaagttatagtaagtatggcatatatgctgtttatctaggagaactgatgagatgaggctcgccatctagagacatgtgtgatgatgatgatgtaactgggtttctttctttctgttgtcgtttttttttctgaatgttgtttgtgatgtaataggatctttgtccattgaaaccatgtccattatcatgatgagaatatgaacccagtgtcttttg

SEQ ID NO: 27153 - DNA, 2507 bp, Oryza sativa
  ref <308>: DATABASE ACCESSION NUMBER: AK102595
  ref <309>: DATABASE ENTRY DATE: 2002-08-28
gcaagaggcttgcaggttgcagcgaacacacgcagcacggaaaggggaaaaaaaaaccaaaccctctcgtcctccccttccccgcccaccccggcctcgccgcccccttcccgtcgttcaccggcggcgaattcaagctgacgagctcgccaccgggggggggatttaggattggttcgatcttggccggccaagaagtacaagtttcttcgggggattagcttgttcgcgagggggaggagttcggtggtggagccttcgccttcgtgatggcggacaccaaggcggaggcaaaggcggaaactatcggcggcggcggcggcggctctggctcgttcagcgagcaggcgtttgttgagaagcttaacaagctcaacaacacggcgactaggatccagacactttcaaattggtgcatttttcaccgaaagagagccagaaaggttgttgatacatgggagaagcagtataacagtgcaaataaggataagaaagtatcattcctgtacctgtcaaatgatatcctgcaaaatagtaaacgcaagggaggggagtttgtgaatgaattttggagggttcttcctggattattgaaagacttttatgtcaatgggggagaagatggaaagaaagtagttggaagattaatagatatttgggatgagcggaaggtctttggaacccgtattgaaagtctgaaaaatgacattcttggtggtagcactcatacaatgggtaacaatgtcaatagctcaaatccaagccctaacccctcttcagtttccaaagctgcgcggaaagattctggtacagtaacaagaaaacttactgttggcgggatgccagaaaagattgtaacagcacatcagtcagtgcttgatcaacattttgatgaagacacagctttaaacaaatgcaataatgctgttagtgttttggataggatggataaagatgtagatgatgcttgtactcaaggtattcagcaaggatcatcgttgatttctgaccttcaagggcaggaaacagtccttaagcagtgcattgagcaacttgaaagtgtcaacatggctagaataaccctaatcaataaactaagaaaagccctcggcgaacaggaagcaaagtcagagcttcttcgcaatcagttgcttgtggctcgagcaaaggctgaacatgccatgcaactaaaacaacgacttggtagtgccttgaacaatggtgcaggatctagttctagtccactgatggttacacttccaccaggacaaacagctgccatgatgcagaattcagcagcaatgccgatatttccccagtttcaaccactgcatccagcaacctcacttcctgccacatccagtgctgttggtgatgagcccaaaaaaactgcagcagctatggcagataagcttgcatctttgtcagctcctgagaaggtgctctcctccattttctcttcccttgctgctgaacaagcaaggaatagtggttcgacttctggagatctttctgcaggacctccaggctttgagagcaataagaagcctaggcttgacaaccccattcatgctagtgacatgagtgctcccccattctttgggcaactgccgcaggtgcaaccacagattggagcaacagctgctcttggaggcacacagccaccaacccaagcaaaccaagcagctggttcatttccaccacctccacctccattaccacttatgccacaatttgttcaaaatactggaggaatgtttggaatgggaccttttgggatggtgagtggctctgcgccacctccacccccattgcccaacattatgtcagcaggttttccaagactaagtgtgcctccacctctgcctctgcctacacaatctcagaaccagagccagccccagcagcagcagtctccacaggcaccacagcaatcgccgacctcgactggattttttcaaccaccaggtgctgggttcttcccaccagtgcaggttcagcaatctccatctgcccaacggcaatgatgattctacaacaattgttgggctataaaggaagcaccttgtgctaactttgtatattaaacaataatccctgaggattgatctgatagttggcgagtcctgcatcgtgaagcaggattaatgcttatgaattgggaggatttgtaggataggcttgcggcttatgtgatgtacaactgttccttttggtctgaggagtttgttcaactcttcttgattatgtgaagttagttagactttacttttgtttgcatagccagatcttattgttagtcctgaggcaaacaaatgtcggcattacatttgttacttaaagaggtgcccaagtgaaagaacttttttgggctcctcaatggtagaacttacctgtggctctgttagtttgctagagaagccatatatccatagatccttacttgaagttgtgaactgcaaatatttgtcatattcaagtttatttgtttacttaattttttattc

SEQ ID NO: 27154 - DNA, 3867 bp, Oryza sativa
  ref <308>: DATABASE ACCESSION NUMBER: AK102596
  ref <309>: DATABASE ENTRY DATE: 2002-08-28
gggcctcggcctcccgtctcctcggctcctcgcccacttcgtccgccgcctgcgctgcgccgagacgccgccgatccccatcccgcgagcggcggggccggcctccatcccgtgaccgtgagcaggagcgccggcgcggggcacgtgctgctgcttccaccaatatcatcgccggtgagggcacccgatctggaagcctttttctctttgccctaaccaatagaagttcgtttccaaatcaagattttgggggttcaagtaaacccccatgcccaacgtaagaacttgttaagccataggctctggttccatatgagagaagatccatatgctcttttgagatagttgggaaaatggcatcaaagaaagtataagtgggttatgtcaagaaggcctgtgattttctagaatcaatttggtgagccgaatgatggagtgcaacaaagaagaggccctcaaggccagggatattgctgcaaagaagatggaaagcaaagactttgttggtgccaaaaggatcgcgcttaaagctcaaaggatttttccagagcttgagaacatatcccagatgttaactgtctgtgaagtacattgtggggcagaagcaaagatgaatggactattggacttctatggagttctccaagtggatgtaatggcggatgaagcaaccattaaaaagcaattccgcaagcttgctttttcgcttcaccctgataaaaacggtttcgctggcgctgaagctgctttcaaattagttgcagaagctcagtcaacattgtctgatcgaaccaaacggcgtgcatatgacatcaaatggagaattgcatcaaagcagggtacgcaacccaagcagggtgcccaaccagcgcaggctgcccaaccaaaacagtgtacacaaccaccggctgggtacaaaacgaaatcagagtgcacaaccaacgcataatacacagcagagtgcacagccaaagcagagtacacaaccgatgcaggctactaaaccgaagcatgctactgaacacaatggagaaaacagatgcgaatagaggtagtaatgctaaggaaggatatggatcatcagttcgaccaccccgtgctggagaagcattctggacaatgtgtgttaactgtaaaactaaatatcagtactactccaatgttctgaatcataaactccgttgtcagaactgcaaaaaagattttcgaggcagttatgctaaatgaacaggatgtgccttctgtattctcatcaagtgcagcccaaagtgcaggagcaacattgtgacgttcccaaacaagaggactgttctacgaagttctcttctgcagcgaatagagatgcaaagcccatggtgaatggaggacaacatgatgaacaaatgaaaaacagtgccagtgtcagagcaggtggtgaggggacagttaaccatacagagtcaatcagaaaagggggacttgaattttcaacactgcatgtatcttctgcagcaaatgttggtagtaaggcagggggaaagatgacatcgtgccctactccagatgttgctggtagaccaaagccctggtaatagggtaaatacatcagcagagacaggtgtgatgaatattcctaatccacggagatcggctaggaggaaggaaaatgctgatgccagcatcatccaggatacgcctagccaaaagaggcgaaccatattagattggttttcaaatcctgactcaaggtcgtaagaaagtggctgatgataatgttgtccgtgctgatggagcaagcttgtgaacctcatgtctccagcgaagcacagcaaccaccagaaaggaactactagccatgaaggaaaccaggaaaaaaggaaagatgttgcacatgatacaaatgctcagaagaaatctggcattcctgggaacttttcctatcctgacccagaattttttgacttcgataggtgcagggatgttagtatgtttgcagttgatcagatctgggcactttatgatgaccgtgatggcatgccacgatattatgctcgtataagacgcattgatacaaccaacttcagagttcagttcacttggctggagcatgatgcaaagaatgaggaagaggacaaatggactgatgaagaattgcctgtggcttgtgggaactttttcttaggaaaaacagtggtgtcacaagatgccctcatgttttctcatattgtgtcatgggtgaaaggtagaaaaaggagctcatacgaaatatatcctaggaagggtgaggtatgggctctatataagggttggagtatgcagtggagctcagatgcagataagcatagagcctatgagtatgaagctgtggagatcttgtcaaatttcacagtggaagctggtgctgctgttggccctttggtaaagattaaaggttttgtgagtctctttgcaaaagtaaaggagaaaccatcattcgttataccaccaagcgaaatgctacggttctctcacagtatcccattttttagaacaaagggagatgagaaggtaggtgttgctggtgggtttcttgaactagatactgcatcacttcctagtaacttggacgtagcctttccatcggttactcttgattcttgcatgcctgtctgccagacaatgaacagtggatttaatgatttcactggatatgagcaaggtgcgctgaaagaaaatttgatgaacgaaggtaaacgtaaagatcattcccttgaacgaaccccagtgcatcaacagagtgctgcctattcctcccccagtacttttgattacccaaactctgaatttcataactttgaagaatatcgatcatatagtaagtttgaacgtggccagatatgggctctttacagtgatcttgatcaatttccaaagtactatggttgggtgaccaaagttgatacagatccgttcagagtgcatttgacttggctcgaagtctgccctcagctggagcaggagaatatgtggttagagcagaatattcctgtgagctgtgggacttttaaaatccgcaactggaggataaagttagacacgaatgatgctttctctcatttagtagaaactagccaagttggttggaaacgatactttgaaattcatccacaagtaggggaaatttgggccatctacaataattgggcacctggttgggttccttccagcaaggatactttcgagtacacaattggtgaaattactgactgcactgaagctagcacaaaagtcttacttttgacccgagtagatggctacagagctgtgttcaagcctgacagtgtaaggggcactctggagatacctacaaatgaaaacataaggttttctcacctgataccttctttccggctgacaaaagaaaacggtggcaaactctgtggcttttatgagctggatccagcttctgttcctgatactttcctgttccggagcggccgctgattggcaaatgttgatgctgactgtcctggagatagtaaggatctggtctcttgtatgctcttctagtagggtgttcatacaccacgcagctgtggtgcaaaccaaaccatgctatcttttctaatgttgaggcctctgtgctcattcagttagttattaggttaaaattgcatgttgcattggcatttggcatgtgatgcagtgattatctggttgtcaatttctcttgaggcgttgccctgagagcaaatgggaaatgtcatgcatactgcaatttttctggagccaagcttcttttctggccagtggtgtcatgggcctgtgctcaaagaagtattgcaacctgtaacatataggttgcttcttgctgtgctttaatatatttgtgccctttcatttggtagg

SEQ ID NO: 27155 - DNA, 2267 bp, Oryza sativa
  ref <308>: DATABASE ACCESSION NUMBER: AK102597
  ref <309>: DATABASE ENTRY DATE: 2002-08-28
ggtcgattcccctttctcccgctcttcccctttcaaatctctctctagccgctcctctctataaaccctagtactcggggggcaccgcgcgctccgtcccccaaatccgatccatcccgcgagatcgccccgcgcccttccccctcgataatggcgacggcgccgccgcgggtatcctgcggctcccttctccaggaacttcaggtactctggggacaaattggccagaatgaagcagaaagagacaggatgatattgcagctagaggaggattgcctcaatgtttacagaaagaaagtagagcaaacaagaaagcaaaaggaggacctgattgaagaactttcttttggtgaattggatattgagaaaatcctttctgctcttggagagcgagaatctttttctagggtagagaaacttgggggtacattactggaacaacttgcgaaagtagagcctgttctggaagatttgagacggaggagggatgagcgagtcgaggagtttatggttgtacaggcgcagatagttcggttacatgcagaaatttcaggaacaattgaaaatggggatcctgtacctcctttggtggatgagacaaacctatccttaaggaggctagaagagtttaagagccagcttaaggagctccaaagctgaaaagaatctcaggctgcaaaagattgatgtacagatcaattgtatccatgaaatctgcaacatgatgtctcttgatctcaagaaagaactttatgatgttcatcccagcttcgttgagttgggaaggaccacatcgatgagtataagcgacagcacacttgaaaggcttgcaggaaaagttcattcgttaaatcaagaaaagaaacagaggcttcggaagttgcaagatcttggcagcacacttattgagttatggaacctaatggacacaccaactgctgaacagaaatgctttgaccatgttacttctttgatttcagtctcaccaagcacaaaaatgccccaaggatgccttgcacgtgaacttattgagaaggtagaggttgaggttaagaggctgaattgtttgaaagccagcaaaatgaaagagcttgtattaaagaaaatgattgagcttgaagagatctacaaaagtgttcacatggatattgacagtgattacgagaggagaattctcaatgatcttattgattctggtaaagcagatctctcagatttgcttacaggaatggatggtcgaattacaaaggcaagagagcacgcctctaagcagaaaggaaattctagagaaggttgaaaaatggacattagcatctgaagaggagagttggcttgatgaatatgaaaaggatcagaatcgctataatgctggtcgaggagctcacaaaaatctcaagcacgctgaaaaagcaaggatgctggttagcaaaattccatctctgctggagaatttaactgctaaaattaaagcttgggaaaaggagaacggtgtcccatttatgtatgataagataaggctgttggatagtttagaagaatacacctcaagaagacagcagaaagatgaggagaaacggcgatcgcgggagctcaagaaactgcaagaacagtatgcagcagaacaaggtgctacgtttggaacgaagccaagccctgcgcgtccaccttcggctaggaagcctcttgggcagagctcgaacgccaacataatcagtggaactcctaccagccgccgtgtctgtaccccgatggcacgcaagggaggcttgtcttctggaaaagtgaaagagactggcaagacagcctttataccggcaaactatgtggcccttcccaaggattgctcagacaattctaacctgtgaggctgtgagaatgtcaacaccagttataagtaggagtcttttactcgggcttctgccttttcattttgcttgatctattcgattagcatcttgctaaatagttggtccgttatgtgatctgaacttttgatgcgaaaacctttctgacgtgaaatgaccccatctataggatgattctgtactggaagattcctgattttaacttgacagtgtccatttaaattatgttgtctttcagtccaaaaaaagttgtctttatgtagtttacttgactcacctaaagtaaatttcatctcccgatagtttcttcggttgatactgcagttatctgcaaaatggttttctaatttgttcttatacttgtttctcaacaattatatatcaaaatggagatttccttgc

SEQ ID NO: 27156 - DNA, 1616 bp, Oryza sativa
  ref <308>: DATABASE ACCESSION NUMBER: AK102598
  ref <309>: DATABASE ENTRY DATE: 2002-08-28
tgtgctaataacctcctccactcgatcacctcctcttccccgccaagctcagcctgcctatccactcccactcccatggcggcaatcgatctctcctcccccgcaagatcatcgccggcgcctctctccccgcgccgcggctccctgcacctcctcctccgacgcccgcgccgacccaccctccgctgctccctcgacgccgcgccaaagcaggctcaggctcagggcccgcccgcggcggtcgcggcggaggaggcgcccaccgcgcgcaaggagtgctatggcgtcttctgcaccacctacgacctcagggcggatgagaagacaaagtcctggaagagcttagtgaatgttgctgtgtcgggtgcagcagggatgatatcaaatcatctgcttttcaaacttgcctctggtgaggtttttggaccgggccaaccaatagcacttaagttgttgggctctgaaagatcaatacaagcacttgaaggtgtggctatggaattggaggattcactgtatccattgctaagggaagtcagcattggtatagacccttatgtagtcttcgaagatgcagaatgggctcttcttattggggctaagcccagaggtcctggaatggagcgatctgccttactagatatcaacggtcaaatctttgctgaacaggggaaagcacttaactccgtggcatctcggaatgtgaaggtcatagttgtcgggaacccctgtaacactaatgcattgatttgcttaaagaatgctcccaacataccagcaaaaaactttcatgcattgacgaggttggatgaaaatagagccaagtgccagctggcactaaaagcgggtgtattttatgacaaagtatcaaatatgactatttgggggaaccactcaacaactcaggttcctgattttttgaatgctaaaattaacgggagaccagtgaaagaagtcattaaagacacaaagtggttagaagatgaattcaccaaaacagttcaaaagcgtggaggagtactcatacaaaaatggggcagatcttcagctgcatcaaccgccgtttccatcgtggatgctattaggtcccttgtaaatcctaccccagaaggcgattggttctctactggggtttatacgactggaaatccttatggcatagcagaggacatcgtgttcagtatgccatgcaggtcaaagggtgatggtgactacgaactagttaaagatgtggcaatggacgatttcctctgggaacggataaaaaagagtgaagctgaattgctcgccgagaaaagatgcgttgcccatcttactggagagggcaatgcattttgtgatcttcccggagacaccatgcttccaggagaaatgtagaatcattgttgcggtaaccctggcttgtgttatttcacaggggttttcgacggaaacacacacacacaaactactagtagctgagagaaacaactgcttgcagattacttgcagcagttatttatacgtatgtataataagtatttatttaataaggatgccacagaaatttcaactatgttgccgagtttgtacactataatacaatcaaccaaatgcaatgcggctgatcgtatagc

SEQ ID NO: 27157 - DNA, 2597 bp, Oryza sativa
  ref <308>: DATABASE ACCESSION NUMBER: AK102599
  ref <309>: DATABASE ENTRY DATE: 2002-08-28
tctccattaagtaatgatgaagccgatgcccctgccaatgagtttgtgactgccaggacaaagttggagatggattctgtgcaaaagtatgggcataatggtactcaaggtgcttctgtatccccacaatgtgataacaacccaaataaccggaattatggtgtaaggccaacctggaattctcgtcgtggattacgtggtaattttgttcctcctatcagaagtaatggaggatccacttccaatatgacctcacgggtcattggaaaaaatgatgattcaatgggagattcaacaagaaaatgtttagaaatgctttgtggacctgatggtgagcttcctgagaagctgagaaatctggaacctcgcctaattgagcatgtcagtaatgaaataatggataaagatcctaatgtccgctgggatgacatagctggtttggaacatgcaaagaagtgcgtgacggaaatggtgatatggccactgctacgtccagacatctttcacggttgtcggtctcctggaagaggtcttctattgtttggacctcctgtgggtatttatctcatctggttatgttgctcttcccccattttattcaatttaaagataagtgcattaatttccacagggaacaggcaaaaccatgattggaaaagcaatagctggtgaagccaaggcaacatttttctacatttctgcaagttcactgacaagcaaatgggtctgtctgctgcttgttttaattttcaacatagttccatttgtatcctataaagtcaaggctagttacatctttctggtctgcatatctttaatcaatcataaaggtgctacggaaaacaaattcatttgtttatatgctaataaatccatcttattaatgttttcaaagaattatagtctatatggattagaaccaagatttagtacaagcgtggaacatgcttgtactccctacaattgtttgtgatctctctcacttgctaattctctcatcccagcctttatatgccctctcctcagaaagtagaaatcctaatctctgtcaaactatgtttgcccattttgtgcacagtaattatgcaatctttttttttcaaaaaaaaatacattatgacatagaatgtgaaggcatacctttagattgataatgattgttaattctcctgctgtgcagattggcgagggtgaaaagctagttcgagcactatttggggtggcctgttgtcgtcagccagctgtcatatttgtggatgagattgattcactactatcacagcgcaaatcagatggtgaacatgagtcaagtaggaggttgaaaacacagtttctaatcgagatggaaggttttgacagtggaaatgatcaaattttacttataggtacctcatgcgttaaaaagatgaaaatatcaagtgtgatatgcattaatgtatgtcatggtaggaattacaggatatttatatgtatgaggtttgagcatcaacatagtatgtgcttttctattgtccttgtgaaatgcattattgcatatccatctttgcctaaaggcctatgctttgaagttgtgttgcatagtctatgaggtggatgttaaatgtggggtcataaccaatggtggaacttagattgggctgatgtcatggagaaaaaatgatggcaggagcaacaaacagacctcaagaactggatgaagcagcacggaggcgacttacaaaacgtctatatattccccttccttcatcagaggcacgggcctggataattcgcaatctattggagaaggatggccttttcaagctcacagaggaagaaacaaatattgtttgcaagttaacagaaggttactcaggatctgacatgaaaaatcttgtgaaagatgcctcaatgggaccactaagggaagctcttcaacagggtgttggcataacaaagctaaacaaggaggacatgcggccggtgatgctcaaggattttgagactgctttgcaggaggttagaccttctgtttcctcaagtgaactgggaacttatgaagaatggaacaggcaatttgggagcttagcaaattaatttgcagggagatgttgaaaccttgaaggcgctagtatgctttcccatgcaaagcatgcgaaacatatgcttgcgagagtcgacagaggacaatgaagcataccttgtgcagccatataccttcagactacttgtgatcactgatgcaggtattccttgcctctcagctgaaagacttccaaaggcgctgcaaatctgatggtttggatgcgtgttatttttgctcaatgtcaagtatgctggcagttggtgatgctgtatgagttggtcttgtggtgcttcaaaagaagctacttcgaggagtcgcaggaattttcattctttgcaaagcaagctaccaatgttcagtaaagcggtgtttatctgtatgcattcagctattttgttactatggtgctgaatgcataatgcatatcctaaattcctaattatgatgttatgttttttttttttttttgctttcttgtggtttgtttaattctgtcacagattcgatgaaactgccctatgctaattttgcc

SEQ ID NO: 27158 - DNA, 1954 bp, Oryza sativa
  ref <308>: DATABASE ACCESSION NUMBER: AK102600
  ref <309>: DATABASE ENTRY DATE: 2002-08-28
gagttttcccacgccaccgtcgaacaccttcacccatggcgtccatggccgccctcctcgtcgtcgtcttcctcgccggctgccacgtgggggtagtggtggcgcaggggaggagcaccgcggcggcgcatggcatcggggtgaactacgggagggtggcggacgacatcccgccgccggcgaggtcggtggagctcctccgggcggtgggggccgggtcggtgaagatctacgacgcgaactcgagcgtgctccgcgcgctggcggggacgcgcatgcgggtgtcgatcatggtgcccaacgagatcatcccggggctcgccgcctccgccgccgccgcggacaggtgggtggcggagaatctggtgccctactacccggagacgcgggtcaagtacctcctcgtcggcaacgagctcctctccgactactccatcgccaactccacctggccccgcatcgtgccggccatggagaacctccacgtgagcctccggaggaggaggatcagcagcgtcaagatcagcaccacgctcgccatggacgcgctcacgtcggggtcgttcccgcggccgccgtccgccgcggcgttccgccccgacatcgccggcgacgtcgtgcgcccgctgctccggttcttgaacgggacgaactcgtactacttcgtcgacgcctacccgtacttcgtctgggccggcaacaacgacaccgtcccgctcgagtacgcgctcttccagggcggcggcggcggcggccgctacgttgatccgggcacggggctcacatacaccaacatgctcgacgaaatgctcgacgccgtggtgcacgcgatggcgaagctggggtacgggggcgtgaagctgggcatcgcggagaccggctggcccaacggcggcgactacgagcagatcggctgcaacgcccacaacgccgccatctacaacaggaacctcgcggcgcggatggcgaggagccccggcacgccggcgcggcccggcgcgaagatgccggtgttcgtgttctcgctctacaacgaggacctcaagccggggcccggcacggagcggcactgggggctgtactacgccaacggcacggcggtgtacccggttgacctcgccggagcgcggccgctccggtcgtacccgctgctgccgccgccggagaacgacgcgccgtacaagggccccgtgtggtgcgtgctcgccggccgccgcggcgagaagctgaacgagacggcggtaagcgacgcgctggcgtacgcgtgcgggcaggggaacgggacgtgcgacgccatccagcccggcggggagtgcttccggccgaacaccacggcggcgcacgccagctacgccttcaactcgtactggcagcagctgaggaagaccggtgcgacgtgctacttcaacaacctcgccgaggagaccaccaaagatccaagccacggatcatgcaaattccacagttctttggactaactgattgcatgggaggacaatatgaaaatgaacaacattgttctcgatttattttatttttgtcaaacctgattagatttagacccaggaagttaggtagttgagtacttctgtatctgctcatcgtctacaaaacctgtgaactgtgatgtaacagcgaaatttgccgtctgtttttctgtggcttaatcagtagaagaagatctgtggcttaattagaacgaaattttcagaactgaaccacctgcctctgcatgggcctcacatgggccatacatgggcctgcacctgcctctgcaaccgagctaggagtagcagttctgccacacggcccgtctacaaggatggtgttgtactgtgtcactcatccttcgagttttagttttttttttgtaatatcttttaatagtttgcacatcatctacagaaatattttgatgtacgcaagttatttaaaaagaatcttttatattttc

SEQ ID NO: 27159 - DNA, 3447 bp, Oryza sativa
  ref <308>: DATABASE ACCESSION NUMBER: AK102601
  ref <309>: DATABASE ENTRY DATE: 2002-08-28
ggcgaaagggaaaaaccccgcgctgtgtagggttttaggcgggtcgaggtggaggggggaggatggccggcggctcgtcgccggcgatacggccgatcggcaagtcggcggtgcaccggatctgctccggccaggtcatcttcgacctctcctccgccgtcaaggagctcgtcgagaacagcctcgacgccggcgccaccaccgtcgaggtcaccctccgctcctacggcgaggactccttcaccgtcgccgacaacggcaccggcatctcccccaccaatttccaggcgctcgctctgaagcaccacacctccaagatctcggacttcggcgacctcgcctccgtcgccaccttcgggttccgcggggaggcgctcagctcgctctgcgcgctggggaagctgacggtcgagacgaggaccaaggacgagcccgtcgggacgcgcctggagttcgcgcactcgggcgtggtgaccggcgagaggaagatggcgcggccggtcgggaccgccgtgaccgtcgagaagctgttctccacgctgccggtccggagcaaggagttcagcaggaacattcggaaggagtacgggaaagtgatctccttgctgaatgcctatgcgttgattgccaaaggggtcagattagtttgcacaaatactgttggcaagaattctaaatcggcggtgcttaggactcaagggagcagttcactgaaagataatatcattaccgtatttggtctgaacactttcaagtgcctgcagcccttcaatgtgacaatctcagaaggctgccaagttgatggctttctttccaaacctggacctggtagtggtcgcaattcaggggatagacagttcttctatgttaatggcagacctgtggatatgccaaaggtttccaaacttgtcaatgagctgtacagaagctcaaatgccaagcaataccctgtggctgtattgaatttctgtattccaaccacatcttatgatgtgaatgttgcgcctgataagagaaaaattttcttctcatctgagcatgccattttgctatctttacgggaaggtattgagaatctgtactgccctcaacaatgcagtttctccatcaacagcgttgaagatcctgggaaggaaatggacccagccatcgatgggtctgatgaagacatgtgtttaacagaaaaggagaatgtttcagctcctgaaaatgacgatgacatggatgaaacagatagtgatgatgaggttacaccagagaatcagaaagtgccttcttcagtgacaacaagggtagccactggatctacacccaaagatgtgagccccttgtcaagaggcccacctgctcagcttgatagatctactttgctttcagcctaccggtatgaacaacgagaaaagacgcctacacgagtaaaaagttatccagcacaagcaaatcatgttagaacagggcttgctgcaaagtcttctccttcaagtgctgttcaaccttctattatgaaatttctatcacaaaataaaaggaaacacgaagacagttgcaatcttatttctgaagctccagtgctgagaaggggaacatgcttggagcaagtgaggagaacagatttaggagtgaattcaccaactgcactaacctcaagagtatctaatattccagaggttaatgcacctcaaggaacaaatcctttgcggcaccattccctgcaatcttttgtacctgagatgccagaagattcaccacagcattctgaaccacctaatattgtttctcatcgtgatgaagtgcctcagttgcgtccatgtgatgttcacgctacagaatctgaagtggataaccagcatgatccatgccattccaagtttggtgctcccagtcgatgttcagaagtggaaccccaaaataaactgacaaatatttccttgcctgatgctcattatgatggtcatgacactgcagcacattctggacaatcatcttatccagttatgcaatttacacttgctgatcttagaagaagaagaaggcatagttttatgatatcacatgcaaaaaaaggaagttttcctgagaaatcaacaaggtgttataaagctgcgacactggataactatgtaccagataacgaggagggaaaatcgaattctttagctgcagccaccagcgagttagataagcttttcagtaaagatgactttggagaaatggaggttgttgggcagtttaatcttggttttatcattggaaagctggaccaggacctatttattgttgatcagcatgctgctgatgagaagtacaactttgagaacctttcacagtcaacaactttaaacatacagcctctccttcaaccactgagacttgacctatcaccagaggaagaagttatcgtttctatgaacatgagcactatcagaaagaacggttttgttttagcagaagatctgcatgcttcaccttgcaaccgctattttataaaagccgttcccttcagcaagaatattacatttggtgctcaagatgtgaaggagttaatctccatgcttgctggcagtcaaggtgactgttcaataatcagcagttacaagctcgacagaactgattctatttgtccttcaagggttcgtgctatgttggcttcgagggcttgccgaatgtctaccatgataggtgatccattgacaaaaactgagatgaagaagatacttaagaatttgacaggattgaggtccccttggaattgccctcatgggaggccaacaatgcgccatctagcagatctccatgctataaaaactgaaggatcgaaggcaactttctcatgatgtctggcagagtttaggttgggtttatgatggatgctcttgcctttgcgctgctaccattccaaggaaattaggcgctccatggccaacattccttgatgtgtatagatgccagtctctcccacctgtttgagagcctgtgtgacctattcgtgtactaacttacatatgtgatacatacatgacatgcgtgatagtggagaaccttgtttctaagccttcgaaatgggatgcatctccttgcccactagaatccttttgctcggagactaatgccggaagcgaaatactccaacacctttgcaaggatgacgagcaacaaaggtgacatcaggttatcagggaaagctatctggggaaacataaactgatgcatgtgcttacctttattgtgtggttaaaatccagacaagatgtaacttaggtacttgtgttgaaaatgcctcgagtttctgagttgtatgcaacaaagctcttggctgtatttagttgcaggcttgcatttttaacgccttaccttatctataaacagtagacacttgctctcagggtatggattaccctgtgctatttatattatctttttgagcctggaacggctggtagatcatag

SEQ ID NO: 27160 - DNA, 3050 bp, Oryza sativa
  ref <308>: DATABASE ACCESSION NUMBER: AK102602
  ref <309>: DATABASE ENTRY DATE: 2002-08-28
gagatgccatcctgagcttctagctcgcgagtgatctcttcttctagctcagtaaccacagctacaacctacagcttacagtgtccgcaaaattgtaacattgtgtccttccatcggcaacaatggcggcctcggtggagtacaagctggctccgcacccgtgggcgagcaatgctccgtcgagcaacctcgacttgttcccgtccggcggcggcaagcgccgttcgggctcggagaccgactccgacgacgaggacagcataccaccggactggaggtcgctgtaccacccgcggctggaggtggcggagccggccgtcaaggacccccgcgacgaggccacctccgacgcgtgggtgcgtcgccacccggcgctcgtccggctcaccggcaagcacccgttcaactccgagccgccgctgccgcgcctcatgtcgcacggcttcatcacgccggcgccgctccactacgtgcgcaaccacggcgccgtgcccaaggcggactggtcgacgtgggccgtggaggtgaccgggctcgtcaagcgccccgcgaggctcaacatggagcagctcgtgaccgggttcgaggccgtggagctccccgtcacgctggtgtgcgcgggcaaccggcgcaaggagcagaacatggtgcgccagaccgtgggcttcaactggggccccggcgccatctccacctccgtgtggcgcggcgtgcggctgcgcgacgtgctgcggtggtgcggtgtcatgggcgcctccgccggcgcggccaacgtgtgcttcgagggcgccgaggacctcccaggcggcggcgggtgcaagtacggcaccagcctgcgccgcgaggtggccatggaccccgcccacgacgtcatcctcgcctacatgcagaacggcgagccgctcacgcccgaccacggcttccccgtccgggtcatcgtcccgggcttcatcggcggccgcatggtgaaatggctcaggcgcatcatcgtcgcgtccagcgagtcggagagctactaccattaccgcgacaaccgcgtcctcccgtctcacgtcgacgccgagctcgccaatgccgaagcttggtggtacaagccggagtacatgataaacgagctgaacataaactcggtgatcaccacgccgggacacgatgaggtgctccccatcaatgcgctgacgacgcagcggccgtatacgatgaagggatacgcctactccggcggtggccggaaagttacaagggtagaggtgaccctggacggcggcgagacgtggcaggtgtgcaaccttgaccacccggagaggccgaccaagtacggaaagtactggtgctggtgcttctggtccgtcgatgtcgaggtgctcgagctgctcgccgccaaggagatcgccgtccgcgcctgggacgagtccctcaacacccagccggagaagctcatttggaatctcatgggcatgatgaacaactgctggttcagggtgaagacgaagacgtgcaggccgcacaagggggagatcgggctggtgttcgagcacccgacgcagccgggcaaccaggccggcgggtggatggcgaggcagaagcacctcgagacgtcggagagcgcggtgagcacgctgaagcgcagcacgtccacgccgttcctcaacacggccaccacgcagtacaccatgtccgaggtgcgccgccacacgacgccggagtccgcctggatcatcgtgcacggccatgtctacgactgcacggggttcctcaaggaccaccccggcggcgccgacagcatcatgatcaacgccggcaccgactgcaccgaggaattcgacgccatccactccgacaaggcccgtggcctcctcgagatgtaccgcatcggcgagctcatcgtcaccggcagcgactactcgccgcagagcagcagtgctgacctcacgtccatcgttgagagccctacggcagcggcggcgcccgccgtgccggtgtcgaccgtcgcgctgtccaacccgcgggagaaggtgaaatgccggctcatggacaagaagagcctgtcctacaacgtgcgcctgttccggttcgcgctgccgtcgccggaccagaagctcgggctaccggtcggcaagcacgtgtacgtgtgcgcgtcgatcggcggcaagctctgcatgcgcgcgtacacgccgacgagctccgtcgacgaggtcggctacatcgagctcctgatcaagatatacttcaagggcgaggaccccaagttccccgacggcgggctcatgtcgcagtacctggactacctgccgctcggcgccaccatcgacatcaagggcccgatcgggcacatcgagtacgccggccgcggcgccttcacggtgaacggcgagcgccggttcgcgcggcggctcgccatggtggccggcgggacggggatcacgccggtgtaccaggtgatccaggccgtgctctgggaccagcccgacgacggaacggagatgcacgtggtgtacgcgaaccggacggaggacgacatgctcctccgggaggagatcgaccggtgggcggcggcgcacccggcgcggctcaaggtgtggtacgtggtgagcaaggtggcgcggccggaggacgggtgggagtacggcgtggggagggtggacgagcggacgctcagggagcacctgccgccgggcgacggcgagacgctcgcgctcgtgtgcgggccgccggcgatggtcgagtgcacggtgcggccgggcctggagaagatgggctatgacctcgacaagtcctgcctcgtcttctgaaacgtgacgtgtgtagtgtacgacactgcaaaaactgtacatatacgtagcatagttgcataaattttaattcaaagtttggagctctctcgagttccggtacatcggagtagcgcgcggcggtcgcattcgatggccatggaaaaagtgtagagtgtagattgatggatggttgtgcacatggttcatttgagaatcaagatgtatatttcattggtcatactagagcaaataaaaccgagatattactacgactgt

SEQ ID NO: 27161 - DNA, 3227 bp, Oryza sativa
  ref <308>: DATABASE ACCESSION NUMBER: AK102603
  ref <309>: DATABASE ENTRY DATE: 2002-08-28
gctgctcctcctcctcctcctctctctctctctctctctctcccgtgctgtgattgctgcctcggggtgggcggtgcgagctacatacagcacaccggcggcggcggcggcggcggcgaggctccgggagaggtccagctaggcgtggtgggtggtggtttcttgatttcttgtgtttgggctgtgtcggcggcgggtgatggcggcggcggctccgtgcgccggagcgcggggcggctaggggcggctgtttctctgaggcgtctctcccccggcggcggcggtggaggtttgttgttgttgtgttgaaggcggagaagaggggaggctttggtggtggtggaggaggaggatggcggcggcggtggcgatgcggagcggcagcggcagcgacggcggcggcggcgggtacgacaaggccgggatggactccggcaagtacgtgcggtacacgccggagcaggtggaggcgctggagagggtgtacgccgagtgccccaagcccagctcctcccgccgccagcagctgctccgcgactgtcccatcctcgccaacatcgagcccaagcagatcaaggtctggttccagaacagaaggtgccgagataagcagcggaaggaggcatcaaggcttcaggccgtgaaccgaaaattgacggcgatgaataagcttctcatggaggagaatgagcgtcttcagaagcaggtctcccagctggtccatgagaacgcgtacatgaagcagcaacttcagaatccgtcattgggcaatgatacaagctgtgaatcaaatgtgaccactcttcagaaccctctgagagatgcaagtaacccgtctggactccttacaattgcggaggagaccctgacagagttcctctccaaggctacagggactgctgttgattgggtgccaatgcctgggatgaagcctggtccggattcgtttggtattgtggccgtttcacatggttgccgtggtgttgctgcccgtgcctgtggtttggtgaatctagaaccaacaaagatcgtggagatcttaaaagaccgcccatcttggttccgtgattgtcgaagtcttgaagtcttcacaatgtttccagctggaaatggtggcacgatcgaacttgtttacatgcagatgtatgctcctactactttggttcctgcacgagatttttggacacttagatacacaactacaatggaggatggcagccttgtggtctgtgagagatcattgagtggttctggaggtggtccaagtacagcctccgcacagcaatttgtaagagctgagatgcttactagcggctatctagtgcgcccatgcgagggtggtggctccatcgtgcatattgtggaccatctggatcttgaggcttggagtgttccagaagtgcttcggccactctacgagtcatctagggtagttgctcagaaaatgactactgcagcactacggcacatcagacaaattgctcaagagacaagcggggaggttgtatacgctttggggaggcaacctgctgttttgcggacatttagtcagaggttgagtagaggcttcaatgatgctataagtggtttcaatgatgatggttggtctgtcatgggtggggatggcattgaagatgtgatcattgcttgcaatgcaaggaaggttaggaatactagcacttcggccaatgcttttgtaactccaggaggtgttatatgtgctaaggcatccatgctactgcagagtgtcccacctgcagttttggttcgatttttgagggaacatcgttctgaatgggcggattataacttcgatgcatattcagcttcatctctgaagacaagctcatgttcacttcctgggttgcggcctatgagattttctgggagccagatcattatgccacttgctcacacggtggagaatgaggagattttagaagttgtccgtcttgaaggacaagcacttacacatgatgatggtcttatgtctagagatattcacctgcttcagctttgcactggaatagatgagaaatcaatgggatcctgcttccagcttgtctctgcaccaatcgatgagcttttccctgatgatgctcagttaatatcttcaggctttcgtgttataccgctgaacatgaaaacagatggtacacctgctggtagaacattagatttggcatctagccttgaagttggttcaactgcacagcccacaggggatgcatctatggatgactgtaatctacgatcagtgctgacaattgcctttcagttcccttatgaaatgcatctccaagacagcgttgcaactatggcccggcaatatgtccgcagtattgtttcctctgttcagagagtatcaatggctatttctccttctcggtctggcttgaatgctgggcagaagataatttcaggcttccctgaagccccaacgctagctcgttggatttgccaaagctaccagttccatttgggggtggagttacttaggcaggcagatgatgctggggaagcactattgaaaatgctatgggattacgaagacgctattttgtgctgttctttcaaggaaaagcctgtgtttacttttgccaacgagatgggactaaacatgctagaaacatctctcgtcgctctccaagatctctcactggacaagatatttgatgaagccggtaggaaggccctatacaacgagatcccgaaattgatggaacagggttacgtgtacctgcctggtggagtgtgcttgtccgggatggggcgccatgtttctttcgagcaagctgtagcatggaaggtgctcggagaagacaacaatgtgcactgcctcgccttctgcttcgtcaactggtccttcgtgtgacccaaaatccaatccaccatgctcgcagtcatcgtcgttgtcgtcagatctccattttttgcaatctctgtagaagagaggacaccaaaccaaccacaaacctgtcagctgttagctaatgattctactagcttttctagatctttgaaggcaaaatgctgccggtgcctgtaaagagtgtgtgcgtgcgtgtgtaaatttgggcgcgttttgcactaatttgatctggggtaaggaggcgctggctgctgctgtgctgtagtttggtaaaagttgagtacactaaccttggatggtctcgaactgtatgatgaaattcctagcagtaaaatttcaacttggatccgtgagg

SEQ ID NO: 27162 - DNA, 1874 bp, Oryza sativa
  ref <308>: DATABASE ACCESSION NUMBER: AK102604
  ref <309>: DATABASE ENTRY DATE: 2002-08-28
gagcttttaactgctcgtctcatcactctccacctctctccctctctctctcttcctcgcgctcccacgccacgcagcagccgcagatctccacccgcctccggcgagcccgccgccgccgccgccgccatggagtacgagcgcatcgagaagccgttccccacccagggcggtgggttctcgccgaagcggctgcgcgcgatgttgctgggggtggagaagcggcggaaggggcaggaggaggaggaggagggggacgccggggaggtggacgacgagtacggcgcggtgcccaagtcctctgtcagatccgacgccgactccgatgcgcgcagaggaggtagcatgtgcgaagaatacaaggatgtagatgtggtgagcaccatctcagaatcttcatcctcgttggagacagggagtgggcaccgatcgcgtgacacccactccatgggttcacgagtaagggtgcctgaggaggactcctgtgactctgagagtgtggcttcaaactttgagttccataaggagcgaggggcctctgctcggtctgtgacggcggcaatcgttcctccattctcaaagcctgcaccatcaaagtgggacgatgcccagaaatggatcgccagcccgacaacaaaccgtcctggtagggctggtggagtgccacagaggaagatggaaaaaactagctttggtggcgggaggctgccggctacgaaggttgtgttggaggccacagaggagatagatactaagagggttgatccaagccaagagaaaagggaaattgggtggcaaaaagcggtgaattgggccccacctgatccatatccagaagttgagacttgtgcaaagtctgcacttgctgaagaaattacagtagctgattcagctgttacttttagtcgccatgattcatctgccacgcttcagagcgcgacaacatgcatacctcccccaccaacagtccgatcagtgtcaatgagagacatgggtacagaaatgacccctattgcgagccaggagccatcccgaacaggaacaccggtgagagcaacgagtccagattgttctcgcccaactactccacgaaaaacaataggccccaatgcaatcggtgctgttattggccatggtgaatgtagcaacgtggaattaagtgaacaagaattgcaaatgaagactaggagggagataatgctcctcggcactcagcttggtaaaaccaacattgctgcatgggcaagcaacaaggaagaggaaaaagatgcatcactttcgcttaaaggagtgcccatggaccaatctacacagaaggtaacagaaattcgtgcagcagcgtgggaggaggcagagaaggctaaatatttagcaagatttaaacgagaagagattaagatccaagcatgggaagatcatcagagagcaaaaatcgaagctgaaatgagaaaaattgaggtcgacgtggaaaggatgcgagcccgtgcgcaggacaagctgatgagccagctcgcatcggcgagacacactgccgacgagaagcgggccgcggcggagctgaaacggagccgtgcggctgcaaagacggcggagcaggcagaccacatcaggagaaccggcaggatgccgtcctccattggctgctggaactggtgctcgtagtagcgtagctaagctcaagcaactgaagcaagcaaaaagctctcctcactatgtctcgcaagacttgaagcgccatcatctgtttttaccgtgatcttgtagaatattgtcttttgattggtttcagtagatataagtcagaagaagacgagtcacttgtaagtaactatggagcagtatataagatgcaagcttcttgcctttttctgtgc

SEQ ID NO: 27163 - DNA, 1192 bp, Oryza sativa
  ref <308>: DATABASE ACCESSION NUMBER: AK102605
  ref <309>: DATABASE ENTRY DATE: 2002-08-28
gttacggctggggccaaccgccgctaagtccaaagagagagagaaaaaaaaaaaaactctccgcagccaaatcgagatctctttcccgtcctccaagccggcgactccctccccgtccggcggcggcgtcggcgtcggcgtcggcggcgaagagatcgatcgatggcgtcggcgttgtcctccctgcgctacggcgacagcctctcggtggtggcgatctcgggcgccacggccgtgctctgcgaggccatctcctggctcctcatctaccgcaccgccacctacaactccctccgcgccaccatcgagcgccactcccgcaagctcgacgccatgaaggccggcgcctccaactcctcgtcctcctcctccgccggcgccggcgcctccgggtcctcccagcccgcgggctcctcctcgtcgcgggccaagaagatggaccgcgtcgagaccagcctcaaggacgccgcgcgggagctgtcgctctccaagctcaagtccggcgccgtcgtggccgccgtgctcttcgtcgtcttcggcctgctcaactccctcttcgagggccgcgccgtcgccaagctgcccttcgccccggtgccgctcgtccagcgcatgagccaccgtggcgtccccgggaacgaccccaccgactgctccatggtcttcctctacttcctctgctccatcagcatccgcaccaacctgcagaagctgctcggcttcgcgccgccccgcgccgcggccgccgccggcgggggcctcttccccatgcccgatccgaaagtaaattgagctttcatgcacacccccatgaccgtgacggtgttgatttcggcatggacttccgtctccgagaagagtgattacgatggaaacggggagaaatgccatgagattctgtactcatacgcctgtttacaaattcgtttcccataacttgctagccaggtattcgcacacatgacctgcaaactgatggaagctagactttttatttttattattccatagagcaagcagtgaagtgaacttgaccacgtgaagccaggttgctgcgtgtcaatgaaaccgtgcagccagctatcgaactcttctagccttttgtctcttgtgtcaaagataacattgttgccatgatgccatcccctcttgctctgttgtgtggacttgtgattgggccattttcagcatc

SEQ ID NO: 27164 - DNA, 1433 bp, Oryza sativa
  ref <308>: DATABASE ACCESSION NUMBER: AK102606
  ref <309>: DATABASE ENTRY DATE: 2002-08-28
gagtggggtgtgagctctctgaacctcctagcttgcccgagacagagagaaaaagaaagcctcatctccggcccctcttcctccttgattccggtggctcgccgccggtgacgggagggagaggggtcaggctcaattgcgtctccttcgtatagtagtttagtcgggttagtctcgtagtcaagttagtctcgttctatgtccttcctgttctttgtctttggtcctctatgaagagtccagtattcccttcttcagatctgaaatattgtgggtggatcagccagggaggtcggtctttgctgtgccagacctcgatttcgttggccctagcgacgcctgattgtggaaaattcagctacagtgccggtggccgaaagtcttcaagctttgaggtcgctggccatagtttgcggtggatctggatggcttcaaccgatttccgcgacctctttgtccatctaatccttggcgctgtgcccttcctcagcgatgcactcagccgcgtcgtgtccggtgagggtgggctcacacatgcccagatcgtcgtcatatttggtgggcttggaggtgcagagttagctgagctgttggagcagttcgtgcttgctgattcctctcatgcgagcatcccgaacattgtctcgacagacaacacctccatcaatttgctgctgtgcctaaatcaattatgcctaaatcaattatccaagcagcagcacaagtcatgggccagcaaggagcacgccatgaatcccctgcatcatacaggcaaccaacaagctacacaacaaggcaaagctggtccagcaattctgtgcatgccggcaacgaagtctccttctcaatcctcacccatgggatacatcttaagttcgtaagactttatcatcgccaccatctagcttctctaaagcttaaggtcagctgggttttggatgcatcttttatttcattcctttgcagcagtatccatgttgaggttatcgttcgggttgagcaccgactatctgttagactttggtcggcagggatattgttagtgttcctcagatttaacgatgacttccatggcaatcattggttgagtccggtgaagccaccaacatatctacgactcaactccaaagctcaattagtgccaaatccgtggaggcagccggaggggtcgctggcaggtcaaatgggaagcacgtttgaagaggcccttgggtgcaatcgtcgcggcaatgccgcggatctccgacgattgtattcactactactgctgtatcagatgatctggaagtttgcttccatcattcaatcattacctttcaggaagatggtccttaacgtttgttgttatcaatttcttgcaaggtgatgtttcagggaatgttgttcccttccaatgtactatgtttaatatgcaataaaactttatgagtttc

SEQ ID NO: 27165 - DNA, 1257 bp, Oryza sativa
  ref <308>: DATABASE ACCESSION NUMBER: AK102607
  ref <309>: DATABASE ENTRY DATE: 2002-08-28
ggccctctgaccccgatagaaagggaggaaaaaaaaaagagaaggcgaaaccccaaatccgccgcgatggccgccgccgccctcctccgccgctcgccggcggcgcgcgccctcctctccccggcgctctcctcccgcctcgtcgcctccaagccccactcgtcgtcccccgcgccgccgccgccgccgtcgaaggcgggggcgaacaccaagacgttctcgatctacaggtgggatcccgactcgccgtcgacgaagccccacctcaaggactacaaggtggacctctccgactgcgggccgatggtgctcgacgtgctgctcaagatcaagaacgagcaggacccgtcgctcaccttccgccgcagctgccgcgaggggatctgcgggagctgcgcgatgaacatcgacggcgacaatggcctcgcctgcctcaccaagatctcgtcggcgtcctcggcctccacgatctcgccgctcccccacatgttcgtcatcaaggacctcgtcgtcgacatgaccaacttctacaaccagtacaagagcgtggagccgtggctcaagcgcaaggacgcgccgccgcagcccgggaaggagatcccgcagaccaaggccgaccgcgccaagctcgacggcatgtacgagtgcatcctctgcgcctgctgctccacctcctgcccctcctactggtggaaccccgaggagtacctcggccccgccgcgctcctccacgccaacaggcttccgctgttggggacgctaatcaaaccaaaacccaacatgttcatgcacatccaagctcgaggatatcacggggtatcggagaagagaaacttgctggatcacaaacgtagattgcttgcagcaaaatatgaactgaaaggaaagctttataaggctgtttgtagggaccctgatcttccagcagatatgcaggaccagtttcgctataagctgtccaagttgccaagaaatagctccatgacacgccttagaaaccgctgtatcttcacgggccgctcgcgcgctgtttacaagaaattccgcatgtctcgtattgtgttccggtcattggctaataagggtgaattgttgggtgttaagaaagcgtcttggtagatgctaacaaccagtagatcaaagcactagctctgcagtagtccagcacaataagtttgcctccatgcagtttttcagtgtttgcaacctgaaactatatttcaatcttatgaccagcagccaatctggcactctttc

SEQ ID NO: 27166 - DNA, 3182 bp, Oryza sativa
  ref <308>: DATABASE ACCESSION NUMBER: AK102608
  ref <309>: DATABASE ENTRY DATE: 2002-08-28
gggtgcgcgaaaccagaccatcgcaccgtccaccaccagtctcgtagcatcgtggcgccgcaccgcgccgtctccctctctctctctctctctctcttccccttcctcccctgaaacctaacgcgccaccgccaccgccgccgccgcctccctctcccaaatcttcgccgggaatcgcgacgatcaagccacgaggatcgctgctgctgctgcagcagctttgcctgtgcttaacgcccaggtataatgcggaccaggagccagcgcgacggccaccacgccgccgccgctgccgaaaccccgccttccggggcaagcggaggatcaggaggggacgttgcgaggggcggtggcacgcctcgccgtcgccggagggcttcgccggccgcggagaaagggaagtcgcccgccaaggtggaaatggaatcggcattggaggataaaagtaaaaacgttaaggtccatgcagagggttatgacgatgccgggatgacgaggttcggtagggatggctctgaaaagaacagtttggaggaagaagatccagatgcagctgatatggactgggaagaagggattgttttcgcggcggaacacgatgagtgttattcccatgagcttggagagacagtcaccgttgagttcactgatctacccctcttccactgaaaagaagactgctcggaggcttactgctgaagaaaaggagttggctgaactcgtgcacagggtccatttgctttgcctactagcaaggggtagggtaattgacaaggcttgcaatgatcctctgattcaggcttcaattctctctgttttaccacaacatgtactacggaattctgtagacactccaattctgaaagctaatgaactgcgtagtcttgtgagctggttccacaacactttcagtgtaattgcacaatccgacgacaaggggtcttttaaatcaaatttggcatttgctcttcaaagttatgtaggcactgctgaagaggtttgtgcactttcagtggcattgtttagggctctcaacttaacagctaggtttgttgcgaatctggatgttgctggtctcaagcctgacactaaatcaatggggacatcaaatcaggatgaacctaggctttgtacaaaggcgctgccatctagttcttttgttgcaggccataatgagtataataacctttcacctgtcctgtcacaaaacaatactgaaggtagcatcaatacaactccaaaacaagtcaaagttcaaggctgcaggaaaagtttgtctaaaaaattgtcgaagtgcaaggcaaatcagagagatagctctgcatcactatcaaaagatagctcatccagcagccaatatccttccacctccagtaatgctgaagtaccaagacgaaaaggggatttggaatttgagttgcagctggaaatggctcttttagcatctgcagctaaaagtcaagacaacaagctagcaactcaattaaatcagtcaactgatagcttactaagttcaactccaccattgaagaagttacgaaaaagtgaagaagcctcaagcaactcgagcgtggtttggtcgaggaatagagcaccgttattttgggctgaggtattttgtggtggcgaggcatcgtctggaagatgggtccatgttgatgttgcaaatgatattattgatggtgaacaaaaagtagaagctgcttccgctgtttgcaggaagcctttgagatatgttgttgcctttgctggaaatggtgctaaagatgtgaccagaaggtattgcctgcaatggcacagaattgttcaggggagagtgaatcctgagtggtggaaaagtgttttggcacccctagagcgtcttgaattggcagcaacgaacaacactgaagaaatggaacttcagaccagggccttaacagagcctcttcctaccaatcaacaggcctacaaagaccatcatctatatgcccttgagaagtggcttcacaagaaccaagttcttcaccccaaaggcccagtgcttggcttctgtaaagggaatcctgtttatcctagatcttgtgttcagacactgcaatcaagacatggatggttgcgggagggtctgcaagtcagagaaaatgagttgcctgcaaaggtcgtgacgcggccaaagaggactttcaattctcagtcaattcaatctaatagtaatagtaatgaagatgggcttaagccaaccatggaactatatggtaaatggcagctggaaccgctgcaacttccccatgcagtaaatggtattgtaccaaagaatgagcgtggtcaagtcgatgtgtggtcagagaaatgtcttccgcctggtactgtacacctgaggttaccaagaatattccaggtcgcaaagagacttggaattgattttgccccagccatggttggatttgattatcgaaacacccggtgccttccagtttttgatggaattgttgtctgttccgaattcaaaaatactatcttagaggcatatgcagaacaagaggaacggagacaagccgaggagaggaagcaggaggaagctcaggctcttattaggtggtatcagctgctgtgttccgtcgtaaccacacagcggttgaaggactcttacaaagcaccctcatcagagcacggaccagaaggaccatcccaagatgttagtcagcagaagggcacacgcaaaagtcgaagctcggaaacgaagactcgctcaagcagactacaggcggaccgaccatttgattctccttttcctgtccatgaccatgagcatgagtatccagaggaagatcagagcttcgacgaagagacgtttgtgaggacgaaacgctgtccatgtggtttttcaatccaagttgaggaattgtagcaaaatgatatcagaaatgcactaacttaaggtgtagcctgtttttggtcccaggtgaactctcaaaactatggtagctgtgatgcttctgacgaatgcaggttttgatgcatttgtcttgagttgggagttaagagtgagtttgctaaacccatagttcagctgttgcactgaaatgaggtgttgaaagttgaagctgatggtatgaaatgtagtgggtgttaaaactgttaacagtatatgcttgtttaagtttcagcatagtgccatcacgctaagattttatcaaact

SEQ ID NO: 27167 - DNA, 1215 bp, Oryza sativa
  ref <308>: DATABASE ACCESSION NUMBER: AK102609
  ref <309>: DATABASE ENTRY DATE: 2002-08-28
gattgtcctcctctccactacactacactgtgcacttctgcaggttgcaatggccaccatcccggaggtgccggcgagcgagcttatccagaccatgccgcgcgtcggcatgggcacggcggcgttccccttcacctcctcggaggacaccaccgccgccatgctccgcgccatcgagctcggctaccgccacttcgacacggccaggatttacgccaccgagggctgcgtcggcgaggcagtcgcggaggccgtccggcgtggcctcatcgcctcccgcgccgacgtgttcgtcacctccaagatctggtgcagcgacctgcacgccggccgcgtcgtgccggcggcgagggagacgctccgcaacctcgggatggactacgtcgacctgctccttgtccactggccggtgagcctcacgccgggcaactacgacttcccgttccccaaggaggtgatcctgccgtcgttcgacatggagggcgtgtggcgcggcatggaggagtgccaccgcctgggcctcgcgcgcgccatcggcgtcagcaacttctccgccaagaagctggagcagctgctgtcgctcgccgccgtgcggccggcggtgaaccaggtggaggtgaacccgatgtggcagcagaggacgctgcgggaggtgtgccggcgggagggggtgcagctgtgcgggtactcgccgctgggggcgaagggcacgccgtggggcagcgccgccgtgatggactccggcgtcctgcaggagatcgccggagccaagggcaagacgcttgctcagatttgtttgaggtggttgtacgagcaaggtgatgttttattggtgaagacatataatgagaagagaatgaaggaaaatctggacattttcaactgggagctcacagatgaagagagggagaggatcagtcagctgccccaactgaggggcctgcctggattggaattcatctctgaccatgggccttacaaatcagttgaagatttgtgggatggtgacgtctagcaagctacttagatacagtggagtatatatctaaataatcatgatggatcatgatgtggatctatcttaattatgtgcggcaggcatgggcacggcaccattcccgtacacgttctgcgatcaattaatgtatggaccatacatgtatattaattgctgtatacctatccacttatttaaaacacgtcgacacgttcacg

SEQ ID NO: 27168 - DNA, 2158 bp, Oryza sativa
  ref <308>: DATABASE ACCESSION NUMBER: AK102610
  ref <309>: DATABASE ENTRY DATE: 2002-08-28
gactcctcctcctcctcctttccctccctccgcctccccccacctcgcgtctcgcggagcccggagagcagcggcgccgcccatggagtcgctcgcgctcctccacgccaagcccggcggcctccctccccgcgcggggctccgcctcccgctcccgcgcgcgcgatccgcgcgcgtctccctcccctcctccccggcggcccccgtatcgctccagtccccgctcctcctcgcttcgagaagcggccctacctcgcgggacgccgtcgtggggttgggattggggtgcgggctcttgagacggaggagcggcgctagtggtggtggtggtggtggggtctcttgcggcgcgcagcctgccgcggcggcggcggcgggggcggtgccggcggcgcagccggaggggaagaagttcctcggcgtggaggtgaagacgctgaagaagatcgtgccgctcgggttgatgttcttctgcatcttgttcaactacacgatcctgcgggacaccaaggacgtgctggtggtgaccgccaaggggagcagcgcggagatcatcccgttcctcaagacgtgggtcaacctgcccatggccatcggcttcatgctcctctacaccaagctctccaatgtgctctccagggaggcgctcttctacaccgtcatcttccccttcatcgccttcttcggcgcctttgccttcgtgctctaccctctcaggaatgtgatccaccccaccgcgctcgccgacaagctccttgcggcgctcggcccgagctttcttggccccgtcgccattctgaggatttggagcttttgcttgttctatgtcatggccgaactgtggggcagcgtcgtcatctcggtcctcttctggggcttcgctaaccagattactacagttgaggaagcaaaagaattctaccctctatttggtcttggggctaatattgcgctcatcttttctgggcgtactgtgaagtatttctcaaatctgcgcaagacattgggtccaggtattgacggatgggaggtgtctttgaaaggaatgatgagcttagtggtgcttcttggacttgtcatcacttccatctattggggggtgaacaagtttgttttgaatgatccttctcttccgaagtctgaccgtaagaagaaaaaggataaacctaagcttggaatgaaagagagtcttaaagttctcctctcctcaagatatgtaagggaccttgctactttagtggttgcatatggcatcagtatcaaccttgtggaggtcacatggaaatcgaagctcaaggcacagttccctagtccaaatgagtattcatctttcatgggtgatttctcaaccgctactggcattgctactttcacaatgatgctgttaggccggatcatactccgaaaattcggctggggagtggctgcaatgatcacccccacagttttgttgctgactggcgtcagtttcttctccctgattctatttgggcagcctctcactcctatgcttgccacaatgggcatgacccctcttcttgcagcagtttatgtgggtgcacttcagaacatattcagcaagagtgcaaagtatagtttatttgatccatgcaaagaaatggcctacattcctttggatgaagatatgaaggtgaagggaaaggcagccattgatgttgtctgcaacccattggggaagtctggtggagctcttattcaacagttcatgatccttacatttggctctttagctaactccaccccctaccttggtggcatactgttggtgattgttctagcatggctaggcgcggcaagttcactagacaagcaattctctagcttggctaaggaagatctcaaaagggatatgtctgcaaaagagaaggtagatccttccctgctcaaggctcctgaggctgatgtattggtggagcacacaaacggcactatagagagcgaagctactgcaactgagagttcaccatcaaactcatctccaagtaattagattcatctttctttgacaaagtcaatcgataggtaggagaatgattgcagtgggtagaaataatggtgatgaaacaattcacggtttctcaagtttgtaacagtgcgcagaatcaagctgcctgtttattttgtttgtaacgtatgc

SEQ ID NO: 27169 - DNA, 1263 bp, Oryza sativa
  ref <308>: DATABASE ACCESSION NUMBER: AK102611
  ref <309>: DATABASE ENTRY DATE: 2002-08-28
gactctgcgctgcgcctcctcccccctccatccatcgccgccgcttccgctgcgctctccttcatcgccatcgttgttcgccctacgcccggcggcgaggagaggacgggaggagacggtcaccgagagcgtgtgtgggtcacctcgtgccctagcggggcgccccatcgtggtggtggtggtggtggaggatcccgcgccggcatggagggaggggacagcgtcctggacgcggtgctcgacgaggaagccctagactacgacggcgatgacgtcgagatggcggacgcggacgacgccgtagaggaggcgcaggcgcaggaggatcctgtagccatcaccgcccccactgccgccgccaccggaggaggaggaggaggaggagaaggcgatggcggcgtggggcaggcggggaagaacaagaacaagaagaagaagaagaggaagaaatccgcgaggacgaagaacaaggggaagcccgacgggccgcccaagatcgccgacattaacagatttgttaatgaaacttgcaagcgcttgaaggagaagaagtcctatcttgtttggaatgctgttggctgccttggtgtttctgctatcagtgatcttgttagagaggttgaggccatccagaagtgtggaggccagattgttgctgatggaagtcgcttccgcaccggtggtggaatcctgtggaacatcttgaagtcacgggagccaaaggcatataaggaaattatggcgaagggaagggagcttgagaagcaattcaggtacaaacaaggcaggccgcaaacaagcagaaatgaagatgcaagctcacagggaagtgcgctaattgacgaggatattgaaccacatggtgaaaaggaagtatcggatgatcctgagcggttaattgacgcggagaagtcaccacatgtacctgataataacaaagctgaacgcaaaccattagcagacaggattcgtgttcttgttgcttatgatgatctatttgaagagggagagatacacgaaggggatgcgccatgaagtatttcgaaagtcttgccctttcaacccctcttgagcgttaattcttgaagcaaacatcaccgaatgggaaaaagggcatgtgtattaatcgacattacagtgaggcaattctttttccaattttgcctttatatgtgcctgattgggcagtaaggcagcggatgagttttttgttgagagcagtgagctgaaacaaactcaatattaatggaaagttacggcggt

SEQ ID NO: 27170 - DNA, 1296 bp, Oryza sativa
  ref <308>: DATABASE ACCESSION NUMBER: AK102612
  ref <309>: DATABASE ENTRY DATE: 2002-08-28
ggcagatccgacggagacaagcgcaccaagcccccccaccaaaccctaatcctccttcccccccctcccatggcgaagtacggagagggcgacgcgcggtggatcgtgcaggagcgcgccgacggcaccaacgtccacaactggcactgggcggagcgcgactgcctcgagtggtcccgctcccgcctcacctccctcctcgccggcctccccgtcctctccggcgagggcggcctcgccctccgcaccaccgcgctcgacaagctcgacggcgaggcctacgtcaacatccgcaaggggaaggtcatcccggggtacgagctctccctcaccctcgcctgggaggccgaggccaccaccgagtccggcgtcgtcaaggtctccggcgccgccgaggtgccctacctcgccgacgagaacgccgacgaggacccggagctccgcgtcaccgtccgcggcgacgatggccccgtcgcccgccgcgccaaggacgccttcctcaccaagggcaagcctctggtcctcgagaagatccgggagtacgtcgccgccatggcgaagggcggcccggctaaggacgagctggattccaagaagacccccaccaaggccgcggcggtagaggccggtggcgcggccaccgcgcctgcccctgcggcggagaagaaggaggaggcgccggccgtgaaggagaagaaggcgaaggcgaaggacaaggaaggattcaagacgatcgagatgacggagaaattctactgccgtgcgaaggacatgtatgagatcttgatggatgagaacagatggaaggggttcacgcagagcaatgcgaggataagcagagaggtcggagggcagttcagcctcttcgatgggtcaatcagcggcgtcaatgaggagttgcaggaagggaagctgatcgtgcagaagtggcggttcggtagctggccagacggcgtgcactcgacggttaggttggtatttgatgagcctgagtcgggagttacagtcataagcctcaaacaaactgatgtgccagaggaagacagatatggaaattcaactgtggtggagaacacggagcgaggctggagagaactcatcttccagaggatacgcggagtgtttggttttgggatctaaagcagtactttgactcttgagctggatttctgcttttcaggaagtcgagcgttaccatgtcacagttatccctgtctttgctgtcgcagtttattcgatgttagacagaaactttgcatattacggggaagtcggaaaaaacatctgttattcatc

SEQ ID NO: 27171 - DNA, 2154 bp, Oryza sativa
  ref <308>: DATABASE ACCESSION NUMBER: AK102613
  ref <309>: DATABASE ENTRY DATE: 2002-08-28
ggttttgtctccggctccgctcgccgcctccaaatcccgctcctccgctgctgctcctctctgccgcggcgaggcgagagatccgaatccaccgccacccgcgcccaccccgcccgcacaaaccctagtttttccggggttttgcttcccctccgcagctccgctccgctccgtccgtcgtctcctcccggcggctcggcttgctgtccatgctgtagccgccccccgcaggtggctgatgggctcccagaaccgccccccaccaccgcgcaagaggcagccgccgccgccggaggaccacctcgtcacctacaagcgccgccgctccaaagaaacacagcctttgccactcatggccaacggcgccaattctaagaaagacgccaaggcccaacattggattagctggagggacactctccacggcttcctccaatcccctgctattagccagggtggaggaattcagacctgcatccgtcatgctctccaacacaatccttgcttgctcaccaatggtgttgttgttcacactgaattcaaaggtaacccagctcattcccaaggagaggaagcaaaagtgcagcaccctaatggtgctgctggaggcaaggtggtttctgcagatgctgctatacaagatgcggctgccgcagcttcttccgaagctaacaaggcaatgtgtaataatgccctcttcgacattttggtctcccagaaatttgccttgttgtgccatttgctacttgggaccttccatgtcaataaacctggtgatgtcatcgacttggaaaaaatcgacgccaagatgagaaatggagactatgcccacaaccctgcactatttgacgatgatatccagcagatgtgggagaagtttgagcaagttggccaagagatgacaggtctagcgagcaacctttcaaccatttcacgagtttcataccaaaagcaggcttctggattttctgaagctgaggtggctgagcacagaatagaggaaataagtttgccgggtgctgtccacgttgtcacaaaggagtcgactaccaccgtgcagttggccccatgtgattctagtcattctacaataccgaaacgaactgtgccacctggacgtgatctgtgcccttgcgatggttgtggcaccaaggtagatgttgaagaaggcctaatctgtgatgaatgtgacaccatgtaccactttgcatgtgtcaagctactcaatcctgatattaagcaagtcccagcaatctggcattgttcaacctgcagcttcaagaaaaaagaattggctgcagataccacgaataatgttgcccatgactgcttgcatggtggtaactgtgttttgtgtgaccagctcgagctggtgaagacagaagaagaagatcccaagcttcccataaaaattgaattagctgaagaaagagaggggagctccgtctcaagcatgggggaagacaatgaaccagacctgtcaacaactgccctgtcaaacttgtgcaaacactgtggcacatgcgaagacgatgacaagagattcatggtatgcggacatccttactgcgtttacaagttctatcatatccgatgcctgaaaacaagccagcttgcaattgagcaacaaaagaagcttggttgctggtactgcccctcttgcctctgcagagggtgcttccaagacaaggatgatgaccagatagtcatgtgtgatggctgtgatgaaggttatcacatatattgcatgagaccagcacgcaacactatccccaaaggtaagtggtactgtacattttgcaagatccgcagggcagcggaaggaatgcataagtatgaggattctgtgctgaaaatacatgggaatagtaagcatgcttgtaatgtgaatcagtcgaaggattctgaaggtgatggtactgaaaagtgatcatcacaatagctttgtggattagcttctgagctcgcttggacaagctcaggaaaagagattctttggccccttaggagggctatacaccgactttgatactgaatcagttgtgtagtttatttaattaactgccgttgacatctacaggaagaactcttacctggtgaagatggtgtatgtagtcttttagctgggcggaatgatgtgttgtttacttgtcc

SEQ ID NO: 27172 - DNA, 1869 bp, Oryza sativa
  ref <308>: DATABASE ACCESSION NUMBER: AK102614
  ref <309>: DATABASE ENTRY DATE: 2002-08-28
gttactgaacttctctgaattgaagaagcttccagctgagctgggggatcaaaatggaggtgcttcttccccttctccttgcctgctctctcctcttcaccattgcaacccctatcagagacatcaccgacgtttgtgcctcacagatcagtgatttccagcacctgaacagctccggactgcacctgacgctgcaccacccgcagagcccctgctcgccggcgccgctcccctccgacctccccttctccgccgtcgtcacccacgacgacgcccgcatcgcccacctcgcctcgcgcctcgccaacaaccacccgacatcgccgtcgtcatcgtctctcctccacggccaccgcaagaagaaggccggcggcgtcggcggctcgcaggcgtcgtcgtcgtccgtgccgctgacgccgggcgcgtcggtggccgtcggcaactacgtgacccgcctgggcctcggcacgccggcgacctcctacgtgatggtggtcgacacggggtcgtcgctcacctggctgcagtgctccccgtgctcggtgtcgtgccaccggcaggccggcccggtgttcgacccgcgcgcgtcgggcacgtacgccgccgtgcagtgctcctcgtcggagtgcggcgagctccaggccgccacgctcaacccctccgcctgctccgtctccaacgtctgcatctaccaggccagctacggcgacagctcctagctccgtcggctacctcagcaaggacaccgtctccttcggctccggcagcttcccgggcttctactacggctgcggccaagacaacgagggcctcttcggccgctccgcggggctcatcggcctcgccaagaacaagctctcgctgctctaccagctcgccccgagcctcggctacgccttctcctactgcctcccgacctcgtcggcggcggcgggctacctctccatcggctcgtacaaccccggccagtactcgtacacgcccatggcgtccagctccctcgacgcctcgctctacttcgtcaccctgtcggggatctcggtcgccggggcgccgctcgccgtgccgccgtcggagtaccgcagcctgccgacgatcatcgactccggcacggtgatcacgcggctgccgccgaacgtgtacacggcgctgagcagggccgtggccgcggccatggccagcgccgcgccgcgggcgccgacctactccatcctggacacctgcttccggggctccgccgcggggctgcgcgtcccgcgcgtggacatggcgttcgccggcggcgcgacgctggcgctgtcccccgggaacgtgctcatcgacgtcgacgactccacgacgtgcctggcgttcgcgccgaccggcggcacggcgatcatcgggaacacgcagcagcagacgttcagcgtggtgtacgacgtcgcgcagtccaggatcggcttcgccgccggcggctgcagctgaggacccaaactgcagctggccgactcaagctaggtaaaagagcaatgctgcttcttctgctgctgccgccgcctcctatctctgctcaggcacagaagtgacaacttcttaactgcaaattcattcatcacatgtaaatgcatatatatgtgccaggaagttacgagtgtggctctaggacctagttttacatgtcataaacaaatatagatgtacaaataaatacagggtaactactttaggtgaagataatacttatcaatgtgaaagattattatgttatatggctgcttgttagcaatcaagccaaaatgttcatcatgtacatgtaaactatgggtgtgtttgggttctaaatgttcagggtgaaaagaaaagcagtataagaacatgaagatttgagtt

SEQ ID NO: 27173 - DNA, 1927 bp, Oryza sativa
  ref <308>: DATABASE ACCESSION NUMBER: AK102615
  ref <309>: DATABASE ENTRY DATE: 2002-08-28
gacaacgggagccgaaaaccgcagggggttcacgggccgccgcccccactgcaccctctcccacccccatcacggcgcctcctcgccctcgcgccgcccgccgtgtgccatggcggaagtagcggcgacgcagcacggccacgccgtcgccgcgcgcgcaatgccgggccgcggcgaggtggacacgtcgtccccgttcgagtccgtgcgccaggccgtcgacctgttcggcggcggcgccctctccccctggcgccaccaccacccgcctccgcctccgccgcccccacccctgcaactccgcccggaggaggtagaacttatgaaagttgaggaacaaactgtgaagttagagatggagctttttgtcaaggaaaaagaaacgtttaaggttttgaaagaattacaggcaacaaagcaggttgctgacaacttgaagttacagttagagaaggcggcatctgagagtgcagcttctgcaagaggtcacagtgatgcagggaaggtgtatccactccctgacaccgaacggaaatgcagttaccatactgggcagccggtcgagagcgcaaaaggaaatcagtccgcgctaaccacattgatcaagctgaatcaggcaaaggcattcctaaacatggatactgtcatgacgattaagaggcagatagaggaggagaaaggatcacttgaaaaaactcgtgagaggttacagttgaacagagcgaaggcttcatcacttgaagcagacttaaacaaaattgtttcacagttacaagcagcaagaggccccaaacctactcttgaaccttctgatatctggttgcagatgaaacagttaaattcagagaaagagaaacacaggaagattgctgatgactcgaagaatgagattggcgaattaaccgccacgattgagcacacaaagtccaggacgaagaccctacaattcaggattgtcatggctgaaaaattgaaggaagcctcaaggcgcggagaagctcttgctcttgcagagagaaagaacctgagcaatggggagcacgaggccagtaccgcatccgatgtcacactttctgtcgaagaacactcagtgctggtgcaaaaagcagaagaagcagatgccgcgtgtaggaagaaaatcgacgcggcaatgcaagagctggatcaagcaaaccggggcaaactggaactcttggaaagagtagaggaggcaatggctgcagttgagaccagcaggaaggctttggaggaagccctaaagagggaggaatccacgaacaaagcgaagctcgtagccgaagaatcactcagaaagctgaggtccgagcaaatcatccagaattggcggccgaccggcaacagctccgtcaaattcaagacctcagcagcgacgacggcggcggtggtggctcaccggagagccggctccgggatctacgacgtgaacgggctgagcctggtgacggcgacgcccaagagcacgaaggcgatgtccatcgggcagatcctgagcatgaagctggaccaccgggagctcgaggtcgccggcaagggcggcggcgccaagaagaaggtgtcgctggggcagatcctgagccagaagtacgacgccctgtcgccgctgaggatcgatcacggcggcgcgtcgcgcaggcagttccaccccaggaggaggaagctggggttcgtcgtgtacgcgctgctcctcgccaagcacaggcacaggaagaagaggcagcccgccgccgccgccgccgccgactcctcctcttgcacccatggcagcttcagcaccaaggctgtgtattaattagcaacatttttttttcttctggatcaatgagtagtagctatgcagtgtaatagtacagacttatgaataatcagcatgtgtaattagttagttctatgcacaaagttgaaattc

SEQ ID NO: 27174 - DNA, 2556 bp, Oryza sativa
  ref <308>: DATABASE ACCESSION NUMBER: AK102616
  ref <309>: DATABASE ENTRY DATE: 2002-08-28
gggaaaaggaggggtaaaggtgtgtgaggtgaaggcgaggggagaagcgagaagctcgtgagcagcagcggtgtgtgtgtgtgtgtgtgtgtgtgcgtggggcgaagggaggggaagatttttttgagaaggagaacttgttgctccgggcgtttcttgggcgccgccatggacgcctacgaggcgaccaaggtggtgttctcccggatccaggcgctggaccctgaccacgccgccaagatcatgggcctcctgctcatccaggaccacggcgacaaggagatgatacgcctcgccttcggccccgaggcgctgctccacagcgtcatggcgcaggctcgcaaggagctcgccctcctcccgccgccgccgccgccgtcgtcgtcgtcgcccaccgtgccggcggcccactcgccgttcctgctgtcgcggcagaactccggccgcggccccgcgccgtcgccgtcgccgctgtccgcgtcctcgccgtcctcgtgggcgcaggcgcagccgttctcgaggagcaatgggtccgtggatgaggtggtgggcgctggggaggagctaatcagcccggcgaacagcgggggaggcgccgcggcgaacgcgccgcccttctttcctcggggtggggacgtgctcctggacgacttccagctgcaggagcagctcgcgttcctcaacgaggggggtgtcaaccccagccaccctctccaggggttcgatggagcggagtgccggagccccggtcccggcgagggcggcgggatgttcccgtacggtctcggctgggcaaacggtggccctgggcaccgccggagcgcgtcggtcaacgagctctgcctcggcggcggcagcagcgacggcttcgggtggaagccttgcctgtactacgcgcgcgggttctgcaagaacggcagcagctgcaggttcgtccacggcgacgacgccgccgctctgacgggcgccgccatggacgcggccaccgccgagcagcagcagtgccaggatttcctcctccgttccaagagccagcgcctcggccctgctgccttcccctattcacccacagggtcgctccccggctcgccatccgccgccaccaagtgcctcagcctcttgctgcagcagcagcacaacgacaaccaaagagccgcggcggcggcggcgctgatgctcggcggcagcgacgaggcgcacaagttcatggggcggccgcgcctggaccgcgtcgactttgccagcatgatgaaccccggatcgcgccagatttacctcaccttcccggccgacagcacgttccgcgaggaggacgtctccaactacttcagcatctacggtccggtgcacgacgtgcgcatcccgtaccagcagaagcgcatgttcgggttcgtcaccttcgtgtaccctgagacggtgaagctgatcttggccaagggcaatccgcatttcatctgcgacgcccgcgtgctcgtcaagccttacaaggagaagggcaaggtccccgacaagtacaggaaacatcaaggtgacttctccggctgcacgacccccactggcctggacggcagagacccattcgatctgcatcagctcggtgcgaggatgctgcagcactccaatagcacaaacgagatgatgcttcgtaggaaactggaggagcagcagcaggctgccgagctgcaacaggccatcgaactccacagtcgccgtctcatggacctccagctgctcgacctcaagaatagagccgcagctgctgtcacaacagcaatggcgatgacaattcccaccgccaatgccttcggttccagtcagcctcttgccaccaccatggtcgagtcaccgcctgattctggcgagcagctcaagggaacaggttacttcacagaagagaggaaaatggtcaacggaggaggtgataaggaagaatctgctggtgaggcgagcctgaatgctgatagcgaccaaagcttggagcacaatttgccggacagcccgtttgcttcgccgactaagtcctctgtctcagctcaccaaagtttcaccaccactgataccggtgtcgtcgcgacaagtagctgcagtgcatctcatgtaggcatcagcgcgggcactaatgctggaggtggaatcaaccatctgcggccctctactttggatataccttcgccaagagacttcttctcggtttccaggctggcctctgatcacggagcgattgggatgtaaagttctctgcaatggatgagtgaatcccccagcctaatcatagaacacaagaagcaaaagaaaagcgatagtggaatataggagaaaaggagtgaagtgtcagcatagtgttagctcccttgtttatttctttttggttgccctttttagtgggtagctctattaaaaccacaagtgaagatgccattagcctttgactaggaaaaaagccagtagatgcagacatgcagtgttgtgagatacttaatatatataagcaatccagtgttacccccttataatattagatatactagtagtactcaattacaactgccatcaact

SEQ ID NO: 27175 - DNA, 1136 bp, Oryza sativa
  ref <308>: DATABASE ACCESSION NUMBER: AK102617
  ref <309>: DATABASE ENTRY DATE: 2002-08-28
gaactagaacccccacgcactcacgcgcactgcacgccgcaacacaacgcgctcgcctcgcctcgccccgatcggtggtggtgctcgccgtcgccgggcggcgctagggtggccggagaggctccggagagtaggaggaggaggaggagccggagatgagggggtcgaggaggccggtggccgtggtgctgagctgggtgcggaggcagccgcccaaggtcaaggcgttcctcgccgtggtcgccgggatggccgcgctcgtcttcatccgcttcatcgtccacgaccacgacaacctcttcgtcgccgccgaggccgcccacgcgctcggcctcggagtcctcatctacaagctcaccaaggagaagacctgcgccggactctcactcaagtctcaggatttaacagcactatttctggctgttaggctgtactgcagttttgttatggagtatgacatccataccatacttgatacagctacactagcagctactctctttgtcatctacatgattcggttcaaactgaggtcaacttatatgctggacaaggacaattttgcattgtactacgtggtgttaccttgtgctggcctagctctcctggttcatccttcaacatcgcataacatcatcaacaggatctcctgggctttctgtgtttatttggaagctgtttcagtgctgccacagttgcgtttgatgcaaaacacaaagattgtggaaccatttacagctcattatgtgtttgcattgggtgttgcaaggtttcttagctgcgcacactgggtccttcaggttttggatacccgtggtcgcttgttgactgctctgggctatggtctctggccttcgatggtgcttctctctgaaatcgttcagacgttcatccttgctgatttctgctactactatgtgaagagtgtttttggtgggcaacttgtccttcgacttccgtctggagtggtgtaaaaatgcagcaggatgcaacatgttatgggctttgtgcacgtttagtacatcgtcggataccagagccttgtttgcttgataatttttttcagttacaaattgctcatgtgaaaaatgtacctaccagagaccgtgatgaaatctagagactagtttttaact

SEQ ID NO: 27176 - DNA, 1998 bp, Oryza sativa
  ref <308>: DATABASE ACCESSION NUMBER: AK102618
  ref <309>: DATABASE ENTRY DATE: 2002-08-28
gggtacagagcagaggaggggagagagagagagagagagagagagagagagagtcgtgtgtgcgtgtgtccccggggttctagctttgggatgctgatggcgaccgtctcgccggcgcggagggagccgacgccgcaggcggtgcgggcgtccccgatgccatcggcggcggcggcgttggtgaggagaggcggtggtggtagcggggggacggtgctggggaagtacgagctggggcgcgtcctgggacagggctcgttcgcgaaggtgtaccaggcgaggcacctggagaccgacgagtgcgtggcaatcaaggtgctcgacaaggagaaggccgtgaagggcgggatggtccacctcgtcaagcgcgagatcaacgtgctccgccgggtgcgccacccgaacatcgtgcagctgttcgaggtaatggccagcaagaccaagatctacttcgtcatggagtatgtccgcggcggcgagctcttctcccgcgtctccaagggacgcctcagggaggacaccgcgcggcgctacttccagcagcttgtctccgccgtcgacttctgccacgcccgcggcgtgttccacggtgacctcaagcccgagaacctcctcgtggatgagaacggggacttgaaggtctcggacttcggcctcgccgccggccccgaccagttcgaccccgacggtctgctccacacgttctgcggcacgccggcctacgtcgcccccgaggtgctcaggcgccgcggatacgacggcgccaaggcggacatatggtcatgcggtgtcatcctctttgcgctcatggccgggtacctccctttccatgaccacaacatcatggttctgtaccggaagatctacaatggggagttcaggtgtccaaggtggttctccaaggattttactagattgataacgcgccttcttgacgcaaaccccaaaactaggatcaccgtgccagagatcattgagagcgattggctcaagaaaggatacaagccagtcaagttttacattgaggatgacaagctctacaacctgtctgatgacgtgctgaacttggagcctgctgatcctgttcccccaccattgggtttggcacctcctgttcctccacctccacaaggggatgatcctgatggttcagggtctgagtcagattcatcagtcgtatcctgcccggccacattgtcaactggggagagccagagagtccgtgggtcactaccacgcccagcaagccttaatgcatttgatatcatatcattctcaaaaggattcaacttgtctgggctgtttgaggagagggggaacgagatcaggtttgtatctggtgagcccatgtctgacattgtaaaaaagctggaggagattgcaaaggtcaagagcttcacagtgcggaggaaggactggcgggtgagcatagagggtacacgcgaaggagttaaggggcctctaaccataggcgcggagatatttgagcttacaccctcccttgtagtagtggaagtaaaaagaaaggcaggtgataatgaagagtatgaggatttctgcaacatggagttgaagccaggaatgcagcaccttgtgcaccagatgctcccagctccaaatggaactcctgtgagtgagaaggttgaaaggtcttcaagcttacaggctcccctcaccctgaagttgataggaacagaaggcagcatgagctagagacaggagcttccatgcagttgacagggagatctcttttaccggaccaaacctgaccggtctggttcccgttgatgagctcgtggttttgataactagcaagagttctctttctctggatggcctaagatcgtttttaggcaatggatcgagacagtggatgtagatactccggttgtggatggtgcccaggtgggcgtttaaagtggatgtagataccctggttgtggtggtgcccaggtgggcgtttaaagtggattgtactggccagttttctctcgactc

SEQ ID NO: 27177 - DNA, 1048 bp, Oryza sativa
  ref <308>: DATABASE ACCESSION NUMBER: AK102619
  ref <309>: DATABASE ENTRY DATE: 2002-08-28
gggaatcctcctcctcgatccctcccaatccccaatcccagcatccccgagatccgcctcccagcgcgatcccaacctcatggcgtcgccgccggggaagaagggggaaggcggcggcgatggcggcggcgggaaggcggagtggctgatctacgcgttcgtggcgcgcggcacggcggtgctggcggagtacaccgagttcaccggcaacttcccggcgctcgcggcgcagtgcctgcagcggctccccgcctcgggcggcggcggctccggcggtggcgcgccggcgcggttcagctacgcgtgcgacgggcacaccttcaacttcctcctccaccgcggctacgcctattgtgtagttgcaaaggaatctgtcccaaagaatgtctcggtggcttttctagaaaggttgaaagatgacttcatgaagagatatggaggtggtaaagctgatacagctcttgcaaaaagtctgaataaagaatacggaccagttataaagcagcacatgcagtatgttcttgatcattcagaagaaatagagaagacattgaaagtgcaagcccaagtttctgaagttaaaaatatcatgttagaaaacatagagaagactttgggtcgtggagaaaaactgagtgaacttcaagataagacttccgatctacaaagtcaggcccaggaattcaaaaagaagggagtgaaaattcgtaggaagacatggttgcagaacatgaaaatcaaattggtggttcttggaattcttttgcttcttgtaataatcgtatgggtgtctgtttgtcaagggtttgactgcaccaagcactgaaagtaactactatcctactgtcggtatagctctgctatataatagtttggagacgtgagattgtgtcggtgaaatcaagtgcattattgactctttggcttgatttctgctgcacatttatcgcgatacaaatgtaaagttgagttggtgtcaagtgttattcaaaccgtgtgaccaacattacataaagtagtaatagtacggttgcttgtcgattgatcc

SEQ ID NO: 27178 - DNA, 1532 bp, Oryza sativa
  ref <308>: DATABASE ACCESSION NUMBER: AK102620
  ref <309>: DATABASE ENTRY DATE: 2002-08-28
gtagacgaggaggaagaagaagcgagcgaagcttgtgttggatcggagtggggaggagatgttgagggcggtggcgaggtgctgcgggcactggccgccgggggcggcggcggcggacgggatgctgtggcagacggagctgaggccgcacgcggcgggggagttctcgatggcggcggcgcaggcgaacctggccatggaggaccaggcgcaggtgctcgcctcccccgccgccacgctcgtcggcgtgtatgacgggcacggcggcgccgacgcctcccgcttcctccgctcccgcctcttcccccatgtccaacgattcgagaaggagcaaggggggatgagcacggaggtgatccgtagggcgttcggcgcggcggaggaggagttcctgcagcaggtgaggcaggcatggcggcagcggccgaagatggcggccgtgggctcctgctgcctgctcggggctatctccggagacacgctctacgtggccaacctcggcgactcccgcgccgtgctcggccgccgcgtggtcgggggcggggtggccgtcgccgagcggctcaccgacgagcataacgcggcctccgaggaggtccggcgggagctcaccgcgctcaacccggacgatgcgcagatcgtggtgcacgccaggggtgcgtggagggtgaaggggatcattcaggtatcgagaaccattggtgatgtttacttgaagaaacaagagtatagcatggatcccgtgtttcgtaacgttggtccccctattcctttgaagcggccagctcttagcgcagaaccatcgattcaagttcgcaagctcaaaccaaatgatctgttcctgatatttgcttcagatggtctctgggagcatctcagtgacgacgctgcggtgcagattgtcttcaagaatccaaggacgggtatagcaaacagattggtgaaggccgctttaaaggaagccacgaggaagagggaggtcagcttccgtgatctgaagacgatagagaagggagtgaggcgccatttccacgacgacatcagcgtcatcgtcgtctaccttgaccgccaccgcggtcgccgtcacacaagggtcgtcgactcgagcagcaactgcaccaacgcccccgtcgacatctactcctccaactccggccaatccgtggagactcttcaagcccatcggggctccggttggtagaagaagactgggacgcctcccttgaaaagatcaagacggtctcttgttaattagtaaaaacatgtagagccgctgatcagtaacactagctgcagtggcatcatcggaagaaacgcgggaatgtacataaattagtagcggcgcgtggcattttgatgtggggaagaatatttgattttttttccttcctttttgggctaatttaattgcagagattactttttgctgttcttctttggtttatatttctgctgaaccagcagttaactgttgactgggaattaccgcatttatgtgcggcaagataatatagtagtggtataatggtatt

SEQ ID NO: 27179 - DNA, 1851 bp, Oryza sativa
  ref <308>: DATABASE ACCESSION NUMBER: AK102621
  ref <309>: DATABASE ENTRY DATE: 2002-08-28
gcgggtagtactagtacgcgccgcgtgcagtggcacccggcgcggtgtccccccgaaggcccgaacgctcgactcgcgactggacgtcggtacgaccgccaccaccggaggcaggcagcggccgcaggcgcatcgccgtttagcgcgtcatccttcctttggggttatctggtgtcaccaataattggtggagcactggtcgactactatggcggaaagcgagttatggcttatggcgtggctctatggtccttggctacattcctctccccttgggcagctgctcgctctctctggttgttcctctcaactagagttctgctgggtatggcagaaggggtggcactcccaagtatgaacaacatggtgttgaggtggtttcctcgcacagagcgatcaagtgctgtcgggattgcaatggctggttttcagcttggcaataccattggtttacttctttcccctatcatcatgtcacgagctggaatttttggaccatttgtgatatttggattatttggatttctatgggtgttggtgtggatatctgctatatcagggactccaggtgaaaatgcacaaatatcagcacatgaactagattatataaccaggggtcagaaattggtaaaaactcaatctggaggtgaaagattacgaaaggtccctcctttcagcaagctactctctaaatggccaacatgggctttaatttctgcaaatgctatgcatagttggggttattttgtcattctttcatggatgccagtgtatttcaaaacaatatatcatgttaatctgagagaagctgcatggtttagtgcactcccctgggtcatgatggcagttttaggctatgttgctggtgttgtatcagacaggcttatccaaaatggtacaagcatcactttgactcggaagataatgcagacaattggctttgtgggtcctggtgtggctcttcttggactaaatgcagcaaagagtccagtcatcgcttctgcttggcttactatcgctgtaggtttgaagtcctttggtcactcaggttttctagtaaatcttcaggagattgctccacaatatgctggagtgctacatggaatgtcaaatacagctggaacatttgctgccattttaggaactgttggagcaggtttctttgtcgatcggatgggttctttccgtggatttttaatattaacatctcttctatacttcagtagcacactgttctgggatatatttgctactggagagcgtgttgattttgatggcactggctagcgcctaagagaaaatctacagttgctatcctagaatatgatgattggttggagaattatgtgccatcatcttctggtatgctattggaaagctccatgcacacaagcaaacagagttatgacgtctaccgattatggcattgtgcttccatttagtaggggtagcagtgaagaaaaaatggaaccagctactgtgatcattcgaattttcgtactatggagactggagagtccaaaatgtgagtcaaggatagctgaagcagttacacagaactaatgactggagagtccaaaatgtgagtcaaggataggtgtggtaatattagttgtagagatctgaaaatgattggcacttgacaagaattaagcttggaatcaagcacggtttgatgagggttgtcaagtttttaaatggaaagtagatggaatacgttttagtcctttatagttttatagttaatagaaaatatgactcaacagtcatagcctcatagggcaccttcgactttgtaaatgccacaacatgtggatggctttaaagatccaacgaattgcaaggattttc

SEQ ID NO: 27180 - DNA, 2291 bp, Oryza sativa
  ref <308>: DATABASE ACCESSION NUMBER: AK102622
  ref <309>: DATABASE ENTRY DATE: 2002-08-28
gatgggcaccgaaccctcccaaacccctacccccccgccgccgccgccgccggcgagccctcgccggcgcgcgccgcagccggccaccatcctcagcccttccttctcgcggaaccctctacgcgccaccgccgcctccgcctccgcctccgccggccccgtcccctccccctcctcctcctccgactgcgaggagcacccctgcgtggagctgttcgattggtggctgaagagggtggagggggacgaccggaaggtccgcatcgccggccacacggaaaggaaccacaaaccccatctattcacttctgcacccattgtaaaacggcataaggcttgtatgcttgaagctgaagacagcatcatagtgttaattgatggcccgttggacctttcgcaaatggaaaataatggatattcgcttgaggtctgcgaaaaattcatgactggatttccatgcttgtgggagagttacaacttaggatctcaacagagctgttcttacactagcatttcacgagatggccgaactaaattttattgggagcgattccagataggaaactttattgataaagttggatcttctttcctagcgaaccttcttaacaactcaagaagttcctcaggtaatgatgctgattcctttgaaaaaggttcctatttgtcaaacaaaaaaccaagatttgaggaatacacctgcgaccttgacatttcagcaaaggaaaagactactgcttttaacgaaggcagtacaggatctctagctgtatgtaacaaggtgggtaatcagcagatagacttggtcgtgaagagcttttctaaagaaaggggtcatggcaatatagatcttagtgcatctttgacttctatagaagaaactactagggacaaaacttctgaagatgcagggaatcagaatgaatttatccattcagatgcagaatatcaggaggctggcagccatcttgtcaactctgattcaatttacggtatgtccactgagtcagggaatcagaatgaatttatccatgcagatgcagaacatcaggaggttggcagccatgttgtcaactccgattcaaatttcgatatgtccactgataatatgatctgtgagatgggagatggaagtgctaatgctggcagtgcagtgagtcagggatctaaagaggttttagccaccgtgctacctgaaagggctaatctctccccagacagttgtttggacaatattctacccataagtacatgtaatagcaataattgcttggaaaatcaaggtttcccggaaatagctcagcacatgacattgaacgaggaggtagtaccaaatgaagacatttcaacttcagttcattcagatgtggagtccctgggaaatcctgtaggcccagcagaggtgcagagatcagagtgtgacatattacagggtgctcctagatcacctaagcagaatgtaggctcagcacaggagcagagacctgagcagtccatgtcacaaggtgctgctagatcgccaatgatcagaactccaattccagatggtgctcctagcttgcgtaatcagcatttaggctcagcacaggagcagagatctgagcatttcatgttaaagggcgctactagatcgccaatgatcagaactccaattccatatggacattattctcctcttacccgtggcaaggccaagtcatcatcagtttcaacacctgaatctctcaaactgagaagaactagatcaggtcgcgtggtagttcccacattggatcctggatgccaaaggatcgtctatgacagagacggtttggtttcaggtgtggctggcttagagtttgaatcaccacctctcaaagggaacgagtcaaggactcctgagagcaagagaagggtccgttgagcaacttccatagcctgcgcatcgattatatcctctttgaaaatgtgggctccattctgcatttttgatgatctatctggaatccgctcggtataggatgaggatggtggattttgtatatacgcctggcagtttagcttgcagataattgttgtttggtagctgattgtaggccttggtatggaccaatgttgctagtttcgaaatgaccaatgttgctggtttcatgtcagcacttgcagcacctcttcacctctatggtggccatcaacattaactagctagctagtttgttctgcatcaccagtcgcaggtgtctgatacagctaatgtattttgattcctggaactgtgctatccacaccaatataagacccattgagtctct

SEQ ID NO: 27181 - DNA, 1047 bp, Oryza sativa
  ref <308>: DATABASE ACCESSION NUMBER: AK102623
  ref <309>: DATABASE ENTRY DATE: 2002-08-28
gagtccacacgcggacatgccgccgccgcctctgcactgcgccgcctgcctgcctgccgcgaccccattttgtccgccatccgtgctgcacctgcgcctcgatgccagccaatagatcgacgaccggcggccccaggcgcactgcgtgctcgaccacgccgcttcctcttgttctgcgctgctcggcttgctgtcgtggttgttgctgttgtgtgtggagacccggtgggtgccccgtacccgttgcggggacggggacggggacgggggaaatctacactcgtgtgcggggatggggagggtggcgttcgattttttctgctgcgggggtgggtacggggtggtcgcacccgacgggcgcagccccgttgccatccctaaccatgagcgatggccacatcgtccaggtgcgctacggtgacacaggtgcgggattggggaggaggagcgggtggtcgtggcggagccaccctggatgcagcgaggtggcacctgctcatgttgtacaccgacctagcaccatggttcaagtacgccaccgtgtgcgcccacgagctcagctcctggtgccacctctctcactcgcctcgacgggacaggtgcatccattgtcgccacagacgacgccgacgatgcgagagaagaggaagggagagaagatggcaaagagagagggtaaccgactcactgacatgtgagttccacaatatttctgaattttgtcagcaccacgttagcagaaaccgtcatccaaatcgacttgggaagggtgtgtcatatctagttctacggtgcaagatgaattttagactcaacaattgagggacctaagtgaacttattcctttccactgcagttgctaacttgctatcatgtatagttagttgaactagctagcactgttgcgccacgggtgcctttgcggtactaggctgcgaatggatttacgggcctgttcactttgatgcgaaaaaaaccttaccaaattttggtaaagttaccaaaaaaaaatagctatatttagtttgctgccaaattttggtaatg

SEQ ID NO: 27182 - DNA, 370 bp, Oryza sativa
  ref <308>: DATABASE ACCESSION NUMBER: AK102624
  ref <309>: DATABASE ENTRY DATE: 2002-08-28
gacatattttttttcttggacttcttggcgatggatcccccaccggctcaggcgatgaacaccgacgacttcacggacaagaccatggatgaatgttgttcttgctgctacgattgctgctccagcatcctggatttcctctgctgttcttgatgctgcccctcgtcaaccttgcagaaacttcatgggtgctgacgatgagtgaatcagaagtctcggtgatatattttgggctgtacaagttattgaattcttagattaattcttcctcccttgcgttgtaactgagatttgtgcgtcactttatggatgattttgggaggaaatttgtgcactatcaagttctgaaacatcgatttgtcttccagcc

SEQ ID NO: 27183 - DNA, 2430 bp, Oryza sativa
  ref <308>: DATABASE ACCESSION NUMBER: AK102625
  ref <309>: DATABASE ENTRY DATE: 2002-08-28
gagctgtctcccccctctcacgcggtcacgccctccgcaccgcacgccctcgagtttctcctcctcgtcgacgtcgacctcgcttacggcttcacccatccgcagccgccgccgtcgccgtcgtcgtacgatttccacgcgagccgcgatgccgcctccagcgtgggggtggggctccaacccgctggagcccgtcgtccacaccgtcgcggccttctcccgccgcctcctcattgcccccgacgccgcgcccgacgaagcacgcctccgccccctcctctccctctccctctcccctccgcccaccccgccgtcgccgccgccgccgccaccggaggtcctcaagaaggattcgaaggcggcgcccctgaccaaggaggaggtcggcagggccacgtggatgctgctccacaccatcgcagcgcagtttcctgacgaaccaaccaggcaacaaagacgcgatgcgagagagctggtaagcattaagcaggataaacagttagtgatatctctctagagtttgggtggaagtatggtaaagtcccttgttttgattttgggggaaacatgaggaccttgctgtcgctacccactcgtaatttgtcacggctaactacaggattgttgaatcttagaaaaggcactttcttgatgtttatcttgggggccttgtattctcctgcaatggatcctgtttaagatatagcttgtatttaatttattctttatgtgccttgaaatattcaagattactttaagactgcacagtaaagttccagcatggtaatctcgtgattttgttgctacaggatgcaggctttgttctaggtgttctcctggttcattccccgctaactttgagcttagacatttttagaaaatgttttgtgcttttggtctagcacagttatgaattaccactacattgcttgacaaataaatgttatactttgcatcgttgaaaatgggtggcagtatgttacgactactgctaaggtttcgtttggaatcgactatctcatttgattgaacctcatttagatatatgggtgtttggctagctgttatttttttttctcaatcatggtgcatacagatgcattatcatcatataaaacatctgagttgaaatttgatggatgagtctaccaaattggataactgagttttacaaattgttccatgaaaacttaaaaaataagcataggccagcacaacaactgcaaattgagcctcaatccatgatgaataatgggaagttcgttcactggttttttactcgctttaacgaagaggaattattttattatttcctgaagaattacatttttctgcatctcattattccttttgcttggttacttggttcatgcaaggtcacatttctgctgctttttatgttcagatggctataatatctagactctatccttgcaaagaatgtgcggaacacttcaaagaagttttaaagtaagaaatgctctccaaccactagcataaattatagtatccattttgatagtttgattcctcgagatgtgtttctgtgtgacaggactatgttttgttgaaatgttggtatgtaatacattatcaacctttatccattcattgttttagggcgagatataacatcatgtaggaactataaattctttgtacttttgcattatgaaactgtgcttctggatcttttatattctaaagctatgcatccacaaactcgtttaaaaactttttagttattttacaccatctgtaccttttgggaatatgatttacagaagctatggtgataatgggatgtgggaattggatgtaacaatccatttataagctcatttctcttatagctatttttcatttacttttatggttataatgtcgtttttgctgtcatagtttattatgttccagttatatccagctgccaatttctgttgttctgtttttttcttgtgctgcccttaaattttcatgtttgtgctcaatgtagcaacaataaactgtctcggcacaatattgaactgacttctttatgttctttttgcttagagcaaatcctgtgcaggcaggatctcaggctgaattctctcagtggttatgctacgtgcacaatgtggtcaatcgaagccttggaaaacctatatttccttgccagagagtaaatgcacggtggggtaagctggattgtcctgaacgctcttgtgatctagaaggctccaacgacatcatcccgaataggtgacattagatagggatcgtttagaaattctggaacagtgacaaagtttaaaccatcactggatgggcagcatgaagagcatatgggaaaagaattataacgccgtgccggcattcttcctatacccttgtaatactagtgtatcaaatgtgatttcattttgttatttacaagcttcagctctg

SEQ ID NO: 27184 - DNA, 2369 bp, Oryza sativa
  ref <308>: DATABASE ACCESSION NUMBER: AK102626
  ref <309>: DATABASE ENTRY DATE: 2002-08-28
ggccgccgccagtcccctcctccctctcgttcattgctcagtatgtatcatcgagaatggtacggattcccaataaactgatgttgggtgatctaataactgaaggcaaaatgaagtaatataatcgcatcaatttgtaatgttgtggggagttgattttgtttttgtttttctgtactgatgaggtgtaggctagcagcgcccgccaaccggcactgaggtaaggagttccacaaccacagcactcagatgcaaataatgggcatgcctctgtctaagctactaagcagagaagcacactgcaaataagagctgagtgagctgggagctgccaatctctgttttctctttttcttggattgcaatttttgattttagattggatatttgagagaatgcataggaaagggaaaggaaaagggaaagggatgcctttacattgtacttatctttccttacgttacctatctcagatgtggtcatagtaatatacttttttctttgtgccacttatctttcctttctatgctccactgatatatcagctggtccatgtgccatttggtgattgctgcttacatagttatttttatttatctccgtacgctatgtgatgttatattcccttctcgatatatgttcagccattcaatcagttttgattagttaatgttcatgcatcagatttgttaatacaaaatgttctctgatctggtattcagcttggctaccagtacatgttacaagttcaatcttccacaagcaattgagaaaggttgcaggtgagaggcaagcagaagcatgacaggaatattgatttacttacatgataaccgttgtgccattagccttggacaatcggaggtcattgagattaaactctgcttgcttcgcatcctccatatgttcagcatggatggtgactttggtccattgcttgagcttatcaagttacacagaatgtatgggcttttgttggtcatggacgttgttagtgtttttctctcccttgaaatacatatttttttcctgactattgccttggacagttggagatcattgtgatgttggtgtaattgggcttactaagtgctctggtactcatgggcttcttccctgttttgacacctttttgttagtatcaattcagagagagacaatttgcgtacatcccttggatttcatgatctggacaatcttggtttgcagcccaaagtaaagggcaagtgtacgaatttagccacaaaagcgacgccaacgaggatcgccatcgacggtgaccgctgctccatcgatccttcttcccccgtttgctactctcacttcacagccacaatcatgtcttccgcagtgttcgcatcaatgaggctgaatgcaacaaatcaaagctacttgcctgtgccaatcacacttgcgacagcatataagatgcagcatggagataatctgaagttaaaaacttcccatggcttgaagataaagatcaaaatcaaggaagtagctagcacactgtacatgacgacaggatggagataatctgaagttagaaactggagaaacgattcttttcaggatgccatcaaggtctaaagcgtgtgttatgatactgaacagacaaggccttattagatgtccagtgaagaccccatccaacagctcatcagctaacaaaaggtcccctgatccatcaggtcaattaaccagagcaagcacatttgaccatgcatcttctagcaaaagcgttccatttctgaggaatggaacaggcagtaacaaaagaaaacctagcagacacctccttctgccaccagattaagctcacagctgaattgaagagttacatcaaagagattgcagattgtctagaagaatcaaacaagttctatgtcgtgcgtatgaacagaacattcatggaacaggacagagtgtactttgcgactgagttttcaaagaaatacattgtgaacttggttcgaggcaagacagcaaacattagagtgcagattgcaggtcgaccctcaacaacttaacatcagggtggttagctttgcagcagccaacagcatcaacttacacaatctgcatcttccacttttataggacacaagtcacctcatgctcaccatagatgctctgtgaaagttacctgcatcttcagtagtcgctgctattatctaccctggaacagctactataattctctctattatcctttgcttgcggtctatctaacttcacttgctcagtaagcacgtgacctataactgcttatcattgtcctcagctccttttgttattcataagctgagtgaacaattaaccactttatgtacaaacagctggcttgttatactacaggttactatggt

SEQ ID NO: 27185 - DNA, 1537 bp, Oryza sativa
  ref <308>: DATABASE ACCESSION NUMBER: AK102627
  ref <309>: DATABASE ENTRY DATE: 2002-08-28
gagttctcgaggcttctgtttcctcgtctctcgtcgtcgtcggcggcggcggcggccatggaggacgacgacgagtgccctcccctcgccgtcgagctctcgccggagaagccgtacagtcctccgccgctcggtccctccgcggcgtcgccggtcggagtcaccgtcatcactggctacctcggcgccggcaagtccacgttagtcaactacattctaagtgcgcaacatggaaagagaattgcagtgatattgaatgagtttggagaggaaattggggttgaaagagcaatgatcaatgaggggcaaggtggcgcgcttgttgaagagtgggtggagctggcaaatggatgtgtttgttgcacggtgaaacacagcctggttcaagcacttgagcagcttgtgcagagaaaggagagaatggatcacatattactagagacaacaggattggctgatcctgcacctcttgtctctattctttggctagacgaccagttggagtcatcaattaaactagactctatcattacggttattgatgcaaaaaacttcaggctgcaaattgatgagcacaataagtcatcatcattccctgaagcatttcatcaaattgcatttgcggatgttgtgatattgaacaaaattgacctagtagaaggcagtcttgaggatttggaaaggcagattcatgaagtcaacgctcttgttacagtggtgcagtctgtccgctgccaggttgacttaaataaaatatttgatcagcaagcatatggtgccaagaattcatcgcagctgcaagaacttctggagtacagtaaatcagtaccacctaatctccgtcatgataacagtatttctaccttgtgtatttgtgagcaggatccaatttccctgtctaaggtggaatcatggctcgaggatcttctttgggaaaggaagttggacatggatatttatcgttgtaaagggattttacatgtccataactcggatcaagttcatacattacaggcagtgagggaagtttatgaagttctgccagctcgagaatggtccaagacagaatctcgcacaaacaagatagttgtcataggtcgcaacttggatatcaatatccttcaagattcatttagtcgttgcaagcactgatatcgaagggtttgttcatcctgtaccctgcacctccatgcaatcaagtactgcaaggagtttctatggctccccgaagtaatgtgctttatgtttgtctgtatatcttcaaaggtgacagtgctgacagcttcttggcaatgaagttctgcacaacggatgcgattatccgacgcgccatgttcaactttggaagaggaacatgcatccagttacaagatgatgaactacttgtagaagattttagttaagagtagtatgcaaactgatgatcggcaacatttctcgttgtatggaactgaccgaaagcaatctttttgtaagaaaccgattggcaacaataacatactgggagttgaaatctgatcctcaaattcatgtttgt

SEQ ID NO: 27186 - DNA, 2144 bp, Oryza sativa
  ref <308>: DATABASE ACCESSION NUMBER: AK102628
  ref <309>: DATABASE ENTRY DATE: 2002-08-28
ggggagcgagcattgaagcatacgtatatccatctccagaaactcgatcaagcatactagctgagacagatcgagtcacctagctatttgagcaaatgggagctgtcaatggtgtttgctacggtgttcttggcgacatcctcccgccgcggagcgaggtcgtgcagctgctcaagtcccaaggcatcggcgcgatgcgcatctactacccggacaaggaggccctcgacgcgctccgcggcagcggcatcgccatcatcgtcgacgtcggcgacagcggcgcggtggccaacctcgccagcaacccctccgccgccggcgactgggtccgggacaacgtcgaggcctactggccgagcgtcatcatccgctacatcaccgtcggcaacgagctccccgccggcgacatgggcctcatcctcccggccatgcagaacgtgcacaaggccctcgtgtccgccggcctctcgagcagcatcaaggtgtcgacggcgatcaagatggacgtggtcgccaacacgttccctccgtcgcacggcgtgttccgccccgacgtgcagcagttcatggctcccatcgcgcggttcctcgccaacaccgtgtcgccgctgctcgtcaacgtgtacccctacgtctcctacagggagaacccgcgcgacatcagcctcaactacgccacgttccagccgggcaccacggtgagggacagcgacagcggcctcacctacaccaacctcttcaacgccatggtggacgccgtgtacgccgcgctggagaaggccggcacgcccaacgtccgcatcgccgtgtcggagaccgggtggccgtcggcgggagggttcgcggcgacggcagagaacgcgatgaaccacaaccagggcgtgatcgacaacgtcaagaacgggacgccgaagcggcccgggccactggagacgtacgtgttcgccatgttcaacgagaaccagcagactggcgatgagaccaggaggcatttcggcctcttcaaccctgacaagacgccggcctacccgattacaccttatcctcgtccagccgtgcaatccatcggcgtgtgctacggcatggtgggcaacgatctcccgtcacgtagcgaggtggtgcagatgtacgtgtccctgggcatcaatcggatgcgcatctacaatcccgacagggaggcgctggacgccctgcgcaactccggcatcgacctcatcctcgacgctggcggcttcgacacggtgtcctatctcgccgccagctcctccaacgcggcgtcatgggtccacgacaatatcagcccctactacccggccgtcaacatcaagtacatcgccgtcggcaacgaggtggtaggcggcaccacggagagcatcctcccggccatgcgcaacgtcaactccgcccttgccgcggccggcatcggcggcatcaaggtttccaccgcggtgaaatccgacgtgatcgccaactcttaccctccctccgccggcgtgttcgcgtatccctacatgaatggcatagctcagtacctggcgagcactggcgcgccgctgctggccaacgtctacccctacttcgcctacgccggcaacccgcgcgagatcagcctcaactacgccacgttccagccgggcacgacggtgagggacgacggcaacgggctcacctacaccaacctgttcgacgccatggtggactgcatctacgccgcgctggagaaggccgacgccgggaacgtgagggtggtggtgtcggagagcgggtggccgtcggcggaagggatcggggcgagcatggacaacgcgagggcgtacaaccaggggctgatcgaccatgtcgggcgtggcacgcccaagaggcccggacagatggaggcgtacatattttccatgttcaacgagaaccagaagacaggggctgccaccgagaggcattttggcctcttctaccctaacaagtcgccggtctatcagattgccttttcgaattagcagctgccaatataaatgagttacagccttacaggtgatcgatcgagtaatgcttcattaaatgttgggcgtattttaatgttctcagtatgttactttatgttttataataaaagctacatgaatataaacttttcaaggtttcttatc

SEQ ID NO: 27187 - DNA, 2720 bp, Oryza sativa
  ref <308>: DATABASE ACCESSION NUMBER: AK102629
  ref <309>: DATABASE ENTRY DATE: 2002-08-28
ggcctccccaatccgtcccgtctcctcgcccgccgccctcgactcccgtctcctcgcctgccgctggcgccgatctccatcctgctagcagaggtggcgccggcgtcctcctcctgctcccgccgcattcgctcaccggtgagcattctaatccatcccatccggcctcggcctcggcctcgaatttcgtctcctcgcccgccgcttgcgccgatccccatcctgcgagcagaggtggcgcccggcgtcctccttctagcttccaccgcatcgtcgctcgccgcccctttgtcccgagacccgacgcaaagtggaaaagctctcccgatactacctcctttccttttcctccgctcggcgcgacccatctccgatggcgattccggcggaggtgcgccgctactggctgcccatcctcctcgccgccgtcgggttcctcttccagctcctcgtcctgcccatctccttcccgcccacccactactacgcgcttgggatcgagaggttcgcgccggtggagagggtggtggaggcctacgagcagctctccaaggagtggctcgctgagacgaatcagcaaacaactgttgatattataaagattcgttatgcatatgagctgttgacaaatccaattttgaaaagggattatgatctttttggtctggaccatcataaggatgtccttgagaaagtcaaagaacagtatcaaaaggaacactttttgaaaatagatctccccttgttaaaggattcttcagttcaatcaactgattacgccttcaacgtactgggctacgagtcattcatgcatactattgctgacgaacacccactgctcataatggtgtattcaaagggtagtcctcggtgtgctcaatttattgaaaaatggaagcaaatcggcagccgactggatggtgtagcaaacactgctatggtagaacttggtgatgtgcaactgactggtcattttgcagaacaaaggttctctaaacagccatttttccgtaatggtctacccactcttgttgcataccctgcagactgcagaagtccatcctgttacatgaggtacccaggtgagctttttgtggattctgttgttgactgggtggcaacgtcagttgttggtttacctcgtatcttgtactattccaaggagacattggggcctgagttcattgggaagagcggccatcataaggtcaaggttatctttttctcaagtaccggggaacgtgctgctccattccttcgccaagctgcccaagagtattagacctatgcatcatttgcatttgtcttatggaaagaagatgaatctcagatttggtggaattcgttaggagtggaatcagctccatcacttgttttcttgaagggaccaggtgccaagcccattgtataccatggaacttttaccaagtcagagtttacaaagataatggaggagcataagcaccaagaactcccacagctaagaagcgatacatctttggagctgggttgtgatgccagaggttattcacgtgctggaaatgatatagcaatttggtattgtgtaattgttgctggtcgtcctggtatagagctaagtaaaaggagacagattttgcggaaggcccaagaccaactatttagtgatgtcgatgcaagtacttccgagaatgtggatagttcagttgtggtatcaagtgccgcggctgccttaaaagatgacaggttgacctttgtttggttggatggagaagtgcagaagaaactttgtgccttctaccttgcaactgattacagtggagcctgtggtcctggaggttttggagatgataatgataaatctgaactgtttattgttcgtttccaaagaaatgcaacatttgaggcgttgaaagctgagaaaacaaataatcttatggaggctctccaaagacagcataccgctgatgcctcccagctagtggcaaggtataaaggcccggacgaaatagaggagataaacaaatggatctctcagattatcaaagatggagatactagggaaataccttactttacttcaaaggtaccagatcttgtgcctgaggaaacaagtaaggaatggataaaaagtaccaaaagtatccgctcagcaggaaacagtgtaaaacagaggatccagagcagtggatttcatttcggagattacctgactgacccaaggatcggcccagctttgcttatgtctgcatgcatttcaatgggaataatatggtacaagagcaaccaacgaactcaaactacggaggatggagcacctcctaaagacaaaactaagaagcgtcgtcctcgtccgaagcttagcacgtcactgtttggccagcccgagtatcccgctgacgctgatcctgaacccaaagatgctcgtcagtgggagatgactgactctgattcggactagcgagttaaactctctataatcaatccaccaataggactagagataggactaggtaaaatgctaatgccaccaatatctgcaatcttttttttttagaattccaatatatgcaatctggaaaaacttcgagcagttcatctgtctgttcattcatgtatctacccaactgcttggaagcggacaagcatgatatagacctctcacgcagtaatatactgtatgactgtataaacgtacgtgtacttgtctgattttgttaatggtcgcctgccggaactgt

SEQ ID NO: 27188 - DNA, 1643 bp, Oryza sativa
  ref <308>: DATABASE ACCESSION NUMBER: AK102630
  ref <309>: DATABASE ENTRY DATE: 2002-08-28
gatgatgccgcagcgccgcctcgccgcgcgccaccgccgcccgcctgcccccaggtagcgttacatgatcgcccgctcgagacacgctgcctcgctcgcagccgcagcatgtgggggtacctcctccgccgctcgctcgtacgccggcctcgacctgctcctgcaggagaacttctcggccccgcgccgcgtcctccagctccacgccctcctcctcacctccggcgcgctctccctcccgcaccccgacccggccgccaccgccgccttcccctacaactgcctcatccacgcccacctccgcctccgcggctccgcttctcctccatggggccccctccggatcttctccgccatgctcgcccgcggcgtccgccccaaccgccacaccttcccctccctcctcaagtctagcgccagcttcgacgcggccaccccgaccctccacgcgcagtgcctccgccgcggcctagacgaggaccgcttcgtcgcctgctcgctcctcagcgcctacggccgcgacggccatcttgtgcgcgacgcgcgtaaggtgttcgacgatatggctagtccggatttggctacctgtaatgccatgcttgacgtgctgtgtctctccggagacatgtatggtgcccgctgcttatttgatcgtatggtggtgagggatgttgtatcgtggacgacgattatctctgggttaacgaggattgggtgtcactgggatgctgttgaaatgttccgggcatttctgctgcagaataagggacggctttctgaggccacactggtaagcgttctttcagcttgtgctaatctggatgctgtggaggggcttgcggttggaatggctgttcatgggcatgttgttcgccatgaggttcagttcactgcgttcttgggcacagcactcatcgacatgtatggtaagtatgggaagcttagctgttgtagccatatctttcatttggtaagagacaaggaggtttgtacgtggaatgcactgttgtctgcattggctaatcatgggaaggaggctgaagcactggttaagtttgagatgatgaggagtgaagggttcttgccaaatcatattacattcgttgctgtaatgacagcctgtgctcgcgcaggattggtggagactggcttagacttcttcgaagagttgtttactgaatataaggtcattccaatgatggtgcattatgggtgtgtggtagatcttttaggccgtgctggtcgttttctggaggcaattcagattatagagaggatgccatttatggctgatgattctgtgtggggtgcacttcttggggcttgcaagatccatggcaatatagagctttctgcccagatcagggagaaactaatagttcttggtggtcagcaacctggacggtatgtgactgttaggaacatgtatttagaagaagggaactggtatgctgccactagaatgggagaggtgatgcaggaggctggtattaagaagatagtgggtatgagcagtgttgtgcttaattgagttaattctatcacatgaagtagtagttatattattcatcggattagatgtttgtaagaacagaataggtatgatgttacttctagatgttggaattaatttgtcatttggg

SEQ ID NO: 27189 - DNA, 1512 bp, Oryza sativa
  ref <308>: DATABASE ACCESSION NUMBER: AK102631
  ref <309>: DATABASE ENTRY DATE: 2002-08-28
gatcaatggagctggaaagtgggaaacagggcttctgcaactggccactggcttgataggtaccttacaccgccctcacgttttcgtgatgctactggtaaaaagacatcattcacaagtagactaaaggttgaagaatttatcaagacagagtttccagatatggatccgaacacattcttttctatgtttatttggaagatccctgctaaaggacactgtatccaaagaggaggtggagaagtgaggagggtcttttgtccttatgcaaggcaagctgatccagctggaccatgcaaggccaggaataacttgtgtaaacttgagagagagggattcattgaatcatctccggcacaggattgtgacctctgctgcaaaatgcctgatttctgccgagagtgctgctgtgttttctgccgcagggttgttgactattcctttggaggttatagctacattaagtgtgaggcagtcctagaagagaacaaaatatgtgggcatattgggcaccttgattgtgctctccgtacttttatggctggaacagttggaggatgtattgacttggacatgcagtattgttgcagacgttgtgataacaaaacgaacttgatgctgcacgtagaaaaattcttggaaatatgccaatctcttcaatcaagggatgacattgaacctatcctgaatactggcttatgcctagtgcgtggttcaagacaaacaagagcaaaaagcttggagagcattatgagatcagcaatggcaaagctaaagtgtggggttgatcttgctgaagtttggaaaatggaagataatggtatcaactcaactccaagtgcagaagtttcccctgctaccggtggtgtaacagtgcttgggatccagcaagctccagaagaggatgctcctccagggtttccatattatgttgatttggctgacaatgatttgcagagggctgttgaaaatcttccagcttacattaccgaggatcaacacacactgtctgtcaggttcgaagattcgatagatcatgctcttaaagaactgaagagatctcaggaagcagagtacaagctggcagagcagaagctttattcccagaaggatcatgtcctgagtctttatcgtcagcttgattctgaaagatccgtccttgcagaccctatgcccttagctgatgatgatggttcactatatagtacactaatcaccaatgttatgaagcgtgtggatcaagtgaagagtgaagaggagaagctcaaggtcatgctgggaatcgctgatggatttgggaaaacgccatcaggagtcattcaggagcatttcgggctacctgctgatactgccaactgagagtgcctgctttgttgtactgtcgtatgagtttgttaccaacccatctggtttggactaaaccagtaataccgtgaaactcgcggtaatccgtggacatgcctttaggaaccttcgctctccataataccagttttaccgtttagcagtacc

SEQ ID NO: 27190 - DNA, 894 bp, Oryza sativa
  ref <308>: DATABASE ACCESSION NUMBER: AK102632
  ref <309>: DATABASE ENTRY DATE: 2002-08-28
gacaccgagtcatcgctcgccggagttagagttcgtagcggcgaaggatatagccatatattatagatggcgattggtgttggtggctgctgcgccgtgctgctcgcggcggcgctgctcttctcctctccggccaccacatatgcttatgattccctggatccaaacggcaacatcacgataaaatgggatgtgatgcaatggactcctgatggctatgctgccgttgtcacactgtccaactaccagcaattccggcacatccagccaccggggtggcagctggggtggacatggcagcagaaggaggtgatctggtccatgtacggcgcgcaggccatcgagcagggcgactgctccatgtccaaggagggcagcaatgtcccccacagctgcaagaagcatcccaccgtcgtcgacctcctcccgggcgccccaatcgacctgcagatcgccaactgctgcaaggctggatcactgagcgcattcagccaggacccggcaaattctgccgcgtcgtttcagatcattgtaggccattctgggaacagcaatgagactgttagggtgccgaagaacttcagtcttatggcgcctggtccggggtatacctgtagccgtgctatgattgtgaagcctagtaggtttttaagtccggatgggaggagggcgactcaagttctgatgacatggaatgtgatctgcacatactcccaatttcttgcacaaaaggttccatcctgctgtgtttctctctcgtcgttcgacaatgacaaaactgttgactgcccaacatgctcttgtggctgccgaaatgaaaaatctactacaggaaaatgtgtaaagaagaatgcacctgatttgcaatccatcattcacggccctggcagatgg

SEQ ID NO: 27191 - DNA, 2767 bp, Oryza sativa
  ref <308>: DATABASE ACCESSION NUMBER: AK102633
  ref <309>: DATABASE ENTRY DATE: 2002-08-28
ggtctatcccccctctactcgcggctgcggcggcaaggcggcgaggcgtgggagagggatttacaggtagagggagagggtggaggaggagaggctgaggctaggaagcggtttcgccatggcgagcgtcgacccgtcccggagcttcgtgagggacgtgaagcgcgtcatcatcaaggtgggcactgcagttgtctccagacaagatggaagattggctttgggcagggttggagctctgtgcgagcaggttaaggaactgaactctttaggatacgaagtgattttggtcacctcaggtgctgttggagtggggcgacagcgacttaggtaccggaagcttgtcaatagcagctttgctgatctgcaaaagccacagatggagttagatggaaaggcttgtgccgctgttggtcagagtggactgatggctctttacgatatgttgtttaaccaactggatgtctcgtcatctcaacttcttgtcaccgacagtgattttgagaacccaaagttccgggagcaactcactgaaactgttgagtcattattagatcttaaagttataccaatatttaatgaaaatgatgccatcagcactagaaaggctccatatgaggattcatctggtatattctgggataatgacagtttagcaggactgttggcactggaactgaaagctgatctccttattctgctcagtgatgtggatgggttgtatagtggtccaccaagtgaaccatcatcaaaaatcatacacacttatattaaagaaaagcatcagcaagaaatcacttttggagacaaatctcgtgtaggtagaggaggcatgacagcaaaagtgaaggctgctgtcttggcttcaaatagcggcacacctgtggttattacaagtgggtttgaaaatcggagcattcttaaagttcttcatggggaaaaaattggtactctctttcacaagaatgcgaatttgtgggaatcatctaaggatgttagtactcgtgagatggctgttgccgcaagagattgttcaaggcatctacagaatttgtcatcagaggaacgaaaaaagatattgctagatgttgcagatgctttggaggcaaatgaggatttaataaggtctgagaatgaagctgatgtagctgcggcccaagttgctggatatgagaagcctttggttgctagattgactataaaaccaggaaagatagcaagccttgcaaaatctattcgtacccttgcaaatatggaagaccctataaaccagatacttaaaaagacagaggttgctgatgatttagttcttgagaaaacatcttgcccattaggtgttctcttaattgtttttgagtcccgacctgatgccttggttcagattgcatctttggcaattcgaagtggtaatggtcttctcctaaaaggtggaaaagaagctatcagatcaaacacgatattgcataaggttataactgatgctattcctcgtaatgttggtgaaaaacttattggccttgttacaactagagatgagatcgcagatttgctaaagcttgatgatgtcattgatcttgtcattccaagaggaagtaataagcttgtctctcaaatcaaggcgtcaactaagattcctgttcttgggcatgctgatggtatatgccacgtatatattgacaaatcagctgacatggatatggcaaaacatattgtaatggatgcaaaaattgattacccagcagcctgcaatgcaatggagaccttactagttcataaggatcttatgaagagtccaggccttgacgacatattagtagcactaaaaacagaaggagttaatatttatggtggacctattgcgcacaaagctctgggatttccaaaagctgtttcatttcatcatgagtatagttctatggcctgcactgttgagtttgttgatgatgttcaatcagcaattgaccatattcatcgttatggaagtgctcatacagattgtatcgtcactacagatgataaggtagcagagacttttctacgcagagttgatagtgctgctgtatttcataatgcaagtacgagattctctgatggggctcgttttggattgggtgctgaggttggcataagcacagggcgtatccatgcccgtggaccagtgggtgttgaaggtctcttaactacacgatggatcttgcgagggcgtgggcaagtggtgaatggtgacaaggatgtcgtgtacacccataagagtcttcctttgcaatgaggtcaaatgctccttttagcctgttcaggagtaggtgaatatccttttaagaatggattgactactttattttgtcatcttgtacaagcatcttattgcggcatcccgatggattattgattttgggggtcccactttcaaatgtgacaccaaaaataaattcatcagttctgagagcaagattttggaggttcagcttctccatgtaataagtaaattcagttctgagaacttgtgtaccaacgcgctatgttgcttgtaatgagcgatactaacatctgtgattgcacatatactaattgctatctccactttttcaatcatgctacgacatatcgccgtggatgcatatatttggtagcatagattcctcagctgaggctctacttgagcttccccttttgttctgataaacatcactaattgtggggttccgctttcagttctgagaaggttccgctttcaaacgtgacactacaaataaattcagttctgagc

SEQ ID NO: 27192 - DNA, 2307 bp, Oryza sativa
  ref <308>: DATABASE ACCESSION NUMBER: AK102634
  ref <309>: DATABASE ENTRY DATE: 2002-08-28
gccgtgcttttgtgtcaatgttaaaaaatcgacttgcctttaccggatgacttcacttattagttattaccatcaacaatcttaaggcaattagtatatccaggttaagaaacttgttaatatgcaccttcatcagcatgcacatttcatcagtgcactaaattctgctcattcaactcctatgtgtgtccatagcattttttacagaactcctgcaattatgcttgatttggctgataacttataattgaccttactatgtcaacaaaaagaatgcatccctctgtgactgtgtccagctaaactcgatgttctttgtacttttcaaatttagaaatcatctatattactaagctctatcatgacctcattcttctctttgagaatcattagatcatttccatcagggatgaactttttgagacattcaaacaaagatctaaacatgaaatggaaaaacaagaggtccaacaaactgaagaatcattgcgcaggttattccaatgatgcccatgctcttttgtaaagcttacacatgcatgcttccttactcaaaacttagtaaagtattgttctgaattaggcttttctccttcaaacctacacgtgcctttctccttaccaaaactttttatagaagtgttctaagttaatatccatttgatatggcctaagtttcacctccttacccaaacaagatgacatgtatctgcagtttcaagattttacaatgactatatatggttcagtaatgtaccagacatccatgccatttgaattatatgcgcccttttactttcttggaagtgttcctgtatgaaattgtgggttaaaattaggttttgcttcttgtgccttttttatatatctcaggtaatatcgatctgttgactgttgagattgactaattttcgttagtaatcaacaaaaagggcttcatctcataacctacatcctgtttcttgcttgcttccttctttttttttctttttttctttttttgccttttctagtcccttgacaatattcatcaccctggagctatgtactttattcccacattttcttggaactatgtaaaatttcaggtttgcattgcatttattttctgaaacacattgagtattataaaatggtcttgcattatctcaccgtacatgttacatgctgcctttgtaggatgttgcttgacttttgtgggaacacttcaagtgaaaaaccgccacaagatatgtcagagctagcaatgatggagattgtcatgaagagatatgagaaggaagcaatgcatccatttaaaggtctttccagtggaaaattaacatgtgcattgtctattcaggttcttccccttctatctctatttaggatgcactcagttcaagttaacctgcattttttctaacattctgatcctaaaaattcagattgagaagcataaactggctcttctggagtaagttatactaatgtattctgacaatactgcttaaaatgcatgatgataaattttttatgtctaatattaaactgcaagagatgattgaattgtttttacacagggcaatgctggagctggaccagatccttagggcaaatgagataaactttgctattcttgcagcactacctgcatttggtgtttcacttctgctgctctttgcagttcgagcatgggctacacatggccgtggtgctgagggaagaggtaggactgcacggcgtcagcgaaggctgcttcttgctgatgtagagaaaaggcttatggagtttcagaattgcatggctaatggaatggaggaagaggcatgctgtaagttcgggttaacactgtacacccttgatagactatacaaagctgttgaatcgcaggcgagagaaacaggagagtggtcaagcttgaaagaagacatgttcgatctggcaaagcctggtgtgggcatggaagacaagctggttctgctgtcccggctcaaagggatgtacgactgcttacttccatcaccgtcaggtgtcttgccccgtctgtagtcttctcatcttcctttcctttccttttcttcttttctttttggtcacgtgtgacgattagtgaaccccaatcttagacgacatgaatttgcttggcgttttaagagtcgtcaaattttgaattttttatgccccgggtactttgattgtagccctttcggctccatggagtgatgatggcttttgtgctgctgcaatgtttgcactagagattactgactgtaaatccaaaatctcttctaactggatgcttaattcatgtgccacacccatttt

SEQ ID NO: 27193 - DNA, 1065 bp, Oryza sativa
  ref <308>: DATABASE ACCESSION NUMBER: AK102635
  ref <309>: DATABASE ENTRY DATE: 2002-08-28
gatattcctccgtcttctccccgcccgggtgtcgctctcctcctcgtcgccgtcgccggtcgtcgccggtcgcgggtggcgcgcaacccggagtctctgccggctgcttactcgccgcgggcttcagcttcctcctcgatctccggcgcgcctccaagctgcagatcggccgacccccccagtgtgttgaagcctgcccttgacacttagcaactgcagagtcctgctggagagagatggggttcatcggcgacacgatagagtcaatccgctcgatgcaggtccgccaggtgctggcgcaaatcatcagcttaggtatgattgttacctctgcattgatcatatggaagggtttaatagttgtaacaggtagtgaatctccagtggtggtggttctttctggtagcatggaacctggatttaaaagaggtgacatcctgtttttgcacatgagcaaagaccctatccgcactggagaaatagttgtttttaatgttgatggccgtgaaattccaattgttcaccgtgtgatcaaggttcatgaacgccaggagagtgcagaagttgacatcctcacaaaaggtgataacaattttggggatgaccgacttctgtatgcacatgggcagctttggcttcagcaacatcatattatggggcgagctgttggttttctgccatatgttggatgggttacaattatcatgactgagaagccaattattaagtaccttctgatcggcgcgctgggcctactggttataacatcaaaggagtaataaagatgcggcttttcagtagagtagtggcctctctagtcgcatggaagaagctggtatttgtttcaccatgtttccaatggaagatgcgaggggtttatttttaggataactgtgcgacaattggcattgtattttccagcggtttatcatgtggcatccatctttcagtggtttacagttaattgcgcaagaaaatttaacgtgacttttggttcggcaactggttattggatgctgactttgatacaatataagatgaattcataaagcaatcctttgaggc

SEQ ID NO: 27194 - DNA, 2118 bp, Oryza sativa
  ref <308>: DATABASE ACCESSION NUMBER: AK102636
  ref <309>: DATABASE ENTRY DATE: 2002-08-28
gactcctctcccctctcccttctctcatctcgcgcgcggcgcgccgccgtagagacgaaatgatgatggctcagaagacgaaggaggcggagatcacggagcaggattcgctgcttctgacaaggaatttgctccgcattgctatatacaacatcagctacatcagaggtctattccctgagaagtacttcaatgataagtcggttccggcactagagatgaagattaagaagctaatgcccatggatactgagtcgaggaggttgattgattggatggaaaaaggtgtctatgatgcactacagaagaaatatctcaagacccttctcttctgcatctgtgagaaggaggaaggcccaatgattgaggagtatgcattctcatttagctaccccaacacgagcggtgatgaagttgcaatgaacttgagccgcacagggagcaagaaaaacagtgctacatttaaatcaaatgcagcagaagtcactcctgatcagatgaggagctctgcttgtaagatgataagaacactggtttcacttatgaggaccttggaccaaatgccagaggagaggaccattctaatgaagctgctatactacgatgatgtcacacctgaagattacgagccacccttttttaagtgttgcgctgacaacgaggccataaatatatggaacaagaaccccttgaagatggaagttggaaatgtcaatagcaagcatctcgtgttagctttgaaggtcaagagtgtccttgacccttgtgatgataacaatgtcaacagtgaagatgataatatgagcttggataatgaatctgaccaagataatgatttttctgacactgaggttcgcccatctgaagcagagcgttacattgttgctccaaatgatgggacttgcaaaggtcaaaatggtacaatctcagaagatgatactcaagatcctgttcacgaggaagagctaacagctcaagtaagagagtggatatgctcaagagacactgaaagtcttgaggtttcagatgtccttgttaatttccccgacatatcaatggaaatggttgaagatattatggagaggctacttaaagatggtttactatccagagcaaaaaaggatagttattctgttaataagattgctgatcctacaacaccacacataaagaaagaggtcatcatgcaaaatgtctcacctactgaaggaactaaaaatagcaatggtgatctgatgtatatgaaggcactgtaccatgcacttccaatggattatgtgtcagtaggcaaacttcatggcaagctagatggggaggccagccagaacatggttcgtaagttgattgaaaaaatggtgcaagacggatatgtcaagaattcagccaaccgaagactaggcaaagctgtcattcattctgaagtcaccaacagaaagctccttgagataaaaaagattctggaagtcgatatagccgaacaaatggccattgataccaatgcagaacctggtgagcctgagcgcaaagaccacctgagtggccatgaaatgagagatggatcgacgatgggttgcctccagtccgtcggatctgacctcacccgcacccgggagcttccggagccgcagcagaacgtgtccatgcagagcgggcaggaagcttccacggtggataaggatccaagcaggactcctacaagcgtgcgcgagcaggcgtccgtttgttccctggagagtggggttctcgggcagaaggtcagaaagtctttggctggtgctggcgggacgcagtgctcgcaggacaagcgattcaggaaggccagcacggtgaaggagccgatcctccagtacgtcaagcgccagaagtcccaagttcaagttcaagttcagtgagggttcgtgtcgcaagcgtcaggagcaactaacatcgtagttcaggtgcagaagaccacaagtagatatatccatcctattcctagttccggtgctcaagtttgtgcagatagtcagagagcactcacgcacacgtagatatctgtccatgccgctgtcccaaatggcaaatggagatagacgctactatgtgctaacacacactcaaattaagcattcaaaacgc

SEQ ID NO: 27195 - DNA, 1181 bp, Oryza sativa
  ref <308>: DATABASE ACCESSION NUMBER: AK102637
  ref <309>: DATABASE ENTRY DATE: 2002-08-28
gggattggacgcttcaaaagcctttttagccacctcgtagcctctcacaagtactacattttcatctcgaaagaaagtgaaatcatcaagaacttggtgagaatcgatcaaagagcagtgccagctgcagctgcagcagaggatcggaggaggaagggggagaagaggagatcggggagtggagagacgaaaagcagcagcagtagttgcagcagcagcagcatggaggagagagtgaagattggaggagacggcgaagaagaagaagaagaagaagcagaggaggaggaggcgccattggaggtggtgagggcagcgaaaaggagatttggggtggtggtggtggtgggcccaccccccagctgaggaggagcaggagaaggaagaagagcgaggaggagaggatcccctctcacgtcaaaggagggggaaagcagcataaaggcagcagcagctactggaggagaagaggaagcaagagagctcagcttcactacttcactggctcggccaaccaaagcagcagtcgaaagcgagaaaaaaagcttaagaaagaaagaaagctagcttcagtgagagtgagaatgtggggggagatagagagagagagagagagagagagtctagtgtgtcttgagagagatatataacaccaacaactcccagctgtgtgtgtgtgtgtgagagagagagagagagagagagagagagagcatctggttcttgtaccaccaccaccactgccccctttgcattgtccctccctggccacttctttctccttctccattttgtgcctagcgtacaaggaggtgccctgcttgctgctgctgctgttcggaagctatggcattgcaagaagaagaggaggatgatgaagatgatgaagaaggggagaaagaagaagaagaagacggtgtcagggtgcgtggggagctctgatttctccttgtcctgaggtgtgctgtccacttgtggatgtagtaagatattggcacaataggctcaatcacttttttcttttcctctcttcttttctcacttctgcttatttttgctgcttgcttgcttcttcgtcttttttattttccttcttcccctcaattcatgatgacacgttcttccttccttgtgtaatttatcaccgttcttggcgttttgcctgatttagaatgcaactg

SEQ ID NO: 27196 - DNA, 1884 bp, Oryza sativa
  ref <308>: DATABASE ACCESSION NUMBER: AK102638
  ref <309>: DATABASE ENTRY DATE: 2002-08-28
gttgttctttcaggatcaatagttcagtactagtcatctcctatctctcgtgtcgccctcccccaagggcggcacgtgaggcgtcgaactccggccgccccctccccccatcttcctcctccgcctcgccgccgcctgagcggccgcaaagatggcgccggcggggctcctcgcttctcgccgacctcgtctcgttcgggtggctgggggagcagcccaggatagtggcgacagtgaccgccagatccgcgccgcctcaaccagatctggcggggtggcggctggctgtggggatggcaacggcgacggcaggggcgcggctgggtccacggcagtggggatggcgacggcggcggggttcctcacttctcaccgacctcgtcttgttcgggcggctgggggagcagccaaggacagttgtgacagtgatcgccagattcgcgccgcctcagctggatctggcggggtggcggctagcgatggggatggcgacggcgacggcaggggcccggctgggtcgacggccacggggatggcgacggcgccggatccggccgcgctgaaggcgcatccggcctcccgacggtggatctagcaacccagcggctggatcgggctagctcgtggtgggagcggcagagctcgcaacgacgtggcggcggcagcagggcaagctcgtggcaggagcgcccgtcggcggcggcggcaacatccgtcagcaggagcttctggaggtggtcctgtcaacggcggtggctgccgacggcggccgctgtatcagcagtgtccacggcggctctcggccagatctggttgtgaccggtggtggtcggctggcgatgttggcggcggcagttgttgcccgcttggtggtggagggcgacggtgcggcgccagtttgcgtaggcggtggctcgcgtcggtggcagcggcgatggcggccttgactatggaggcggtggcgacatcggcggtggggaaggagtcgggtgcgaggtgaggatggcgacggcgaggtggctgaccgttcgatagcagcggctgcggtggtggtgactgtgtctgtggtaatttggcgcggcatcgtttggtggaggggtcagagagatcggcttggcatagagaaacgcagccgatggcagtggaggccggctcggcgcgagagacgcgggcggtggagatggaggcaggcttggcgcgggaggagcggcccatggaggaaggccggattgggcgaggcgcatccggcggaggaggccggcttggcgcagagaggtgtggctgacggtggaggaggcgacctaggtgtgaggaggagctgccggtgggtgtggagtggacttcgcgcatgaaggttggccgacggggggcgccgttgcagggatctcacatgtcggcagagctagtgtagtggtggagcattggtgcgtcagccatggattcgcaggtggtgagcagcgggtgaaaacccaatctggccttggccggaccgacaacgatggttcattgcccctcgtgagggtgttgttgtgctgtctcacccctcaagagtgattgccaggtgaaagcaaagtcttggctcctttgagtcccgatggatggtggcggcggtcttccgtcgcttctcttcttgaagatgtcattttggcatccccttggaggcaatcttgtctgtgtccctttgatggcctagtggtggtcggtcacgcttagtggcggccggtccggtgctagccttctcctgggcttgtgtgttggcgatgtcggtgtgtaggtagtggtataatttttcctttttcctggctacgaccctccagggtcgtaaccttgtaattttttcctactctatcaatagaacttcacaccgtctcgtgtgagtcgttc

SEQ ID NO: 27197 - DNA, 2217 bp, Oryza sativa
  ref <308>: DATABASE ACCESSION NUMBER: AK102639
  ref <309>: DATABASE ENTRY DATE: 2002-08-28
ggaagatctcgacagtcagattgcttttaggggaatatgcaaaaaggattgctcgacagtctcagaccaccatgggacctgtgctgctgtgcctagccatcgccgccgccaccgccgtgtgcgcagcatcatcaggagcaccaccatctcccgatgcggcggccgtcgccgttggtagctgccccacgtactccggatcaggttactcttctgcatctgacggcggcaaccaagaagagtatgatcccaataaagaaaatccgtgtaaacggtcatgtggctctatgtccattcctttcccattcgctcttctatccgcatgctctggcagtaaaagatttctcctaaactgtacatcaaataaaacacttatcggaattccgccagcgcaatatcaggtgataaatatatcattagacgatggtgtcctatttgtgaacaagccctcaaaccttggagatatcatcacaacgccaacggtggcaaacgagttacatgacttcgacttctctgggagccaaggcatttggagatgggctgtcgccaatcaaacatgtcacacagcgagaactgatcagctatcgtacgcttgcgtgagcaacaacagtttgtgtgttcatagatctactggctaccattgcaagtgctctttgggctacggaggaaatgcctatatcgaagatggctgtgaggatattgatgagtgtagtctacccaacttttgtaatggaaattgccagaacttcctagggagctacaggtgctcacattgccctcgtggttcaatttttgatcctgctaaacgtgtatgcatatatggacatggccttcatccagctggtcttctaattggacttagctgtggtattggagtcctttttcttgtagtaggtctaattttatttgttcgaaggtggaggagacatatgcaaagaaaaattagaagggaatacttccaaaaaaacaaaggcctcctacttgaacaattgatgtcgtctgatgaaaatgtagcacatgatccaaaaatattttccttggaagagctagagaaggcaacagacaactttcattcaacacgtattcttggctgtggaggccatggcactgtatacaagggaattttgttagatcaacgcgtggttgctattaagaaatccagaattgtggagcagaacgaaattgatcaatttatcaatgaggttgccatcttgtctcaaattgttcatcggaatgtggtaaaactttttggttgttgccttgtatcaaaggtacctttacttgtgtatgagttcatctccaatggtacattatatgatcttcttcatggtgaacagagtacaacattctcattaacgtgggaagattctatcagaatttcacttgaggttgcaagtgctctttcttacctccactctgctgcatcaatacccatattccatagagatgtgaaatcagccaatatactcttaaacgacaattacacttcgaaggtttcagactttggcgcgtcaagatccatctccattgacgaaactcgtgtggtgacaattgtacaagggacatttgggtatttggatcctgaatacttccatacatgccaactaactgagaaaagtgatgtttacagctttggtgttatacttgttgagatcctaacaaggaagaagcctatcatagtaaattgtttcggtgaaaaccaaaacctaggtcattgctttcttcaaacactacaacatggaacaatcatggaaatagtggatccccaaattgctaaggaagcaaatgaaagtgaaataaacgaaatggcatcgcttgcagaaatatgtttacgaatcagaggagaagaaaggcctaaaatgaaagaggtggagttaaggctgcagctcctaagagctatgataactgagagaagccgtcaggagttactaaggaacaatggaattgggccatcagtacaatccaattccagcactacatctgtgaccaggagtgttgtgcttcgtgcaggtattggcatatccactgatcaggatgcaactcgttgctataccatggagcaagagctcgtttcttggacagatctaccgcgctaaactgtactactctatcttttatgagacatcacaaactattctctgccgtctttttctggactgtttccttttagcgtgtgaaaaaaaaaacagattaactttttgaatgtttgttggtttagtg

SEQ ID NO: 27198 - DNA, 2800 bp, Oryza sativa
  ref <308>: DATABASE ACCESSION NUMBER: AK102640
  ref <309>: DATABASE ENTRY DATE: 2002-08-28
gactctcctcaccccccccccctcggccctggactccctcctccaaatctcccctaaaagcttcccaatttggcgagaattccccatatatttgccccatctcggcgtcccaacgagcccttccagattcccagccgcctctcttcttgttaggggatccgaaatctcggtggacgagagacttggtggtaagattcgccggccatggcgggcgccgtgctggtcgccatcgcggcctccatcggcaacttgctgcagggctgggataatgcaaccattgcaggtgcggtactgtacatcaagaaggaattcaacttgcagagcgagccccttatcgaaggcctgatcgtggccatgtcgctcattggggcgacgatcatcacgacgttctctggagcagtggctgattcttttggtaggcggcccatgctgatcgcgtcggctgtcctctactttgttagtgggctagtgatgctttgggcgccaaatgtgtatgtgttgctcttggcgaggctcattgacgggttcgggatcggtttggctgtcacgcttgtaccattgtacatctctgagactgccccgacggacatcagaggactgctaaacacgctgccgcagttcagtgggtctggagggatgttcctttcatactgcatggtatttggcatgtccctcatgccacagccagattggaggatcatgcttggcgttctatcaataccatcacttatatactttgcattgaccatcttttacttacctgaatcgccgaggtggctcgtgagcaaaggaagaatggctgaggccaagcgtgtgttgcaaggcctgcgtggaagagaagatgtttcaggagaaatggcccttctcgttgaaggtctgggggttgggaaagacacaaaaattgaggaatacataattggacctgatgatgagcttgctgatgaagggctggctccagatccagagaagatcaaactgtatggtcctgaagaaggcttatcgtgggttgcccgtcctgttcacgggcaaagtgcacttggaagtgcattaggtctcatctctcgtcatggtagtatggtcagtcagggtaagccccttgtggatcctgttgtcaccctttttggaagtgtccatgagaagatgcctgagataatgggaagcatgcggagcacattgtttcctaactttggcagcatgtttagtgtggcggaacagcagcaagctaaaggtgattgggatgctgagagtcaacgggagggtgaagattatggatcagaccatggtggggatgacattgaagatagcctccaaagcccacttatttctcgtcaagcgacaagcgtggaaggaaaggagatcgctgcacctcatggcagtataatgggtgctgtgggaagaagtagtagtctcatgcagggcggggaggcagtaagcagcatgggcattggtgggggatggcagttggcttggaaatggactgagagagaaggtgcagatggcgaaaaagaaggtggcttccaacgtatctacttgcatgaagagggtgtgacaggtgatcgcaggggctctatactgtcattgcctggaggtgatgttcctcctggtggtgagttcgtccaggcagctgctcttgtcagccaacctgctctttactctaaggaattgatgaagcaacgccttgctggccctgctatggtgcatccatctcaggcagttgctaaaggtccaaaatgggcagacttattcgaacctggagtgaagcatgctctgtttgttggcatagggatacaaatcctgcaacagtttgctggcattaatggagttctgtactacactccacaaattcttgagcaagctggtgttggtgttcttcttgcaaacattggacttagctcctcatctgcatctattcttattagcggactgacaaccttgctgacgcttcccagcattggtattgctatgaggctcatggatatgtctggaagaaggtttcttctccttgcaacaatccctatcctgatagtagcactagctatcttgattctggtcaatattctggatgtggggaccatggttcatgcctcactgtccacagtcagtgtcatactctacttctgcttctttgtcatggggttcgggcctattcccaacattctctgtgcagagattttcccgaccaccgttcgtggcatctgcatagccatctgtgccctaacattctggatcggtgatatcattgtgacatacaccctccccgtgatgctcaacgccattggactcgctggagtgtttggaatctacgcagtggtctgcatactggctttcctgtttgtcttcatgaaggtgccggagacaaagggcatgcctcttgaagtcatcaccgagttcttctctgtcggagcaaagcaggccaaggaggactagttgctcggatcaagtgatcaatcagattgctggtggtaattttgttgcttccaaatcgcgctgcgggttaaacctgtgatggatgctttgttaaagaatcttggaagagatcaaaatgcagtgagcctaaagagatgatttggctgtacatcatgaggctgaatcctgtcgtagactggattttggagcttaggatatgtagatcatctgttccttttggtttggtcattttccatttgtgtttctttggaattcttctccctgtaactagtggtctatcacagttgtgttactggttttgccttactcttgagtttgttttcttctctcggttgtgagttctgaatattagcatagccgagtactagttccg

SEQ ID NO: 27199 - DNA, 1302 bp, Oryza sativa
  ref <308>: DATABASE ACCESSION NUMBER: AK102641
  ref <309>: DATABASE ENTRY DATE: 2002-08-28
gacttgcatggcgacgacctacccacccccggccgccagatgcactgcatccgccgctctttgcatcccccacacccagcttgctttcttgcttagctagctaccccaccactgcctccctcctgctgctgctgcttgctgtcgcctcctgtctctcctccctttgcttgcatctgtagctagcagcagcttgatctggaatactccagccagctagctagctcggatcgatcgatcgggatgctgcctgggcgtgaagagatcgaggtgatgatcaggtgatccatcgatctatatgctgctgactagctgctgcatgcatgcctgccatcccgtctcttgaatcagcagataccgcatgcagagattgcaggaacagcttagatctgatccgaatatatatctggttcagtatcaagaaatcgagctacatatgaaaacttcatttctaagctccagcagctagcgtgatatgatagtgtgattgatatttgatacttccttgagagagacgcatacgatcgaatcggatgcactgcacctgagctaagctagctcaagctcgctcgatcagctcatgtacttgttgagcccaagaaatggcgacgaggaggacgaacaggaggaaatccaggagctgatcagcgacgacgagccgcccaatctcaagttggcatcctgcgccactgcagccagcagcagcagcagcagcggcagcgacatggagaagggaagaggtaaagcctgcggcggcgggagtacggcgccgccgccgccgccgccgtcgtcgtcaggtaaatccggcggcggcggcggcagcaatatcagggaggcggcggctagcggcggcggcggcggcgtgtggggcaagtacttctcggtggagtcgctgctcctgctggtgtgcgtgacggcgtcgctggtgatcctcccgctcgtgctgccgccgctgcccccgccgccgtcgatgctgatgctggtgccggtggcgatgctggtgctgctgctggcgctggcgttcatgccgacgacgacgtcgtcgtcgtcgtccgccggcggcggcggcggcggcggccgcaatggggcgacgacgggacatgctccctacttgtagtcttgtagataaacagctgcatcgatcgtttttctcttgtttttttttctttcccttggatttggaggtgtagagaagctccctctctaattaattacttagtgcgcatcttcttcatcaatctcatccaatcgttgtctttgttcggttaatcatagtatagtggttggaggtgtgtgatttgaacc

SEQ ID NO: 27200 - DNA, 1175 bp, Oryza sativa; identical to SEQ ID NO: 17870
  ref <308>: DATABASE ACCESSION NUMBER: AK102642
  ref <309>: DATABASE ENTRY DATE: 2002-08-28

SEQ ID NO: 27201 - DNA, 2930 bp, Oryza sativa
  ref <308>: DATABASE ACCESSION NUMBER: AK102643
  ref <309>: DATABASE ENTRY DATE: 2002-08-28
ggcttagttatcctgacccctcctcgtcagtttgtccgcccgccgccgccgccgccgccgccgtcgatccccatccatcgcgcgcgcgagcgagcagggggcgccgtcgttcgtcctgctgcttccgccgcatcctggcgggcacatcctccgccaccgccgcccgcgccgatccccacccatcgcgcgcgcgcgcgagcgagcagggtcgccgtcgttcgtcctgctgcttccgccgcatccatcctggtaaccgggagcatcacacgtgctcgctcaattcggattagaagaaacagctttgtggtactttggggttggactgttttgtgaatctgctgtgagggcttgtttttcttggtagcttttcgggatacgacggaatggagtgcaataagggtgaggctcttagggcgaaggagattgcagagaggaagtttgaatcgaaggacctgcagggggccaagaagttcgccctgaaggcgcaggctctctttcctgggcttgagggcattgttcagatgatcaccaccttggatctctatcttgcttcagaggtgctaatttctggggagaaggattggtactctatcctttccgtggagtcttctgctgatgatgagactctaaagaagcagtacaggaagttggtccttcagctccatcctgacaagaacaagtcggtgggtgctgagggtgctttcaaggtggtccaagaggcgtggactgtgctgtcggataaaacaaagagagctctgtatgaccaaaaaaggaaactaatggttctgaaacggaatacatctcaaacaaataaagcaagtgcagctcctggtgcatccaatggcttttataattttgcagccaatgctgctgcttccaaggtgacaagaggaaacaagcaaaaggcaggaccagcaacatcttcagtgcgccagcgcccaccccctccccctccccctccccgtcaggctcctgctccacctccagcaaagccacctacattttggacctcatgcaacaaatgcaagatgaattatgaatacctgaaagtgtatctaaatcacaatcttctctgccctacctgccgtgagccattcctagcacaagaggtaccaatgccacccaccgagagtgttcatgctgtacatgatccgaacatcagtggtgcaaatcaaaacacaaatggtagtagaaatttccaatggggtccgttctcaaggacagctggcgcagctagtgctaccgcatcatctgctgctgctgctcaagccgcgaatgtggttcatcacacatatgagaaagttaggagagagagggaggaggcacaggcagctgctagaagggaagaagctcttcggaggaagtacaatccaccaaaaaggcaagcgaatatctcagagaatcttaaccttggaacaggtggcaactcatctaagaagatgagaactatgggtaacgatattggaattggttcttcatccattctatcaggttcaggggccaattattttggagttccaggtggaaatatatcattttctaccaacagtggagcacatcattttcaaggtgttaatggtggattcagttggaaacccagacctcctactcgcatcagcttagtcaagaccttcacgcagtttgatgttagaggtattttgatggaaaaagcaaagagcgatttaaaggacaagctaaaggagatgcagactagaagatcacaggttgctgctaatggaaaaaagaataagaaaaacatgtttaaagaaagtggtggggatgatgaatctcttgcatcagatgattctactgcacgtcaagctgcacatgttgatccagaggacaatgcttctgttaatagcacagatgctgatgatgaaaatgatgatcctttatcttataatgttcctgatcctgatttccatgacttcgataaggatcgtactgaagaatgttttcagagtgatcaaatttgggctacatatgatgatgaagatggtatgcctcgttattatgcatttattcagaaagttctctccttggagccattccagctcaaaattagctttctcacatcaaggacaaacagtgaatttggttctttgaactgggtctcgtctggcttcacaaagacatgtggtgatttccggatttgtagatatgaaacctgtgatatactcaacatgttctctcaccagattaaatgggagaaaggcccacgtggggttataaaaatttatccacagaaaggtaacatctgggctgtgtatcgaaattggtcccctgactgggatgaagatactccagataaagttctccatgcctatgatgtagttgaggtactggatgagtatgacgaggatcttggcatttctgtcattcccttggtcaaggttgctgggtttcgaacagtatttcagcgaaatcaggacctgaatgccatcaagaaaattcccaaagaagagatgtttaggttttcacatgaggtgcccttttataggatgtcaggggaagaagctccaaatgtccctaaagatagctatgagctcgacccagctgctatttctaaagaacttcttcaggagatcacagaaacagtggaatcgtcaaaggcaacttctgaatgctgagtaaaacagttgattgcttccaagatgcctctgttcacctcccattttgaagctataaatatgtagacaacgctaggttctatagtttcctgccttttattacttttgagttttgaccattacctttgcgcactaggatagtttgagctaatcattcaggggaatagggggatagcttctgttgtaactgtggggtgttctgacatgaatttgtcgttataactatactattaagcaactctagaagatgaagtactaattagaagctcatgtggcagtttgtcagtggaagcttttagg

SEQ ID NO: 27202 - DNA, 2495 bp, Oryza sativa
  ref <308>: DATABASE ACCESSION NUMBER: AK102644
  ref <309>: DATABASE ENTRY DATE: 2002-08-28
ggccatttcctctcgcttgcaatctcaccattaacaggctgtaccaggaagcatccatttcgatcgcaagaagaataatgggtgagagcagaggcagcattgccttcttcgcgagctacaggccaccggtggctctggacatattctgctgcccagctccaccgtctagcccgaaggacgagctgcacctgacggacggcgactcctacaactacaactgccagcccatcccaccggcggcgctcaagacggtcgtggagcgcctcggcgtgtcccgcggcgacgccgtcgagggcgacatcgattccggccgcatcaccggcctcgtcttcgtctccgagagggagcacaacctcgagacgctccacatcgccctgcgcttcaacgacgacggcgaggtccaggtcttctccctggccgacgcctatggcggcgacggcctgttcagcggcgcccgcatggaggacagcggctgcattgccggcggctacgaggtggatggccgcacggttgaccattacctcgtgtatgtgtccaccaaggagccagtgcgagaacgtcgcagcccgtggaacgtcgcttacaagaccaatcttagaaccggcgagactgaacgcctcacaccaccaggaacatttgatataagcccatctgtgtcaccatccgggaagaaagtagcggtggcttcgtaccaagggaagaaatgggacggtgagatcaagaacctcaacaccaacatctacgtgatgagcttggagaacccgtctcaggatcgcgagcgggtgatcgagaacggcggctggccgtcgtggggcagcgaggacgtgatcttcttccacaggaaggacggcgacggggagaacagctgctggggcgtgttccggcacaccctgagcaccggcgagaccgtccgggtgacgccggcggcgttcgacccggtgactccggcggccatcgacgagaccagggtggcggtggcggccatccgccagaagtccgagttcagtgatgtccgcgtcgaggcacagtacaggcacatcgaggtgttcgacatgagatcgccggagcagccgatgcagatcacccggaacaccaggccaaaggccgaccatttcaaccccttcgtgatggacggtggcaagttcattggttaccaccgttgcaaaagcgagctcctccagcacggcgatgatctcccgagaaaatttcacaagctgcaatccccacacgaagatgtcggtgtgttcagggtgtccggtgtgttcccaacattttccaaagatggttctcagcttgccttcgttgacaacgagttcaaatccgtgtggctggccgatagccaagggatgcgtgtcgtcttcaagactgatggcccagacagcgtcttctcaccgctgtggaattccaagaaggatatactctatgtgtgcatgggaccttctttcaaagccagtgaaacgttggagatccattccatacacaatgtatccactggtgaccggaagtcgcggcagctcacgttcggaggattcaacaacgccttcccttccaccaatccagacggaacgaaatttgttttccggtcgacaagagatggaggggcaaagtacagcaagaacctgtacataatggaggacgccgacgccggagaaggcgaggatggcagccagtcgacggtgacgcggatgaccgccggcgagtggacggacacgcactgccagtggtctccgaacgggaagtggatcgtgttctcgtcgaaccgggacaggccggcggacgcgccggagcgcgaccacggcctcgacccgggctacttcgccgtctacctgatggacgtggcgtcccggtcggtggtgagggtgatcaggagcgggtacgacgtcgccgggcacgtgaaccacccggtgttcagcccggacgggcggagcatcgcggtgacgtccgacctcgccgcggtgaccgccgacccgatgtcgctgccgctcttcctgcactccgtcaggccctacggcgacatcttcaccgtggacatcgacccggacgacatggcgaggaacgaggacgtggaggggttcgtccgcgtcacgcacagccggtacgagaactccacgccggcgtggaccgtgttctccacgcacgacccgcacgcgcagtggaacctcctcgtcgtggaggacgagcacgtcccgtcgtgcccgtacgcgcatccggacggaggcgagagttggcacatgaccggccagatttgcatccccaaaaggcactgttaattctctcgccattgcattactacgtttcttgtttagaagcgttgttgtttgtttaacgtacgatatttattatctgaagacgttttcagcatttgcttggatgtacaacgtgtgtatgaactgtttgcgatgtaatatttgtttatttgcttgagatgtacttttttcttgtcagtaagacttttgcataaatcgaaaaaataatcacacgagtgtaatactacg

SEQ ID NO: 27203 - DNA, 1644 bp, Oryza sativa
  ref <308>: DATABASE ACCESSION NUMBER: AK102645
  ref <309>: DATABASE ENTRY DATE: 2002-08-28
ggccctaaaactcaagggtaccccaaattccccatcgccgccgcccccgatccggcgatgccgctgcgcccgccgcccccgcctcagggattcctcaccgcgtatccatccgcagctttccctccggtgaagcggccgcatgaggacgacctcggcgccggtgacgtgctgaccttcaggttccactccctcgccgtcttgaaattattcgaccgcatccgcgagtaccgtctgcacgattaccggtaccaggcaacgcgaggctggtacagctccgggacggcgccggaggatgctcttcttccctgtgcggttgctcgaccaccgaggatgtatgggtgcgtgatcggggtgcagcgcggtcggacggtggaggtcgtcgacacctccgacatcttgctcgacaccgaccccggaaccctcgaccgcgacttgttgaagaagaagctcgagacctacaagaaggcgttccctggcttggccattcttgggtggtactccattgacactcatgtgacgaacaccgatatggaaaccaaccaggctttgatggatgctagtggaacaaccttttatcttctattcaatcctgcaatgaacctttccctgaaggatctcccagtgactatttatgaaaaagtgcactctaccaataggagtcccactccgttaatctttgtccaaggcaaatataaaactgagactgtagaggcagagaggatatctttagaccatacgtgtcctgtagtttctgatgttagtgtgccacctcttgttggaaaagggcaacatgcaaatattatgcagacttctggatttaagctgatgctgtttgaaattccttctggtttcgcgatgtttgaagtttcacaggaactgattgcacgccctaaggacatatgggcacgatttgcttatcaggatgacattacaaatgttattgttaccctgggttctattcagatccataacaaatctgttgctagggatattattgttggtcctggtgacgaactgaaagaatttatcctaagcttttgcactcacaactacttaattgttcaagatgtagagcttaaagatgttatcgagaagaaacttaatatctattgttactgtaatccaactgttgtcggtgaattgacatggggactgaactatgtcctacataagttgttacctcaagagcaaagtttaactcatgagccttatcttccactaagcaaggcaatgtctaagcagataaaagaatatggattcaaaatctcgccacgagagggaattgtaccaagagatgagagatacactagagcagagattatggagttcattgacttcataattgcagctcctgaaaacagaagccggacgctatcgttcctgcggcgcatcgaggcagcttctattgatgattctcctccaccgccttcactgccaggagggatgggtgtttcgttgttgaagcgtcttcgtttggattggataactgtttgttgtctaggatgtgcagttgctctttaccctttctaccgcagagtatgaatgactttgttataaaattcactatgttttgaggacaaatacatattctctgacctgcttgattagtaccaaattaatccttaatcaaagaccattttatgt

SEQ ID NO: 27204 - DNA, 2666 bp, Oryza sativa
  ref <308>: DATABASE ACCESSION NUMBER: AK102646
  ref <309>: DATABASE ENTRY DATE: 2002-08-28
gactccactctgcttcactgtctcctccgctccgttgcttaccccctcccaaaacccaccgccgccgccgcctccgccgcgcaagccaagctgctccctcccctctccggccgccggcggcggccaagaatgctccgctgccgcatcaccccaggattccatactccagaagattgagttgcagctacctattgccagaaggcaatcaatttgttgagggatgtctggagcaaagccagctatgggtcaaactcaaggagatggttgtcctgtccaacagatctattcatatttggagaaagccactgactctgacaaatttcatgcggacagaaaacctgcaccttgtgatggttcttcacgtagaaaatcaaatgcaacttcattaaaagtgttattagcaaaagagatgactaaagaagtggaattaaagagaaagccaccaggtgtcgttgcccgattaatgggccttgaggaggatctacctgctaatggaccagttttacaccaggccaaaagtggtttcaggaaaagtcaatcatgtaaccagttaaaagcactaaacaaagacttaaagcaacaagagcagcatcgtctcataaagtcaacgacacaagatatccacccattttgtcaggaagcagttcaatataatgatgtgtatgaagtatctgaagcacaaacacggatgagctattttcaggacaaaatttcgcagaaaggagggtcttctgggaacacaagtaacagagtggatattttgcgaggaagtgtcatggagaaaaaatgcttaggcatggcagagaagccgcttcattcaaaggacttacaagaagctcttagggttgtaagttcaaacaaagatttgtttctgaaatttcttgaagaacctaactcaattttctcaagacagttggtagggcctcacaccaatctagcaccacctcagaaaaaacggattacggtactaaagccacttggttcttttgagagtgatggcacaagacaaactggaactgagcaaattcaagagcaaaatggagcagcaatgagagagttccatcagagttctaattttaaggaagaaaatccctccttgccaagtagaatagtactcctgaggcctactccagggaagccgagtttaacaaatgcaaagctaacccccaggacaactccatttctatcaattaaccccagtgatttcagggtagcattggatggcaatggggcaaccctacgatctacaaaagtagagcctggtatcattcataaccagcaagatggctgtcatcaaggagatgaatcttttttatcttcctcatactcaaatggatatggaggagatgaaagttcattaggtgattcagaaattgatcagaacagtgattctgatattgactatattgaagatgaaggtgacagcttcagtgactcagggggatgtagtcctgtgtcaaagcgaacatggcattataccaaaaaacatggaaatccctatctgggatcgtcttttagcaagatctcccactttgctgagtcatcagttactaaggaagccaagcaacggctttcagagcgatgggcaactgtaacttgtgatgagatcagtcaagagcaagtagaattgccaaggagcacatgcaccttaggagagatgctctcccttcaggatgtgaagaatgataatttcatcaatgagttaccttctgtttctaccagtcgctgttatgacagagaaaatgaactacctactcaagctaaatatgcaactgcttgtaggaaagatgaaaaaaatggtgagagacctatggggttgccaagatcaacatctgttcctctgattccatccacgcttaataacatggtggcaaatgtgaaaacttcaaatcatcagggccatgaaagaacaaaacatattgtcgcatcaaataaagaaaaatcatttttcaggggtagagtttcagatttcttctttccaagaagtaaaagaacaacaaggcagatatctgccaatcatacatctgatttgtcttcagggaatactgaagactgtggcggtgatagtcaacaagatgccaaccatgatttggatggtaatgaaaaatccaccatttgtgaggacatacttgatatttgtgctgtgcaatcaaccagcacttcagagggaacaactgctttaactgatgtacctgcatcattggattgtcggagtggaaacctgaataaactaggactgaatgaggtccagtccaaatgatgagtctccagcaaatattgaagcggctaaggattggagagaaaagagggacgatttcaagaaaaaggttagacgcattgttcgtaaatcacaggaaatgctctgaaagataaggagcacaagggggagtaagcgagtgctacaacaggtgcactacacttaactgtctgtcgtcaaacgactacctaaagatagcatttttgcttcttcccctgtatatttccccctcagtgtcattcgagtggtgatgttggtcttgtctccgagatgctcggaaatgttgcctattctagaaatttcgattgtattgtgtggcatggagtgtcaacgttgaggaatattttggaatgctgccaattagtcataattgtcgtaatgaacttttcataacagaaaacctagtttc

SEQ ID NO: 27205 - DNA, 2145 bp, Oryza sativa
  ref <308>: DATABASE ACCESSION NUMBER: AK102647
  ref <309>: DATABASE ENTRY DATE: 2002-08-28
gctctatccatctagattttgatcttcccctcctcgctgcttcccctcgcccttctgacctggcgcagatgttttcccacggcgctgattccgcccacgacgccggcgccgtcagcaccggtgcctccggcgtccccacgcgcttcgtctggccctacggtggcaagagggtctacctcaccggctcctttaccaggtggacagaacatttgccaatgtctcctgttgaaggttgtcccaccgtttttcaggccatatgcagtttgtcccctgggattcatcagtacaagttttgtgtggatggggaatggcggcacgatgagcggcaacctaccataacaggagactatggtgtggttaacactttatgcttgactagggactttgaccagataaatacaatattgagccctagtacacctggaagtaggatgaacatggatgtggacaacgacaattttcaacgtactgtttctttgtctgatggcattattcaggaaggtcctcagagaatttcagaggcagctatacagatctctaggtgtcgtgtagcggattttctgaatggacaaactgggtatgatttactcccagattctggcaaggtcattgctctagacgttaatttgcctgtgaagcaatcttttcatattcttcatgaacagggaattcctgtggcacctctatgggattcattcaggggccagtttgttggccttttgagcccactggattttatactcatattgagagagctggaaactcatggctccaatctgacagaagagcagcttgaaacacatactatatctgcgtggaaggaggccaagcgtcaaacttatgccagaaacgagggttcttggagggcaaatcaccatttagttcatgccaccccttatgaatccctgagggaaattgctatgaagatactgcaaaacggtgtttctaccgttccaattatgttttcctcatcaccagatggctcatatccacaattgttgcatcttgcttccctttctggaattttgaaatgtatttgtagatattttaaaaattctcaaggtaatttacctattttgagccaacctgtatgcacaattcctctgggtacctgggttccaaaaattggtgatcctaatggccgtccattggctatgttgcggcctaacacatctcttagcgctgccctgaatttgctggttcaagctggtgtgagctcaataccaattgtggatgacaatgactcactgcttgacacatattccagaagtgacatcacagctcttgcaaaagacaaggtgtacacacacattcgcctagatgagatgaccattcatcaggctctgcagcttggacaggatgcaaattcgccctttggattctttaacgggcaaagatgtcagatgtgtctccggtctgacactttgttgaaagtgatggagcgattagctaatcctggggtgcgccgtgttttcattgtggaagctggtagcaaacgtgtggagggcataatatcactgagtgatattttcaagttcttgctgagctaagtgaaaatgcccgagccatctgtgttttgttctcacaactgccggagttaacaatagcagaaaaaaattgtgaatctccaacatcgatctctctggcttttggatcagacaggtgtcttttcccgataatggccaaccagagtctgtaaagtctttttttttttcccttgccccttcgttaccaaaatgtctggtgatttttatttattggattgttttgctgcttgctcggtttctgagccccccaaggagttagtagctctgttgaaagggtgggatgggcgcttagagacatattttagcatgaatcatcatcacagggaagtaagaattgaaggaaagaggggatgctctgaagcaagaaggatgaattcaatgtgttgtttttgctcaacaactgtttttttggcgggcagtgttgcaaccatgaaaggagaaattacagtcggctccttgcttgttagacaaaaaaaaaaaaagaaaaaaaagaagagaaaaactattggatatctgatgatgtagtgactgagaagcaggagtggagttgtgtaaaacctgtaccacctgatttttatgtctaaaccgcagcttactc

SEQ ID NO: 27206 - DNA, 1139 bp, Oryza sativa
  ref <308>: DATABASE ACCESSION NUMBER: AK102648
  ref <309>: DATABASE ENTRY DATE: 2002-08-28
ggccatttttccgccgcatctggagctctaaaacccaaaccctagccactgcgccgccgccgtcgccttcgccgccggcccgccgccgccgcttcagccatgaacgcctttcggttcctcggggacatgacccacctcttctcggtcctcgtcctcctgctcaagatctacgccacgaaatcctgctcaggggtgtcgaggaagacgcaggagctgtacatgctggtgttcgtggcgaggtacatggacctgttcacggactacatctcgctctacaactcggtgatgaaggtggttttcatcaccagctcggcggcgatcgtgtggtgcatgcggcgccacccacaggtgcggcgcacgtacgacaaggatcaggacacattccgccatgtggtgctcgtcgccgctgccttcgtgctcgcattgctcttcaacgagcggttcaccttccgcgagatctgctgggcattttcgatttacttggaggcagtggcaattctccctcagttagttttgctgcagagaagtagaaatgtggacaacttgactggacaatatgtattcttcctaggggcctaccgtgcattttacatcctaaactggatttaccgttacttcactgagggtcaccacagcagatggatcccttggattgctggtttggtccaaacagctctttatgcggatttcttctactactatttcttaagttggaagaacaatgtgaagcttgagttgcctgcttgatagttcttcgccacgccagaaaatgtgcacatcacatgagaattatcgagattagttgatgctggcagagacttggtaatgaagtgggcagttgcaatttgtactgttgactatgaaaattgatgatgttcatgtgatggtttcccttggcaaaggctattacgtttcagaagctaacagttgctactgcacagaagtagactagttcctttttggacctcatactgagatggaaaatcacacccaattcatttggcttgttgtttgcagctctattacacttggtgtaaacaaacagtgtgatttccggtgtcttgtaaaaaccaatgcactccaaactactccgaaataccagaaatattgattgtgcttcctggatcctctcaacgctt

SEQ ID NO: 27207 - DNA, 1162 bp, Oryza sativa
  ref <308>: DATABASE ACCESSION NUMBER: AK102649
  ref <309>: DATABASE ENTRY DATE: 2002-08-28
gttactgaatgaactgaattagtgtgtgcgtgttgtatcatcggcccgatcgagaagatgtcgaagctccaactccggccgcctctgttggctactctgcattgcagcttgctcgtgctcctcatcatcaatggcgccgccgctgccggcaagaccggcgagctcaccgtcatctggggccggaacaaggacgagggctcattgcgttcgacctgcgacaccggcctctacaccaccgtcgtcatctccttcctcaccgtcttcggccacggccgctaccggaccgacctcgccggccacccgctcgccggcgtcggcgccgacgtcaagcactgccaaaaggccaagaacgtcaccgtcctcctctccatcggcggcgccggcgaccagtactcgctgcccaccgccaagtcggcgcaggacgtggccgaacacctgtggcacgcctacctcggcggcggccgcaggggcgtgtcccgcccgttcggcgacgccgtgctcgacggcgtcgacgtctacgtcgaccgcggccggtggggccactacgacgagctcgccaggcgcctgaggagcttcggtcgcgagaagccggcagtgcgcctgacggcgtcgccggcgtgctcgctggcgctgttcgacgacgaggtggagacgatgaagacgctgtcgctgttcgagcggctgcacgtgcggttctacaacgagagctcgtgcgactacaactacttcgagacgcggccgttctggggcgcgtggaggacgtggacgtcgaggttcccggcggcgcgggtgcaggtggggtggccggcgatggaggagatgagcgggttcgtggacccgcagacgctgcgggagagcgtgctatcgtcggtgcaggacgatgccaactacggcggcgtcatgctctgggatcgctactacgacaagatcaccggattcggccgtgccatcaaagacattgtctaattgcaatgttactccagtgtttatactacatggttcactgtgttgtttaccaacctgcattgcgtcatctgttactatctgtacccgtctactggcatatgcatgttcgtatgggtcaggcttgaaagtagtatgattatgttaatttagttttgaaatataaaagaatccagcatgtttcactgtgctgtttacc

SEQ ID NO: 27208 - DNA, 3311 bp, Oryza sativa
  ref <308>: DATABASE ACCESSION NUMBER: AK102650
  ref <309>: DATABASE ENTRY DATE: 2002-08-28
ggccgtgcgggccgccaacacaaggacgcgacgacaagggtggggggataagcggagagagagagaaaaaggaaaaactgtctcgtcgtctcgaaccttctcgcctccctcaccgccctaacccttcctcttctcctccgccgccgccaccgccgctccgccccctccgtcccttcgccgctaccgatctcccccgcccgcccgcggagatggacgacagctgcgcggtgtgcgcggacgcgctggagtgggtggcctacggggcctgcggccaccgcgaggtttgctcgacctgcgtcgttcgcctccgcttcgtgatgggcgacaagcactgctgcatctgcaagaccgagtgctcctccgtattcgtcaccaaggctatgggcgattacacaaaagtgataaatgatttcaatattttcccccctgtggcaactgagggaaaggtgggggagtactggtaccatgaggatagccaggcattttttgacgatgctgagcactacaagatgatacgagcaatgtgtcggctttcttgtagtgtgtgtgacaaagctgaagatcaggctggccaggcagcacaagtaaggcgcaaaagcaagttcaggagcattgaacagctgaagggacatttgttccatcaacataggttatacatgtgcagtctttgcttggaggggagaaaggtgttcatttgtgaacagaagctttatacaaggacacagttaaatcagcatgtaaaaactggtgactctgaggtggatggctctgaggttgagcgcagtggttttgcaggacatcctatgtgcgagttctgcagaagttcattttatggagataacgagctttacacacatatgtcccgagaacactattcatgtcacatatgtcaaaggcaacatcctgggcagtatgattatttccggaattatgatgacttggagttgcatttccgtaaagatcatttcctctgtgaagatgaagcatgtttggcgaagaagtttgtagtcttccagagcgaagcagagctcaagagacataatgctatggagcatggtgggcggatgtctcgtgctcagaggaatgccgcacttcagataccaaccagctttatatatcgaagaaacgagcaagatgaaaggcgtggtagaggtaggggacggaattctcaccgtgatggatctgaccgggataccccctctatgcaaaatggcagtgcaattataggcaacggttttccaagtcgagttgataatgttacagggtctgtgagtgtcagttctagttctgggcgaggagaatctggccaaagctcaggcaatggacgtgtgtttgaacacttgtcctttcctcctcttcaagaccaggatattcctgatgcaaggatggactctgctcctgatgaaacctcattcccttccctctcagagcagcaaaccagatatgctcatgctcttagtcagagttcccttgctgccaagcttggggatgagttattattccctccactacctgggtcaagtagcaacaggggttctacttcaactcaacaggggctacaaagtctagcgaagaacacacttgcatcaaggcttcagcagcgtagcaagggcagtgtgaaagtacttcattctgcccggcctcgcccatctgaaaatcctgaatcagtccctcctgtttctagttccccacagatgtggcctacacctgatcaggggctgcttcattctagttcttcccagcttcgaattgtaagagaaaatgggattatgtcatctgccgactcggcatggaatcctggaggtggagcttcaaacaggatgaagcactctgtttctactcctaatcttatgtctggtgggtcctctgttcaggcactaagtacatctaacggtggcaataaaaaacaacagccaccacaaagcagccaaacattgcctgctgctgatgatgttcgtgctgccaataagaccctggttgaaagaatgcgcagtgctttaggcatggatgaagataggtactctgcatttaaagaaatcgctggtgaataccgtcaaggcatcattggtacttcagaatatctttcatatgttgagcaatttggtctgtcacaccttgtgcctgaaatggctaggctgttacctgatcctcagaagcagaaagaacttgctgatgcctatcacaccaatatacgcttcagaagcctccaagagaacagtgatggtttaaccattacctcaaaggagggtggccgcaagaaaaagggcaagggaaaatctcatgatgttacagaaactagtgctgctcctgctaaggatatgaaggattcactagcagatagcttcctggacactgtaaggaagcttcagttaaacaagactcaggaaggagaggctgaggtgctgtcaagggatgggtatcgatcttccaagggaaaggcccaactaataactggaggttcatcatctagtacaccatgtctagatggtgatcatggtgccatttcaatggcttcttgtgccaaagatgatgtaggcaagggaggaggtagcagcaacagcaacatcaacaaacaatcaaagaagacatcaaagtttctcagagcccgattaggtgataactccttagctacacttgatttgagtcgtcctaccatgagccctgaacgaccagaaagggaatcgcaaggcccacaggtagggttgcctatgcgaggtgtttggaaaaatggagggggccagaagctctttacgggcaatggaaggaagtaaaatcattttgcagatgcagtttgacttttgaaacgagctggtcaatggtacaagcagattctgttgccaagtgtgcatattttgtgatcagttggttagctggtcgtgggagagctttattgctcctttgaagatcatcgcctttgaattacacctcactttcttgttttctttgccaaaacatcaactgaggctgaaacttgaaacagtaatggcgtgatattacgttactggccagttagtggaatccattggtagatggtattttacatgagctctgccaaatattatagttactttatcactttgtttgtgctggattgcagtcaaagacatgtatttagtgtgtctgtgatcaggccgaccctaactgaattcgtgaaagttgaaatctcaatgttcttcgtgttatttaaacggaattgctagaaaactctttcgtaagttttttgctcccaaaacttttagatttgtgaccataggatcaccttgagatttgtgcatgaagggggaaaaatactataaagaaaatttcacagt

SEQ ID NO: 27209 - DNA, 2130 bp, Oryza sativa
  ref <308>: DATABASE ACCESSION NUMBER: AK102651
  ref <309>: DATABASE ENTRY DATE: 2002-08-28
ggcctcgcatcgcaccccacaccgcgggacgatctatcggtcagaaaaagcgagcagagcggtgggggagaatggcggtggcggcggcgacggttcgatggctcgtccttctcctggccgtgtcggcggcggccacggcgtcgcgcgagaagtggtggcatggcgccggcggcgaggcgagtggtggcggccacctcgtgcagaaggagtggcggagggtggtcgccgcgagcgacgctggcctggtgacggccgtggatgtcgccgacgcggccggcaccgcgtaccggctgcacttcatcacgatgagccccgggacgctgttcctccccgtgcagctgcacgccgacatggtgttctacgtgcacagcgggaggggcaaggtgacttacatagaagaaggggacagtgaatcaagttcgcttcaggtggagaggggggacgtctacaacttcgatcagggtaccatcctctacattcagagtaacgcatgcggcacgagagagcgccttcaaatttacgccatcttcaccagcgacagcatcaacgctgatgacccaaggcatccgacatcagaagtttattcctttgtcagtgacctgttgaaaggatttgaagtagaagtccttcgaccgggcttcggggttccacgcgaagttgtggaatccatcaaatcgaccaaaaccccgccggcgatcataccgtataatccagaggaggaggacgaggacgactcgtcaaattggacggaggaaatcaccgacgcgctgtggggagtgcgagatcctcacttcctgaacaagaagaagaaggacaaacaaaaggacaagcacaagggcaaggacaagaagtccaagagcaaggccttcaacttctactccggcaagccggacgtcgagaactgctacggatggagcagatcgatgaccaaccgagacctcgagaccttgcggggatccaacattggcatgttcatggtgaacctgaccacgggcgccatgatgggacctcactggaacccgagagcgaccgagatcgccgttgtgacccagggcgcggggatggtgcagatagtctgtcccagcatcccgtccggcgagagcaagaagcatcaccacgatgaggagggcggccgtggcgatcacggccacggcggcggcggcgtccggtgcaagaactcgttgttcagggtgaaggaaggcgacgtgctcgtggtgccgcggttccaccccatggcgcagatatccttcaacaacgactcgttcgtgttcgtcgggttcagcaccgacatgggccacaaccacccgcagttcctcgccgggaggcactacgtcctgcaggtgatcggcaaggagattctggcgcggtcgctcggccaggacaactccaccaacgtcgggaggctgctgtcgtcgcagcgcgagtcggcgataatggcgtgcacctcctgcgcggaggagctggagaggaaggcggaggaggaggaagagggtggtggagggaagggggagaaagagcgggaggaggaagagaggaggcagcgggagaaagaggaggaagaaaggaggagacaagaagaggagaggaagaggagggaagaagaagagaaggaaaggagagagcgggaggaggaggaaaggaggcagagggagaaggaagagaagaagaggagggaggaagaagagcagaggagagaagaggaagaagaagagcggaggagagaggaagaggaggaggagcaagaggatggaagaggagatgagccaaaaccgaggagggaagaggaggaaggagactggggagagcggcagattcgtttgcccaggagcttgaaaaaacgcttcatcggaatcaagggcaggctctccagtggctaagcaagtgagcagagagggacatttggaggtgaacgcgtccagctacagtagtttctgcgtaaataatgctggtcttgctcgtgtagaggccggcctgcatactacgtgcgtactttcgtttcttccactgtgtcgtgatgtagctgagttaaataagctgttgatgtgtataatcgtagcctcctcccttccaagaacccgcctgtaaacggttaagtaagctgttaatgtgtataaacgtagctttcctctc

SEQ ID NO: 27210 - DNA, 3166 bp, Oryza sativa
  misc_feature (890)..(890): "n"=any one base of a, t, c, or g
  misc_feature (903)..(903): "n"=any one base of a, t, c, or g
  ref <308>: DATABASE ACCESSION NUMBER: AK102652
  ref <309>: DATABASE ENTRY DATE: 2002-08-28
gagaatttatctttcgcaaagaaaccctcgtctctcacccctcctctctccctcccttcccccgccttctccctcgcgctcgccgccggcgagcagccccggcggcgcgcgcggtgtgtacggcctcctctcgctcgcgcccccatcctcctccccctgccccgcgcgctcggccggcgagcaggtcccggcctccttccatctcggctcgaatcgaatcgaatccaaggttttcaaccgctgtgacagacgatggaggatgatgagaggggggatggcgatgagctgattgccgactatgtcgactgcctcatgtccctggacaccaactcccgctcttgccagaatgacgccctgattcttgaaggagctccagatgatgtagacgacgacgccgctgcggcggcggccgcggcggcggagcaggatgtgatgagagattttgctcctggtgatggtgatggtgatgctgatgctgagaatgatcccaaggagccggtgctcggcatgacgttcgagtccgacgaggcggcaaagatgttctacaatgagtacgccaggtggctcgggttccccttccgcgtcggccggtcccggcgatcgaagggcatggaggaggttgtaatcatgaacaggttcgtttgctcgagggaaggggcgcacaagaacacccagccatcgacgtccggcgaggctaccagtaagcgtgagagggcattgatgcgggaaggttgcaatgccatgatggaggtggtcagggacaaggaccactgggttgtctccaagcttgagaaggctaacaaccatagccttggccatcggccaccagcactacgggctatcttcgctgccagaggcacttgcctgatgctgtccaacccgatcgctgngatgggctctgangggaccgccctctcttaggcacgaatttcccttggggagaaccggtgacggccagggctcttcttgcattatctgaagacagaagcaagccaatgaccccaggtgtcccccatgccatacaggtcgacaagaatggttgtctgatgaatgttttttgggctgattctagagctaaagaagcctatcggcattttggggatgctgtcacatttgacacgtcatataagaagaccaagtatatgatgccctttgttaccttctcaggtgtcaaccatcatcttcagacagtaatttttggttgtgcgtttcttatggaagaaactgaatcctcattttcttggctgtttgaaacttggttagcagcaatgggtgggaaggcaccaggctcgttagtcactgaccaaaatagggctatgaaggctgcaattggaaaggtttttccagatacctgtcaccgcttctgcaagtggtatattttgagtagaaccaaacaaaaattatgtcatgcatactctgagcatccggacctgagggatgagatagaaagctgtgtgattgaatctgaaactatctctacttttgaaacatcatggatgtcaatcctcgagaaatatgacttgagaaaacatgcatggcttcaagccatttaccatatacgcccaaagtgggttcctttgtacatgatgggtacattctttgcagaaatatcacccacaccaaaattggagaccatgaatgacttttataagaaatacttcaatacaaagacaacgctggaggttttccttaatcaatttgattcgaccatgacaagtcgatatgaaaatgaagcacaagcagatatagacactcggttaaatgaggcaactacaaggactgcatcgccaatagagaaacaggcagcaagcacttacacaaaagcagtctcagtaggttcaagaagaattcacagaatcctgggttatatcattcagaaaactgaagaaggcagagtaaacaaattcagcatcacaaaagatgaagatgatccatcagacacattctcagtgacttataatgcttccagtaagatggcaaagtgtagttgcaagtactttaagttctcaggtattttatgccgtcatattcttggagtattcataatagttgatccacgcacacttccacctgattactttttgaaacgttggacgaggaatgccagacatgatgaattgttggaagacaacagcaataaccacaaagatgctacttgtcaatccattacaagccgttacaatgtcctgtgtgctgatgccatcagatgtgctgacaaaggatctgcatcaaaggctgtgtataaagcagcaaaagacatcttacagaaggcatatgaagaaatcattgcctatgaaagaaatcctggcagaggattacaaagggatgctataaacatcaatgaggatatcacaatagatgataccatgaatgatcaatctttgccagatttctgggaccaaaggaacctaaaatcttctaggccagcttcttggcaactctcgatctcccatctgaatgtatatatttttgtcttctcttggagatgcgatgcaaattaccaccattgcatggtgtcatgcttgacatgcaatttccatgttgaattgaccagtggagaacagcatatggaccaagatgaaaagagtttccaccgatggattcggatcaacagcaacaatatgggttgagacttggaagctcccttttgaaatgtgcatcaaatccaccctgcttgccaactttaatccttgagatcactgcgcctatgagattcatttgggcatttggccattatggctagttgatagttgttcgtcagacatcagccgttgttgcatcaacatctcagatgttcagaacgcactcaagtatcaggagtactgacgcaatcaaacaatacttccaaagatttggattaagactagcctaaatgatgcttgaactgaaattagtactgagtgttcatggagatggaggcgagggttgtgattctttgatgataggattaggctgttagggtaggaagctgtgcaaccattgattacttctttctttttctttttgtccaaagatgagttagtagaaggaagcaaaaccagtgtagcctatgtcaatgttgttaatgaattgtaaattgaggtgaaatggttgagatctgtatcgttaaccttgtaaaaggtgtcctgtttcatcatagtttatctgggtatttaccagttcacgt

SEQ ID NO: 27211 - DNA, 2123 bp, Oryza sativa
  ref <308>: DATABASE ACCESSION NUMBER: AK102653
  ref <309>: DATABASE ENTRY DATE: 2002-08-28
gaattctttaaagggagaagcaactctgatctcacaacagatagtttagctgatgctctagctcttgctcagcaccatgatgctgttacaggaacggagaagcaacatgtcgcaaatgactatgcaaagagattatcaattggctatacacaagccgagaagctggtttcatcctctctctcttgcttgagccagtcaggctcaaaatcacattgtccgtcccaaacaacgaattttgaacagtgtccgctcctaaatattacatattgccccccttccgagatggacctttctcaagggaaaagtttggttgtgcttgtgtacaactctcttgggtggaaacgggaggatgtccttcgcataccggtcatcagtgactcaattgttgttcatgattctgagggaagagaagttgaatcacaacttctgcctatagctaatgcatctttgtacatgcgggagaaacatgtcaaggcttacctaggcatgttaccagctgcaaaacccaagttttggcttgcttttccagtttctgtaccacctcttggtttcaatacgtactttatatcaagcgggaagaaatcagcatcagtctctttgatgtccactctgcactcatctcaaggaagtgaaaatagtaacatgcaaattgggcaaggacagttgaaacttcaatacaatgcagctggagcattatctctgtactccaatagtaagacccaggttgaagcaaattttgagcagaagtacaagtattacataggacaggatggaaatggaagtgatcctcaggcttctggagcatacatatttcgccctaatggcacagttcctatcaagactgatggacaggttcctctgacagttctccgtgggtccatattggacgaagtgcatcagcagattaatccatggatatatcagatcaacagagtttacaaaggaaaggactatgtggagactgaatttatagttggaccaataccagtggatgatggaaatggaaaagaactatccactgaagtcgttacaaacatggcaacaaacaaaacattttacactgattccagtggacgtgacttcatcaaaaggatacgggattaccggtcagagtggaagatcgaagtgcaccagcctatcgctggaaactattatcctgttaatcttggcatttatgtggaagatggaagcagagagttatctatacttgtagacaggtctgttggaggtgccagcataaaggatggacagatagagctaatgctacacaggagactacttcatgatgatggtcgtggtgttgcagaggcattaaatgaaacaacctgttttgataatcaatgtgaaggactagttattcaaggaaagtattatctcaaaattgatccacaaggtgaaggagctaggtggcggcggacatttggccaggaaatatactcccctcttcttattgcttttgcagagcaggatggaggtaattgggtgaattcacacgttacaaaattctctgcaatggatccggcctacagcttgcctgataatgttgcattgcttactcttcaggaacttgaagacggaactgttcttcttcggttggctcacctatacgaggctggagagcacaaggatctttcagctctagctagcgtcgacctgaagagagtatttccagacaagaagattgtcaagattgttgagacaagcctatcagcgaaccaagaacgttcagccatggagaaaaagaggctgaagtggaaggtggaaggccctcctgctgatgaaaagatcgtccggggaggccccgtagatccttccaagctcgtcgttgatctgggccccatggagatacgcacattcctcatcaatttcgccccgcagtccggcaaacagttgatgtgaggggtgacatggccttggcaccaatgttttatttttagcttgagttcttctcatggtgatgagcaataagaaataatgtggccatggtgattggtgaccgaatgcagagatgcactggtagcatccaaccactgagccctgtttgtagcttgtaaatgaatttggcttcaccttaagttgagctcggtttcagtgaagataagtgactgaaacttttggtctcc

SEQ ID NO: 27212 - DNA, 1346 bp, Oryza sativa
  ref <308>: DATABASE ACCESSION NUMBER: AK102654
  ref <309>: DATABASE ENTRY DATE: 2002-08-28
gaaccgtccactccgccgccgcgacaactccctgcggcgaccatggcgacaagatcagcgctaccgccgcgccgccgcggcctcccggaggagctcgtggtctgggagatcctggtacggcttccccctaaacccctcctccgctgccgcttggtctgccgcgcatggcgccgcctcacctccacccgcggcttcctcctcgcccaccaccgccatcaaccctccctcccgctcgtcgtcggctacggctgcgacggtgggagcctcctcgacatcctcacccttgaccgccgggacgccgctcggccgcggctccatcccgtggtgcggctcaagaacgccgctcacttcgtgagtgcatcctgcgacggcatccttatcctcaacatgaccaactgcggcgaattttactactcggtctgtaacccgaccactcgtcaattcgctgatctgccgatgctcactggtttcttcgtcatggggttttaccagcaccgccccaccggtgaataccggcttctactctactaccagtttcggccggaaggttctgaggatagatatgcctgctacgtctacacattgggctccagcgaaatgccgaggtgcattgggtggatggaggaggttgcaacctgcacagctgttgtgctgctccatggtagcctgcattggtataattacaaaacagacaagattttgattttcaacaccgcatccgagtcgttctggtcgatgcgtcaggctgacaagatgaatgggaatgatctgtttgagattgatggtacacttggcatctacttctgtaatgatgatgcgacgatcgtagatatttgggtactgcaggattacaagacagaattctggtctctcaagcaccggattgaattgccagtcccagatataaaggggaagcttgatgatggtgatgattggagtgcgatggtattgtctgaggacggggatgtgcttgtgctggtttactacagacaatggctgctttacattggtactgatggcaagctgttggcgagttttcaacatgatgttgggtgccactacaatactcctctgaagcttaagcaaagccttgttccacatgcattctttccattgttaaagggttatgtcgtgaatgctcgacctttcatctgatgctggagcggctttgctagttgttggactcgtcttgagatggtttcttttcatcctggtgggtagcaacttttggtgctgtcttttagaggttgtggacactgttatcttgtgggatgtcaccttgctaaaatgtactcaaaccctgctgaactatgtaatatgcagtagctggtttgccaatctttttc

SEQ ID NO: 27213 - DNA, 1410 bp, Oryza sativa
  ref <308>: DATABASE ACCESSION NUMBER: AK102655
  ref <309>: DATABASE ENTRY DATE: 2002-08-28
gctcctcccctcccctcgctccccaaaatttcccaaactccccgccgcccaacacaatggcgagctttaccgccggcggcggcggcgccaacaacaaccccaacaagtccctcgaggtgaatccggcgcccggggactcggtttccagcctcagcttcagtcccaaggcgaaccacctcgtcgccacatcatgggacaaccaggttcgttgctgggagatccagcctggaggccaatgccaagcgaaggcctcgatctcgcacgatcagccggtgctgtgctcggcatggaaggatgatgggactactgttttttcgggaggttgtgataaacagattaagatgtggccgctgctctccggtgggcagcccatggttttatcagggcatgaagcaccggtcaaagagcttgcctggataacacagatgaaccttcttgttagtgggagctgggacaagactctgaggtactgggatgttcgacaacctcagccagcacatgttcagcaactacctgagcgctgttatgctctctcacttagttatcctctcatggtggttggcactgctgatcgaaatgtaatagtcttcaatatgcagaatccacaggctgaattcaagaggattgtgtcacctttaaaactccagacaaggtgtcttgctgcatttcctgatcagcaagggtttctggttggatcgatagaaggacgagttggtgttcatcatgttgatgatggtcaacaagggaaaaactttacatttaaatgtcaccgtgatggcaatgacatatacgctgttaacgcattgaactttcaccctgtgcaccatacttttgccacttcgggctctgatggaggtttcaacttttgggacaaggacagtaagcaaaggcttaaggctttcaataagtgtccgtcacccatcacatgcagtacattcaatcaggatggctcaatatttgcttatgcggtatgctatgattggagcaagggtgccgagaagcacaatccttctactgcaaaaacaaatatctttctccatagtgtccaggaatctgaggtcaaaggaaagccccgtgttaataagaagtagacctgacaacaagaagttgaggattggttatcataatcataacatcatctcgctgatgctaatttcctgcatgagtatcctccttccgaactctttatgccatctcttcgtctatgagacggtaacttgtaaacacatacttttctggtcgtcattgttgtgaattgcaatagtggacaatggtagttatatgcaatctttacaccaaatgcgttcagatcaatcctggtattggatccaactttgttctcccaggttcagattttctggggcctgcgaagtacaaacctaatacagtcattcaacagcattaaacgcc

SEQ ID NO: 27214 - DNA, 2126 bp, Oryza sativa
  ref <308>: DATABASE ACCESSION NUMBER: AK102656
  ref <309>: DATABASE ENTRY DATE: 2002-08-28
gtcctccgcctccgcctccggtctcccctctcctcacacgctccggctccgacggacgattcccacccagtaatggcgatggatttggacgagccgcttgacgcggagaagggcgaggcggcgctgcggcggctgcgcgacgccgacccggccctctacctctccccctccgccgacctcgccgccgccgcccgtgaggcctccaagcacctctacgcctcgctcgtccccttctcccccgcgcagccgcccccgctctccaacctcctcgcaggccccgccttcgacgccgagcagatttggtcccagattgagctgctctcccgccccctcatcccccacctgcgccgccagctccgccgcctcgagaagcaacccccgtctcagccgccgcctcgtacggaatcgaagtccgctgatgccgaagagaagtcagaggaggaggacgaggaggatggtgaaggtgacgaagaattggaggagttggacgatgtagatgatgaagaggagtcagaggaggaggaagaggaagaggaagaagacaaagaaggattggaggataaagcagggaatcaagtggaggacgagttcttcaagataaaggatctcgataagttcatggtaaagggggaggaggcggaatatggtgggggtgccaagcaagggaagaagaagaagaaaacagagaactggatggaagaagatagtgatgaggaggaagaggaggaccttgatgaggatgaggacaatgaggatgaagaagatgacgatgaacacttggacttggaagactttgacgatgaagaagaagaagaagagggtgcagttggagatataatgtataaggatttttttgaggaagctgatgaccaaaaagtaaggaagaaaggtggctccaagaaagttcaattcaaggatgaaccagatgaaccagaagttgatgacaaaaatgatgatggaaatgatgaacagggtttgtcaactcacgagaaggcgcgcctgaagatgcatgctaaaatagaggaaatggagaaagctaatcttgaacctagtatgtggaccatgcagggagaggttaatgcttccagcagacccaaaaacagtgctctagaagtggaccttgattttgagcacaatgtaagacctgccccagtaatcactgaggaagtcactgcttctcttgaagagatgataaagaaaagaataatagagggtcattttgacgatgttgaaaagccttctcccttgcaatttaaatccccaaaggaacaaaaggatctggacgaaagtaagagcaagaagggtcttgctgaactatatgaggacgattatgcgcaaaaggctggccttgcacctgcaccactttctatttcagatgaacttaagaacgaggcaaataccttatttaagagaatatgcttgaagttggatgcactatctcatttccactttgctccaaagccggtcattgaagatatgtctatacaagcaaatgtaccagctctagcaatggaggagattgcacccgtagctgtttcagatgctgcaatgcttgctcctgaagaaatttttgaaggaaaaggtgatgttaaagaagaagcagaacttacacaagctgagcgcagaagaagaagagctaacaagaaaaggagatatgcaggatcgcataaggagaggccagccaagatgcagaaagattaactcaatactggggaaacgcttacattatgaacaagtagtcagccatttttactgttcagcattacctcctgacccaaggatccattcatgatgagtattgtgcaaatggcaacgcagcattgacagacatggaggcagagagcaggctaggaaaggtagggtgaagggttgggctccaatgcttttgatcacaggatctgtactctggtggcacaacagacagacagctgttccaggtcaaagaccctgacgtaacccatctcccgtcccacaagaaaaggcgagcgaacgtattggaatgtgggatgggtaaaagaaatcttttgtttcttgttacactagtcgtagtagtagtgtagtaatgcaattttacaatatcattttttacactatagagtatcaatggagtgcatgtattcagaggc

SEQ ID NO: 27215 - DNA, 2001 bp, Oryza sativa
  ref <308>: DATABASE ACCESSION NUMBER: AK102657
  ref <309>: DATABASE ENTRY DATE: 2002-08-28
gattactctccttccctctcctctcctctcctctctcgccatctctctctcctccgatctgcgcagccagccggagccaccgccgcctctctgtcgccgcctcgcccgcgggggctccggcgaacgggccgcccgcctcgacctcccctccttcccgtcgccgagctagcctctccacgctgcgcggggccgcctccggcgagcaggctgggcctcgggcctcggggcctcattccaccgccctgcgcctctcggttcggatcggcttgaaggtgaaggtatggacttcggtgattctagacgcaagcctaatgtcgtcgggaagttcaccgtagctgttgcactcacggtcatgtgcatcattgtgttgaaacagtcgcctggttttaccagtacaagtgtgttctctcgccatgaaattggtgtgactcatgtgttggtgactggaggagctggatacattgggtcacatgctactcttcgtctacttagggacaactaccgagttaccattgtggataacctttctagagggaacatgggagctgtcagagtccttcaacgtttgtttccagagcctgggaggcttcagtttatttatgctgatttaggcgatgcgaaagctgttaacaaaatattttcagaaaatgcattcgatgctgttatgcactttgctgccgttgcttacgttggtgagagcacgttggagccactgaggtactaccacaacataacatcaaatacattgacagtgcttgaggcaatggcagcatataatgtaaaaactctgatatactcaagtacttgtgcaacatatggtgaacctgacacaatgcctatcacagaagcaacccctcagaatcctatcaatccatatgggaaggcaaaaaagatggcagaggacatcattttagatttctctaagagatcagaaatggcagtcatgatcttaagatacttcaacgtcattggatcagacccaggggggcggttaggggaagctccacgaccagagctgcgtgagcatggacggatttctggtgcttgctttgatgcagcactgggaatcattccaggtttgaaggttcggggaactgattaccctacagctgatggaacttgcataagggactatattgatgtcacggatctcgttgatgctcatgtgaaagctcttgataaagctcagcctggcaaagttggaatctacaatgttggcacaggacatggtagatcagtgaaggagtttgtagaagcatgtaagagcgcaacaggagctagcatcaaggtttcattccttacccggagaccaggagactatgctgaagtttacagtgacccatccaaaatccatgacgagctgaactggacagcccgttacattgatcttcgcgaaagcctttcaactgcatggaaatggcagaaagcacacccgaatgggtatggatcggcctgattcagggtttaatagattcagacttaaggtacacagattctcaggtccatgtgcagaaatcatatatccttcagaaaattggttcttcagcacaaacatagtgccaggcacagaagtgttctgaatttttttggcagcatttggaagaagatacagaaagaatggcccctctattcctggcttaggatcatacatatagtttttttttttccttgacattttttttaatcttttctactcgttaaagcataatataataaccaatagaaaatgtgttgtagacaaggtagataactatcatgtatgaacgttcatggtgttgaatgaaaggatatatgaataagtagatgtttgcttattagtggaagttaaatttccattttggcaagctcagcggttaaatttcttgtatgtgaagcaaggggtgactggggacaatgcattgctgtgcacaactcctggtctcacttgcaaaaacatttcttacatgtaactagagtacaagtggttggattataccgtatgtacatgaacgtcaattcgcc

SEQ ID NO: 27216 - DNA, 1756 bp, Oryza sativa
  ref <308>: DATABASE ACCESSION NUMBER: AK102658
  ref <309>: DATABASE ENTRY DATE: 2002-08-28
gaatctctcttccatctctctctttcttccagaccgtggcatgcacggcttgacacagacgctctcgtacgtcgtcgtcgtcgccgtcgtcctcctcgtcggcataaagcagtctccactgcaaaccagctagctgtagctctcaattcgtaggtgagatcgacgcgcatcgcgccgcgtctacgtttgtatatagagggggagagaggatcggaggagccgatcgagctgaagtagggatggtgctgagggcgtgcacaatggtggaggggtcatctttcgtcgtcggcggcggcggcggcgtgccgttcttcgagtggctcaagccgcggtcctcgccgccgccgtcgccgtcctcctcgtcgacggctacgacgtcatcgtccctcaccgcccaacgacaaccgcgtggtgctggtaccatgctgtgcttgcctcttcttggcaggctcggagaggagcccgttgatgctggcgatggcggggcgatgaacaatcctcctgtcaaggaagaggtgagcaatactacagacgactatgccggtgttgatctcaacatcggcttgccggcgacgaccggcgggggtagctctgaagatgcgcccatggatgaggatgaagaagacgatgatgacgacgaggaggaggagacggaggatgatgaggagaaagcagctgggcttgaggggtgcaaggtggaggagaaagaaagagagcaagtacatagcgagggatcgaagtattacgtgtccgtgggaggaggggaagatcagagcagcaacgccggcgatgtcgacgccggcgccgcctgccgtggccggcggtattggatcccgacgccggcgcagatactcatcggcccggtgcagttcgtctgccatgtctgcaacaaggccttcaatcgatacaacaacatgcagatgcacatgtgggggcacggtcgggagtacaggaaggggccggagtcgctcaaggggacgcaggcgacggcgacgctggcgatgctgaagctgccgtgttactgctgcgccgccggctgccggaacaacgtcggccacccgcgtgcgcggccgctcaaggacttccgcacgctgcagacgcactacaagcgcaagcacggcgccaagcccttcgcctgccgccgctgcgccaagccgttcgccgtcaagggcgactggcgcacccacgagaagaactgcggcaagcgctggttctgcgcctgcggctccgacttcaagcacaagcgctccctcaacgaccacgtccgctccttcggcggcggccacttccccgtcgccgccgccgccgccgccgcacatgcggcggcggcgccgcccaagcagcagcagcgaatcatacgcttcgacgacgcaatggcgcaaatgcatggcggcggattaatgaactaacagtgttaattgttcttgatcgttagctagctatagctaattgcatgtacacttcccccttagtttacacacacacacacacccacacaaaatgcaataagattatggagctaggttgccgaggagaagctaaaggcagtgaagcagctgaattttcttctggatgatgaccggagtttgcatgcaatcgggggactgactgatcacataaggtttgttagttacccgtagcttggtaatttgcaaggaagaaaatttgtcagcttcacagcctaatgctggtttggcagccaaatgtatcaatgtatcactcgtgcatgacttaattttaagaagatctgttaatt

SEQ ID NO: 27217 - DNA, 2468 bp, Oryza sativa
  ref <308>: DATABASE ACCESSION NUMBER: AK102659
  ref <309>: DATABASE ENTRY DATE: 2002-08-28
gtagcgtgtgacgtgctcatatcatgtgctactgcctagttgcacgcgcgtcctgctagctaggtgcctgctaattaagctcgttgctcaaccatcagaggcacgcagatgtgactgacactgagactcaatccgtgacagcgcgagtcgctcgcggcatccgcgtcggcgtcgccggctcgccgccacccatgtccccccctatgccgctgccacacctcactgtacttctcgtcctctttgcgacgtccgccgcccaggctgccgccgatcggagcagcagcagcagcagctgtggcggtggcgaacgctgcggcgatatcctcctcccattcccgttccacctcaactcctcctgcgtctccagcaccaccaactcttcctcacgctttcgcctctcctgcgacaccaccaacgccacgctcaccctgccgctcggctcggcgacgttccgcgtcctcggcttcctcccgtcgggatcgatcctcctcgactacgcccccgccgcgtcgtcgtcgccgtcgtccccgtgcgaccccgcgtacgccgcgttctcccgcccgtcctccccggcggccgctctcgatgccgccgcggcattcctcgccgtcacgccggccaacgttctccgcctctacgcctgcgaggactcctccctctgccgcgctggctgcgaagacgttgccacctgcggccgcggtggcgccgccgcgggcgctaagtcggggtgctgctatccgctgtccgacggcagcgtgtggaagcccggcgatgggcttggcgccttcgcggagttcggatgccgggggttctcgagctgggtcaagaaccggtcggccgccgcaccgggtgtcgtgagggggatcgaggtggagtgggcggtgcccaagggcagcgagatggcggcgtgcgccgacggtgcggtcgccgtcaatgccacggcggtgcgaggcggcgtgcggtgcgcgtgcgccgcggggctcgtcggcgacggcttcgcacatggcaccggctgctcaaaaggcacatcgtgcagcaattctgggcaggcaagtgacggcagggagtgttgccagggaaggttttgctccaagaagtcagttgctcttgccggtttcttcgtttcgctcttcttcctcgcggcggccgtctcgttttggttgttcctaaggcagccttccaaggacaccctgtgggacatcgacccggcgtgcatccccaagatcttcggtggcgtgtgcaacgcgaggcagttcacgtacgagcagctggacgaggcgaccaagaggttcgacgacagcgagaaggccgccgtcaacgtgcaggtggacggcggcggcacggtccacgccggcgtcctcgacgacggcaccgtggtcgcggtgcagaggatcgggtacgacacggcagagaagctcaggctggtcctggacagggtggagctcctctccgaggtctcgcaccggaacatcgcccgcgtcgtcggcttctgctgcaccgccgccgccgactccggcaccggcaacgcgctgctcctggtgcacgagcacttcgccggcggcacgctggaggacaacctgcggcaggtgaagggccggctcctcagctggtaccaccgcgtcaacatcgccatcgagctcgccagcgcgctcacgtacctgcaggcgcacgacacggccccgaccttcctccacgacctcaagtccagcgacgtcttcctcgacgacaacctcaccgccaagatcgccggctacaagctcgcgaggccggtcgcctactactactacgcgccgtcgtacgaccacgacgtcgtgcgcaacttcggccacctcctgatcgagctactgacggggatgaggcaccagcacccgttcgactcggtggcgcccaaggtgagggaagggaggctgcacgaggtcatcgacgtgacgctcctggcggggaagcagctgccggcgccgaacgaggacgtgaggaaggtgttcgagctcgccgtcgcgtgcctgctgagcgccgagaacgggctctgcatgctcggcgtcgccaaggagctgatgcagatcgtgaggaacaacatcgggagcagcagcaagatcgagatatccctcgaggagacgttctcgagctccagcctgctgcagatgatctccatgtcgccggagacgctgcatcaccatcttccttgaacggagatcaagctagctgctgcctgaactgcacaccgccatctccatcttcattcaccttgaatggaagaggatgatgcccgtgtttaaggttcggaccgagcaagtttcaccgtcccagtgaaagcctgtaaaacattcaaaattgtcaaaattagcctgtctactgtacaaatactgctgtgtaatgttcttgtgccaacgttttgttggcttgtatgagttccatgtatttgctgcaagcttcctcaatacagaagcgtacagtataatcttgagtgc

SEQ ID NO: 27218 - DNA, 1593 bp, Oryza sativa
  ref <308>: DATABASE ACCESSION NUMBER: AK102660
  ref <309>: DATABASE ENTRY DATE: 2002-08-28
gaagaagaaccctagcaagagggggagaaaaagaggaggaagaggggagggaagggagaagaaagtggaggagatcagcagcagcagcagcagccgcggccgcggccgccggaggatggcgccggtgaagaagtccaagaaagggaagcgcaagtccaaggactccggcaagctcaagatcgtcaagtatggcggcggcgcccctcccctcccccccgagctccgcggcctcgacaccgagtggtggtacaccttcctccacaagcactccgagctaggtctgagcgcgccgtcagatgagggggaggcgttcaggtatttcttcaggacgtcgaggaggacgttcgactacatctgctcgattgtgagggaggatttgatctctaggccgccgtcagggctgatcaacatcgaggggaggctgctcagtgtggagaagcaggtggcgattgccatgaggaggctggcgtcgggcgattcgcaggtgtcggtgggggcggcttttggtgtcgggcagtccaccgtctcgcaggtgacttggaggttcatcgagtcgatggaagagcgggctcggcatcatctggtgtggcccgggcaggagaggatggagcagatcaaggcgaggttcgaggccgagtccggtctgccgaattgttgcggcgccatcgatgcgacccacattatcatgacgcttcctgctgtcgagtcgtctgaggattggtgcgacccggcgaagaattacagcatgttcctgcaggggattgttgatgatgagatgaggtttattgatattgtcactggttggcctggcagcatgatgttttcgcggttgctgaagtgctctgggtttttcaagcactgcgatgctgggactcgcttggatggccctgtcatggtttcagcagagaatggagaaatcagggagtacattgttggtaacaattgttatcctttactcccatggcttatgactccctatgaaggggagagtctgtctgctccaatggccagctttaatgctaggcagaaggctgcaagaacgcttggaccaagagcactgtcacggctgaagggctcctggaggatcttaaacaaagtcatgtggaggcctgataagaacaagttgccgagcataattcttgtctgctgtttgcttcacaatataatcatagactgtgaagacgaactgcttccagatgtacaacttccagatcaccatgatactggttatagtgaagagaagtgcgagcaagtggatcctaatggcaagataatgagagatgtcattacaggatatcttcaaatctaagaagcttcccattgaacttagctaagctgactggcagtactctggagttgcaagaaggcatctctgttcttatgtttttctcctcagttgtccttgttgtaatcagacctgctggtctccattcggtaaagattagcaatgaaataattcagttaggaattagctagctcaggagcaaactatctcttccttgagttaaggaaaaaatgttaatgtgttcatggtgatgacaatctccatcattttgaggtacaagatatatcagtggtcaattgctttgaatg

SEQ ID NO: 27219 - DNA, 1036 bp, Oryza sativa
  ref <308>: DATABASE ACCESSION NUMBER: AK102661
  ref <309>: DATABASE ENTRY DATE: 2002-08-28
gacccatctcatcatccaaacacatagagtacttaattagcaatggccagaaccaagttggtatctcttagctttgttgttctgctgagcgttggtctagccgatgccgcaagggtagctagatatgctagcgccgagggtggcggtagtggagggggaggtggtggagggtccgaggatggttctggatggggatccggctctggctctgggtatggtcaggccggcggatcttccggtggagcatatgctagtggaggcgggggaggtcaaggtggtggaggcggtcaaaatggtggatctggatatggttctgggtccggttctggttatggccaggctggtggctatggccctcatggtggagcgtacgctcaaggaggtggccaaggtggaggcggtggtggtggggtgaatggtgggtcaagatatggttccggctctgggtctggatatggtcaggctggtagctatggccccggtggagcttatgctcaaggaggtggacaaggtggaggtggcggtggtggacaaaatggagggtctgggtatggttctggctctggctatggccaagctggtagttatggcccaggtggagcatatgctcaaggaggtggacaaggtggaggtggcggcggtggacagtatggcgggtctgggcatggttctggctctggctatggccaagctggtagttatggcccaggtggagcatatgctcaaggaggtggacaaggtggaggtggtggcggtggacaatacggcgggtctggttctggctctggatctggttctggccaagctggtggatacgggccttacggtggaggatatgctcaggcaggcggtcaaggcggcggtggcgggggtgggcatccatagaactcctatatagtgaacaactgcattttatgcagttaaataatatcaaagaggcccttgttatgtggtaaccgataatagaataaaagtagtggtaatgtaaactactatgtaatgttactggtgcaatgaataacctcttgccttatgc

SEQ ID NO: 27220 - DNA, 2265 bp, Oryza sativa
  ref <308>: DATABASE ACCESSION NUMBER: AK102662
  ref <309>: DATABASE ENTRY DATE: 2002-08-28
gttcgtcagtttgtccgcccgccgccgccgccgccgccgccgtcgatccccatccatcgcgcgcgcgagcgagcagggggcgccgtcgttcgtcctgctgcttccgccgcatcctggcgggcacatcctccgccaccgccgcccgcgccgatccccacccatcgcgcgcgcgcgcgagcgagcagggtcgccgtcgttcgtcctgctgcttccgccgcatccatcctggtaaccgggagcatcacacgtgctcgctcaattcggattagaagaaacagctttgtggtactttggggttggactgttttgtgaatctgctgtgagggcttgtttttcttggtagcttttcgggatacgacggaatggagtgcaataaggatgaggctcttagggcgaaggagattgcagagaggaagtttgaatcgaaggacctgcagggggccaagaagttcgccctgaaggcgcaggctctctttcctgggcttgagggcattgttcagatgatcaccaccttggatctctatcttgcttcagaggtgctaatttctggggagaaggattggtactctatcctttccgtggagtcttctgctgatgatgagactctaaagaagcagtacaggaagttggtccttcagctccatcctgacaagatcaagtcggtgggtgctgagggtgctttcaagatggtccaagaggcgtggactgtgctgtcggataaaacaaagagagctctgtatgaccaaaaaaggaaactaatggttctgaaacggaatacatctcaaacaaataaagcaagtgcagctcctggtgcatccaatggcttttataattttgcagccaatgctgctgcttccaaggtgacaagaggaaacaagcaaaaggcaggaccagcaacatcttcagtgcgccagggcccaccccctccccctccccctccccgtcaggctcctgctccacctccagcaaagccacctacattttggacctcatgcaacaaatgcaagatgaattatgaatacctgaaagtgtatctaaatcacaatcttctctgccctacctgccgtgagccattcctagcacaagaggtaccaatgccacccaccgagagtgttcatgctgtacatgatccgaacatcagtggtgcaaatcaaaacacaaatggtagtagaaatttccaatggggtccgttctcaaggacagctggcgcagctagtgctaccgcatcatctgctgctgctgctcaagccgcgaatgtggttcatcacacatatgagaaagttaggagagagagggaggaggcacaagcagctgctagaagggaagaagctcttcggaggaagtacaatccaccaaaaaggcaagcgaatatctcagagaatcttaaccttggaacaggtggcaactcatctaagaagatgagaactatgggtaacgatattggaattggttcttcatccattctatcaggttcaggggccaattattttggagttccaggtggaaatatatcattttctaccaacagtggagcacatcattttcaaggtgttaatggtggattcagttggaaacccagacctcctactcgcatcagcttagtcaagaccttcacgcagtttgatgttagaggtattttgatggaaaaagcaaagagcgatttaaaggacaagctaaaggagatgcagactaaaagatcacaggttgctgctaatggaaaaaagaataagaaaaacatgtttaaagaaagtggtggggatgataaatctcttgcatcagatgattctactgcacgtcaagctgcacatgttgatccagaggacaatgcttctgttaatagcacagatgctgatgatgaaaatgatgatcctttatcttataatgttcctgatcctgatttccatgacttcgataaggatcgtactgaagaatgttttcagagtgatcaaatttgggctacatatgatgatgaagatggtatgcctcgttattatgcatttattcagaaagttctctccttggagccattccagctcaaaattagctttctcacatcaaggacaaacagtgaatttggttctttgaactgggtctcgtctggcttcacaaagacatgtggtgatttccggatttgtagatatgaaacctgtgatatactcaacatgttctctcaccagattaaatgggagaaaggcccacgtggggttataaaaatttatccacagaaaggtaacatctgggctgtgtatcgaaattggtcccctg

SEQ ID NO: 27221 - DNA, 2617 bp, Oryza sativa
  ref <308>: DATABASE ACCESSION NUMBER: AK102663
  ref <309>: DATABASE ENTRY DATE: 2002-08-28
gacacactctctctctcgccgtgcatctctttcccctaccatcccacgcctccctctcccccgatccatccaccggcaagcggccgcttccgccaccgcgtcaccaaggttagctcacacatgttctaggctattggaggatctttgcttcagatggctggggctctgcatatttcttgttctccggctccattattgtgggctcttctgttgctgactgtgtcaccaggcaatgcattctacttgcctggcagctacatgcacacatactcccaaggtgaggaaatatgggccaaggtgaactcccttacgtccatcgagacagagatgccattcagctactacagcctgccatactgccggccccaaggcggcattaagaagagcgctgagaacctcggtgaacttctcatgggtgatcagatagacaattcaccctacaggttccgtgtgaatgttaacgagtccctctacctctgcaccacaaaagggcttaatgagaatgatgcaaagctcctcaagcagcgcacacgtgacctctgccaggttaacatgatgctggataatttgcctgtcatgcgttttactgagcagaatggtatcactgtacagtggactggctttcctgttggttacactccagctggaatctcggaagattacatcattaaccatttaaagtttaaggtgttggtccatgagtacgagggcaggaatgtggagatcattggcactggggaagaaggatctggtgtcatctcggaatttgacaagaaggggatgtctgggtatcagattgttggttttgaggttgtgccttgcagtgtgaagcgtgatgccgaggctttctccaagagtaacatgtatgacagcattgaacctgtgagctgcccaatggagcttcagaagtctcaggtgatcaggcaacaggagaggatcactttcacttatgacgttgaatttgtgaagagtgacatcaagtggccatctaggtgggatgcttatctgaagatggaggcaggtgctaaagtccactggttctccattatgaactccctaatggtgatcctgttcttggctggtattgtctttgttatattcttgagaactgtcaggagggacttgacgaggtatgaagaactcgacaaggagggcgcaggcacagatgaatgaggagctatctgggtggaagcttgttgtgggagatgtattcagagagccaacttgccctaagctgctgtgtgtcatgattggtgatggtgttcagattttgggcatggcaatagtaacaattattttctccacacttgggttcatgtctccagcatcaagaggaatgcttctcactgggatgatcattctctatcttttccttggtattgcagctggatatgtcagtgtgcggctgtggaagactattaagggcacatctgaagggtggagatcagtgtcctggttaactgcctgcttcttccctggtgtcttgttcatggtccttactgtcttaaacttcgtcttatggggaagcaagagcactggagctttacctatctcactatttttcgcccttttagctatgtggttctgcatatctgtgccgttaactcttgttggtggctttgttggtacaagatcagcgcagatagagtttcctgtccgtaccaaccagatcccgagagagatccctgcacggaaatacccatcatggcttcttgtccttggtgcaggaacactgccattcggaaccctgttcattgagctcttctttattctgtcaagcatttggcttggaaggttctactatgtgtttggctttctgctaattgtccttgtgctgcttgtcattgtctgcgctgaggtctctgttgttctgacatacatgaacctctgcgtggaggactggaggtggtggtggaaagctttctttgcctcaggatctgttgcaatctatgtgttcctctactccatcaactacttggtatttgacctcagaagcctgagcgggcctgtctctgccatgctttaccttggttactcattcctcatggcatttgcaatcatgctggccactggaaccattggatttttgacatcattctccttcgtgcactatctgttctcatccgtgaagatcgattgatgaatgaagattacgatactctctggccctccggattcgtgttccctgtgtgtgggtgtgaactttcaccatgagatgcactgtttattgtttgaggagattttgatcaactgaagatgtttttaagatgaaaggtattctccacctagcggacgtagtcattttttcctctattccaaccgttgttgtgagttgtaactgctagagttaattaatctagatacatgcaacccggctttgcaagggtttaagagcaacgctatgttgattatcgtgattggcagatagaattctgtcatattcaagtgaaaatgtagccacctgccgttcaaaattctgatgtgtgacctgaagattagctgtgtcagctcttgacaaaactgtaatacgattgcaagtacctgtttccttggcatttttttatcatgtccagtacaaatttatatttccttatctgtagtgggatagtttctcgtc

SEQ ID NO: 27222 - DNA, 1581 bp, Oryza sativa
  ref <308>: DATABASE ACCESSION NUMBER: AK102664
  ref <309>: DATABASE ENTRY DATE: 2002-08-28
gtcgagctctctccctcctccaatgcgacggcttcccggagattgcgagcttgtgaagtagtagccgccatgggtggacgcggcgcgctaccggtggtcgcgggggtcgtgcttgtcctcctggtggtcgcggcgcggggagcctccgccgctggaggtggaggtggtggtggggcggcggcggcggccgccgcgtccttcgcctgccttccggcctctgctcccgccctgagcccgcgtccccgctcgacccggtgccgccgccgcacgcgctcgaggaccccgccatgttccactacgccatcttctccgacaacgtcctcgccgcctccgtcgtcgtgcgctccgccgtcgccaactcgctcgacccctccaagcacgtcttccacgtcgtcaccgaccgaatgaaccttggcgccatgcaggtgataattcgcctaatggacttaaaaggcgcgcactatgaggtcaaagcatttgaagactacaagtttcttgactcctcatatgttcctgtgcttcggcaactggagtcagcaaacctccagaagttctattttgagaacaagcttgagaatgctacaaaagatgctagtaatatgaagtttaggaaccccaagtatctctcgatgctcaatcacttgcggttctatttgccggagatgtacccaaagctgcaccggatacttttcttggatgatgatgttgtggtacagcgggatcttacaggattgtggaagattgacatggatgggaaggtgaatggagcagtggaaacatgctttggatcgtttcatcggtattggcagtatatgaacttctcgcacccacttatcaaagagaagtttaatcctaatgcatgtggatgggcatatggcatgaacttctttgatcttgattcttggaggagagaaaagagtactgagcaatatcattactggcagagtcagaatgagaacaggacattatggaagctaggaacgttgcctcctggtttgatcacattctactccaccacaaagcctctggaaaaatcttggcatgttcttggactcgggtacaatccaagcataagcatggaggagattagaaacgctgctgttgtgcatttcaacgggaacatgaagccctggctggatatcggtatgaaccagttcaggcacctatggacaaaatacgtggattacgacgactcattcattcgccaatgcaattttgcaccaccgtagaaggaaaagcctttgccattgttctacagatatcaaggaagattggtaactggagctagagccactgtaacagttaacacatgtactatcgcatgttttgtggaaatctcaggagcctgcgaattagaactgcggaggacaagaaattctttctagatcttgttgtatgtcatcgattaagttatggtgaaaatgctgttcaaaacatgaacattattttcatcccgtttgtaataatcttatgcgtgtcagcgtgtgtatgccaaagtcatgtgctatgttcataatatgaagacaatcttactaggacaaattatcagaagatcaatgaactcctgtagagaaatattgt

SEQ ID NO: 27223 - DNA, 1923 bp, Oryza sativa
  ref <308>: DATABASE ACCESSION NUMBER: AK102665
  ref <309>: DATABASE ENTRY DATE: 2002-08-28
ggcccccaaacccctcaaaaccctcgtcgtcttctcgcgatcgctattccctcctccattcctcctcctccacctccgagacctagggttccaatgtcgagcggcggcggcggcggcgacgactacaagcgggaggagtcggtggcactcatggtcatcgtctccctcgcggcgctctccctcctctccctcgtcgccgccttcgcctactactgctacatcacccgcaaggtctcccgccgcctccactcgctcgacctccccaagcaccaccgccgctcctcctcctcctcgcctcctcccatgcccccgccgctgcctccccctcctccttccgcgaatgccccgacgctcgggaaggagagcccgtctagcaactccgccagcgacggcgcggcggcggcggtcgtggtcggcggggagaggggggccgtccaggtgttcagctaccgccagctgcacgccgccacgggcgggttcgggcgggcgcacgtggtggggcaggggagcttcggggccgtctaccgcggggtgctccccgatgggaggaaggtcgcggtcaagctcatggatcgccccggcaagcagggggaagaggagttcgagatggaggtggagctgctgagtcggcttcgatcaccttatcttttgggcttgattggccattgttcagagggtggacaccggctgctggtctatgaattcatggccaatgggggtctccaggagcatctctacccaaatggaggttcctgtggtggtatctcaaaattggactggcctactagaatgagaatagctcttgaagcagcaaaaggtctggaatatcttcacgagcgtgttaatccacctgttatacacagagacttcaagagcagcaacattctactggacaaggacttccgtgcaagagtgtcagattttggtttggctaagcttggatctgatagagctggtggtcatgtatcaactcgagttctaggcacacaaggttatgttgcaccagaatatgctttgaccgggcatttgacgaccaaatccgatgtctatagttacggtgttgtacttctggagttgcttactggcagggtgccagttgatatgaagaggcctccaggcgaaggtgttctagttaactgggcattgcctatgctcacagaccgagagaaggttgtgcagatcttggatcctgcactggagggtcaatattcattgaaagatgctgtccaagtggctgccattgctgccatgtgtgtttaacaagaggctgactacaggccactaatggctgatgtggttcaatcgttggttccgcttgtcaagaatcgttctactccaaagacgtgcaaccctagtgtccaagcgtagaagccacttgaaggggaagttgaatgctcagtttccaggttggtgcttgacttttctggaaattttcatctacatctaacaactactgctgagtttatgagatcagtatgctccataacttaattctcttcctctgccagtgaattcctgattttgcgaggtgaatcgtaagcagttagatttagaaatcaagcattaatttagttcgatggaccagaaagctagtttcagtttgaagggaagtcctctagtcatgtgcaattagtgatcatgttaggtggtttggcttagtacttatggttgtgccctgtgggaatgatcagagagtgttgtttccagctggcagaattgcaatgtactgctgaattttcttttggcttgtcaattatgttaggtgtctttggagatccatgttcgttgtcttaactcttgtgctaatacgttggtctcatcagcttggcctataaacatcgccgatgtatctttttgtatatgtatatagtaggattctggaacttataaaaacaaacatttgccagttgagcattttcatgc

SEQ ID NO: 27224 - DNA, 1577 bp, Oryza sativa
  ref <308>: DATABASE ACCESSION NUMBER: AK102666
  ref <309>: DATABASE ENTRY DATE: 2002-08-28
tgaagcgaagcgagtgaacacacacctctccccccaccctttcccgcaacacgcgaaaagagaggcgaggcggaaacaagcccgggcttttccgtctcgtctcgtctccctcccaaaccgaaccaatccaatctcttctcatccatccccatggaggcgcaggcgcaggacaaggcggaggagggggaggaggagggcacgcggcagcaacacgcgcaggctgggccggtcggtgcggctggtggtggtggtggggggggcgcggcggctgtggcgatgagcgccatccccatgaacagctggctcgtgcccaagcccgaaccggtggagttcttcggcgggatggccatggtgcgcaagccgccgccgaggaaccgggaccggcacaccaaggtggaggggcgcgggaggcggatccgcatgccggcggcgtgcgcggccaggatcttccagctcacgcgggagctagggcacaagtccgacggcgagaccatccggtggttgctgcagcagtcggagccggcaatcatcgcggccaccggaaccggcaccgtcccggcgatcgcgaccaccgtcgatggcgtgctccgcatccccacccagtcgtcgtcgtcctctggcccggcgtcctccgcggtggtcgacggtgaggagtcctcggccaagcgacgccgcaagctgcagcccacgcgcgcggtggctggcgcgtctccgctggccacggcggcgcccgcggcgtactacccggtcatcgctgaccctctcctgcaaggtagcggcggcgcggcgatttcagtcccgagcggcctcgctcccatcaccgccaccggcgctccccaaggcctcgtgcccgtcttcgccgtcccggccactggcagccccgcggtcgccggcggcaaccgcatgatcccgcaagccaccgccgtatggatggtcccgcagcccgcaggcgccgcgggcgcgggcaaccaacccacgcaattctgggccatccaatccgcgccccagctcgtgaacttcgccggcgcgcagttcccgacggcgattaacgtcgccgacttccagcagcagcaacaacagcagcgggtgtcaacaaccatcatccagaacagcaactcgggcgagcacatgcacttctccggcgccgactcccacgagcagcagcggcgcgggcggaaggaaggcaacagcggcggcgtggtggaccacccggaggaggacgaagacgacgacgacgacgagccggtctccgactccagcccggaagagtagcaaacacacacagcacaacacaaaaaaagcaagcgaggcgagcactccactgcacgccaaaaagtccacaagtcccccccacacacaaagcttaggttcctttttgctccgattcaatttctcgatcgtttctttcccgcaatattcctcatccttgtcatgatgaactagtaattactcccgcgtgttgtgctgtgctgtgctggtactactccttactttcccgtccttagctcagtgtttagtcttagagaagaagaagatgatgatgatttagcatgcaaatgagcagttgacaatttgac

SEQ ID NO: 27225 - DNA, 2375 bp, Oryza sativa
  ref <308>: DATABASE ACCESSION NUMBER: AK102667
  ref <309>: DATABASE ENTRY DATE: 2002-08-28
ttttgccacagctgcagtatgtgtcgctcgccggaaactctttctccggtgatgttccggaggggttcagcagcctgtggagtctgcgccacctcaacctctcggtgaactcattcacaggctcaatgccggctacctatggatacttgccatcactccaggtgctctcggcctcccacaaccgcatctgcggtgagctgcctgtggagctcgccaactgttccaacctcaccgtgcttgatctcaggagcaaccagttgactggcccaatccccggtgattttgcgcgcctcggcgaattggaggagcttgacctgagccacaaccagctgtcccgcaagatacctccagagatttcaaactgctcatcgcttgtcactctcaagcttgatgacaatcatcttggtggcgagataccggcctctctctccaacctgtcgaagctgcagacacttgacctgtcgtccaacaatcttaccggcagcatccctgcttcattggctcaaattccaggcatgctatcactcaatgtgtcacaaaatgagctcagcggagagataccggcaatgcttggctcccgctttggaaccccgtcagtgtttgcttccaacccgaacctgtgcggtccgccattggagaacgaatgcagtgcgtaccggcagcatcggaggcggcagaggctgcagcgcctcgctctgctgattggtgtggtggctgctaccgtgctgctgcttgtgctgttctgctgctgctgtgtgtacagcttgctgcggtggaggcgccggttcattgagaagcgagatggtgtcaagaagaggcggcgcagcccgggacggggcagcgggtcgagcggcacaagcacagacagtgtcagccagccgaagctgatcatgttcaattcccggatcacctatgctgacacggtggaggcgacgaggcagttcgatgaggagaatgtgcttagccgaggccgccatggtctcgtgttcaaggcttgctacaatgacggcaccgtgctggcgatcctacggcttccttccacctcatctgatggcgccgtggtgattgaggagggctcgttcaggaaggaggccgagtccctcggcaaggtgaagcacaggaacctcactgtgctccgtggctattacgccgggccgccgccagatgttcggctgctggtctatgactacatgcccaacggcaacctcgccacgttgctgcaggaagcgtcgcaccaagacggacacattctcaattggccaatgaggcacctgatcgccctcggcgtctcccgcggccttgcttttctccaccagtccggtgtcgtgcacggcgacgtcaagccgcagaacatcctcttcgatgccgacttcgagccgcacctgtccgacttcgggctggagccaatggtggtgacggctggtgctgccgctgctgcggcggctgcatcgacgtcagctacaacaacagtcggttcgctcggctacgtcgccccggacgccgcggccgcgggtcaggccacgcgggaaggcgacgtctacagcttcggcatcgtgctgctcgagctgctcaccggccggcgccccggcatgttcgccggggaggacgaagacatcgtgaagtgggtgaagcgtcagctgcagcgcggggcggtggccgagctgctcgagccgggcctgctggagctggacccggagtcgtcggagtgggaggagttcctgctcgggatcaaggtcggcctcctctgcacggcgcccgacccgctggaccgcccggccatgggcgacgtggtgttcatgctcgagggctgccgcgtcggcccggacatcccgtcgtcggccgacccaacctcccagccatccccggcgtgatcgccggctcccctcggccggcggcatcacccgatccagtccactagtgttgttccatccattttccgctaattctttcttctttagttcagattagtcttagcttcatccagccgcggggtcaaaactgacatgtgagcccgggagcaagaacacctgcatttcccgccaagcagaccagaggcttggccccaagtgggaaagtagccgttgagccccttcctaatctcgcggttagtggaggtgtcagtggctgccggggaagcaaatcaccatgtggactgatgcttgcgcggcatgttgcggaggaggaggttggtggtggtggcgtcgtggactcgcgcatgtggggttccccatcgcaacggctactgatgctccatctgttcttggctgctctgtaccctgtactcccttctctctctctctaggaaattgatttcgtgtaggggggcctgcttggcttcttcggatcttgtcttttattaatctccattttttacc

SEQ ID NO: 27226 - DNA, 1461 bp, Oryza sativa
  ref <308>: DATABASE ACCESSION NUMBER: AK102668
  ref <309>: DATABASE ENTRY DATE: 2002-08-28
gacgtcgcctcgccggagaagaagacatcgccaacatataccccccctccctacctagactcagatcagatcacctgcccatcgacgagcacaagagcgatccattcctggtttgaatcgagcttggtttgtttggttggttggtttcttggagtggatgatggcgaggtggtgcgtggggtggccggcggcggcgaggggtggtcgggatgagctgacgtggcaggcggagctgacggcgcacgcggcgggggagttctccatggcggcggcgcaggccaacgcggtgatggaggaccaggcgcaggtcatggcgtcgcccggcgccacgctcgtcggcgtctatgatggccatggcggccccgacgcctcccgcttcctccgctcccgcctattccctctcatccatgagttcgcggcggagcgcggcggcgcggtggacgccgacgtgatccggaaggcgttcctggcggccgacgaggagtacctccagctgctgcggtggtcgctgccgaacatgtcccgcgcggccgcctcgggctcctgctgcctcctgggcgccatctccggcgacacgctctacgtcgccaacgccggcgactcccgcgctgtcctcggccgccgcgcggcggccggccagaccgtcgccgagcggctctccaccgagcacaacgtggcctcggaggaggtccggagggagctcgccgcgctccaccccgacgacggcgaggtcgtggtccacgcccgcggcgcgtggagggtgaaggggatcatccaggtggcgcgcgccatcggcgacgtgtacctcaagacgccggagttcaagcgcgacccggcggtgcagcggttatgcagcgccgccgccgccgtcgagctggcgcggccggtggtcaccgccgagccgtccatccacgcccggaagctcaaggcgggcgtcgacctgttcgtcgtgttcgcctccgacggcctatgggagcacctctccgacgaggcggcggtgcagctggtgtccaagagctcgacgaggagaggcgtggcggcgaggctggtgcaggcagcgctcggggaggcggcgaggaagcgggaggtgaggcgcggcgacctgcggcggatcgagcgaggggtgaggcgccacttccacgacgacatcaccgccgtcgtcgtcttcctcgacctcgacgacgacggcggccgccgcgcgcgccgccgtggcagggtcgtcgactccagcagcagcagctgcagcaacacgccgctcgacgtctacagcttgtacaactccaccgcttgaacaacaatatatttaatatttgggatttcccatgtcatgttgcttacaactacattttttttaaacatttttacaaataggatgtcgagttaggttaacacttaggatctgtttgtcatagtttaactctatcttttttgaagttggagttcagactaacagttttaggt

SEQ ID NO: 27227 - DNA, 2879 bp, Oryza sativa
  ref <308>: DATABASE ACCESSION NUMBER: AK102669
  ref <309>: DATABASE ENTRY DATE: 2002-08-28
gatatggaggcatgggagttggggatggcggcagcggtggcggctatgagccagcctatggcggcatgggcagctatggccaaagcttcttcaacatcagctatgcgcgcagccagccgcctccgccgtccgtctcatacgagcaccggctgcaggccaccgatgccagggtccactactacgccggagaaggcaaccctcaagcacccccactcgggtatggcggtgggtatggttatccgccgcagggctcgagctcttacaaccagtatgcgtacggtggttactatggtggtgcttctcctccgcctccggccgatataccttctacctcccgcggggaggttacgccaccggcacctccatctccgccgagggtgtctacttgggacttcctgaacccatttgaaacctatgagagctactatgagcagccaactgctgctcaagcgtcatacactcccagcagaagttccaaggatgtgcgtgaggaggaaggcataccagatttggaggatgaggatatggaggtggttaaggaagcttatggtgatgagaagcacgccgccaatgggtacagtggcaaggggaagatggcaaaagaggaaggtggtaggagcagcaccggggatgaactgccccatgaatccaagttatcggaagcgagcagtagcgggagcaaccaggagcatgatgtccatgtagtggagaagagtgttgtgggagaacaggtgcagcggtcagagcctcgtcagcatgtcgcaggcctgccgcccataggatcggagaagacgtactttgatgatgctgaggtggtgctggagatcaggactcaattcgagcgtgcctcaaaatctgccattgaggtgtccaagatgcttgaggttgggaagatgccttactacccgaagagttcaggtttcaaagtgtctgcgatgatgatttgcgggataccaacaatggaggaagagttcctgcggtttgaagaagacaaggcgatggggtgtggcaatctttcctcaacactgcagaaactgtacatgtgggaaaaaaagcttcttgaggaagtcaaggctgaggagaagatgcgggcgttgtatgacaggcaacgtgaggagctgaaaatattagatgagaaaggtgcagaagctgataagcttgaggctactgaaagatccatcaggaagctatcaacaaagataagcatagcaattcaggttgtcaacactatctcagacaagataagtaagctgagggatgaagagttatggccgcaaacatgtgagctcatccaagggttgatgcggatgtggagcactatgttagaatgccatcagatccaattgcatgccatatcccatgctaaaaacatagattccatgataaacggtgcaaagtttggtgaagctcacatggacttgatcaagcgcctagagcttcagcatttggattggatagcctcttttgcctcatgggtgaatgctcaaaaaagctacgttggtactttaaatgactggttgaggaaaggagtcacatatgaacctgaggtaactgatgatggtgtgcctcctttttctcctggacggctaggagcgccacctatttttgtcatatataacaattgggcagttggtgtggggaggatatctgagaaggaagtagttgaggcaatgcaggcctttgcatctaatgttcttggcctctgggaaaggcacaggtcagagcaaagacaaggtcttatggctaataaaggtatggacaaggaccttagggtgatggaaagggatgaacagtcgatgcgcaaggctctggaagcacaaaataagaagctggtgctcatttctaatcagagcggtgtatccttatcagcacaagcacaggccttacaagatggaggttcccatggtgatactggtagtttgcaactaagtctgaagaatatttttgaagcaatggagaacttcaccgccaactctgcaaacacctacaaggatctccacctgcgtgctgaagaagagaaagctcgcgttgcccaagagagttgcagagtttcctagttcctttcgtggtttccatgttacatgagggcatgagccctttttaacgcaaaggagctgactgcagtggttcagatgagcactatagtttgcatggcagcgtcacaattcaagtggcaagtgatgcaccttgcatgaaatagcttctacccagggctgcgggctgccagacaaacctgtggcgtaaatggagacttgctagattgtgtttttttgaattggagcaacactcctcatgccatacagcccaggaactcaattttgctaatagctgaatcacaagacattgccgataggggaagaaaaatctgaagtggcgagtgacaagattcactcaatgttgggaaatcccagtaaatagttggaagatgtaagctgcataaacgaaatgcatggtctaagcatggagcagtaaaatgttccgatcatgagtccaagattcatgaagttgtatccatccatatgaaatagtcaaatgtgatcatgctgccaggttcagggaaagagtcactggaagagtgcaacaatgctagcatgccagtgtacatagttgaaggcaatgcgatatgggatgaaccaaagctgatgctgtgggagatgcttccctcccagctgggaggctgcagcctagctagttcacctgttaggggagtgatggatgatgatgagcttgtaggatagagaaaaaaagtggatgccctgaccccgttctgcagttcactaactgttggatttttttgttccgttatttattatacatataattcatttgtatccctgtacagccggtggctaactcataaacccccccttttttgtgtc

SEQ ID NO: 27228 - DNA, 3032 bp, Oryza sativa
  ref <308>: DATABASE ACCESSION NUMBER: AK102670
  ref <309>: DATABASE ENTRY DATE: 2002-08-28
gcctccgggtgctcgacctctacaacaacaacctcaccagcccgctccccatggaggtggtgcagatgccgctgctccgccacctgcacctcggcggcaacttcttctccggtgagatcccgccggagtacgggcggtggggccggatgcagtatctcgccgtctccgggaacgagctctccggcaaaatcccgccggagttggggaatctgacgagcctcagggagctgtacattggttactacaacagctactccggtgggctcccaccggagttggggaacctgaccgagctcgtccgcctcgacgccgccaactgcgggctctccggcgagataccgccggagctcgggaagctgcagaacctcgacacgctgttcttgcaggtgaacagcctcgccggcggcataccgtcggagctgggttacctcaagagcctgagttctttggacctatcgaacaatgtcctcaccggcgagattccggcgagcttctccgagctcaagaacctgacgctgctcaacctgttccggaaaaagctgcgtggtgacatccctgatttcgtcggcgacctgcccagcctcgaggtgctgcagctctgggagaacaacttcaccggcggcgtgccgcgccgcctcggccgcaatggccgcctccagcttgctcgacctctcgtcgaacaggctcaccggcacgctgccgccggagctctgctccggtggcaagatgcacacgctcatcgcgcttggcaacttcttgttcggcgccatcccggactcccttggtgaatgcaagtccttgagccgtgttcgtcttggggagaactacttgaacggctcaattccgaagggtctctttgagctgccgaagctgacgcaggttgagctgcaagataacctcctcacaggcaatttcccggccgtgtccggcgctgcggcgcctaatcttggggagatcagcctgtccaacaaccagctcactggtgcgctgccggcatcaattggaaacttttctggtgttcagaagctgcttcttgatcggaattcattctctggtgtcgttccacctgagattgggcgactgcagaaactctccaaggctgaccttagcagcaatgcgcttgagggaggtgtaccaccggagattgggaaatgccggttgctcacttacttggacttgagccggaacaacatctctgggaagatacctccggccatctctggaatgaggatactcaactatctcaacctgtcccggaaccatcttgatggagagatacctccatccattgcaacaatgcagagcttgaccgcggttgacttctcatataacaacttgtctgggcttgtgccaggaactggtcaattcagctacttcaatgccacatcttttgttggtaacccaggcttgtgtggaccgtacctcggaccatgccgccctggtgttgctggcaccgaccatggtggtcatggtcatggcgggctatccaatggtgtcaaactgctcattgtcctaggcttgttggcctgctccattgcatttgctgtcggggcgattctgaaggctcggtcgttgaagaaagccagtgaggcacgtgtgtggaaactcacagcattccagcgcctcgacttcacctgtgatgatgtgcttgactgcttgaaggaagaaaacgttatcggcaaaggtggtgctggaattgtgtacaagggggctatgcctaacggagatcatgttgctgtgaagcgtctcccagctatgggccgtggctcttcacatgatcatggtttttcagcagagatacagacacttgggagaattcggcaccgccatattgtgcgtttgctaggcttctgctcaaacaatgagactaatttgctggtttatgaatacatgcccaatggaagcctgggggagctgctccatggcaagaaaggcgggcaccttcactgggacacccggtacaagatcgccattgaagctgcaaaggggctctgctaccttcaccatgattgttcccctttgatacttcaccgtgatgtcaagtcaaacaatatccttcttgactcagactttgaagcacatgtggctgactttggccttgcaaagttcttgcaggacaccggtgcatctgagtgcatgtctgccattgctggctcttatggatacattgctccagaatatgcatacaccctcaaggtcgatgagaagagtgatgtctacagctttggtgttgtgcttcttgagctggttactggacggaagcctgttggggagtttggagatggcgttgacatcgtccaatgggtgaggatgatgaccgactcaaacaaggaacaagtgatgaaggtcctggacccaaggctctcaacagttccacttcatgaggtcatgcacgtcttctatgtcgctttgctctgcattgaggagcagagcgtgcagcgtccaacaatgcgggaggttgtacagatcctcagcgagcttccaaagctagctcccaggcaaggagaagtgctttcacacgctgtcgatggttttgcatccaatcctccagctccagttccttctgggtctgcagaagcactaactggtgatgcgaaagatcaacagcagcagcaaacaaattcagagtcaactacacctcctgatctcatcagcatatgagtaaccaagtctaaaattgctgtcaaccttttgttgcaaagttcgcaagcttcagtatcggaaacttatctaggtatggatttaggtcttggtaagtttttaggtgttctgtgctgtacatattccagtttggtgggttgtcctgttaccagtttgtttcctttggtgctgcaatgtaggattccgtagcgagtttcggtactttagagccttttatcatccatcttcaatgtaggcaatggctttctatccaatttagaatcaaaatctaagctttactgtggaaccaagtttcctttaaagcacttcctgagttcctggtcctgtgtaaacagttcaagttgggtcctttaaattgagaaacccatact

SEQ ID NO: 27229 - DNA, 1675 bp, Oryza sativa
  ref <308>: DATABASE ACCESSION NUMBER: AK102671
  ref <309>: DATABASE ENTRY DATE: 2002-08-28
gacagtttttcaggcttctgaacttgctcagctagccactctgctccaacgcacgcagcttagctcggagtgacaacggaatggctaccatggatgagcagcagccactgcacatcctcttcctcccgttcctcgtgcccggccacctcatcccgatcgccgacatggccgcgctcttcgcggcacgcggcgtcaggtgcaccatcctcaccacccccgtcaatgccgccgtcgtccgccctgccgtggaccgcgccaacgacgacgctctccgtggcgatgccggcggcgcaccggcgatcgacatcgccgtcgtgccattcccggacgtcgggctcccgccgggcgtcgagagcggcacggcgcttgcttccgaggaggaccgtggcaagttcgtccatgccatccagcggctgcgcgagccgttcgaccggttcatggcggagcaccaccccgacgccgtcgtggccgacggcttcttcacttggtccgtggacgccgccgccgagcacggcgtcccgcggctggtgttcctcggcaccggcgtgttcgcgcggtcatgccaggagagcatggtgcgccacaacccggtggaggcctgccccgacgacgaccccgacgccgccgtgtccctgccggggctgccgcaccgcgtcgagatgaggcggagccaaatgatcgacccaaagaaacggccggaccactgggcctacttcaagatgatgaacgacgccgaccagaggagctatggcgaggtgttcaacagcttccacgagctggagacggactacgtcgagcactaccgcacggctctcggccgccgcgcgtggctcgtcgggccggcggcgttcgcgagcaaggacttcgcggcgagaggcgccgccgagctctcgcccgacgcggacggctgcctgcggtggctcgacgcgaagccacacggctccgtggcgtacgtctccttcggcacgctgtccagcttctcgccggcggagatgcgcgagctcgcccgaggcctcgacctctccggcatgaacttcgtgtgggtcatcaacggcgccgcggacgacaccgacgcgtcgggtcagtggatgcccgaaggcttccccgagctgatctcgccgcacggcgatcgcggcctcaccatccgtgggtgggcgccgcagatgctgatcctgaaccaccccgccgtcggcgggttcgtgacgcactgcgggtggaactcgacgctggaggccgtgagcgccggcgtcccaatggtgacctggccgcggtacgccgaccagttcttcaacgagaagctcatcgtggaggttctcaaggtcggggtcagcatggggtccaaggacttcgcatcgaatctggagaaccaccaggtgatcggcggcgaggtgatcgccggagctgtcaggagggtgatgggtgacggtgaagagggcgccgaggcgatacggaagaaggcagcggagctaggcgttaaggcgaggggcgccctggagaagggcggttcgtcgcacgacgacgttggacggctgatggacgcgttgatggcacgccggacctctgttgacgtatgaggtggcggttgacgtgaggaacgccgtcggatggtgaccggacagcacacgcgttgtaaaattctggttatacatatacatgagtataacgttgagcggcc

SEQ ID NO: 27230 - DNA, 2328 bp, Oryza sativa
  ref <308>: DATABASE ACCESSION NUMBER: AK102672
  ref <309>: DATABASE ENTRY DATE: 2002-08-28
gcacctcccccgtctccagctaacctaacagtctccaccttcctccaagctccaccccatccctcccccctcccagctcccacacgctaatatcctacggccgccaccatggatttggtgtttgcagggcagtcggcgacagatgaagtcatcgctaacctgatcgacaaggcctcatcctacctgggaagcaaccccgacagattgcaggagtcgatgcgcatgctacgcctgaagttgccgaagatgcgcgataccctcataccggctcaatccagggagtcgtactcaggacttggggttttgctggacgagtcgttgtggcgcctgagggatgcagttgaggagctcgaggatgcagtcgacgagcatgcctaccacgagaagaagaccaaggagcgagaggttagtgatggtgatctgggctcttctttctccaagatgaagcaacgagttatcaagtctttggcaaatggtcgcactctcgaaaggaggttgaggaaagctatcgaggctttagacatggttattgtggatattgcaaagagactaccatctgatgttagacttacacaagagcaattggatcaacatcgtttacaactatatcgcaggacggttgactttacacaacgatatttcatgacggctggctttaaggatagagtgttgggccgggagaaggagactgatgtgatagtccgatggctgatcgatcccttggatgatgatgatgctgaaactcaggttagtccaaataatcatcatgtctcagttatgtccatagttggccacggtggcgtggggaagactacattggcacaactggtatataatgatccaagggtcagagatcattttgatatggttgcatggttatgtgtaacttcaagctttgatgtaggaagaattatgcgtgaaatagtacagtgtgttacacgttcgccatgttcatccgattctttggaaaacatgcagcatattctccaagataaaataaattccactaaagcttttctactcgttttggatgatgcctgggaagaaaatctacatgaatgggagaaactattttcagttctgaggggcatcaacactagaatcaaaattttattgacaaccagaacgcaatcagtggcaactctagttgagagtgtcacaggatgtgaagatcagcaccttaggttgcatgaacttgaagaaaatggaaatctacagatcttctgccaacttgctttggctgatctgaatgaaagatcagaagattatgcggaactccaatcaatcggcgctaagattgtaaagaaacttggagggactcccggggcaataaaaagtgctgcttatctgttacgagtaagatcattagagtcctggcgaaggtttcttcacggtatggataattttggagcagcagtaccaaatattatggatgtcttgaaaataagctactacaggctctcggcagagttgcagagttgctttcgctattgcagcttatttccaaaaaatcatccattcagaaaggaggagttggtgagggcttggatttggtcaggattgatatttcctcaattcgggaaaaaggacggagagttatacttggctcaattgactgcaaatttgttccttgatcgctttggtggagaaaacgaagaacctgcatactatgttatgaatgacacaatgcatgattttgcaacatatatctcacagggcgaatgtaagaggttaactgaagccgcagacttgagaaacgtgaagagttcggttcgacacattagtattgcaggtattaacaatttcactgttgttgatgtgaaggaattgctccgtttgacgaagctgcgcacagtcatcattgaagattgtggcaatgtcgaggaggacgtggtatacgcaatggcagaggtcgtgaagaactcaaaatccttgcgtctgttagaatgttctctgttcaagatgtgccatttacctgacagactttctagtctgatgcaccttcgtcacgtcaagatctcaatgctttaaaacacataaggcagcactgccttaggggataaactgggatcattgaagaagtaaggctaaaaaaaagtgatgctgtatgataaaccatattatttctgtatgttgtccacataaatggctaaatgtgttgccatctgcaatctgtaatagtggtgtccatttgcttttgcaactactgttgtccctggaggaaactgttttgcttctctgtatcattgtatcgcttgttcgggatttgtagtctgtatcgcttgaaatgactgtgtaatatttctgtttgtgtgataatttgtgtcc

SEQ ID NO: 27231 - DNA, 966 bp, Oryza sativa
  ref <308>: DATABASE ACCESSION NUMBER: AK102673
  ref <309>: DATABASE ENTRY DATE: 2002-08-28
ggacggccgccaccccgcttaggtttaggtcttctccgcctccggtttctccctccgccgtcgaaatggtcgcctacaggttccatcagtaccaggtggtgggtcgcgcgctcccgacccccggcgatgagcaccccaagatctaccgcatgaagctctgggccaccaacgaggtccgcgccaagtccaagttctggtacttcctgaggaagctgaagaaggtgaagaagagcaatggacagatgctcgccatcaacgagatctttgagcgtaaccctacaacgatcaagaactacggcatctggctgcgttaccagagcagaacaggttaccacaacatgtacaaggaataccgtgacactactctgaatggtgctgtggagcagatgtacaccgagatggcctctcgtcaccgtgtgaggttcccctgcattcagatcatcaagaccgcaacagttcacttcaagctctgcaagagggacaacactaagcagttccacaactcgaatatcaagttcccgctcgtgtaccgcaaggtcaggccgcccaccaggaagctgaagaccaccttcaaggcatctaggccgaacttgttcatgtgatctaccagtgtgtacccatgttctgcaatttagcccaagaatcaaaagattttgtctgtggaagttttggtgccctgctggttaggcatttccagtttcatatccaaatgatgcttaggcatttccagttacccttccaaatgatgctttgcaaacccttgaatttcctcgtattagtaatcagcagacttcttgttacttcaacctggctcacttggaagtgttgatccctgatgtgctattatttatctctgtaatttgtgatggcactgtctttctggtctggtcgaacgattacatattttacttcctgttcctgggtgttaagtcgctttgcattttattgattgcacccatcaatgct

SEQ ID NO: 27232 - DNA, 1082 bp, Oryza sativa
  ref <308>: DATABASE ACCESSION NUMBER: AK102674
  ref <309>: DATABASE ENTRY DATE: 2002-08-28
gatcctctccctctccaatctccctcttcctctcctcagatcggggcgccggctgagaccgagcggcggctgctcgttgcgatcggggcaggaccccgcttctcccgtccaatccggcggtggctcggtgacgagagtaggggcggcgagagctcggctcctccctcgcctcttctcccctccaatcccggtggcagcggcggcggcggctccgcgacaaggaagggcggcgggagcttggttcctccctcccctcttctccccttcaatcccggcggcggctcggcgacaagtgcgggacaagggcggcggctcggcaacggcggctcagcggcgacgacgacgacagcgacatgggaggggccttggcgactttgacgacgaccgtgacgacggagggcctcgtcgacatcgacggcgcgcggtggacggcgacgagcggatccggcaccacctcctccatccaccgcgccacctccatctccgcccccagccacctcgtcgcccttccccgcctcgctcccccagccagggaagggacggtggcgcgcggatctgccgcctcccggcctcgggagcgacggcggcgcatgaatccagcggcctccgtcctcgggagcgccctggcgtgagcgggagtgccggcagcacgcagattcgcaacgacggtgacggtggctgcaacgacgacgacagcggcgatggtagctgcgacgacgacgacggcgatgacagcggctgtgatgaaaacgacaacgctgtgatgcaagtagcggcggtgctctcttcctctgtcctccgccatcagcagcaccagtataccctgatcataagagccgtagtactatggctgatcctgcacttgctagtgatccagagttacacgggctgtcttatatctatgagaggaatggtcgtcattattgtttaaccatggcaactcctactgtagtacctaatcctccagccaaattttcagaaagtgcttagaccttgtattagggatcttcgaaaaattgtaattctcttttaagggcacacagtagtatctcgatataaactctctggtagtccaattttgc

SEQ ID NO: 27233 - DNA, 971 bp, Oryza sativa
  ref <308>: DATABASE ACCESSION NUMBER: AK102675
  ref <309>: DATABASE ENTRY DATE: 2002-08-28
gtccggtcgtcgcaagcccgcatcaacgagcaggagggatataaaaccctccgccccctcctcccccaaacccttccgccgccgccgtcgccgtcgcctgctccagcgcgctcgccgccggccgccctactcccgctccaggcccgtcaccgccgtcgccgatccaacatgggtaagacacgtggtatgggagctgggcgcaagctcaagacccacaggagaaaccagaggtgggccgacaaagcatacaagaagagccatcttggcaatgaatggaagaaaccctttgctggttcatctcatgcaaagggcattgtccttgaaaagattggcattgaagctaagcagccaaactctgctatccgtaagtgtgctcgtgttcagttggtgaagaatgggaagaagatagctgcctttgtgccgaacgatggttgcttgaacttcatcgaggaaaatgacgaggtgctcatcgctgggtttggtcgtaagggacatgctgtgggagacattcccggtgtccgtttcaaggtggtgaaggtctccggcgtctctctcctcgccctcttcaaggagaagaaggagaagccaagatcttaaatcctattcccctccattgcaagcagctggagcggcatggcggctataagaagtacaattagctacattcagctaatgaattctggggccttccttttctgcttctggcagctaatctctctctgaaattcagactcgatgttgtggtgaacatgtcaatcgtatttttaccccccctaatcacctgaattcaaattccatatagaagtagcagcggatttggtttccttcagcgcgattttaaaattcaaacctggaatgtcgtggagtgaagtagtgtcatcatatgcttgtgaatctctgcaagttgcaagcagcctattttgttgttttcttgtggcgcggtttgaatcttgaatgaagtcatcattttg

SEQ ID NO: 27234 - DNA, 1961 bp, Oryza sativa
  ref <308>: DATABASE ACCESSION NUMBER: AK102676
  ref <309>: DATABASE ENTRY DATE: 2002-08-28
gacagaaggcgagctctcgaccgccactactgtacacggcccagagcgagcctcctcctcctctgcaccaccggagatggcttccgccgcgctgccggaggccgtcgcgccgaagaagaagggcaacgtccggttcgccttcgcctgcgccatcctcgcctccatgacctccatcctcctcggctacgatatcggggtgatgagcggggcgtcgctgtacatcaagaaggacttcaacatcagtgacgggaaggtggaggttctcatgggcatactgaacctctactcgctcatcggctccttcgcggcggggcggacgtcggactggatcggccggcggtacaccatcgtgttcgccgccgtcatattcttcgcgggggcgttcctcatggggttcgccgtcaactacgccatgctcatgttcggccgcttcgtggccggcatcggcgtgggctacgcgctcatgatcgcgccggtgtacaccgccgaggtgtcgccggcgtcggcgcgtggcttcctgacgtcgttcccggaggtgttcatcaacttcggcatcctgctcgggtacgtctcgaactatgctttctcccgcttgccgctgaacctcgggtggcgcatcatgctcggcatcggcgcggcgccgtccgtgctgctcgcgctcatggtgctcggcatgccggagtcgccgcggtggctggtcatgaagggacgcctcgcggacgccaaggtggtgctggagaagacctccgacacggcggaggaggccgcggagcgcctggccgacatcaaggccgccgccggcatccccgaggagctcgacggcgacgtggtgaccgtccccaagagagggagcggaaacgagaagcgggtgtggaaggagctcatcctgtccccgaccccggccatgcggcgcatcctgctgtcgggcatcggcatccacttcttccagcaggcgtcgggcatcgactccgtcgtgctctacagcccgcgcgtgttcaagagcgccggcatcaccgacgacaaacacctcctcggcaccacctgcgccgtcggtgtcaccaagacgctcttcatcctcgtggcgaccttcttcctcgaccgcgtcgggcggcggccgctgctgctgagcagcacgggcgggatgatcctctccctcatcggcctcggcgccgggctcaccgtcgtcggccagcaccccgacgccaagataccttgggccatcggcctaagcatcgcctccaccctcgcctacgtcgccttcttctccatcggccttggccccatcacgtgggtgtacagctcggagatcttcccgctccaggtgcgcgcgctgggctgctcgctcggcgtcgccgccaaccgcgtcaccagcggcgtcatctccatgaccttcctgtcgctgtccagggccatcaccatcggcggcagcttcttcctctactccggcatcgccgcgctcgcctgggtgttcttctacacctacctcccggagacccgcggccggacgctggaggagatgagcaagctgttcggcgacacggccgccgcctcggaatcagacgagccagccaaggagaagaagaaggtggaaatggccgccactaactgatcaaactaaccgcaaaatcaccaaatcctaagggttttcttgcaaaaacgtgtgctgtactggctagctagcaagtagtagcagcaacgtgggaagattcgctgatccggcgttgctggagagcgacggccggcgacgacaaagctgagctccagctcgagacttcttaaaatcatcttcaagtacatggattttattttgctctttgctttgtccgtaaaagttgtactatgcgatgaagaataccagtatgtagcaaggctgaggttgtgtgtagctactagaagtgtcagtcacgttgttcttgtaagaaatgtttaactgttaattaagcagtattgttgcagtaatc

SEQ ID NO: 27235 - DNA, 2494 bp, Oryza sativa
  ref <308>: DATABASE ACCESSION NUMBER: AK102677
  ref <309>: DATABASE ENTRY DATE: 2002-08-28
gatgctcctcgcggctgaacagtggaggggcgctgatctccatctggcgagcggagcaggggaggagaggggatcctggagaaaatggtgatgatgaatttttaatgctcgccagttgcacaaccaaaagaaattctcaaatggacgtggctcctgttgaacaggatcagggtctaatgaaaatcaacagcagtgactgctctggcgatggtgcaagctgtgagaatgaaactaattacactgatcatggcaaacagtcaaatgagcttggtcatgcaagaatatcggttactggtgggggttattttcatcagctgcttgctgagcataccattatctctgaagcatttctttctgcagcaacctattcatggtttgagaaagagaaagatttgctttcctcccagcttagttctttgaaaagaatttggtcacaacctcagtggcaagcttgcttaaagcacttatgctgtcatggtgaatttaggagtgctgtgctgaaaattataaaaatatttgaggaagagctttcaaagtgcagagaagagaccaatatgttacatcaaccagaccaaataagccattcaactttaatgtcccttgtttcattgatcattcctccactacttaagttgattcgatttgtacatgcactatggatggatggagctgtacttagattcccagaagaacttatagaagctagaaagatgaaaaatgttgatcagatcttgagattccgaggagaaacactggaattctagatgtttggcctgaagagttggaagagggattagcacaatggttacagctaatccgagagagtgggtacaacttattaggtttatgtgcaactatcaagggcgcattctcagagctgttagacaattcatcaatcaacaatgctatcatggaaaacataagatcaatggaaattcggcatctaaccaaacttatcgatcttgtcattgttccattcatcaagcattgccctcataatctatgggtagaatggatgttgaagctcttactacccttatttgactactgtggagacgtgctttactactcatggttcagtcttctacataatggtcaggctaatgttccacttttctttggttatgtttgtggatcagaagaaactgtaagccaaatggaaaattacctacttcttgacctgactcgtaaagtatccaagttgcttgggggccttagcttcgcaagaactgaatcaaggtgtttaccgtgcgggtcttgtccttgacatgaatagtgcttctcacgatttcaagtgcacaccctctacctctttagttggatatattttactcaatgattgctttacaaggttaagcatgaatctctttggatgttgggtggatggtgaagcagccatagattccattcccttttgtcattctttggttcaagtcgcggttgctacaaaccatgaaaaggctcaagcgatttattaaagatgatatgcttcctgctataatccgacgcctatatgatgatcttccatgtgcagttcaaaagaccatcagaaagttatctcccttgatgaactcaatcaattgcaggaaagccaccaaggatctcttggttctatgtcaggagatctataaagtttacatacgatgtcagaatttggaaggtgaagaccaggatactgataacatagcatactggtttgatgattggttaaccaagcagaagaaagaactttgtgtaaaggcatcctatgctattcctgatgaatttccagctacgctgtggaattgggaggtttgaagaagaatttcaaaggtatcttcctacatatcttgatgtgctgcatgaagttgatacaatggattgtcaagagtgttgttgtttggatagcgccaagatttttgagaatctgagcctggaatttcgatccaggcatggtgttaggagccatacagatcatgttgtttggatgatatcaaatttgttacaacggaagatgcctggagcatattcagagcaacgtgctgatcgaatttccaaatggacttgtgaacttattaaatcgaagccttacatcaagctctctaatggttggaacaatgctatgaatcgattgaaggaaaactttgtgataaatgtagatactaaaccggatgcaatagatgcagttaatatcttctacaattcaatattgcttctttgggaacctcagtttcatcctttaatcagggagggtcaaatggatgttcttgtagagatagctcatcagttagcttttgcagaagagagaaaaaactacgagccattggaaccagattcattagatttcttggaccatttgcaaccttatgcaaaattatacatctatagaaagaagacagaatctggggtatgttctcattagtttgtacatttacatgtgcttttgatttccagtctgtttgtaacaacatttgtgctgtcttaaattaaactatacaatgtgcttctctttgcc

SEQ ID NO: 27236 - DNA, 1209 bp, Oryza sativa
  ref <308>: DATABASE ACCESSION NUMBER: AK102678
  ref <309>: DATABASE ENTRY DATE: 2002-08-28
gggggcgtccaaatccgccgccgaattccccacccgtcgcgtccaaaatccaaatccgccgccgcgatcgaggccgacgaggagaggttgaggttgaggtgagagccatggtgagcgccttcttcctgctgtgcgggtgcgtggaccaggcgagcgtcgcggtggtggagaagtggggccgcttcctccgcctcgccgagccgggcctccacttcttcaacccgttcgccggcgagttcgtcgccgggacgctctccacccgcgtccagtcgctcgacgtccgcgtcgagaccaagaccaaggataatgtctttgttcagcttatctgcacaatccaatatcgggttgttaaggaacatgctgatgatgcattctatgagttgcagaatccccaacagcaaattcaggcctacgtctttgatgtggtccgagctatagttccgagaatgaatcttgatgatctttttgagcaaaagaatgatgtggcgaaagctgtacttcaggagctagaaaaggtgatgggagattatggttacagcattgagcacattctcatggttgacatcatccctgatgctgctgtacgcagagcaatgaatgaaataaatgcagcacaaaggcttcagcttgcaagtgtctacaaaggagaggcggagaagattcttctggtgaagaaagcagaagcagaggcagaggcaaaacacctttccggtgtcggcattgctagacagcggcaggcgataactgatggcctgagagagaacatcctgaacttctcgcactcggtttcaggcacctcagcaaaagaagtcatggatctcatcatggtcacgcagtacttcgacaccatcaaagaacttggggatggctcgaagaacaccacggtgttcatacctcatggcccaggccatgtcagggatatcagcgagcaaatccggaatggtatgatggaagcgtcctgcagcaacgtgtaaatcggtatcgaatgcggaaccaaggttgggggtggttcagatgggaggtcctgtttatagtgaatagtacgaatgaatgctagtagcatgtgttgtttgcacgcgcgccctggagttgtatgcagtggtagatagagttcgagttttggcataataatattgtctgaattttatgtaaaagaaaatcacatgtcttccttttgtgagttaaaagttgcaccgatttatgcatggc

SEQ ID NO: 27237 - DNA, 1791 bp, Oryza sativa
  ref <308>: DATABASE ACCESSION NUMBER: AK102679
  ref <309>: DATABASE ENTRY DATE: 2002-08-28
gggccgtcgcgctccgcttttcctccgccgccgcctcctcctcatccctcctcccgcggagaggagaggagagccgagagaggaagtggagcaatggcggccgcggcggagggcgatgaggacccgcgctggaggaggtgcaacaccgactgcgtctacttcctcgcctcccccttcacctgcaccaaggggtccaagtgcgagtaccgccatgccgatggcgcccggttcaaccgccggaattgctggtactggttcaagggcaactgcgtcaacccgagctgcacatttcgtcaccccccactggaaaacttaaacaaaaccaaatctttagcagacccactctcattgtgttctacttctgtcaaggcagctaacccttgttatttctactataactcgcactgttcaaaaggtgacaattgcccctacctccatgagcctctaacttctaatgatgctgtgggaacttcttgtaaagctaccacttccaatcctgctgtaagtaaaagttatgttggagatgagatggttgaagaatcgaaagacactatcacaaatccctgtcaagatacctcttgccatataaaagaagttcctgtgtcaatcaatcctgaatttggtgaagctgaagctgtttccggtgcacttgaaacatcaactgatatagatgaatacatgaaatgttccgcagtctcagatcttaattcaggagattcaactatggaccacacagaacaagatgagcgtgattcctctcctggatttgatgtgcttgtggatgattgcctctctaacaagagtgatcttgaacatcaattgactacagagagtgataataaggtgcttcatgcagaatatggtattagagatccagttctttatgatatgtattaccatgatccagagtactataactatgaaccagaattttgtggtcttgatgatcggcaaggttacctttatctttgccagcctaacggagctcatgagcatgaaagtgagatcactttggggcatttactaccacaaaatactgaggtcacttctgatgaatatgacagaaggttcttcaatcccagaaacttcaccagctcagtggcagatactaactttgttcatcagcacacccagattagacacatctcaaaaagaagacctgagaatagaaaaggtgcaaagggaaagaaggattgcattaagagaagccgttgccttgaacccaagaatagtactcaacagattgaatcaatgccaactcgtcaaaggaaagattatttgatgggagagtgtcctcaacctgctaaccatgctactttcaggggacggaggaagaaaaatagaggaaagcaacagcatgttctttctgctaaatcttctgaacatcctactgcagattttactgggccgaagacccttgctcagataaaagaagagaaatgtaaatccaactcaagttttagccactccactgcttgcacgcctaatgtgagatccttctcagatgattttgaggggcccaaatctctgaccgagcttctcatgactaagagtaggagttctgttggcaagtgaccatatcctagcaagtgtttatgtaaaagtgcagctcagtgagatttctgctttacttggttaggatgatgccaacagttttttttttttttttttgaggatgaaagcaattcagtcaaaaggtcacagaaggtctagtgacaactttctttgaacaaattcttatgagttaacctgccagtgaatgtgcggatgaagaagggatccatattaagg

SEQ ID NO: 27238 - DNA, 2211 bp, Oryza sativa
  ref <308>: DATABASE ACCESSION NUMBER: AK102680
  ref <309>: DATABASE ENTRY DATE: 2002-08-28
gcttcggttcttcctccgccccactccacccaatcctgaatccgccccccccccccccccccgaagcagcagcggcggcggctggcgggaggaggaaggcaaggatccggcggggagaggccgcctctctttcccttccttcgcgtccgtcgtcctgcttgctgcggcctgcagctgagcttggcggacaataatacatatgcttgtccttgcaaacctatagtacagcgatcctttctgtggaacattgcatcagtctagaaatagattggaaaggggtttagcttgcgtatactatctgagactctggctcgacagaatggtctccaatggtaatgaagatcttaaagcggatgttgaactagtagagtcgacaacagtggacaatgatactggagccccaggtgccagtactcttcctactcaaggtgttccacgacaagggaagcagcggaatgggtttctgaatttctgtaatcgcttttccagtggtgacaggtttaagaagttgggtccttcgccttcattcaagtttcgacagcttgcacttgagcgagatgagttctcacgttccatccactctgacagccatgataatcatgagcacttccagtttatcagggaaattaattggggccatctgtgggtaatgtgcaaggattggataaaagagcctcttaatatggccctttttgcttggattgcttgtgttactgtatctggtgcaatactattccttgtcatgactggaatgctcaatcgtgcattgcctagcaaatcacaaagagatgcctggtttgaagtaaacaaccagattttgaatgcattattcacactcatgtgcctttatcaacacccaaagcggatatattactttgtgctgttgtgtcgatgggagcaaaaggatgttttggtccttagaaaaacatattgcaaaaatggaacatacaagcccaatgaatggatgcacatgatggtggttgtggtcctccttaatttgaactgctttgctcagtatgccttatgtggtctcaacctaggataccgcagatctgaacgacctcctatcggtgttggcctgaccatttccgttgctatcggggcagcggcatttgctggattgtataacattatcagtcctcttgggaaggattatgacacagaactgactgaagttgaccaagaagcacaaactgaactcaccaggccagcaacctcacgaacatcacttgaaaagagatactctttcattcaaagtgaagagcgccgttttgtggagagtaggcctgagtgggttggtggactaatggatttctgggacaatatatctcttgcctacctgtcaattttctgcagttgctgtgtgtttggatggaatatgcagaggcttggatttggtaacatgtatgtccatattgctacatttatgctcttttgccttgctccgtttttcatcttcaacctggctgctgtcaatattaacaatgaaaaccttcgagaagcattagggcttaccggtctcgcactttgctttttcggcttactgtatggtggcttttggagaatacagatgaggaagagatttaacctacctgcgaacaacttctgctgccgcagtgcagaagccacagattgcttccagtggttgtgctgctcctcatgctcccttgcccaggaggtgagaactgctgattattatgatattgctgaagataggtcatatacagagcagattactgcgagaagccagcatgtaatgaccccattgtcgcgcgaagatggtttgcctctttttaggtcaaatccaggttcgccatacaggagcagcactgctagtccatcgatcttcattatggagagtccatcagctccacggagatcacctggacctagccctctggggggttcgccgacaatgggcgacaggacaatgaaggcgcctactccatctgttctccacagagacggtgagcccgaattgtagtaccgggaaatgcaatgaagcattagttatcctgagtctattttgtatatttgatgtaaagaaaactaccatacaccttttttttttcatctgcagcttccatgcaactgccattgcttatgaaatgtatagactagaccatcatttcagttcagttctgtactactctgtaagatttctttttgaggtgaagtgaatggtaagcgagagttgtcaatttactatcc

SEQ ID NO: 27239 - DNA, 2892 bp, Oryza sativa
  ref <308>: DATABASE ACCESSION NUMBER: AK102681
  ref <309>: DATABASE ENTRY DATE: 2002-08-28
ggagatccctgatgctcgtcgccgctccctcctgttcctcgcccacgcgtcatcatggtacacgagacaagatcacgcacactagcggcttcccaagaagaagggaaggctgctccgaagaagcagaagacagaaagcaaagagcaggaaggtggccagcaagcgccctccaagaacaagaagacagccgacaatgaagagcacgacggggagcaggagccatcaaagaacaagaagctcaaagcggaggaatctgacctgaatgggaaggcaacagccgtgaaggagttctctgaattctgcaaggccataagggaacacctcacgatcgaggacatgcgcaagatcctccaaggcaatgaacaggatgcatctggatcagaagatgcagttgtcccaagatgtgaggatgtgatgttttatgggcctcttgacaagtgccccgtatgcggtggtcagctcgagtgtaagggattgaaatacaattgcactgggactcacagtgagtgggcatgttgtagcttcagtactaacaatccttcgaggagaggtggtcctataaaggtccctgatgatgtcaagaatgatttcgtgcgcaagtggctgaagcaacaagaagggaataagtaccctaaacgtaatttggatgacgagggtatcttctcgggcatgatgattgcattgtctggaaggatgtcacgctcacatggttatttcaaggagcagattatgaagcatggagggaaagtcaacaactccgtgattggtgtcacttgtgtagtggcttccccagctgagagacatcaaggtggctctggaggatttgccgaagcactggagcgtggaactcctgttgtgagtgagaattggataattgatagcgtccagaagaaggaaaagcaacctttggctgcttatgatattgcatccgatgttgttccagaaggccgagggctgccgctgggcaaccttgatccaactgaggaggctatcgagaccttggctgcagagcttaaacttgcaggcaaaagagcagtgcacaaagattctaaactggagaaagacggaggacatatctatgagaaggatggcatcatctacaattgtgccttttctgtgtgcgatttaggaggcgatattaaccagttatgcattatgcagctgatcatggtgcctgagaaccatttgcacctatactacaagaagggtcctattggacatgaccagatggcagaggaacgggttgaagattttggtagtcgtttcaatgatgctatcaaggaatttgtccgtctttttgaggaggttactggaaatgagtttgaaccatgggagagagagaagaaatttaagaagaagtgtatgaagatgtatcccttggacatggatgatggtgttgacgtgcgccatggtggtgtggctcttcgtcagttgggagctgctgcagcacactgcaagcttgacccttctgttacttttatcatgaaacaactatgcagccaagaaatatacaggtatgctttgacagagatgggccatgatgtgccagaccttcctatcgggatgcttacagatctccatctgaaaagaggggaggagacgctactagagtggaaacaagatgtcgagtctgctccagagtctgggcctgctgctgacgcattctggatggagatcagcaataagtggttcaccctattccccacaactcgtccatatacaatgaagggatatgaacagattgctgacaatgtggcttctggtttggagactgttcgtgatataaatgtcgcttctcgtcttattggtgatgtgtttggttcaactttagatgacccactgtctcaatgctacaagaaactaggctgttctatcaatcgtgttgttgaagactcggaggactataagatgatcctgaagtatctggagaaaacctacgagcctgtcaaggttggcgatgtggtttacagtgctactgtcgagcggatatatgctgttgaatcgagtgctcttccttcttatgatgaaataaagaaacttccgaacaaagttctcctctggtgtggaacaagaagttcaaatttgctcaggcacctgcgcgatggtttcgtgcctgctgtctgccatataccagtgccgggatacatgtttggcaaagccatagtttgctcagacgcagcagccgaagccgcgctctacggcttcacggcggtggatcgtccggagggttacctggtcctggcggtggcatctctggggaaagagatccaggagataacaggcacgccaggctcagaggacgtgaaacgcatggaggagaagaagatgggcgtgaagggagtcgggaggaagacgaccgacccgtcggagcacttcacctggagggacggcgtcacggtgccgtgcggcaagctggtgccgtccacgaacaaggacggcccgctcgagtacaacgagtacgccgtgtacgaccccaagcaggtgagcatcgcgttcctcgtgggcgtgaagtacgaggagcagaacatggaggtggtgccggacgagtgatcgatcgccggccggtcacccgaccgaggccggtggcggccatctgccgttctgcagctttttagcttagagtaatggtagcgaatgcattttgggcccgtgtcccattttgggctgtgtacttgctggagcccggcagcgacggtggtggctggtgtgttcgacggtggcagcccgtgtcccgttttgggctttgccttgttctcttctcttcgtcgtttgccgtgcgggtgtgcagcgcagccacgctctgtaggctgaaagaacccgttgtcgcagtgtcaaaagtttgtacatatttgttatgtgaatcgtaatgggatgtcggggttatcagttatc

SEQ ID NO: 27240 - DNA, 926 bp, Oryza sativa
  ref <308>: DATABASE ACCESSION NUMBER: AK102682
  ref <309>: DATABASE ENTRY DATE: 2002-08-28
gaagccaaacaagaaacccaccgtttctctctcaaaaccgcgggaatcaatcaatcgccgttcgcgtcgcgccacgagatattttcccccaagaaaagttggagtgagggatgagtgctatggcgatgtcgtcgctgaacccgaacgcggcgccgttcatcccggcggcgttcaggagggtggaggacttctcgccggagtggtgggagctcgtcaatcacggcgtggttccgcgaccactggttcaggcagcaccagatgtacgaggacgctgcggcggaggaggaccaccaccgccaggtgttcgacgacgacctcgccgcgctcctgcccgacgactcgctcgacctcctcgacatggtcgacaccgacgacctcttctacacccccgacccccccgtccaccacaagccgacgacgactcccaccctcgacgccgacgtgctcagggcgctcagcctcaactcgccgaggttgggcggcgccgggatggtgaggcacgccgagaagccggcccagttcgtcgccgccaagggcggcgccgcccgccacgtcatccaccagcctcgctagagcgccatgggtgagtggtgatgctgctgctgctgctgtctagtgtataaccttggagttttcagagtttagtctctctgcttttcttcactgtgtataaaaactgaaaaaaaaagggggaaaaattgcagctttctggtgctgcatcccttgtagtagtaaagcagcttctgttcagtttcaggtgcatcatctaaaatgtgttagaaaaaaaaaagcaaaaatagagagtgatgtagaatcatgtgtactaatgattctactaccgcccttgttaatgttggatatattaagatggcaagcagtctaatgtttagaatctttcaacttctgattattcctttgctctcttc

SEQ ID NO: 27241 - DNA, 2338 bp, Oryza sativa
  ref <308>: DATABASE ACCESSION NUMBER: AK102683
  ref <309>: DATABASE ENTRY DATE: 2002-08-28
gagtccttgaatgtttccccaccaaccaatcttctccagtcttcctcccttccattcaaagctccctctgtccacctgaggagggagaaatcttcgtagactcccccctagatccaggctgttctgaagctggagaagagatcccccatggatctaacctccatctgcccgtttctgcaacggatggggatcgaggtaaggagaccggatctatctcaaaatcaatttcaaatctgcattcatcccagcatatccccaagcagatctccaagcagatttcaaatccccccgccggcccaatgtcttctcggcctctttactccgccgtacttcgacaagatggacatccaccagtagctcggcgcctaccgattgcaaatcacctcaatccctcaattcttggccgcccaccgcctcctccgtcttcaagagtgttgagcagtgggaaagttgttgatttgacgagacgccattaccaccccccctctttcccgaagctgtgctacttccaagactgagaaagagcagccatggcaagaagttaagcaaaggttctagtggaggaaaggatcctcattcaattctcctaacaaccaagagatcatggctgcaagaaagatccgattcctcaagcacacagaaggtaaatgcttccgctgcctccaacccggtcataaagttgcagactgcagggatcctcttcgttgttggttttgcagaagatttggtcacctctcctcagcctgcagagaacgccgctataaattgcaacaacaagtgcagtttcatccgccatcctagcaaccatctccaccaccagcgccaccactgctttcctccacagtgttccctcctctcaacaaccatctgaacacttcctctgctcctcccaccatggcctcggtcccaagtgacttggcctctcgccctgacctgggtagctgcatggtggcggcgacaagtgaaatggaacgtctgaagcagctcttcacggcaagatcggtggtggcctggtctgatgaaggccagaaggtggagatcggcacatttgctgatgacatccgttcggccttccgtatccatcgctccgacattcagatcacgaagttctatccagaagacttcttcctcacttttgttaaccatagcgatcgtgaggaagtgctgcaagagccaaggctggtaactcgaagtgggagagtgtatcacttcaagccatggaatgaaaggcgcaatgctgaagtaattgatgttcgcttccatgcccgagtctgcattgaaggtatcccaatgcatgcaagatcagaagaagtggcgacaaagatcattggctgcaagagttcagtccactacatagaagagtactcccgtcgccggaactacaaccgtacctttgatctttggatttggagctcagacttgagcagctccatcctgaaggcttcaagtttctctatcacaaggccagacagtgaagcaagagccactgatgttccttttcctgagttggagccgccccggatgccgggcattcttccgcagttgtttctcctcttccccaacctctctcacctgatctgttgcccgtgtcacaggatcagagggctttgctcttgcttgaaagacacctggatcctatgttctgtggggccacgatgggaggttccatctactcccctgatacttccctgcctcgtactgcctctcctgtgtttgttctttcagctgctgcagactcacaggcgacaccagttgaggtgacccggcatgatgtggaggagttcctggcggaggtgaccacacccatccagcagccactccttcctgcgccaggaaccaagccacgccgcccatgctgcaacaagcactacaagaaactgctctccccagcagacatgaagacaatcacgacactggtggagaatggaggctgcaaaggcattcggctgcgtgccaagaaggcggcatcggtggtgccgatatgaagccccaaccgtgacagaagactgccggccaactgttgatgatgttaagtagatggcttttgatgtttgtaatgcaaatgtgcacctctttgtgtttctgccaagtttcttggctgtgtttcagagatggccatttgcatcacaagtcctcccctgcagatggagtctcccccagtagtaatgacttttattcatgtcgcagttgaactgtttcatcctcaattggaatgtcagaggcttgaacagccaagttagaaaaaaaagtgttaagctgttggtagagcagatgaatgctacaatagtttgtctccaagaaacaaagatgaatcaaatctctgatgtggatgttttgc

SEQ ID NO: 27242 - DNA, 1936 bp, Oryza sativa
  ref <308>: DATABASE ACCESSION NUMBER: AK102684
  ref <309>: DATABASE ENTRY DATE: 2002-08-28
gacggcaccaggctcccccttctccctcctctccgcctcctcccatccacatccgcggccgcgccgatcgcacagcagctttgtgcggtcggggtggtctcggtgccgatggcgaggaagcagcatatcgccatattcaccacggcgagcctgccatggatgactggaactgccgtcaaccccctcttccgagcggcctacctcgcgaaggccggggactgggaggttacgctggtggttccatggctttcgaagggggaccagctgctggtttatcctaacaagatgaaattcagtgtgcccggggagcaagaaggctatgtgcgacggtggctcgaggagcgaattgggctgctgccgaagtttgagataaaattctatcctggaaagttctcaacggagaaaagaagcattctacctgctggggacatcacccagactgtatctgatgataaagcagacattgcagttcttgaagagccagagcatcttacatggtaccatcatggacgaaggtggaaaaacaaattcagaaaagttataggtgttgttcataccaactatttggagtatgtcaagagagagagaaatggatatatccatgcatttctcttaaaacatatcaattcctgggtcactgacatctactgccataaggttataagattatcagcagcaactcaggaagtcccaaggtcaatagtttgcaatgtccatggagtaaatccaaaatttattgaaattggtaaactgaagcatcagcagatatctcaaagagaacaagcattcttcaagggtgcatattatattggaaagatggtctggagtaaaggttatacagaactactccagctgcttcagaagcaccagaaggaattatctggtcttaagatggagctgtatggcagtggagaagattctgatgaggttaaagcatcagccgagaaactaaatcttgatgttcgagtctatcctggtcgtgaccatggagattccatatttcatgactacaaggttttcataaacccaagcaccacagatgtggtatgcacgacaactgcagaagctttggcgatggggaaaattgtgatatgtgcaaaccatccttcgaatgaattcttcaaaaggtttcctaactgccacatgtacaatactgagaaagagtttgtgagattgactatgaaagcattggctgaagagccaatcccactgtcagaggaactgagacatgagctttcctgggaggcagcaacagagagatttgtcagggttgctgatattgcaccaatcatgtctatcaagcagcattctccctctccccagtatttcatgtatatatctccagatgaactgaagaagaacatggaggaggcgtcggcattttttcataatgcgatttctgggtttgaaacggcccgttgtgtttttggtgccataccgaatactctgcagcctgatgaacagcaatgcaaggaacttggctggaggctccaggaatgacagtcatttcttcccacgctgttgtcaatgacaatagaatgccaactaacagcccagggaacttggcttggggaactaactacgtaacgcaattatcttttgctccaaaactacgaaggactgaacagacaagggtgattcttgttttctgctatggtggtacactggtattgcaattctccttcacaattgtggagtgtccatcagacatcagttactgtaatgcatcatatcttggaattgtaaatgtgcggcagttgaagtgattaccaatgctgtcttttcatgtagcctgtgtaatgtaaagcttactgttgcttcccgagtttggcacaattttaaagatatcttgtctggtgtttcacaaccatttttgttggcgtgctgctgctccttttccaattaaaaatgatcattgtatccttgtattcctgcc

SEQ ID NO: 27243 - DNA, 2226 bp, Oryza sativa
  ref <308>: DATABASE ACCESSION NUMBER: AK102685
  ref <309>: DATABASE ENTRY DATE: 2002-08-28
ggcttcgggagcccggctccgcactgtcggcgtgcgcgccgcgtgccgcctcccgtcctctccggaaaactccggcgcggctttctttcttcctccgccttcttcaaggctccagtccagctgctcgctcccaccacccttcgcctccccaagcttcgtcttcgcccgcactccctcccagcaaccgccgccccggagagtcccggatttcgtggccatctccgtcgcacgatcgagtggcgaggatgactgaacaattatacactgtggcatctgacagtgaaaccactggggaagataagtcgcagatgtcgtttcctgatgttgctattggaatcgacattgggacctcaaattgtagtgttgccgtttggactggccatcaggttgaactcctcaaaaacactcgcaaccagaaagggatgaggtcatatgtgatgttcaaagatgacagcctttcagcaggagttacaggaggagcaacccgggaacatggacatgaggaaagagatattttgtcaggaagtgccatatttaacatgaaacgtttgattgggagaatggacacagatgaagtggttcaagctagcaagagccttccttttcttgtgcagacattgggtattggggtgagaccattcattgcagcactggtgaacaatatgtggcggtctaccactcctgaagaagttcttgccatctttctccttgaattgaaggccttggtagagatgcatctcaaacatccggtgaggaatgctgttcttaccattccagttgcattcagtcggtttcaacagaccaggattgagagagcatgtgcgatggctgggctgcatgtgttacggctcatgccagagccgaccgctatcgcacttttgtatgcccaacagcagcagcaattgctacatgacaatatgggaagtggcattgagaaaattgctctgatatttaacatgggtgctggctactgtgatgctgctgtggctgccactgctggaggtgtttctcagataagagcactttcaggaagcactgttggtggagaggatatccttcagaatgtcatgcgccatctcatgcctgattttgatagtctatatgctggtcaaacaatggacagaatcaagtcaattggcttactccggatggcaactcaggatgcaattcacaaactggctacgcaggagcatgtggagatcaatgtagatttgggggctggccacaaagtgtcaaagatcttggaccgtggagaatttgaaaaggtgaatcagtctatttttgagaaatgtgaagggatcatcaagcaatgcctggctgatgcaaagttaacaccagaggacatcaatgatgtgatattggttggaggatgttccagaattcctaaaatcagaagcgttgtccttggcttatgcaagaaggacgactcttacagtggtatagacccacttgaagctgcagtttcaggggctgctttggaaggagccattgcctcaggagtatctgacccttcagggagcctggatctgttgacaattcaggcaactccaatgaaccttggaattcgtgctgacggcggtaacttcgccgcaatcattccaaggaacactgctgttcctgcgagaagggacatgctctttaccacaacccacgacaatcagaccgaagctctcattgccgtctatgaaggcgaagggaatcaggctgaagacaaccatctattgggatacttcaagatcaccggtattccagcagcagcaaagggcaccgtcgaaatcaatgtctgcatggacatcgacgctggcaatgtcctcagggtattcgccggcgtcgtcaagcctcagggccaggctgttccaccgttcattgaggtgaggatgccaacgctagacgatggccatggctggtgcggacaggctctcgccaagatgtatggcagtacgcttgacctggctactatcccgaagaagctgcatccttgagaaattgcatatcgtcgcatgtagttgtatgactccattatctaaaaaaaatgtagttgtatgactcgtatcatccggtgccgtagttcgtgcatatgtggttcgaccgtgtcatgatggttacttggttcagtagcttgtttgccggactttttacatgtaaacataaagagtgccaatgtcatctctgtacaaaaaatgtgtgtcgcgtgtatagaataaatcaatgttaccggctgttcgg

SEQ ID NO: 27244 - DNA, 2764 bp, Oryza sativa
  ref <308>: DATABASE ACCESSION NUMBER: AK102686
  ref <309>: DATABASE ENTRY DATE: 2002-08-28
gaactctctctctcttctctctctcccatgccggccaccatcttgccatgcccaatctcctttaccggagcaacactaaccaaatcctcgcgccaccatacttgcctccctccgacgaacccatttttctagtttcccctctcctttagccatcctataagccaccatcaccacttcttttactcgccagagttgagctcttgtcgtcgccgttccggccatctccctttctctctccaccagacaccgacctccccgggtgcgtcgtgctcgggaacacgcgtggacgccgacgtcaccgccctccagccaccggagcgccgccgccccgattgccttctcctctctcttctctcggctctctctggaacagagaagaagaaaggaacgggaggaagaaggagaagaaaaagaaaaagactgacaggtgggcccctgcacagtgacttttctcattttctagatttaattcaaatcctattctttagaagcccatatgtcctaaaccgtagatccgattccagtcaaatttggacctcaattcatctaaattcaaactcttcattttaatatcaaatttgctattttaagattttatttgaatttccttaatttattcaaataccatccgaataaatatttgatttaatcttataattgaatttacaatttaaacttatatttgctttccaaatattttcttttatttccaaaataccctttagccactaaaaagccgccggttggaactttacgccttccatggggacgttcgcggtctacggacctcaacgtcggaccgttggttgtaaagcccggcctaaaccaaacccaaggtcgaagtgctgctcctggaaccccacgccttgatgcgtacagcggtcggagcttcactatcccctcgacctttattgcacgccgcacagttagctctcgggctctgtgtgatcctagccgctccgccgctactcacggttgtcggagtaacacttccgccccactaaacctgcgcccacctcctattcttctagccgatatgctgtctatcgacacgtctagaaatgataccaaacctagtcgttatgctgtccaactctagcaacgactagcaaacacctaaaaccctagccgatatttatcctacctcgatatcggcctaaacaactaaatcctagccactattctatcaaagctaaccttgacccatattagccacatacctatttaaccatatcaactatcttgtatatttcctatcatccaaaccacgagagcctccacataaaatatagagcctagccgatatgctatcctactccacaaatgactcccatacaactaaaccctaggtattatactacctaaacctaccgctagcaaatactagccccataatccctataccctataaaagagataggttatacattaaacccaagccctctttaccgtttatcgttttcttattattttatggtttttattgaaattggttcttcctctttcttagtagagtctattgtcttttggatggcaacctatggtatttcaagaattggataatcaggttgcctatcttggatttatttgcgttggagcaaggcaagttattattcctcccctttgaccataattatcctatattctacattctattctatgcatttgccattcatgattttgaatgcataatctgaacatatagcaaaccagttatatgctagcttttgcttagccctgcctagttaaattgcataaaatataatgaacttagattgggacagtacgcaagatttggttgatttccgggtggctagtactgtctcagtcgatataagtttaccaagtacttatgtcaaacaaacgagtacgaccgcagcttctagaatggggacagacctagatattatgttaattaacaatgtggtacctccgtacagtggttcttatgtaagtcctcgcaaaggagacaaacttatgccgagaagggcaaatgtgatatttaccgaggcgcaggtaaatatcttgattatcgcgcgatgtgtgtgtgaatttatgaaaacctggttgagatgacgtggggtctctcatccaattctctctaaaaaccccgggaacgccagaactcctctcgttgctgataacattacgttcagagcgcatggggactagagttcatggaacaggtaccacaattgttaataacctaatactgggccatgaataagctaatgattattggcatgttatggactacaggtaaagcatacatctactgcagaatgaatatccttgaatctattcgaatagccgtgctcacggatctgagcattgggactcatatggtactttggttagaaatataattcaagattttcttaaatactgttgcatatatgaaacatttcaggatttccacctttttattctcagctttctgcaagtaaatctacctctacacagatattacctctcatgcattcattgttgaataatataatagcttactgagtacgttgtactcacccttgcttcaacccctctttttcagagtctatttggagttgttgccgaagctgggagttcaatcacataagttagttccctttaaacctaatcttcaagtctagtataattagatggtttaattctatagtaaaacagcaaagttggatcatcatatagcttctgctgtaatagttaaccacaaacttgtaaatatcctattattttatataaagatatctcctttggagtcttgacc

SEQ ID NO: 27245 - DNA, 1678 bp, Oryza sativa
  ref <308>: DATABASE ACCESSION NUMBER: AK102687
  ref <309>: DATABASE ENTRY DATE: 2002-08-28
gcctgtgcctccgccgatccccatccatcccgcgagcgaagaaggccgcaatcgttcgtcctgctgcttccgccgcatccatcctggtgaatcaagcatcctaattttgtcaagatgtcagatggtcaagaaactgacaagaatattgagatttggaagattaagaagttgatcaaggcactggagtctgctagaggcaatggcacaagcatgatctctctgattatgcccccacgtgatcaagtctcccgtgtgaccaagatgctgggtgatgaatatggtactgctccaaacatcaagagtagagtcaatcgacaatctgttttggcagccatcacatcagctcaacagaggctgaagctgtacaacaaggttccgccaaatggactcgtcctctacacaggaacaattgttactgaagatggcaaggaaaagaaagtcactattgattttgaaccattcaagcccatcaatgcatcgttgtatctctgtgacaacaaattccacaccgaagctttgaatgagctcttggaatccgatgacaagtttggctttattgttatggatggtaatggaactcttttcggcacactgagtggcaatactcgtgagatccttcacaaattcactgtagatctcccaaagaaacatggaagaggagggcaatctgctctgcgttttgctcggcttcggatggaaaagcgtcataactatgtccgaaagacggctgaacttgctactcagttcttcatcaatccagctaccagtcagcctaatgtttctggactaattttggctggttctgctgattttaagacagaactgagtcaatctgacatgtttgatcagcgtcttcaagccaagatacttaatgttgttgatgtttcctatggtggtgaaaatggtttcaaccaagccattgagttatcagctgaaattctagcgaatgtgaagttcatacaggagaaaaagttgattgggaagtactttgaagagattagtcaagataccgggaagtacgtttttggcgttgatgacacccttaagactcttgaaatgggtgctgttgagacattgatagtgtgggaaaaccttgatgtcaacagatatgtgcttaagaacagtgctactggagaaactgcaataaaacatctgaacaaagagcaagaagctgatcagagcaatttccgcgacacatcaaccaatgctgagttagaagttcaggacaaaacatcccttctggagtggtttgctaacgagtacaaaaagttcggatgcacacttgagttcgttaccaacaaatcccaggaggggtcacagttttgcagaggttttggtggcatcggtggcatcttgcgctatcagctggacattcgttcttttgatgagctttctgatgatgagggcgtctatgaagactctgattaaagatcctattattcccttgcctatgctgatgtactgaggaacgcaactgccacaagttctgaattttgacagactatttatttttggagtacttcaaaagaagccctatgttttgttcgtcagttcttaaagaaaagagaacgctagtattaccgaattgtcatgtaccaagattgcattggattgagactcaattcaggtgtcctttttacctatccattaatgtatgattagattacatctacatgat

SEQ ID NO: 27246 - DNA, 2631 bp, Oryza sativa
  ref <308>: DATABASE ACCESSION NUMBER: AK102688
  ref <309>: DATABASE ENTRY DATE: 2002-08-28
ggccgactcccgtctcgtctcctcgcgagctcgcccacccgccgccctgcgccgatctccatcgattccgcgacttcgcgagcagtggcgccgtcgtccgtcctgctgcttccgccgcatcctggtttgggggttcaactgaaccccctatgtccctcgttagatccgcccctgcccggcaatgggcagcatggacacgccaagaggaacaaaattttttcaatgcgctgcgccaagtagggaagaattttgagaagattacgctgcgtgtccagagcaaaagcaaagatcaggtcagacattattactatcgtcttgttcgacgcatgaagaaacttctcggtcctgagttctcgctcgatgcaaaaaattccaaggacaccattgctgctatgctctgctggtggtctctgcttgaaaaatttagctgcagtgcatcaaaactgcatctgaagcctcggagattcaaaactttcgtagaagcattgggaaatcaactactaaaggatagaaataaaaccagaaaaaagtgtccacgtggggatgtgtgcctgtcctcttcatcttcggctgtcaacaggactcctggaaatgaatctttctcagtaaaactcttggctgtggatgtctccaatggtagcaaagtaggatcttctaaagggtcatttttcaaaaaggtcacagaaccaaattgcagtaacaagtcaggtgcaactaaaggggacctctccgccacaagaactgtgaaacagaaaagaagagcaggtggtgttgttgcatctgctgcatataaaaaatgggagagagctgccatggctggtgtttctttggttgctgatgcagctgaagagcttgagcgcaacacagtgaacgctgatgcaagaatgttatctccatcatcaagcaatgcctgcacagttgatggtcttggcacaaatcatataaaggaagcagatcaacaagcacctgcaaagctaaagttgcagctatttccaataaatgaagctacacgaaaggcattagagaaggatgaacataatccacatctggaactcacattaagtgctaggaaaaaaatatcatcagtactagaacatttgaaccgcaagtggggcaactcaaacattgcatctggagagcttttgctttttccatattgtgctcatcaagaagatttagctacatatcagaggtggaccacaaaagatactgtcgcagtggctgacgttttcctttctgtgaatagcccatctgtttttcgattaaggtatggttggttttcccttgctgagcttgaagcaggcgtaagtgaaatatctttgactcattttgagaattgcttgatacctgaagacatccatgccaaatctcccttagaggcttgtgtgcaaaaggatggtaattcgctcagtagttgtgctcctgagcaacacccttgtggttcgaaagatcagtcagcattattgtttgctatgccatctagtacaggcaagagtgctcaggtgccagagcagtgcattgatgttctcccctcacagtttggcaggcagaatcaagaccaagttaccacgaaccaagtttttgaggttgatcaagggatggattgtgctgcagtatctgaaggagagtgggcagatacccttactgatatcagtgttggatacttactgacagaagcttccagaggtgctaatactgattgtccagggacatctgttgtcaaaaacacactgttgcttgagaatccctgcagctatgattcatttgatgctgctgttgctcttcatgcttctcgttataaatcagcagagcagccagcccttgcatcccattcaaccatctggggtgctgaagaaacctgtgacgcattcagttttaacctaccagcatctaggaagcgagaaggttcaaataattcagctagcagctctcccgatagtgacagtgatgttcatccttcaaactcagaagggtttcaatgttttcttcaggacttagctggagcggcggttgctcataatccttgtattgacgatgccaaagatgtagagtcactttgtgctgaatcgccacctcgaagtgaccacgattctgctccgaaggatcaatctctagctgacttatactggcctgattcacttggaccattggacttggacataccgtccgcgacataccatgctgatgacttactcctaggggacagccagaatagttggaaccgcatgatggcgaatagcctggatgcatttcgaaacctgtcgttcttcacggcagataagaatgactcgataccatccatcatgtagagctctgaatactggtgcttccttcatgcgcttgcgtggtgaaattgctacgttggctacgaaggtttaccgccaacgatgctgtgcatctcgctgaagaggctttatattgtccaagtgagctgtttgtggctagatccaacagctgcggacttgctgtgcgtttgcagtcaagagggacgcatgttgttgtaaagtagtaacataagagctgttcgtgctaacatgtatgtcgtgtaaattgtggtgttcctgtaaaaaaaaaaaaaagctcacacaatcgcttggttacaataaagcttctcctgccgtgtaccagatc

SEQ ID NO: 27247 - DNA, 1168 bp, Oryza sativa
  ref <308>: DATABASE ACCESSION NUMBER: AK102689
  ref <309>: DATABASE ENTRY DATE: 2002-08-28
ggccgacctcccctctcctttcctcttcttccccaccggcgagtcggcggcgaccgatccctccccgagccgccgccgccgccgcgatgtcgtcgccgggagagagcgggccttcggcttcggcaaaggacacggatgccgcgcagagggcgcaggagcaggagcccgggaagcaggggggcgcgacgagggagcggcggatggagtcgctggggtggctgacggagtcggcggtgatgccgaagaagcacaaggccatcgagggggtcggcgccgcgtccatcctcgacctcaaggcgcagctctaccgcacccaggaggaggcccgcaagcccaccgcccacgacgccgccgcggcggctgctgcctcgggcgagttccgccgggccaagaagcgcgccgctcctggtgaccccctcggcgcgaagaattccggcgtcgatgcccgcgcccacaaagataagttggagctaaaagctgtgaaggatggttcagtaagttatgctgccttagaaaagaaggcagaattgtatgaaaaattatcaagaggcgagatacctgatgaagaagacaaggaaaaatattgtgttgactttttccaaaagagtttcgatcatgtctatgagcctcggcaaccagagagccagagtgttattgacagggcagaaccagaaaatgacaatgatgattctatgtcaagtgccaaaccagtaggccttggtcgaactggcactactattgacagagatgagcacaagcgctttgtaagggaggttcatgaggaagtaagtgaggcaaggcagaaggcttcaacaatgaaatcccgacgacaagagcaggaggctgctcgtagagagaaactcaagcaggcttatttgaagaaacgcctggagaagttacttgctgagaaacgggccacttcagcaaccgacgaccaaccagctagctagtccaggttttgtatgtcctcacttatgtcctgtagcagccttagtagtttcatggcaattcatcatgagttttcctttgaaagtggttctttgatttagcagaaccaaattcagaaaacgttgtcatgtaaagttgtttctacagtttgattcaaacaatgttgtttctacagcatgtaattgtacaaatctacacaattgaaaggcatcttcatctt

SEQ ID NO: 27248 - DNA, 1908 bp, Oryza sativa
  ref <308>: DATABASE ACCESSION NUMBER: AK102690
  ref <309>: DATABASE ENTRY DATE: 2002-08-28
gaagctattacaccgtcagatatatcaagaagatgcaggcggagcaagagcaactgcgcacagaaacggtcaggcatgcctgctctccctcctgcttgtcataaaagggaagccacaagctgaagccagattgctagaaggtagttcttgaggactgaagcaaggtagaagaacttgagcttctggttcgtgtggagctactgggataagttggctgctgattgctgaagatgggagaagctagcagtagttcaggacatccaaggcagaatcctcatgttcttggctatggcttccatggagctatgcccaactccttgccttctgcaaacttgttcgagcagcaaggaggtgctaactattttggagaactagaagaggctctgatgcaacaggtggccacactcaggaggactcaacaaactgcaaccaccacctccacccttcatcatggagacaccacccccttctccaccactgctactgctgcggctacagctaggcctcctcctacactggacatcttcccatcctggcctatgaggtctctccacacacccaaggagggttcaaatgtgacagcagacacaacagactcggagagcagcagcaagaacaacagcaaccaaaatgcctcatcagaccagcatgtgctagtaggagacatggcaggccagttcgaccaaattccacagcaggaacaacacaagaagatggcaactaacagtcccactcatagcagcaagactggcaaggcgcttgatccaaagacgatgagaaggctcgcccagaaccgagaagcagcacggaaaagccgactgcgaaagaaggcttacatccagcagcttgaaagcagcaagctgaagcttgctcagatggaacaggatatccacagagctcgttcccagggcttactgcttggagctccaggtggaaacaccagctcaggtgccgcaatgttcgacgtcgactacgcccggtggctggaggaagacagccagcgcatggctgaactgcacggagggctgcacgcacatctgccggacagcgacctcagagccatcgtcgacgacacgctaacccactacgaccacctcttcaacctcaagggcatggcggccaaggccgacgtgttccacctcatcaccgggatgtgggcgaccccagctgagcggtgcttcctctggatgggcggattccggccctccgagctgctcaagacattgacaccccagctggatcccctgactgagcagcaagtggttggtatctgcaatcttcaacagtcatcgcaacaggcagaggaagctctctcccagggcttggatcagctgcatcagtcattagcagaaaccgtggctggagggtccccgttggatgaccccaacgtcgggagtttcatgggtcacatggctattgccctcggccagctatcaaatcttgaaggttttgtcatacaggctgataatttgaggcagcagactatccatcagatgcacaggattctgacagtcaggcaggcagctcgatgtttcttggccattggagagtaccataatcgcctccgtgccctgagctcactttgggcttctcgccctcgagagatactggtggcagatgaaggcaattgtggagagctaagcattgcagcacatcaatctgagagccaatattcagccttctgaaatcctgtttcaaatgtattttgcaactaaccttcaaagtagggagcaaaagcttgttttttaaatgaaatctagcactctagcagatatgtgagaaactcagaagagagttgggaaacaatggaaggctccagctgcactagcaaaattttcagatggaatgaatgggattgcatgattttcagttactgatcataaagcaagtagttcacgtcctttcctg

SEQ ID NO: 27249 - DNA, 2549 bp, Oryza sativa
  ref <308>: DATABASE ACCESSION NUMBER: AK102691
  ref <309>: DATABASE ENTRY DATE: 2002-08-28
ggcttcacgaactcgcggaaatcccgtcccctcccaaaatctcaccaacgagtccaccccaaatccatccacgaatctcttcctcactccaactgcctccctccgccgtcaaaatccaatctttcctctcacctccgccgctttcggcacgccccttcaaccccaagatcgatactctctccaccaatccgatccaatccgcagctgggttccacgaattgcaaaggtctaggcgcggattggagcatggggctccgatcccccaactcgatgctgtggctagtactactggtgtgggcggcgctgctgtgcggtagctgccatgggaggttcgtggtggagaagaacagcctcaaggtgacgtcgcccagcgacatgaagggcacctacgagtgcgccattggcaacttcggcgtgccccagtacggcggcaccatggtcggcgtcgtcgcctaccccaaggccaacaagaaggcctgcaagagcttcgacgattttgacatctcctacaaggccaaaccgggctcactccccaccttcctcctcgtcgataggggagattgctttttcacaaagaaggcatggaatgcacaaaacgcaggagcagcagccatccttgttgctgatgacaagactgaacccctgattacaatggacacgcctggagagagtggaaatacagactatttagagaatatcaccattccttctgcgctgataaccaagagctttggggacaagctcaagaaagcaattgataatggtgacatggttaatgtgaatttggattggagggagtccctgcctcaccctgatgagcgtgttgagtacgaattttggactaacagtaatgatgagtgtggccctaaatgtgatagccagattgattttgtcaagagcttcaaaggagcagcacaggtacttgagaagaagggatacacacagttcactcctcattacattacctggtattgcccagattccttcattctaagcaagcagtgcaagtcccagtgtatcaaccatgggagatattgtgcacctgacccggaacaggatttcagcaaagggtatgatgggaaagatgtggtagtccagaatttacgtcaagtctgtgtttataaagttgctaaggagcatggaaaaccttggctgtggtgggactacgtgacagattttgcaatccggtgcccaatgaaggaaaagaagtacaccaaggaatgcgctgatggagttatcaagtcacttggtcttgatcacaaagccatagataagtgcattgctgatccagatgctgataaagaaaatcctgtgctgaaagctgaacaggatgcacagattggcaagggctctcgtggtgatgttaccatcttaccgactcttgtaatcaacaatagacaatacagagggaaacttgataaaggagcggttcttaaggcaatttgtgctggttttcgagaaaccactgaaccagctgtttgcttgagtgaagatatacaaacaaatgagtgcttggagaacaatggtggctgttggcaagacaaggctgctaacatctctgcatgcaaggacacttttcgtggaagagtttgtgaatgtccagttgtgaaaggtgttaaatttgttggtgatggctacactcactgtgaagcttcgggatctggccattgtgaaattaacaatggagggtgctggaaggattccaggcatggccggacatattctgcctgcacgaatgatggttgtaaatgtccggatgggttcaaaggtgatggagtccacaaatgcgaagatattgatgaatgcaaggaaaggactgcatgccagtgcaaggaatgtaaatgcaagaacacatggggaagctatgagtgcggttgcagtggcggcttgctttatatgaaggagcatgatacatgcataagcaaaaatgcagcaacagaggtaggatggaacttcttgtgggtgatcttctttggcctagtggtagccggcattgcaggatacgcagtatacaagtacaggatccggaggtacatggattcagagatccgcgccatcatggcccagtacatgcccctggacaaccaaggagatgttcccaatcattctcaccatatcgagctatgaaaagagtgaggatagcatgcaacttccccccatgttgcccaaatgggatgagaagaggtgaacaactcctggagatcatgacacagcctgacgatatgtgtagtagtatcactctgacgatcttatgtttagcaaatttagcccatgtaaatttctggattatcctgtggccgcataatttcaatcgtacctggctgctttgctcccatatagcgctggggaaatatggagattgcaaaattaggcaagtttgtgatctcgaggaagaacactagtatggcatttcccaccaaaaaagactagtttggaaagcatgaattttgtatagaattttcgtgtgaatcagttttgcttggttcttgcggaaaaagaaaaatcaggcattccatacatgttggtggaaaaggatgcccttcacaagc

SEQ ID NO: 27250 - DNA, 1260 bp, Oryza sativa
  ref <308>: DATABASE ACCESSION NUMBER: AK102692
  ref <309>: DATABASE ENTRY DATE: 2002-08-28
tgaggtcaaagcagcagcctcgatcgcaaactgcaggatcgtcgctggctgggcctcaagaatctccaaagcagatccacccacgcgccaccagctcatcattgtcgaccaatcttcttttcttgatttcaatccatgatcttctcatctatttatacccctcgtcttcttctcctcctctcttcatcgtctccgacgccgacgaactcccactcactagtagcacttacttgtagctattgatctagagcacttaagacatggagaggcaaggcttggatcttggcctgagcctcgggctaggcttgacgacggcggcgacatggccggctgctgggttctgtctgaactccgtcatggcggagcaggaagtgatcaggcgtgatgatgtggttgcggcgacggcggcggaggatgagaggttcgcgtgctcacccggcagcccggtgtcgagcggcagcgggaagcgaggcagcggcagcggcagcggcgacgaggtcgacgacgccggctgcgacgtcggcggcggcggcgcgcgcaagaagctgcggttgtccaaggaccaggccgccgtcctcgaggagtgcttcaagacgcaccacaccctcactccgaagcagaaggtggcgctggcgaagagcttgaacctgcggccgcggcaggtggaggtgtggttccagaaccgccgcgcgaggacgaagctgaagcagacggaggtggactgcgagcacctcaagcggtggtgcgaccagctcgccgacgacaaccgccgcctccacaaggagctcgccgagctcagggcgctcaaggccacgcccacaccgcccgccgccgcgccgccattgaccaccctcacaatgtgcctctcctgcaagcgcgtcgccaatgccggcgtgccctcgccggcggcggcgatattccccggccacccccagttcttgtgcggattcagagatcacgccggagcagcgtcgtcgtcgtacggcggcgcatcatctggactcgcgaaggcggtcagggcggcgaggtagatcgatcgatgcgcgcgccgccatgatcgacatgaccaagctagcgatctctagctagaagatgatgacattgagcaagacgcaagagtagaacagagttgaattgatctctcgttttcctgtgtatttttaaggatcaagtgcaaagttaatttagtttttgacaaatgtaggatggatccatgtatgtacatgaaaagttgatgaaataacatgagaagaactaatt

SEQ ID NO: 27251 - DNA, 1854 bp, Oryza sativa
  ref <308>: DATABASE ACCESSION NUMBER: AK102693
  ref <309>: DATABASE ENTRY DATE: 2002-08-28
ggcgtagtagtagtagtagtattagtctattcgagtcctaccagtagctagctaagcagccgagacggtggcggtggaggaggtggtggtggtggtagtagtagtacgccggggagagagagccgttgctgctgctgtgaggtgagggcgagatctaggagggaggcgtccatgggagctcgctgctccaagctctccgtgtgctggtggccgccgcacttcaagtcgccgctgcttgagaatggcgccgccgcggacgacggcagcggcgtgccggtgttcgccgagtacagcctcgacgagctacgggtggcgaccgacgggttctctcccgagcgcatcgtgtcggagcacggcgagaaggcgcccaacgtcgtctaccgcggcaccctcttcagcaccggccgcaccgtggccatcaagcgcttcggccgctctgcctggcccgactcccgccagttcttggaggaggcgagggctgtcgggcagctgcggagtgtccggctggccaacctgatcggctgctgctgcgagaatggcgagcggctgctcgtcgcggagttcatgccgcacgagaccttggcaaagcatctcttccactgggagacaaagccattgagctgggcaatgagggtacgagctgcattctatgtggctcaggcattggagtactgcagtagcaaagggagagctctctaccatgatctgcatgcatacagggttctctttgatgtggatggtaaccccagactgtcgtgcttcggtctgatgaagaacagcagggatgggaagagctatagtaccaatttggctttcacgcctcctgagtaccttaagactggcagagtaattccagagagtgtggtgtacagttttggtactatcttgcttgatctcctaagtggaaaacatatcccaccaagccatgcgcttgaccttataagaggaaaaaattacctggtgttgatggactcttgcttagaaggccatgtctccagctctgatggaactgagttgatacgattagcatcccgttgcttgcagtatgaaggtcgtgaccggccaaacctgaaatcggtggtgtctgctcttggaaacctccagaaagatgcttctgctccttcacatgctttactaggcatacaacatgataaggaaaatacagagcgaatttcgttatctgctatagcgaaagtttatgccagagcagaccttgatgaggttcatgagatgctggagaatgatggatattgtgaggatgaaagagcaacattcgaggtatctttccattcctggactggccaacaagtatctgatagtattcttgtcaagaaacatggagacagtgcttttcaatccaaggattttgcgactgcagttgagtgctactcaaggttcattgacactggtgtaatggtgtctccgactatgctggcacgacgaagtttcgtatacatggtgctcggcaagctgcaagaaggccttgcggatgcaaagaaagcagcagacatatctcctgagtggcctactgcacactaccttcaagggatggcatatctcgccatgggaatggagcctgaagggcatgaagaactcaagcaaggcgccgctttggaagctgaaaggaatgctagatagagatgaactgtatagccctcaaacatgatgtgatgcctcctctcttctgtacctagatcgcctgcattttgggtgtcctccagtgctttgccaccaatagggctgttttttggtcttccctaacttgtattggtatttccagtggttttacaactcctaggttggctgttatgacacctccaatatattcataagtacaaaaaatgggcaactagc

SEQ ID NO: 27252 - DNA, 2151 bp, Oryza sativa
  ref <308>: DATABASE ACCESSION NUMBER: AK102694
  ref <309>: DATABASE ENTRY DATE: 2002-08-28
ccccgctctctcccacgctctcccaccactccactctccaatcccattaattgcgcctcctccgctcgctcctccgcctcgtctcgtcgtcgtcggcgccggcgcggagagggagggagaccgacgagcggcggcgaggaggaatggaggtgaacggcggcggggcggcggggctgccggaggcgtggtcgcaggtgagggcgccggtgatcgtgccgctgctgaggctggcggtggcggtgtgcctgaccatgtcggtgctgctgttcctggagaggatgtacatggcggtggtcatctccggcgtcaagatcctgcgccgccgccccgaccgccgctaccgctgcgaccccatccccgacgacgaccccgagctcggcacctccgccttccccgtcgtcctcatccagatccccatgttcaacgagcgcgaggtgtaccagctgtcgatcggggcggtgtgcgggctatcgtggccgtcggatcggctggtggtgcaggtgctcgacgactccactgaccccgtcatcaaggagatggtgaggatagagtgtgagaggtgggcccacaagggggtgaacataacgtaccagatccgggagaaccgcaaggggtacaaggctggtgcactcaaggaggggatgaagcatggctacgtccgcgaatgcgagtacgtggccatcttcgacgccgacttccagccggaccctgatttcctccgccgcaccatccccttcctcgtccacaactccgacatcgccctcgtccaggcccgctggcgtttcgtgaatgcagatgagtgcttgatgacaaggatgcaggagatgtccttggattaccacttcacagtggagcaggaagtgagctcctctgtctgcgcattcttcggcttcaatggaactgctggtgtgtggcgcgtttccgcggtaaacgaggcgggaggatggaaggaccggaccacagtggaggacatggatctggcaatcagggcgagtcttaagggatggaagtttgtctaccttggagatgttcaggtcaaaagtgagctgccaagtactttcaaagcctttcggtttcagcagcacaggtggtcatgtgggccggcaaacctgttcaggaagatgctgatggagattgtgagaaataagaaagtgacaatctggaagaagattcatgtcatctacaacttctttttgatccgcaaaatcatcgcgcacatcgtgacctttgcgttctactgcttgattatcccggcaactatctttgtccctgaggtcaggataccaaagtggggctgtgtgtacattcccacaatcatcacccttctcaattccgttggaactcccaggtcttttcacttgcttttcttctggatcctctttgagaatgtcatgtcactgcatagaacaaaggccactctcatcggcctgttagaagccggtagggcgaacgaatgggtcgtcaccgagaagctcggcaacgctctgaagatgaaatcatcaagcaaatcatcagccaagaaatcgttcatgagggtatgggacaggctaaacgtcacggagctcggcgtggcggcattcctcttctcctgtggatggtatgatcttgcattcgggaaggaccatttcttcatctacctcttcttccaaggcgcggcgttcttcatcgtcggtatcggatacgttggcacaattgttcctcaatcataacagaagagaagcaaatatatatattttcgagatcggccgccttcaaattcaccatgtcttcagcaagagtctagtagttatataaatcagtttgaagtaaagatcatgcagcatttttttactctcatttttctctgtttcttttcttttctttttcttttcttctttgcctttttctctgttatgtgctattgtaaaaaatagtgcagtgtaaggtcactgcaggaagaaaaaaactagggcaattggtgtgatctgggcaaggaggaggtgaggaggatatcgtgatgtgtttttgcttgtagcaaagtacgtgagtggtatgcttaaagaggagcaggatgactctgcttccgttgtactgtaataacatacagaaaaaaaaaaggtcagacaagtgctggacaaaaccaaaatgttcagccttctctcgcattccact

SEQ ID NO: 27253 - DNA, 2757 bp, Oryza sativa
  ref <308>: DATABASE ACCESSION NUMBER: AK102695
  ref <309>: DATABASE ENTRY DATE: 2002-08-28
gtatattccttgcatggagaattaagcacaagaatgaggatgcaatgtggctatggggcatgtctgttgtttgcgaactctggtttggcctctcttggctcttggatcagctgccaaagttgtgccctgttaaccgagcaactgaccttgctgtcctgaaagataagtttgagaccccgacgccatcaaatcctaacggaagatctgacctgccggggctcgatatatttgtgtctactgctgatccagaaaaagaacccccattggtcacagcaaatactattctgtccatccttgctgctgattatcctgttgagaagctttcttgctatgtttctgatgatggaggcgctctcctgacatttgaagcaatggctgaagccgctagctttgcaaacatgtgggttcctttctgtcgcaaacatgacattgagcctcgcaacccagagagctactttaatctgaagagggacccatacaagaacaaggtccgttctgattttgtcaaggacagaagaagggtgaagagggagtacgacgagttcaaggtcaggatcaatagcttgcctgattcaatccgtcgccgctccgatgcatatcatgccagggaggaaatcaaggccatgaagcggcaacgagaggctgctctcgatgacgtggtggaggctgttaaaatccctaaagctacctggatggctgatggcacgcattggcctggtacctggattcagccctctgctgagcatgctcggggtgaccatgctggaataattcaggtaatgctgaaacctcctagtgatgatcccttgtatggaaccagcggtgaagaaggcagacctcttgatttcactgaggttgacatccgtttgccaatgttggtctatgtgtcccgagagaagcgtcctggttatgatcacaacaagaaggctggtgcgatgaatgcgttggtccgctcatctgctgtcatgtcaaatggacctttcatcctcaaccttgattgtgatcactatgtttacaactcacaagctttccgtgaaggcatgtgcttcatgatggatcgtggtggtgaccgtattggctatgtccagttccctcaacggtttgagggcattgatccatcagatcgatatgctaaccacaacactgtcttcttcgatgtcaacatgcgtgcacttgatggtatcatgggaccagtctacgtcggcactggatgtcttttccgtcgcatcgctttgtatggatttgacccaccgcgctccaaggaacatagtggttgctgcagctgttgcttcccccagaggcgcaaggttaaaacttccacagttgcatctgaagagaggcaggctttgagaatggcagattttgatgatgaggaaatgaacatgtcacaatttcccaagaagttcggtaattcaaacttcctcatcaactctatcccaattgctgaattccaagggcgacctcttgctgaccatcctggagtcaaaaatggacgtcctcctggtgctctcaccgtccctcgcgaccttctcgatgcttccacagttgctgaggctatcagtgtcatctcatgctggtatgaagataagactgagtggggtcagcgtgttggatggatctatggttcagtcacagaggatgtggtcactggttacaggatgcacaaccgtggatggaaatcagtttactgtgtcaccaaacgtgatgctttccgtggcactgcaccaatcaaccttactgaccgtcttcatcaggtgctccggtgggctactggttcagtggaaatcttcttctcccgcaacaatgcactacttgcaagccgaaagatgaagtttcttcagaggattgcatacctgaacgttggcatttaccccttcacatcaatcttcctcattgtctactgcttcctgccagccctgtccctcttctcgggacagttcattgtgcggacgctaaatgtgaccttcctgacctatctgctcgttatcactctgacaatgtgcatgcttgcggtgctcgagatcaagtggtcaggcatcagcttggaggaatggtggaggaatgagcagttctggctaatcggaggaactagcgcccaccttgctgctgttcttcagggtcttctcaaggtgattgctggtatcgagatctccttcacgctgacatccaaatctggaggagatgaagcagacgacgagtttgctgatctctacatcgtcaagtggacatcactcatgatcccaccgatcgtcatcatgatggttaacctgatcgccatcgctgtcgggttcagcaggacaatatacagtgaaatccctcagtggagcaagctcctcggcggcgtgttcttcagcttctgggtgctggctcacctttaccccttcgccaaggggctaatgggaaggagaggacgaacaccgaccatcgtcttcgtctggtctggcctccttgccatcaccatctcattgctgtgggttgccatcaatccgccgtcacagaactcgcagataggcggctccttcacattcccctgagcttcctcatgaacatgaaccttttgtatgatgaattataagagtggtcccagtagcagttgtccttgctgttggacaagtaaattctttacctatgtttacttaggtttttcttttttttttttgggtcgaagatgatactattatgaatcatgcatgatactagttcttttgttcgtttttgtgccaaaatgagaagaggttctgtttggacctgaacatc

SEQ ID NO: 27254 - DNA, 1016 bp, Oryza sativa
  ref <308>: DATABASE ACCESSION NUMBER: AK102696
  ref <309>: DATABASE ENTRY DATE: 2002-08-28
gggcagatacgaagggaacattccaacctcctcccacacggctccaccaagaggcgcggcccgctcgatccgctgattcaccagcgtcggtctggtcgccgagtggcaacggaggccaacccctacgcgatgccgtcgtcgagcaggacggagacggtgaagaacgcgctgtcgcggtgggcgcggagagtcggcgagacgaccaggaaggccgaggacctgtcgcgcaacacatggcagcacctgaggacggcgccgagcatcggggaggcggccgtggggaggatcgcgcaggggaccaaggtcctggccgagggcggccacgacaggatattccggcaggcgttcagcgcgccgcccgacgagcagctccgcaagtcctacgcgtgctacctctccacctccgccggcccggtgatgggcatcctgtacctctccacggccagggtcgccttctgcagcgacagcccactctcctacgaggccggcggcggcagcaaagagtggagctactacaaggtggcgattcctctgcacaggctgaggtcggcgagcccgtcggccagcaagcagaggcccgcggagaagttcatccagctcgtgtcggtggaccgccatgagttctggttgatgggctttgtgaactacgacagcgcggtcaagcacttgcaggaggctctcagcggcttccaccacctgcaagcgtgagtgcgtgacaggcggcatcggcatttgcccgcgctaatcttcgttgttcgctgattgacacggcgtgatttgtgtcttggggtgtttgtgctctagttcttcttgctgaggatatgtttatgagtgcatcggtcacttgagattgtttgggattgcggatatcttcgattgtttggagatacatgtcacacatctaagattcctgaagctcttcacttaaaatcttataggttttggaaactgtggttgccttatttttttttttgagagaatagccaacatgatccttgaagttttgctccatgatc

SEQ ID NO: 27255 - DNA, 2152 bp, Oryza sativa
  ref <308>: DATABASE ACCESSION NUMBER: AK102697
  ref <309>: DATABASE ENTRY DATE: 2002-08-28
gtcggtggctgcatttcgtccctgttctgccgccgacgagcgacgatgcggcgcctcctcctcgccggcatcctccgccgcgcctcctcctccccttcctcccaccaccacctccaccttgtcagggcgctctccgcctcgtccccgctcccggcctccgacgccgacctccgcaagtacgccggctacgcgctcctcctcctcggctgcggcgccgccacctactactccttcccgcttccccccgacgcgctccacaagaaggccgtccccttcaagtacgcgccgctccccgacgacctccacgccgtctccaactggagcgccacccacgaggtccacacccgcgtcctcctccagcccgactccctccccgccctccacgacgcgctcgccgccgcccacggcgagtgccgcaagctcaggcccctcggctcgggcctgtcccccaatggcctcgcgctctcccgcgccggcatggtcaacctcgcgctcatggacaaggtgctcggcgtcgacgccaagaagaagaccgtcaccgtgcaggccgggatacgcgtcgccgagcttgtcgacgcgctccgggagcatggtctcacgctgcagaacttcgcgtccattcgggagcagcaggtcggcggcatcattcaggttggtgcccatggcactggtgcaagattgccaccaattgatgaacaagttattagcatgaaattggttacccctgccaaggggacaatagagttgtcaagggagaaggatcctgatttattctatcttgctcgctgtggacttggtggccttggagttgtagcagaagttactcttcaatgtgtggaaagacaccaacttattgaacacactttcgtttccaatgcagacgaagtcaagaaaaatcacaagaaatggctctctgaaaataaacatattaagtacttatggattccatacaccgatacagttgttgttgtccaatgcaatcctccttcaaggtggagaactccaaagtttacctcaaaatatggaaaggatgaggctatacaacatgttcgtgatctttatcatgagtcattgaagaaatatagaactaaagcagaaagtaatgacccagaagtagatcagctttcattcactgaattgagggatcggttgcttaccctggatcctctagacaaagatcatgtgatcagaattaacaaagcagaagctgaatattggaagaagtcagagggttatcgcatgggctggagtgacgaaatattaggctttgattgtggtgggcagcagtgggtttctgaaacttgcttccctgcagggaccctagcaaagcctaatatgaaggatctggattatatagaggagctgctgcagttgattgagaaggaagatatacccgcaccagcacctattgagcagcgttggactgcctgcagcaggagtcccatgagcccagcatcaagctctcaagaagatgacatattttcatgggttgggataataatgtacctcccaacgtcggatgctcgccaaaggaaggaaattacagaggaattttttaattacagaagtaagacgcaaacaaatctatgggatggttattctgcatatgaacactgggccaaaattgaggttcctaaggataaggatgaactcgctgaactccaggctaggttgaggaaacgtttcccagtagatgcatataacaaagcacgcatggagcttgaccctaacaaggttctttccaatgcaaagttagagaagctcttcccagtaacagaggtccaacatgaaaagtaaggttgtgctgattgttgacatgtttgaagacatgtcggggatacttaaatcaatagccaaaactacaattctggtggtttctcgttacataaccggatatgaagagttaaattctttgtagaacgtggtctgttgctggagaagggttttagtgctcctcctcttggatcagtgcttagtactgaactgacgcgtttgttgctggaggcttttatacttgggaacatccatgcctattatgagactaaatggtctgttttatcaagagaaatggcatgtaaccttttgcagcagaaataaagtgcgtgaaataacaatttgatgcgcttcaagaaattaaagatttggccagtcc

SEQ ID NO: 27256 - DNA, 1173 bp, Oryza sativa
  ref <308>: DATABASE ACCESSION NUMBER: AK102698
  ref <309>: DATABASE ENTRY DATE: 2002-08-28
gtttcaggatcagtaattctgtgcacttgtctgcaggatggcaaggattggatgacgcagctgctagcagtagcgtgcttgtcgcttgctgccaagatggaggaaaccgatgtgcctcaatcgctggacctgcaggtcggggaagaacggtacgtgttcgaggcgaagacgatccagaggatggagctgctggtcctgagcaccctcaaatggaggatgcaggccgtcactcccttctcctacgtcgactacttcctccgcgagctcaacggcggcgatccgccgtcgggacgctcggcgctgctgtcttcagagctcatcttgtgcatagctagaggaacagaatgcttgggattcaggccgtcggagatcgccgccgcggtcgccgccgccgtggtcggagaagaacacgccgctttctcccatgtaaataaggagaggatgtcgcattgccaggaagtgattcaggccatggagttgatacatccaaaaccttcaagccccagcagagtcttcgtctcctcctccattccacggagccctactggcgtgttggatgcagcaggctgcctcagctacaggagtgacgattcagctgttgcctcacactacgcagcaagcagctggggatatgaacatgatagctccccggttagcagcaagaggaggaagattagcagatgatgcagccaatgatggatcaattaaaagtctgtttatatgtgttgcgaaactgatcgtgcatctctctttcttgggaaagtcaaatggttttgattgcaaatgactgtggagcctttcgatgccgtatgggagctagagcctgaaaggcgatgaaggaccaaaagcaaggcattttcgacatggcaacagagcaaagatactgatggataaagagagtctgaggtagacatgtgctccaatattttcatgtgctttagcgttagttgctaggaggcaggcagccacaaaagagtagaggatttgtgggaagagagccgggcgagatgaaaatgagatgaccaaaataaaggcagagacgaggtgacagtggcacaaggcaaagcgagctaggcactgacactccagatgtcctgcgtgtgtttcagttttgcgttgttctgtaatttcccctgcttaattcctttgtgaagaaaaatcataaaaaaggag

SEQ ID NO: 27257 - DNA, 1188 bp, Oryza sativa
  ref <308>: DATABASE ACCESSION NUMBER: AK102699
  ref <309>: DATABASE ENTRY DATE: 2002-08-28
gactacgaatcgccagccgccacaccgagctccgccgccgccaaccccaccgcggcgagctccgccttccgccggccgcgatggctcccaaggccgctgtaaagaaggctgatggaaagactcaacaagccttgaaggttgccaaggcagtgaagtctgggtcaatcaagagaaagtcaaagaagatccgcacttcggtgacatttcacagaccaaagaccctgaagaaggcgagagaccctaagtacccaagagtcagtgcacctggcaggaacaagcttgatcagtaccaaatcctcaagtacccccttacgaccgaatctgccatgaagaagattgaagacaacaacacccttgtcttcatcgtcgacctcaaggcagacaagaagaagatcaaggcagctgtcaagaagatgtatgacatccaggcaaagaaagttaacactctgatcaggcctgacggcaagaagaaggcgccctcgcgctcgcgctccagtcccgcgtcgccgaggtgttcgccgtcgacatccaccccgccgccgcgatcggcaagggcgtcctcctcgaccacgccacgggcgtcgtcatcggagagaccgccgtcatcggcgacaacgtctccatcctccaccacgtcacgctgggcgggacaggcaaggccgtgggcgaccggcaccccaagatcggcgacggcgtcctcattggcgccggcgcgacgatcctcggcaatgtcaggatcggcgccggggccaagatcggggccgggtcgctggtgctcatcgacgtgccgccgaggaccacggcggtggggaatccggcgaggctgctcggcgggaagaagggcgacgacatgccgggtgaatccatggaccacacatccttcatccagcaatggtcggactacagcatctgagcaggacatggtgtatgcgctactaaattttctccttgtttcgagctgtgcttgaactggtactagtggtgttattacttaataacactacaagtaatagcacaatgtgtttcttttttgcttgtaatggctgtaagctttgctccggcgagctgaaggtgaaccgtactgcacattgtcgtgctcgtctccggacacttgtactggatgttcactttgtaattttgcgaaggtctcgtggaatgtaatactatccactaccttaaaatagcccc

SEQ ID NO: 27258 - DNA, 2477 bp, Oryza sativa
  ref <308>: DATABASE ACCESSION NUMBER: AK102700
  ref <309>: DATABASE ENTRY DATE: 2002-08-28
ggatctaatcgaccgagcccaaaactaaccctaaattccccagctccccaccacgccgccgccgccgcctccatgggccgcaaagatacttcctcgtcgtcctccgccgccggcggcaagaaggacaagccgatgtcggtctccgccattctggcctccatggacgcgccggcgtccaaggccaagccatccaaggcggcgtccaagcccaagccctccaaggcgcccgcgtcgtcttacatgggcgacatcgacctgcccccctccgatgaggaggaggacgacgccgacctcgttgccatggccacgaagcccaaggcggcccgcgccaccgtcgacctcaacgccatcgcgccctcgcagaaggacgcgaagaagaaggacaagcgcgaggcgatggcggccgcgcaagccgaggcggccaagcaggaggcgctccgcgacgaccgcgacgcattctctgtcgttattggcgcgcgcgtcgctggatccgccggggcctccgagggtgactccgccgccgccgatgacaacatcaaggatattgtgctcgagaacttctctgtttctgcccgcgggaaggagctactcaagaacgcctcgctccggatctcgcacggccggcgctatggcctcgtcgggcccaacggcatgggcaagtccacccttctgaagctgctgtcatggcggcaggtcccggtgccccggagcattgatgtcctgcttgtggagcaggaaattattggagacaatcgttcagcgctcgaggctgttgttgctgctgatgaagagctcgcagcgcttcgtgccgagcaggcaaagctcgaggcctctaacgatgctgatgacaatgagcggcttgctgaggtttatgagaagctcaacctccgggattctgatgctgcccgggctcgtgcatccaagatccttgctgggctggggtttgatcaggctatgcaggccaggtccactaaatcgttcagtggtggctggaggatgcgcatctcgcttgctcgtgcgctgttcatgcagccaacattgttgctgcttgatgaaccgactaatcatcttgacctccgagctgttctttggttggagcaatacttgtgctcacagtggaagaaaacactgattgttgtgtcccatgatcgcgacttcctgaacacagtttgcaatgagatcattcatttgcatgataagaatctgcatgtttatcgtggaaattttgacgactttgagagtgggtatgaacagaagaggaaggagatgaataggaagtttgaggtgtttgaaaagcagatgaaggcagcaaagaagactgggagcaaggcagcgcaagacaaggtcaaaggtcaggcactatcaaaggctaataaggaggctgccaagagcaaggggaagggaaagaatgtagcaaatgatgacgacgacatgaagccagctgatcttccacagaaatggcttgactacaaggttgagttccacttcccagagccaactttgctcacaccaccgctccttcagctcattgaggtgggcttcagctaccctaataggccagatttcaagctgtctggtgttgatgttggcattgacatgggaacacgtgttgcaattgttggtcccaatggggcaggaaaatctacacttcttaatttacttgctggtgatcttaccccaaccaaaggagaggtaaggaggagtcagaagctgaggattgggcgatactcacagcattttgttgacttactgacaatggaggaaaatgcagttcagtatttgctcaggctccatcctgatcaggagggaatgagcaaagcagaggctgtacgtgcgaagctcggaaaatttggtttaccagggcacaaccatctcactccaatagttaaattatctggtggacagaaggcccgtgttgtgttcacttcaatatcaatgtcacatccccacattctcctgctggatgagccaacaaatcacctagacatgcaaagtatcgatgcattggcagatgcactggatgaattcactggtggtgtggtcttggttagccatgactcgagattgatctctagagtgtgtgacgatgagcagaggagtgagatatgggttgtagaagatggcactgtgaacaaatttgatggaacatttgaggactacaaggatgaacttttggaagaaatcaaaaaggaagttgaagagtaatgtgtttttatagttgcaggatactgcttattctttatagactgggctggtaaacttaatgtactagtacttattttctttggtttgcagagtatttgtatggttgagtccgaaacacctattcgagctgttcttgctttttgcatgatctaagaggtttcaggatgagtctgataaatatgttttctatgattttgctgccaattactctgtactaagacttccatgatatacatccataataattcagtatgatttcatgttattggccc

SEQ ID NO: 27259 - DNA, 1207 bp, Oryza sativa
  ref <308>: DATABASE ACCESSION NUMBER: AK102701
  ref <309>: DATABASE ENTRY DATE: 2002-08-28
ggcaagctgtgacacactaacactctacttgtactaggtagatcgctagaacaatggcgtccggtggcgaggagaagaagagcaggatcctggtggtgggcggcacggggtacatcggccggcacgtcgtcttggccagcgcgcggctgggtcatcccaccaccgccctcgtcagggacctctccccctccgaccccgccaagtcgcagcttctccagagcttccgcgacgccggcgtcaccctcctccacggcgacctctacgaccacgccagcctgctcagcgccgtccgcgacgccgacgtcgtcatctccacgctgggcgcgctgcagatcgccgaccagaccaagctcatcgccgccatcaaggagggcggcggtggcaacgtgcggaggttcctgccgtcggagttcgggctggacccggaccacacgggcgcagtggagccggccaggtccatcttcaccgggaaggccgccgtgcggcgcgccgtggaggcggcgggagtgccgtacacgtacgtggtgtccaactacttcgccggctacgcgctgccgacgatcgggcagaacctgccgccggcgcggccggtggatagcgtggtgatcctcggggacggagccaccaaggtggtgttcgtggaggagggggacatcgggacgtacacggtgctggcggcggtggatccgcgggcggagaacaagacggtgaacatacggccggcgaagaacgcggtgtcgcacgaggagctggtggcgctgtgggagaagaagacggggaagaagctggagagggtgtacgtgcccgaggacgccgtgctcaagcaaatccaggagtcggagatcccgttgaacatcgtgctgtcgatcgcgcacgcagggtacataaggggggagacgacgacgccgttggatccagccaccgccgttgaggccacccagctcttcccggacgtccagtacaccaccgtcgatgactacctcaacaggctcctctgaaatacatcgatacatccatcatcttttatgtgccaataaaataattaagtctcttccttagtaatgtacatgttcctgcaaatttcacaccgtcggtgagagtgagtgtcttggtttaatctgtcatggatcactgtgctcagttcagctcttcttcagggcttgatttgcatgttaatgaatttatttgcttaaacattattagtatg

SEQ ID NO: 27260 - DNA, 2570 bp, Oryza sativa
  ref <308>: DATABASE ACCESSION NUMBER: AK102702
  ref <309>: DATABASE ENTRY DATE: 2002-08-28
gagtcggccatgctgccttgatgatcgatcgatgcaaaggcaggcaggaggattcatttccatggcgtggtcaatgccaccgctggctttgttcgccgccgtgctggcgctgcagcaagctatcgccgccgccgcggcggccggagactgcccgaccacctgcggcgacgtggccgtgccgttcccgttcggcatcggcgccggctgctaccacttgcccgggttcaacctcacctgcgaccggagcagcgacccgccgcggctgctcctcggcgacgccgccgcgttccaggtgctcaacgtctccatcgtcaacgccacggtgcgcgccgcccgcgtcggcggcataaacatcacctacggcggcgggaacacgtcgtcggccgacgagggacgcggcgcttggcgggggctcggcgacggcgggccgttcgcgctgtccgaggatcgcaacgagctcgtcgtcgtctgggggtgcgacgtcgtggcgctgctcaccgacggcggggggagcggcaacagcagcaacgtcaccatcagcggctgcgcctccttctgccccggcaccgacgccggcggccaagcgatcgccgccccagcgggttccacgatgtcgctgaccgaggacaggcggtgcaccggcgtcggctgctgccagatgcccatcagcgtcggccgcgactcctaccaagtgcgtctccgccggctcaacccgagcccgccccagccgccgccgccgcagggcgccggcgacccgacggtggtgctcatcgcggagcaagggtgggtcgccgaggcctctaggtccacccgaggctacccgctcccggtcaccttcgacgagacggcggtgcccgtgttgctggggtggatgatcgcgtcgacccgcgtcggcgccgacggcgaggtgccggtggactcgacgtgccccgccgacgccgcgcgcagcgcctgcaagagcagccacagctcgtgccgcaacgtctccagctccgcgcgcgccggctacgtctgcgactgcgacgccggcttccatggcaacccctacctcgccaccggatgccaagacatcaacgagtgcgagcgtgcagaggagcacggttgcttcggcgagtgcatcaacacggccggatcgttcctgtgccggtgccctgcaggaatgcaaggcaactacacccaacgcaatggatgtttcagacctcctcttcctgctcgttcttctacaggtttaagcatcggtgtgggtgtcagtagtgctgcaagccttatacttatagtgatcatggcgatcttcatcatccgcaagcagaaacgcaggagggccaagaagattaggcagaagtacttcaagcagaatcgtgggcagctactgcagcaactggtagctcagagggctgacattgcagagaggatgatcataccgttgggtgagctcaagaaggcaacaaacaactttgatagagctcgtgagctcggcggcggcggccatggcaccgtgtacaaggggatcttgtccgatctccatgtcgtcgccatcaagaaatcaaagattgcagttcaaagggagatcgatgagttcataaacgaggttgccattctctcgcagataaaccataggaacgtggtgaagcttttcggatgttgcctcgagacagaagtgccattgcttgtctatgagttcgtttccaatggaaccctttacagccatctccatgtcagtggaccaagatcactaccatggagtgacagattgaggattgcaactgagacagccaaagctattgcctatctgcactcatcagtttcaatcccaataatccacagagatatcaagtccactaatatactcctcgatgacactctgacctccaaggtgtcagactttggagcttcaagatgtatcccggttgatcaaacaggggtaacaacaaaggttcagggaaccttaggatacatggatccggcatactattacactcagaggcttacagaaaagagcgacgtgtacagcttcggggtcattcttgtagagcttctcacaaggaagaagccattttctcacctgacacctgagggtgaaggtctggttgcacattttgtcacttcatttacagaaggcaatctagttggagtgttagacctgcaaatcatggaggaggcagacatgaaagttgtcgaagtagtagctacgctagctgtgacatgtgtaaatctgagaggagaggaccggcctaccatgagacaggttgagatggcacttgaaggcattcaggcatccagggaaaatgtttcaggtaatctttctgcagagaagcttggagagagcaataatgtcgcgagggatttcatgccaagccaagaaggaagaagcatgacagaagggactaggcaatatagtttggaagaagagttcttgttgtcttcaaggtaccctcggtagttttctggtcatctgtgttcatgtaaagctgatttcagtttcatttttccccaaggagtttatgtgttctttaaagaattgaaaattaccctcattcgagttaaaaacaatgggccatgacatgcttctc

SEQ ID NO: 27261 - DNA, 1890 bp, Oryza sativa
  ref <308>: DATABASE ACCESSION NUMBER: AK102703
  ref <309>: DATABASE ENTRY DATE: 2002-08-28
ggccgttgcaacaaaccaaaccttagctcctctcgctttggcttctcaccccgcacagccaactcttcccgtccatctcaatctccactgataatcgagacacaggccatgccgtgggtgcgcttcctcgtccggttggtcgtcttcttccgcgtcatcgtgtgagagcaagctaaagctactcgatccgtcgatcggccggcggtgactgactgagaatgtgcattggtttccaagggagcaggaggagtagcagcgagacgagcgccgccgacgcggtgatgagaagtggcgccatcgcgtactaccacacgctgaccaaggtttgccaggccgagtacttccgtcaccttctcaagcccgtgacgtaggttgaccagtacataatcctcctcccttcttcacccgacgagagagctagctgcgcagcttctctcacaaggaaaaaaacagaggagacaaacagagtttggaagttaagagcagaagaagatgcagggagaccacgggtactacggcgggagggactcgccgccgcaggggtacggctacggcggcggctacggctacggaggcgggtatggctacgacgccggtgggtactactccggcggcggcggcggctacccgtcggctggggcggcggcggcggcgtacgaggacccgatggtcgggaggaggacgcacgacttcccggcgccgatgaacgagctggagttccagccgtcggccacgtgccccaagaactacgtcatcttcgaccagacgtgcaccaagagccgggtcatgttccacccctcgctggcgcacaagttcggcggcgggtcgtcggcgtacgacaacaacgtgtacggcggcggcggagcgcacgacgccgccaagggcgcgtacagggacagcgtcggctacgacgacgacgacagctgctcggtgcggcagaaggaggacacggacgagatcgacgcgctgctgagctcggaggacggcgacgaggacgacgtggtgagcacggggcgcaccccggggtaccgggacggcagctccccggactcgacgtgctcgtccagctacggcggcgggcaggcgaggcccgggcgcaagaaggagcgcatgaagaagatggtgcggacgctcaagggcattatccccggcggcaaccagatggacacgccggccgtgctcgacgaggccgtccggtacctcaagtctctcaaggtcgaggtcaagaagcttggcgtgcgcggctccgacaactgatcatcatcatctccaacaccggcagaacggaggaaacaaacaaacaaaaaaaaaagagaggcagctgcagcggcagcaacagcaccagcagtcagcagcagcgatcgagtgctactactgacagtacactgcatctgcatgcacgacatgtaccctactccatcatcctccatttctccatgccttgggtcggcattggcatcgccaagctagccatagctagttgatgcccttttcgcagtgccatgatctggccaaactctttttgtgcgctctacttttggctacgggctttatgctccgtccatgatgagagagggagcatgggagggggcagaggagaggcagcgatcatcatcaatgtactactagtactagctagtgctcatttgctttgggtgtactatagtagtagtggagagatgatggatatggattatggagttctagttaggcagaggagaggagagggagaagggcagcattgcaatcgcatatttgcatgctttggctttgtctgctactactcctcttcatttgttgccttgcttgcttttttcctttctgcccctgccatgtggcccccccttcccctgctggatgaattatccattgatgatcccctccttcgtt

SEQ ID NO: 27262 - DNA, 2184 bp, Oryza sativa
  ref <308>: DATABASE ACCESSION NUMBER: AK102704
  ref <309>: DATABASE ENTRY DATE: 2002-08-28
atgaagtcatgaaaccctttcgtcttctccactctgctcttctcctcctgcaaccaaatccctcgttgtctccctccccgccttcccgccaggtgtcagccatgcgggagccacgtcgccctctcctccccctccccctcccccacctcctcctcgtctctctcctctcctcctctgccgccgcaccgggagcaggagcaggagcaccgccaagaaccggcggcggcggcgtcgcgaggagcatcgccgacatggcgtggccaacaaaatgcacatggttaccctggccaacctgtgggaagagccattcatatactcttgtttccaaataccacaagatctggaaggatacaaaggaggctgtttctacaaaagatgtttccagaaaagaaccaattactggtgtgattgcattgaaggcttccatgaagtacttcgatgctgattttttcaacgattcaaaacttcgggagatggaagatggtgcaaaagaatttaatgtacctgcatttagagacaaccggaaattggtggcgttagagaatggtggattgcataacccgtctgcattggtctttaaatcatcatggagcgatgaaagcaaaatcagtgagaacaaaagctttcaatatccccatacatcttcagtacatcgccctagtaaagatgaagatattgcttttatgtcgataattgagctcggggagcttataaggacaaagcaagtcacatcgcgtgaacttactgctgtgttcttaaggagattaaagaggtatggtcctataatcgaatccgttattactatcactgatgatttagcatacaaacaagcgaaagaagctgatgacttgctggagcaaggaaaatatcttggtcccttacatggcattccgtatggccttaaggatataattgcagtaccagaatacaaaactacctggggctcaagaacttttgaaaaccaaattcttgatgtcgaagcctctgtctacaaaagattgaagtcaactggggcagtccttgtagcaaaacttgtaacaggctcgctcgcctatgatgatatatggtttggggggagaacaagaaacccctggaacattgaggagttttctactggttcatcagcagggccagcagctagcacctctgcaggaatggttccttttgcaataggttcagaaactgcaggttccataacatatcctgccgctagatgtggagtaactgctttgcgcacaacatttggaacagttgcacggacgggcgtcatgagcatttcagagagcttggataaacttggtcctttctgcagaagcgcgatagattgcgcagttgtacttgacgcaattcgcggcaaggatgccggcgatccatcatctcgtgaagttgctatcgaggatccctttcatgttgacatcagacaactcactgttggatatcttgacagtgctgagatggaggttgttcatgttctttccgctaagggtgttaagctagtgcctttcaagctgaactacaccgttcaatcggtccaatccatactgaacatcaccatggatgttgacatgcttgcgcatttcgacaactggcaacgcgagcgacacgacgacgactatgaagctcagtaccaatggccagtggagcttcgccgcgcacggttaatccccgcagtcgactatatacaggcacaacgagcacggggtaaactgatcagagaagtcagggagagcttcacggtcgatgcattcatcggcaatgtgaccgactgggagctcgtctgtcttggaaaccttgtggggatgccggtggctgtggtgccgacaggcttgaagggcatcaagaacccaccagaaggcggcacgcggagaagaaccaccgtgacgacgggcatatacgctcctcctgaccatgaccacgttgctctagctctggcaatggcgtaccagtctgtgactgaccaccacaaacaacgcccagcgatcgacgatctaggaccgggagatgacatacagcggtaagcagtggctggatgacgatgatggtgtattttcatgaaagctgaagttccagatgattgacaactgtgttaatttccttgagaaacatgagatgtaatatatatgaacttacagaatttgtctcagttgcgagtcatttgagaaagtaacaggactcatcagatgt

SEQ ID NO: 27263 - DNA, 2267 bp, Oryza sativa
  ref <308>: DATABASE ACCESSION NUMBER: AK102705
  ref <309>: DATABASE ENTRY DATE: 2002-08-28
ggttcatcttgctcgttcctcctctcgcagtcgcaggtcgcgtcgggacggcggcacctcgatctcctctctctcctggtcgcgcccggcgcctctctcctcctattcgccgtgctaatcgaagaccggcgactgctgcactttctcccgcgggcctcgctgccgctccacaccctttccctcggtttatcgcctccgcgccgcgtcgttctgcccacgccccacctgcctgcctggctgccgttctctcttcgtagcctgcgtggccttgccccttcgcctctgtgcggcttcccgtctcaacccccgctctgccggagtggtcccgcgccctccaccagatcttcgcctctgtgcctctactggattggcctggacatcgctgtaaaagctgggcggatattaggcaccacgaagatgtccatgccatcatctcgccaagctatgggagaaatcaacatcgaggcgatggcacgcccagtctccgtcgaccaccgcatcagcatcgcctactatttccgcatcgccgacaacctcctccgccaggccaacatatatagggaggagaagaatctcgtagacctttacatcatccttctgagatactcgagtttgctgtgtgagactatcccaaaacatcgtgattatcatgcattcaagctacgagaaaaggaattcttgaagaaaggcccacacaattctgataaactcttgaatgttgttaatgagcttgagactctgaagccagttgtgctacggcaaattgctgaccttaatagaggggtcacacaagaacctaatagtcaaagtggaacctctgctgcaattagtcagatggatcatcttacccaaagttcatgtttcacacagccattggttggaagccctacaggattattgaagatgccattctctggagggaagcatcaagtggaaccaacacaaagtggcagacctgatagtcagcttgtcaaatcatatggcaatctgccttatcctaaagaagaaactctatccagacattcggtactggggcctaatgggcttcatggcaaatggacggcacctgttactggtatcaggatccaatatccaagtaatgctgaactaaccaaaagtgatgtctctagtttagtaccatcaatcttgaaccaagacctcttatatggtcctagtagatcacaagattttccaacaaataaaaatgaggatatgcaatctgttttgtccctagacgatggccaattgtctttaccagtagaggaggcaacctctgtgtctcctggttttgaagaagaattttcccagttgaatatcaggcaaccttctcccccacctgtcatggcacaagtacatccacagcatagggcaatttctacatcaacagttgctgatctggggccaggaattgctagttctagcactggacgctatcagaatttgcatgtgccggtgacattaatggagtgttttctgagggttgctgaggcaaacactgcaaataatctggaaacatgtggtattcttgctggtactctgaaaaagagaactttttatgtgacaacactgataattcctaagcagagatcaacatctgattcatgtcaagctacaaatgaagaagaaatatttgaagttcaggacaaaggctcacttttcactcttggttggattcatacacatccaacacagacctgcttcctatcttccattgatcttcataatcactattcataccaggtcatgcttcctgaagcaattgcaatagttatggcacctactgatacaacaagaaagcatggtatatttcatctgacggatccaggtggtatgggtgtgatacatgattgtcaagagagtggatttcatcctcatgaggagcctctcgacggtacctctatctatgagcattgctcccatgtgtacatgaacccaaacgtgaaatttgatatggtggatctccgtgaactgtgaagcttgattccgtttggggaagttgttcacttttgacctttttctgacaaatacatgccgctgagcttatttatttgctacgttggaaggcctgttaatttgatgtaagcgtttgtaaatagctaggccattcaatttccgtgcatagggatcttgttttggaccaatgctagttctggttatggagagtggcatcacgaatgtaatatcatacatttaactggccctttttataccctacagcagaataagtatcctacagcaattcaagttctaactgaattcctaatggc

SEQ ID NO: 27264 - DNA, 2331 bp, Oryza sativa
  ref <308>: DATABASE ACCESSION NUMBER: AK102706
  ref <309>: DATABASE ENTRY DATE: 2002-08-28
gcattcttgaaaactgcagtccagttatcttgtgctaggtactctctctctctgggtgcacctgtctgacccccaaggccccaagttacttcttattgattcaacccagaaggttaggccttacattgaactttgaatttctcacttttttctgtatggaatcatgcattatttcatttcactgccccctgcatgaatatctcttatatcacaaaattgattcaattcagaaggctggccttttcatatcctacagcattgcactttgttagtacttattaggaattcactggtctgtcttttgatttagtgattgatatagtatatattgattcttgatcagggagggaatcctacagattactgaagatgggggaggtggtcagttctgctctcgttcatgagacagtgaacaaaatcatatctggcatgattgacaagtatgagcgaaaatcaagtgcgcaggaacacatggacaggttagagatggcacaaatcaagttagatcttgcacttgagacatccaagaagtggcagatcattagtgagccgttgctacgttggcagaagaagctgaaacgtgttgctgaagagtgtgatgacacaatacgcatgtgcaggcagcgtgtccaggaagaacaagaggccaaacaagtagcaagggattccttctttcctaggcgaattgcccatgccaccaagtcactgatatcgtccatcttttatggcaatatcgacgagccgactagatctaccgttcgaagattcgagtggtttgcagatggagctaatgactttctgagatctgtggagtctggagggacaccgcgtcgttacttgttcttcgaccctcttattgggcaccttcttgcaggtgaaatgctagagtacaaattggttcagggaaacaagcaacatttgttttggatacggcccaataacattgcagagaggatagaaggtatggtgttcttcgtttacaatgatggcactgcacctgaggataacttttttcttggtatgatactacagatttcagagagtacaaacatagttggcactataattaagtgcttgcagttgtttgctcctcatttcgagtctgtaactgaaactgtcaggaaagaacttactctgctacctacacaagacttctcctggataccacattctcgtttataccattgggacaaccttcacagtatagctaccgaatggttccgcccaaacccagtgtgttgcaagcatcatgatcagaaggtatgtggtagtggcaacatgaacatgatagaattaccagacttctctctagaatcagttattcaagtgaatttgcagtgccatgttgcactgcctgggttcagagaacggggaacaattgtcgagggcaaatcttctctcaaagaatatctgcgtggaccgcatctgaatgttctacttgcctatacgcctcacggatcttcagaaagcctattcccatcagtcgagggttctgtgatagaggtgattaatgctaatgagcagcattgcttgcatacaaatattgccttgcaacaaatggaagagatcatgttgccgagggccgtagattattttcatcagaatgcgaaagcgacagtgtatcagatgctttggaagcctaaacatggtgttgcatatcttcatgctgtgaaggcgaccgtgaacattctgagcacacggaggaccattcgaggagctaggaaatcaaagctgttgcgacaacaggatcataagatgcatcatcgcacagatggaatctctgacttcctcagcctttgggctgcgcacgcacctgtccagcttcagggctcaatccttgattgggttcagaaagagaaggaagtacaattagcagctcctctactgcgcttgaaattttagatgatatagggctcgtttagtagagctccaactcctaaatttaactccaggagttgagtctggagtggggttatggagccgtttaaacccagctccacctctttggttcattttatgagagagttccattcagctccactcccattttgggtggagctaaaactgtttggctgagctctagctctaggagaggtggagctagtgctagtcaggaaatcagagaaacgtgaagtacaaatgtaatattttaactgagaaaagtgacttgtagggagataatatctaagtcattcggagttaactgatatgaaatgtgtgctacataaaaatgaaaactgaaaatgtcacctagtggtctgctctttcttgacctctgtaactgcttctccttctaatatatccggcagagctcctgccgtcttttgcttc

SEQ ID NO: 27265 - DNA, 2141 bp, Oryza sativa
  ref <308>: DATABASE ACCESSION NUMBER: AK102707
  ref <309>: DATABASE ENTRY DATE: 2002-08-28
gacctcacctcactcccgatcagatccgagccctaaccctagcctctcgccggcggcggcggcggcggcgatggcgtgcctcgcgatctccctccagccggtgaacggcccggacatcctcctccagacccgatcctggttccccgtctcccgcgccctcgccgccgtctcctccttccgcctcgcccgcctccacctcgcccgcgggaagcagcagcagttgtcatcgtcgtcgtcggccgccgcggcggcggcgacgctcgaggccatcggcgacgacccgctcgccgccgggtcggggcagctcgtggtcggggtggagtcgcagtaccgcgtcgtgtaccgcctagtcaactccatctacgtgctcggcgtcaccacctcctccgaccacgcctcccccgccgtccacgccttcgccgtcgccgacgccgtcaaccaggccgtctccgtcgtcgtcgccgcgtgccgcggcgtcgacgtcacgccggagaaggtgcaccgcaagtacccggaggtctacctcgccctcgacctcgtcctccagggcgtcggctccgtccgcctctcccagatcctcgccaccatccatggcgacaacctcgctcgcatggtgaattcatcccctgacgccgaggcgaaagctcgtggcgctgatccctggcccgccgtcgagcacctcgcccacgatcgccatgccgctcgcgatggcttcacgggcgcctcgttcgagctcccccaggagacccttgctgccggtgacgagttctccgcgtctaacattgcgccggcggcttctgcggctactggggatgagcctccaccggaggaggcagctcccgtggagaaggacccgtttgcagccagtgaactggttaacaattctgaggaggcgttggttggtgggttcaagaagaacaaggagaccgccattgtggttgctgatcccgcggctgcgcttgctgggttggaggtcacgaccttgccaccagctgaggcgactaagccaacatttattggagttgaagggtttgagggtgactatggtggaattgagtttggcaatgaggaggcttcactggccgaggcatttgaagggttcaatgcgccgtttgggggtggattggatgcttcagagtttgttaccacaacaaagaaggaccataaggataagagcatcactggtcttgagctgctagccactagtgctggacagggaccaaatgcacctggtggtaccccgctggagaacttgttggtgacaaagagcacagagatgacagcccctgagctatacatcgtggaggaggtcaatgcagaatttaaggagtctattcttgcacgggttggtttgaagggtacaatctttctgcgaacgttgccaccaaagaaggcggctggtaaggagacagagttctcatttcgtcttgagggcacatctggaatgaagaaggccgcgttgcagagcactgtgttgagcaacctcgagaatgggatgttccatgtccggacgccatcgaaggaggaacccatccccatcatgaagtacagctttctgcccaagcactcacctctccctttgaggatgcgccttgtgaagcgacatagcggaacattgctctcagtgatgattcaatacgcatcaaacccaatgttgccacagccgctgagcaatgttacgttcattgttaagcttcctgtggacccaactctgctaaatgtttcacccaaggctgtgctgaatcgggcagagagggagctcaggtggcacatcccagacattcccctgaaaggacctgctggacgtttgagggctcggatgcctgtagatcaggactcaaaggatggtgagctagaggttgttgggatggtgaagtttgcttaccaagggccatttacattgtctggcatcaaactatgcccagccactgatggcacggctcagtttaatgaggctggccacaccttctccagtgggagttatctgtgcatctaattggtaccttctttgtattgtagttgttactttacccttgatttgttcggtttgcttctaaagcaggttgtgaaattcctattgtatgtagtgacgcttgtttgttttttgaggctggaaattacatcatgtttttgatttgtct

SEQ ID NO: 27266 - DNA, 1462 bp, Oryza sativa
  ref <308>: DATABASE ACCESSION NUMBER: AK102708
  ref <309>: DATABASE ENTRY DATE: 2002-08-28
ggcggattccccaaccctaaaccgccggcggtttctgcggcggcggcggcggcggcgcgtcgagtcggcggagtctccggatcggatcgggttcgtcgctgatcgaggagagatcgcgtcgccgtcgtctcgggggagaggagcaggatggacggggagatgttcgggagtggccactggggtggttccttcccctacgcctccattcccaaggagagccagttcgtgtttgatgccaaggcctcgccgctgcagctgcagctcttcgggagcgccgcagttcctgcggtaggaagtactggttattataactacattgcaaacaaccacctctctgctatgaatcaagaaagaaatacaaacaacgatgttggtcatgaaaagcaactcaatcttcagatgtccctgaactactttcctgttgaaaatcttgatcggttagcacgtattggtaatccaagtgctgtatcaactgggctaagactgtcctatgagaacaatgagcacacttcaatcacatctggcagtggtaacatgtcatcattgcctatcatggcatcctttgttgatgaagtgatggctgaattagacaaagaaaacaaagagttcaactgttatttcggacttcaggtggaacaattggttaagtgcatgaaagatgtaaagcagaggcagatggttgaatttcttgcatcccttgaacgaggagtaggaaagaagctgaaggagaaagaactcgaggtggaggccatgaacaggaagagcaaggaactgaacgaacagatcaggcaggttgcattggaagtccagtcatggcagtcggtagcactgcacaaccagtctgtcgctaacagcatgaaaagcaagctcatgcagatggtagcccatagcagcaatctcaccagggaaggctctggcgacagcgaagtggacaacacagcttccagtcagaatgtcaatgctgtgcctggggttttcttccagtcaggcctcctcggcatcaacagcatggctgatggtgggctgggagcatgcaggttgtgcagaatgaaggaggcagcggtgctggtgatgccgtgtcgacacctctgcttgtgtgctgattgcgagaaaaatgctgacgtgtgccctgtctgccgcttccccaagagttgcagcgttgagatcaacatgtcatagctagcaacagccttataatcatcagcttagacagtggtacactgaagccgtatatacaaagctaaatctctctgcccctcccccccttccagttgtcattcttacatggtgtgtagatttgttgattgggactatggaagctatggtcctccagagtctcttgataaccatatatatagttttagaagctgttacatgtcacatccatatcagaaaaaaggttatcatcctgccaacgttggagtggcaattacaatgataaccatgtttcctggttgcaccg

SEQ ID NO: 27267 - DNA, 2099 bp, Oryza sativa
  ref <308>: DATABASE ACCESSION NUMBER: AK102709
  ref <309>: DATABASE ENTRY DATE: 2002-08-28
gtctctcatctctcgtcgttttctctctcctcgatcgagggcacgcgacgcgccatggcgtcggcggcggaggcggtggaggagctcacgaggctgtaccgggagctcccgccgcgccccgccgtcgaggaggtggaggcggcggaggccgtgctggcctcggccgacgcggaggaggcggcgcgcctcgatgaggtggcgcgggaggaggcctcggcctcagcgtcctcgtcggcggcggcgccggggcgggccgacggggagctcctcgccgtgctgcgggaggccaggcgcaacgccgtgcggctccgcgcgctgcagcagcggaaggaggccgcgtacgtcgtcgagctcgagaggcgcttcaaggtgttcgacgatttgatccagagggcgtcgcgggtggtctcctcctcctccgacgccgccgaagcgggagggggaaccaccggcgatggatacgttggtgttggtgcggacagcgtggacctggagatggagctgaggaagaaggaggcggcggttgcggccgcggccgccgtcgcggagatggagcgcggaagcaagggtctcgctgccctgggcttggagtccaagcccatctcctcgctacgccgtgatgtctctgcaggtactgacatggaaaaattgagccttatccaagtggcaagcctgatagagtcatcagcaaagaaagggatcacagaactcagcctccgggggaaactggtcgaccagatcgagtggctccctgtttcactcggcaaattgcaagatgttaccgagcttgatctttccgagaataggatcatggcactcccatcaacaattggcagccttagatatttgacaaagcttgacctacactcaaatcagctgatcaatctgcccgacgcgtttggggaactctccaacctaattgatcttgacctgcatgccaaccagcttaagtctcttccttcatcatttggaaatctcacgagcctagcaaaccttgacctgagctcaaatatgttgaaggctcttccagattgtttaggaaaattggcaaacttgagaagattaattgttgagacaaatgagcttgaggagctaccctatactattggatcttgcacatctcttgtggagcttaggttggatttcaatcagttaaaagcccttccagaggccattgggaagttggagaagctggaaatactgacattgcactataacagaatcaaaggattgcctacaacagtgggttcactttccagattgagagagctggatgtcagttttaatgaggttgaagtaatccctgagaacatttgctttgcgacaagtcttgtgaagttgaatctcagcaggaattttgcagacttaagagcactgccgaaatcaataggaaatcttgagatgctagaggagctggacataagcagtaaccagatacgggtactgccagattcgttcaggtgtctttcgaggctacgtgtatttcatgctgatgagactccacttgaatttccaccaagagaagttgtaaagttaggggctcaggctgtggtcaagtatatgaatgatttgaatgctgcaagaggaacaaaccagaagaaaacagatcggggaagcttctggacctggctcttctcgctgtttggttgttgcaaaaagaaccaagaagtgggattgccagtataactgaagcatttcatcatctgtatgtgtgttgtgaattactcaggaagagtcaagagatacaaggaaggtgaaactattcagaaagcaaaaaaaccagctgcgcagattagtccctgaagctccataaggtacaccgcaatatatttttcaaggccgctacaccatcctgaaaatattgataatgtttcaaaataaacttcatcatattgctatgctccaagacacttgtagaaatacaaacatggttctctacagacattttatttacttatgcaaacaacaaatcttagttctgttcagcaagtctattgcatcagaatttgacctattgggtctaatggttttgttgtaaaactatattaatttgttactgcatcaaacatgtactcaaaggtgaaggttgagtttcgttt

SEQ ID NO: 27268 - DNA, 3208 bp, Oryza sativa
  ref <308>: DATABASE ACCESSION NUMBER: AK102710
  ref <309>: DATABASE ENTRY DATE: 2002-08-28
ggtggccccttcgcgtcgagcccaagcccttcacttttccttgaacccacacacaatggcgacgcccatggaggaggacttgccgggggcggaggcggaggcggcggggcccgcgccgccgcccgccgcagccaccgggggcgacggcgacggcgagaatcccgccccggctcccgcttccccgttctcggactccgattcggactccgacgatggaggggagggcggggacgccgccgacgagctccgcatccaggccctggagcaagctctccaggagcagcctctcgactacgagtcacacgtccagtatatacagtgtttgaggaagtcgggtaagatcgagaagcttcgtgcagcaagggaagagatgaacaagtatttcccactcacacctaagatgtggcaggaatggacgaaagatgaggcttcattgaggcctgaatcttttgaggatattgaaaagctctatgaacgtggagtgcaggaatacttgtctgttcggctatggcgcgattaccttgattttgttgaagagaatgataaatcagtgtcccaatgttcaccatctggcctcacaaaaatgaggaatttgttcgaacgtgctattactgcagggggattgcatgtgacagatggtagcaagctatgggaagcatacagggaatatgaaatggccattctaaccatcattgatgacgatgacgaggaaaaggcaaagcaagtacagcgcatacgtgttctctttcaccgccagttatctgttcctctggttgacatggaatcaatacttgctgagtataagagctgggaagccgagcaaggtaatgcaaatgacccaacctccaattttgatggtgttccctcaaatgttgtagcagcctacaaaaaggccactgagatgtacaatgtgcggaaacaatatgaggatcaactgagtaatgcggatgcatctgatgatgacaaattggaggagtttctgaaatacatcaaatttgaggagtcttcaggtgaccctgctcgtgttcaagttttgtatgaacgagctgttgcagagcttcctgtttcaactgatctatggatgggatacacgaggttacctggacaaaaccctgaaggtacctgctgttctcaaaagtgtttatcagagggccacaagaaactgtacttggatcagtgaactatgggttcgttatttgttttcattggaacccattcgtgcatcagaagaagaagttgcggcatgtctttgagcaagctctccagtgttcttttccaagcataaaagagtatctcgaaatttatcttactcgagttgatagtttaagacggaggatggcagagccgcttggatttccaactgatcaggcaaacattcatggatgctactgagtttctttcaccccaaatgggaacagaggatttattgcttttacatgcatactgggccaaattagagcgtactcttggaaatgatctagctgcagctcgtggtgtttgggaaaatactctcaagaaaagtggttctgttttggaagtctggcagcactacattgcaatggagatagaaaccgagcatattcatgaggctaggtcactttataagcgctgttataccaaaaggttttctgggtctggatcagaggagatatgccatgcgtggataagatttgaaagggagtgtggcacgttagaagattatgaccttgctgtaaaaaaggttaaccctcgtttgaaggagcttatgatgttcaaggcacagcaggaggttaaggttgacactcatgttgtccccaaagaaactacaggaagtgatttctctcagaaaagaaaatcaagcaaaatccccaccaaacagcagcctcctgctaagaaaaagaaagacaacccaccaaaaagtgctgtgctatctgatgatcatggatcaaaggaacaaattagcaccggtcatgtaaaaactggagaggtctcaggggagaagactcaggcatctatggaagtgaatctggtggacggcagccggagagaaaatacagcttcaaaagaatcaaagtcgaacttctacagtgacaaatgcactgcttacatgtcaaacatagacttgacagcaaacgaagagcacatccggcgtttctttcctgatattggtggtgtgacagcaataaggttgctgagggacaagttcaccaaaaaatcaagggggattgcatatgtggatttttcagacaatgaacatcttgaggcagcaattagaaaaaacaaacataaactgcttgcaaagaaagtaagtgtggctcgttcagatccaagcaagggcaagaaaaaccgtgaagcaggatctttctccaaagaccaagctactagtggcgatcgtggtgaaacggcagaatttgccaataggccagacaaggaaattcccaaagataaacccacaatcacagggaagaacacctttgctgcaccacgatctgtggttaaacctcttggatggacacaaaaggatgaaaaatcagatgtgggcgcagaagagttaaaatcaaatgaggagttcagaaaccttttacttaagaagtgatgctgataggtgtgtggatctccatgttgccatcaaactctgatttctgtaatgtacttttctggtggcttcatgcatcatcttcggtgaacagaaaatcagtgaccttttgggctcctcaaattgaaatctatccatccagctgcaaaagtataatcagcacaggagaatccagacatcattagcaaacttcttagaaaccttcttttttttctagtttgaaggagggaagaattttctgaaagtcgtgtaggacttgtagtttgcagggaaacggtgtatataactcatgtggctgccttaaaactgagctcccgtgctcctttcgctttcgtaagtagttatgctcgtttctcaggttttgtactgccaagaaatttatgatctcccgtgttaaaaaggataacggatggttagagagtgcagcttacgtatgtcggatgccaatgtactgactgtaagctgagcaattattcatcacaacagtacaccggtttccagtatttattgttcgaatgagctcgcattttttagccgcctcagaaaatattttgggacgaatattttgtgatgaataatacaccagtattatattctagtgcggagggaaatttaaatgttgtgtttaggatg

SEQ ID NO: 27269 - DNA, 2461 bp, Oryza sativa
  ref <308>: DATABASE ACCESSION NUMBER: AK102711
  ref <309>: DATABASE ENTRY DATE: 2002-08-28
gaagggttttggaattagaagccgccgttgcgtgggagagcaaagtggaagcagccgaaaccgaaactagccgccgccgccgccttcgcctccgccgcgccgcgccgcaccactcgcccccaaggtccctaggggtttcccgcgcgcggagtgtggggaggaggaggaggaggaggaggaggaggaggcgggggggatctctccggcggcgaggatgaccggcggcggcgcggggggaggaggaggaggagggaaggggggcgcggcggcgggccccgtcccggcggcgtcgaggaagctggtgcagagcctgaaggagatcgtgaaccgcccggaggcggagatctacgcggcgctgcgcgattgcggcatggaccccgacgaggcggtcagccgcctcctctcccaagatacttttcaagaggtaaagagcaagcgcgataagaaaaaagaggttaaagagattcctgagccaagatctcgagcggcaagtaatgctgccagtcgaggtgtaagaggcggtgcagatcgaggcgggcgaaacagttcttttcactctagctccattgacaatgtggcttcaaggtcaatctcagggcctggtatgacatcaaccaattccactcagaagcaaacaattccaagttccttggtaaacaaaagtgtggttgctgatggaccgtcggtacctgcacaatcatcatctgggtttcagcacggttggtctgggacaccaggtcagttgtcaatggccgatattgtgaaaatgggcaggcctcaggtaaagcagtcctctagcaagcctgcggttactgcagacaaaggatatactggacaatacccatctttgcccagtactgtaaaccagaatttgaaacaatctgctagcacagtttcaccaacaaatcctgaccaggggttacattctgctcaagattctattcatcccaaggatcacaaccactcagcagctgtcaacaagcaggcatatgataatgattggcttccacaggacgagccaccaccaggaaatcaatcagccttgcctgagacatccggtgaccaatcattatatgagtcatcgctacagtcatctacactggttgctggtgtgattaacccccatgaaaattctcatttggatgagaacagatcagctgcattttcttccgagagacacttggaacatcatggaggcgattctgaatatgatgatggactgttgcaagaatcgagtacctatctgcctcagaagaattctcatgcagaagatgaagttgagggctccaattctgatgtagcgttagccactgaaaacttccagggtctaagcctacataatgaagagttagttccaacaaaattagctgaagataaccctgcagttataattcctgatcacctgcaagttaccggctcagactgtgtcactttgagctttggcagttttgaatctggagcattttctgggcttctccctgttccatcaaggagcgctgatgataacaatgtggagttgcctgttatagaggaatctgtacctctagatcaaattgattcaagagatcaagactattatgatagtgccgcagttaattcgtcaggaaatgagaaccttgatactatcataggaactaacatggagaacattgatgtaccttctgtttcacagcctgatgtcctgagacaggaagtgcttgatcattccggtcttcaatataacctaccatctgattcaagtgctgcatatgcaaacactacacagccaagtacaatggagtcctcacaaggaaacaaccaggcgcacactctttcccatctttcaaacttactgcaagcaaattcattacacaacagcctattggggtcaaacattgcacctcttcgggacttggacttcagtttatcacctttgctagcagcacaatcaatgacaaaatataactcagctgcaccaactactactggaccagcaatctccatgcaagagactctgaagccaggagttttctccaacgctcaatctacccaaaatcttccaagtactagtatagcaacggggcctcctctccctcagcaattagtccacccttactctcagcctactgtaccactggcgccttttgcgaatatgattggttatccgtatttggcacagaactaccctgctgcttacctaccatcagctgccttccagcaagcatactcgagtaatggaccattccatcagtctgctgctgctgctgtaccaggagctatgaagtacaatatgaatgtgccgcaattcaagaacaacctatggctacaagcttacaacagcaaccttcttcagtgatctctggttatggaggatttggaagctctagtaatcttcctggaaatttcactcttaatcagaatgctgcctctgcatcaacaaatcttgggtttgacgaagcattgagcacgccatacaaagatc

SEQ ID NO: 27270 - DNA, 1562 bp, Oryza sativa
  ref <308>: DATABASE ACCESSION NUMBER: AK102712
  ref <309>: DATABASE ENTRY DATE: 2002-08-28
gtgccctatctagtgacacccataaaaaccagtgtgtgtgattagtaccgtaccggcagtctagtgagatcgggtaccacgagatatacttcttcttgtcgcgctgcttaccgttgatgcgcttagccgccgcctgccatggcctccgccgtcgcgagtaacttgcctgcagctgcgcccgcggctgtcatgccgttcggtggatggcatggtccgcgtgtctcgttcagccgcgacgccgccggggctgaggaggctgccgcggtggtcgtgtgttcttcgcccctggccgccgcggcggcggtggcgacgacgacgacgccggagccggcgatatccaaggacttcatcgacttcgagttcagcctcgggggctccgccaccatgctcccggcggacgagctctttgccgacgggaagctgctcccgcttcggaaggcggcggctgtgccggagatggatgcggcggcgccacggccgccgcagcctgaggcaatgccggcgccttcggagccgatgaagccactacgggcggctaccgccgcggttgacgccgccgacccgtacgttttctctcctaaggcgcccagctgctcgagccggtggcggaagttgctcgggctgaagagagcggcagcgcagagcccgaagccatcgccgtcgtctgcgcccgcgagaacccccgggagagcgatgaactcgacggcggcgaggtcgctgaagctgctgctccaacggaacaacggccgctcgtccggggcctccgcgtcggagctcgcctctgcgccgctcctccgcgacagctccgactcggaggcgtctctctccctcgcctcatcccgcttctccctctcgtcgtcgtcgtcttcctccggccacgaccacgacgacatcccgcgcctctccctcgactccgccgctgaccccaacccgccccgcatccgcctcgtccgttcctcccaccgccactccacctcctcatcctcctcatcccgcgccggccgaagccccgcgcgccgccgcccctccccgccgccgccgccgcgctgcctctccgtcgactccccgcgcatgaactcctccggcaagatcgtgttccagggcctggagcgcagctccagctcaccgtgcaccctccacgccgcggcgaagccacgctcccgcgccgtcgaccggtcatactcctccggcgtccgcgtggcgccggtggtgctgaacgtgccggtgtgctcgcggccggtgttcgggttcttcaaggacaagaaggacgcggcggcgaaggacgccatggcggcgaggacgaggtcgtcgctggggcggaagacgacggcggcgccgcaagggtggagcggcgagctggggagatcttgtgggtaatttgactcttgtttgaccggttagttgctgttgggatttgtcttgtttgctgctgccggtatgatgagtgcacggaaagggaaagggggaggccatgatgagatgatagtttggttttaactgattttgtttgttctttggagacgcctcatggaaggtctaatcaattgactgttctttttttc

SEQ ID NO: 27271 - DNA, 874 bp, Oryza sativa
  ref <308>: DATABASE ACCESSION NUMBER: AK102713
  ref <309>: DATABASE ENTRY DATE: 2002-08-28
ggagttgttgttgttgaggaggaagtgaagaagaggcagtagaaagaagtagcagtagcagaagagaagggaggaagggaattggatagatggcggggacgcggcgtgcggaggaggagtacgactacctgttcaaggtggttctcatcggcgactccggcgtcggcaagtccaacctcctctcccgtttcacccgcaacgagttctgcctcgagtccaagtccaccatcggcgtcgagttcgccacccgcaccctccatgtggagggcaagataatcaaggcgcagatctgggacaccgcaggtcaagagcgatacagagctatcaccagcgcttactaccgtggagctctaggagcagtcctggtctacgacgtgagcaagcccacaacctttgacaacatcagccggtggctcaaggagctccgcgaccacgctgatgcaaacatcagaatcatgctcgtcggcaacaagactgatctgaagcaccttcgggccgtcgcgacagacgatgcgcacaagtttgctgaggcagaagggctgtcctacattgagacttcagctcttgaggccacaaatgtggaggaggcattccagctgattctcggtgacatttacagggccatcagcaagaagcccgtggcatcagatgaaggcggggcaggtgccgctggaggtgtcaaagaagggaagacgatcaatgtcgctgccggtgatgccaatagtgaaaagaagcaatgctgctcaacttagaacgaatccttcagtttcagatgtcatttcgtgtaccttgtgtggtgcttgtgattgttctttctttttaagtttattaaagcttcgttgattcattttgtcagataaatatttaccttgct

SEQ ID NO: 27272 - DNA, 1564 bp, Oryza sativa
  ref <308>: DATABASE ACCESSION NUMBER: AK102714
  ref <309>: DATABASE ENTRY DATE: 2002-08-28
acctttgctctgtttcctctgcctgcgccatggcagcaccaggaagcagcctcgcgccgacggcctcaaggcctacccgatcgtcggcatactgccacacttcgtcaggaaccagcaccgcctcctcgagtggtcggccggcgtcgtggcgcgctgccccacgcacaccatgtccttcaacttcaagggcttcggcctcatcgccggcgccatcaccggcaacccggccaacgtcgaacacatcgtcaagaccaacttccagaactactccaagggggagtacgtggtgtcagtcatggaggacttcctcggccacggcatcttcaactccgacggcgaccagtggctgtggcagcggaaggccgccagctacgagttcaacaagcgctcgctgaggaacttcgtggtcgacaccgtcaggtccgaggtcgtcgataggctgctgccgctgctcacgcgggcggagcgcgacggccggacgctggacgagcaggacgtgctcgagcgcttcgcgttcgacaacgtctgctgcgtcgccttcgacgaggacccggcgtgcctcaccgaggaggggatggggacgaacgcgcggaccgagttcctgcgcgccttcaacgacgcgcagaacatcctcatggcgcggttcatgtcgccggtcgagtgggcatggcgcgccaagaggctgctcgacttggagccggagaggcggatgcgggaggcgctcgccacgatccatggctacgccgacaggatcgtccgcgagcggagggagaggggcgcggcggggctggcgcgcaaggacgacttcctgtcgcgcttcgccgcgaccggcaagcacagcgacgagagcctccgcgacgtggcaccaacttcgtcctcgccgggcgcgacacgacgtcgtcggcgctgacctggttcttctggctggtgtccggccagccggacgtggaggacaggatcgcgcgcgagatccgcgcggtgcgcgcgtcgagcgggagcacggacgcggcggcgttcagctttgacgagctgcgcgagatgcactacctgcacgcggccatcacggaggcgatgcggctgtacccgcccgtggccatggactcgcactgctgccagaacgacgacgtcttgccggacggcacgttcgtcggcaaaggatggcaggtcacctacagcgcgtacgccatggcgcgcttggaggagttatggggcgcggactgcgaggagttcaggccggagcggtggctcgacgaggacggcgtgttccggccggagagcccgttcaagtacccggtgttccacggcgggccgaggatgtgcctcggcaaggagatggcatacatacagatgaagtccatcgcggcgtgcgtgttcgagaggttcagcttcaggttcgtcggcggcgagggacggccagggcttgtgttctcggtgaccttgaggatggaaggcggcttgccgatgcgagtgaagaagaggagggattcagtttgttagaatgtaaatgttctctttgctacttgttgcctttcatttattccaggttgagttctggatattatcc

SEQ ID NO: 27273 - DNA, 3193 bp, Oryza sativa
  ref <308>: DATABASE ACCESSION NUMBER: AK102715
  ref <309>: DATABASE ENTRY DATE: 2002-08-28
gactgcgtgcgtgcccatcgcgtgtgtcgcgttgcgtttgcttgcgcggaacggcgggagagatggggcgtccacaccgtcgtcgggactgtgggcacggcgcggcacaccgagagaggtgccgcatccaatccaaacaactgcactccactgtccccactcccccggcgcggcgtctccctccccacgctattttataccaccaccaccaccaccgcgtggtacttgctcatacgccgtatcgaccaccaccctcgacggcggccatggcgggcgcctcctcctacttctcgttgcggaggctactcctcctgctgctgccgctggtaccgttgctcggcgccaccaccgccgccgcagcgggcgccaactcgagcgtcacgtatgaccaccgctccctcatcatctccggccgccgccgcctcctcatctccacctccatccactacccccgcagcgtccccgagatgtggccgaagctggtggccgaggccaaggacggcggcgccgactgcgtcgagacctacgtgttctggaacggccacgagcccgcccagggccagtactacttcgaggagcggttcgatttggtgcgattcgcgaagatcgtcaaggacgccgggctgtacatgatcctgcgcattgggccgttcgtcgccgcagaatggaccttcgggggcgtgccggtgtggctgcattacgcgcccgggacggtgttccggacgaacaatgagccgttcaagtctcacatgaagagattcacgacgtacattgtggatatgatgaagaaagaacaattcttcgcttcgcagggtgggcacatcatcctagctcaggttgaaaatgaatacggagatatggaacaagcgtacggagctggtgccaagccatatgcaatgtgggcagctagtatggctctggctcagaatactggtgtcccttggatcatgtgccagcagtatgatgcgcctgatccagtgataaacacttgcaattcattctactgtgatcaattcaagccaaattcaccaaccaagccaaaattttggactgagaattggccaggatggttccagacctttggcgaaagtaatccccacaggccccctgaagatgttgcattttctgttgcacgtttttttgggaaaggtggcagccttcagaattactatgtgtaccatggtggaacaaatttcggtcgcactactggagggccattcattactactagctatgactatgatgcaccgatcgatgaatatggccttaggagacttccgaaatgggctcatctaagggaccttcacaaatctatcaaattgggcgagcataccctgttgtatggtaattcgtcatttgtttctctggggcctcaacaagaggctgatgtttacactgatcaatcaggaggatgtgttgcattcctttctaatgttgattcagaaaaggacaaagttgttactttccagagccggtcgtatgatcttcctgcttggtcggtcagtatcctgcctgactgcaagaatgtggcgttcaacactgcaaaggtgcgatctcaaactctgatgatggatatggtccctgcaaatttggaatcatcaaaagttgatgggtggagcattttcagagagaaatatgggatttggggtaatatcgacttagtccgaaatggatttgtagaccatattaatacaaacaaaagactctactgactacctatggtacacaacaagttttgacgtagatggaagtcatctggcaggtggcaaccatgttcttcatattgaatccaaaggccatgctgttcaggctttcctgaacaatgagcttataggtagtgcatatggtaatggctcaaaatcaaatttcagcgtggaaatgcccgtcaatttgagggctgggaagaacaaactttccctattgagtatgactgttggtttgcaaaatggaggacccatgtacgaatgggcaggagccggcattacaagtgtgaagatctcaggaatggaaaacagaataattgacttgtcttccaataaatgggaatacaagattggattggaaggggaatattatagtttgttcaaggctgataaggggaaggacataaggtggatgccacagtctgagccaccaaaaaatcaaccaatgacatggtacaaggtaaacgttgatgttccccaaggagatgatccagttggattagatatgcagtctatggggaaaggcctggcttggttgaatggaaatgccattgggaggtattggcccaggataagtcctgtcagtgacaggtgtacttccagttgtgactatagaggaacgttttctccaaataagtgcaggagaggatgtgggcagccaactcaaagatggtaccatgtcccacggtcatggtttcatccatcaggaaacacccttgtgatttttgaggagaagggaggggatcctacaaagatcacattctcaagaagaactgtggcaagtgtgtgctccttcgtgtcagagcactacccttccattgacttggaatcctgggataggaatacccaaaatgatggtagagacgcagcaaaagtacagttgtcttgccccaagggtaaaagtatctcttctgttaagttggtgagtttgggaaaccccagtggaacctgcagatcttaccaacaaggaagctgccaccatccgaactcaatatctgttgttgagaaggcctgtctgaacatgaatggctgtaccgtctccttgtcagacgagggatttggagaagatttatgccctggggtcaccaaaacacttgcgattgaggcagactgctcttaaggagtttaactcagcaatgagatccatcgctacagattcgctcatcaacttgaagcttatagtgcttggtacagtagcatactacaacaacttcgaagtgaaatcctacctagatttagattacgacctgttatgagcatgatttggcactttgtttctttgacttctcttttgctcaacaatatgtccaggtacccttgacgggtcgccattgtggatgctaaccatccacccgagcaaaggaattaattgcactgcattcccaggtttgcaatggactactgtatgattcagaaacatgaaggcatgaacgagcttctatgagcccaaaaggaatgggatataatataatatgatatattgcgatgcc

SEQ ID NO: 27274 - DNA, 923 bp, Oryza sativa
  ref <308>: DATABASE ACCESSION NUMBER: AK102716
  ref <309>: DATABASE ENTRY DATE: 2002-08-28
tggagaaggaagagaaagctctagagctcgagctgcgcggcgtgaggagatgagcggcggggtggcggcggcggtcggcggtggcgccccggaggagaacggcgcccctccgaacgtcaccatctacatcaacaacctcaacgagaagatcaagctcgaggaacttaagaaatcgctccgcgctgttttctcccagtttgggaagattcttgatgttctcgctttcaagactttgaagcataaaggccaagcctgggttgtgtttgaagatgttgcttcagcaactgaggctttgaagagcatgcaagacttccccttccataataaacctatgagaatccaatatgccaagaccaaatcggatattatagcaaaagctgatggcacctttgtacctcgagaaagaaggaagaggaacgatgagaaacctggaaagaagcagaagcgtgagcagcaccatgatgtgagtcaagttggcttaggtgtgaatgcttaccccggtgtttatggagctcctccgctctctcagctaccttttgctggcgcacagaaggtcatgatgccggagataattgtaccgaataacatcctcttcgtccaaaacctcccacatgagacgacccctatgatgcttcagatgctcttctgtcagtacccagggttcaaggaagtcagaatggttgaagcaaagcctgggattgctttcgtggagtacggcgacgaggggcaggctaccgctgccatgaaccatcttcaggggttcaaaattacgaaagataaccagatgcttatctcgtatgcgaagaagtaaatgtactgttgacttgctcgatgaatgttgtagtcccaagttttcgcataatccatagattttcattgttaggtagactacaccatgacaaccatgttaatgtactactgct

SEQ ID NO: 27275 - DNA, 2202 bp, Oryza sativa
  ref <308>: DATABASE ACCESSION NUMBER: AK102717
  ref <309>: DATABASE ENTRY DATE: 2002-08-28
gagcagagccaagaaccctcacacacacagccacactccatccccaagctcgcgggaaaagccaaagcagcagccaaagaaatccaccttttctagacaaaaattttagacgaaccgcgagactgatggccggcttccaaatccggcagccgggcgctttccctctcgattccccgctgcagatgagatgagatgagaggagaggaaatctccaggaaaatttggcaggataaatgggtagtaattgattgattggggtggttaatgccttccaagattgctcctctgctgctgtgctgctagggttgtgcgattcggcatggggaccaaaccagagaggggagggggggggggggggcatgacgacgacgacgcccccgttgctataattccttgccccgtttcgccaaatccctcgggctgttgcctcctaaccccgcaatccctcctcgccggttggtgatcaatccggctcctgatttggagtttctcttggggacccagggtggccgttccatgcccggtttgctcgtgcattaatactagccgcttcttggataggaggacaactagtagtagttcttctctcctctcgctcgctgttccttgccccattctcttggcttcttcttcttcttcttcttcttgttgtggttgtgtgttatgataagagttcttcgccgttgagatgggttgctttgggtgcttctcgccggaggtggacgacgacctcaagccatccaagcccaattaccactcttctgacgaatcatcaggcgccgacgcgaggagaaaggtcgcgccgttggcgacggatggggggaacggctacgcgcacagcttcaccttcaaggatctgtcagtggcgaccggctacttcaacgaggcgaatttcatcggagaaggtggctttgggaaggtgtacaaaggcaagatcaatgggcagatggtggcagtgaagcagctcacccgggacggcgtgcaggggaggaacgagttcttggtggaggtgctgatgctgaccgtgctcaaccatccgcatctcgtcagtttggtcggcttctgcgcgcagggtgacgagaggctgctggtgtacgagtacatgccattcggcagcttggagagccatctcttcgatgtgcctcttggcaagcagccactggactggaatacacgcatgaggatagctgttggagtggccgaagggctttcgtatttgcacaatgtggctgatccgcctataatttaccgtgacatgaaagcagctaacattctgttggatgaggactacagaccaaagctctctgatttcggactagcaaaagttggaccagtcggtgacagaactcatgtctccaccagggttatgggaacttatggctactgtgctcctgactatgtggtgagtggtaagcttaccatgaaatctgacatatacagttttggtgttctcctgttggaactgatcaccggcagaaggatctacgatgcttcaaggcctaaaccagagcagagtttactaacatggtcaagaccatttctgcatgacaagaggaaattctacaggctcgctgacccagctctgcacgggtgctatccaacatctgcactaaatcagttggttgtgatcagcatcatgtgcctccaagatcagccccacgtccgcccaatcatctctgatgtcgtaatcggcctgaaccatgtcgcaagccagccatatgtccctgagcgctcctcagtgtcgctgagttccccagcaaggtgcgggtcaccacaatatgccggcacgccatctagaaggcgaggcggcagaagagttgctcagtatgcatagcctagactatatccttgtctcaaaagaacagcaagatctcagtctggtgagacgggtagatagttgaaactgtcaaaaatgccatatagtcaaagccttcttgattcaagaaccggtctttagcaacccgattgacacagtttgctgtgagattggtgatagtttgaagctgaccatgatgactgttgttctttcatgcctttcattgttttcagttccttaattctgttgccagtgtacatagcatcatcggttgtgctctgcttgggcagcagccatcagacatgcatcagtccggcctggaagcatggggacaatgtacttaattgggattttgatcaagttatttaatcatgtacaaagctctc

SEQ ID NO: 27276 - DNA, 2159 bp, Oryza sativa
  ref <308>: DATABASE ACCESSION NUMBER: AK102718
  ref <309>: DATABASE ENTRY DATE: 2002-08-28
ggcaagcaagtccttctgctagctgcgagcctcacgtgcccattcactctctttatttattgctgattcccgatcgatcgatcgatcgatcgatcagcaggcaatagttaatcgatctcaacaactacccatcagttattcaatacaatacagccattcagacagaagcaaggtctatcgagtcagagagatcgacatctcggcgagcgagatcggtgaattgatgggtgatcatggacgccggcggcaggcggcggcgccgctgctggagaagaagggcagcaccggcaccggcgtggacgatgggtactgcattgaggggtgccccgggtgcgtcgtcgaccggcggaaggccgcgagctacggcatcccctacgggagcttcctctttgtctggattgtcacgctctgcacagctttaccaatatcatcattgttccccttcttgtacttcatgataagagacttgcatgttgcaaaaaggacagaagatattgggttctatgccggctttgtgggtgcttcgtttatgttcggtcgatgtttgacttcaactgtttggggaatagcagcagatcgtattgggaggaaaccagttgttgtgtttggcatttttgcggtggtcatatttaatacgctatttgggcttagtttcacctattggatggcaatagctacaagattccttcttggtgctttaaatggtttacttgggccaataaaggcctatgcaattgaagtttgccgacctgaacatgaagctcttgcatagtcacttgttagcacagcatggggaataggtcttatcattggtccagctattggaggctacctttcacagcctgcagagaaatttcccaatgtcttttcccctgactcactgtttgcaaggttcccatatttcttaccctgcttgtgcatatcagtctttgctgctgttgttctcataggctgcatatggatgccagagacattacacaagcataaagctgatgcaagtagatcccaaactgttgaagctttggagagccatttgattgatccaaaagaaaaggctgaccaaaatggtagtttggactgcaagaagagcttattgagaaattggcccttgatgtcctccataattctctattgtgtcttctcctttcatgatatggcttatacagagatattctctctatgggcagaaagtgacaggaagtacggtgggctgagtttgtcatctgaagatgtgggtcaagtgcttgcaatcacaggtgtcagtcttcttgtgtatcaactcttcatttatcctcgtatcaataaggttatagggcatattaaggcttctcgaattgcagctattctgtgcatacctattctctttgcatatccttatatgacatacctatcgggacctggattaacgatcatactgaacattgcgtcagttataaaaaaataatcttggtgttaccatcattacaggctgtttcatcctacaaaataatgctgtgcctcaagaccaacgaggggctgctaatggcttggcaatgacaggaatgtccttttttaaggcagtggctccagcaggggcgggcattgtgttctcgtgggcacaaaaacgccagcatgcttccttccttccaggtgatcagatggtgttctttcttttgaatctcttcgagttgcttggacttatcctcactttcaaaccctttctggccgtaccagagcagcacgatacaaattagactgttcaggtatactacagatctagattcttcagaacttcagatgttggcaatttcatgagccctgcagcccgctgtgtgaagcaaaggtataacatatgctcatctggatcccccaggagcaatagatagaagcgagagtactactctgtcccaaagaatcaaagctagggtttgattatttttgggacggaggggtaggtgccagatatgcaattgcagcatttcagcgaaaggaatatatatagttggggtaaatggtggccactgatggctaggtttttcatggccagccagcatgtataccgagtagcattctaccagtataatgaatatagtactatgtacattgtaactagtaaaactctgtaagtgacatcagcttgagaatgaaattattgctggaatcgagatcagtacattgct

SEQ ID NO: 27277 - DNA, 1143 bp, Oryza sativa
  ref <308>: DATABASE ACCESSION NUMBER: AK102719
  ref <309>: DATABASE ENTRY DATE: 2002-08-28
ggcagcttaagcctcgaagagatggctatggcaatggcggcttcgctcgcggcgcaccaccacctcgccggcggcggcctcctccccacgccacgagcgagcgggaggaacggccgcagcggcatcaccatatccatgagagcgcagagaaagcagagcggtgactctgggagtgggaagggagacggcggagacgggcgagtcagcggtcggcggcgagtgtggcgtcgccggaaactgaccaaagaggatgacatgttgcggtgcaagttggaacgtgtccctttcttagaagagaaagtgagaaaagttagggaaaatgggaagatcatatgcttggacatcaaccagctgatgttatctgaagagaatagatttgctttcacaatagaggtggctgaggaagctaactcttatcttgaaaagaacaggcatgagtatggactgaaaaaacctatactacatgtgctcagtgaccgcatgaatgaagctgggttttctcggccggaaggctacctttatccttatcctattaagcctggtccttattttattaaagaagaagggcactgaataaacctcatgctctacagaccagaaaacacaagatgggacctcttttcagaacggagcagtcctgcaggtagttttgctgcgtacactatacggtttgggaggatttggggatacctcgcatcacttccatgatcaaatgccgcctatctccagatctctgatattttgcaagaagttcaccaggcttaatgtacagtaagggcagtggatcctgtcattttgtttggacggtcttctgctttgctttacatgagtccaggactataaaaagtgaacagtgagttctgccgtgaaaaccatgtcaatgggggtagacaaccattttctcatgcatcaagctttgattaatcaaaagatccatcgggtccatgctactgttgtcttcctactgtaccgttgtaatctcaactgatttaccttggacttggctacctagtacagtagtacccagggtgagtctaagcaactatattttgcttctcttttgggtggcaaccatatcctgaatcctaacttttgagaagccaagctagaaagtcaagatattatactcctgcttgatcatcg

SEQ ID NO: 27278 - DNA, 2745 bp, Oryza sativa
  ref <308>: DATABASE ACCESSION NUMBER: AK102720
  ref <309>: DATABASE ENTRY DATE: 2002-08-28
attatttatctacatctctgtggcagatgcgatatttgctccaaaggtggagcgaatgtcgtacgctgcctcgcgcacccctcggccaaataagagcggcgggctgagggaagatgtcgttgatggagttgatagagttgctaagggtgggtgaacacccgaggcggctcacccctggctctctctcactccctaccgagggactgcccatggcgcaaaggggcaccccatgtggcggctcaaccttggcttgctcgcgcttcccgccgagggattgcccatggcgcaaaggggcacccatggcggctgatttgttgctctgcatccaatccctggagaaggctcctcacatggatggtgggcctcttctggggcctggccatggaggtcgcaccgtccataggacctgcgggcagctgctggaggggcttcgcacccaggctgtcaacgtccatacataggacctggacctgcgggcagctgctgaaggggtcctgtggatgaacgatccatggttgagcgaggctgcctccagggatgctgttagagccttttctacttcaccttgcgcatgcaagtcaacacatcttggatgcactttcttttatacaacgtgctggattctcaagtccaacgccaatccaagctcagtcatggccaattgccttgcagtgtcaagatgttgtagctattgcaaagacaggatctggaaaaactcttgggtatctacttcctggatttatgcatattaaacgcttgcaaaacaacccaaggtctggtccaacagtgctagttttggcaccgacaagggagcttgcaactcagattttggaagaagctgtgaaatttggcagatcatcaagaatttcttccacgtgtctatatggtggtgctccaaaaggcccccagctaagagatttggatagaggggtcgatgtcgttgttgctacaccaggaaggttgaatgacatcctagaaatgcgaaggataagccttaagcaagtgtcgtaccttgttctagatgaagctgaccgtatgttggacatgggatttgaaccacaaattcggaagatagtgaaagaaattcctcctcgtcggcaaaccctcatgtacactgctacttggcctaaggaagtccgacgaattgcagaggatcttcttgttcaccctgtccaggtgaccattggaagtgttgatgagcttgttgctaatagtgctattactcagaatgtggagctgatcacaccgtccgaaaagcttcgccgtctggagcaaattttgcgatcccaggattcaggttcgaaggtactaatattctgtaccactaagagaatgtgcgaccaacttgcaaggacacttactaggcaatttggagcttctgccattcatggtgataagtcccaaagtgaaagagagaaggtcctgagccattttagatctgggcgatctcctattttggttgcaacagatgttgctgcacgaggcttagacatcaaagatatcagggttgtgatcaattatgatttccccactggcattgaagattatgttcaccggattggcaggactggaagggctggtgccactggtgtggcctatacgtttttctgtgaccaggattcaaaatatgctgctgatcttattaaaactctggaaggcgcaaaccaacgtgtgcctcgtgacttggcggacatggcctctcggggtgggcgtggtggtaggaagcgtaaccggtgggcaacccgctctgataggggtggttcgcattctgaactggattctaggtatggtggaagagatggtctgtcagggtcttctggcagattggatagtagtcgcagtagtcgcaggcatgactatggtgatgatggacggtctcgcaggtctgggagaggtcgcagtaggagccgtagcagaagtgacagtgataggtatagccgaagtcctaagaggtcacgccgtcatagccgtagcaggaccaggagtcggagccgaagcaggagcaggagctacactaggaaccgtcgtgctagccgcagcaggagccgtagccctggtgctagccgtaggcatgaaagaagcgctactggctctgggtctgcactgccagactctgggcacggtgagcgcaaaagaacaccagaagctgacccatcaagaaaccatacaaaccactcagacccgaaagatgaccgacacccagaggatgggaaggtgggaaaggttgatctcgatcggtcgcctactccacaagacaagtctggcccatatagtcctgcttacaatggaaaaaccagtcgctcagtgagccctggtaatcaggtggaaggaaacaacaaagctgcggaggtttctaagaatcctgatccttcatcgccaccccatcatggtaagaccagggaggacgaagaggaaggtatgatagatgaagatggagagatagctgatgatcctcgggcaaatgcaaccgtgcagaatggcggtgataattgactctttggtcccaaaagaatttaacaaactgctgagcagccactacagatgatctgcgtgacaaagctcaaaatgttaaaaattgtctgaagctgtcttttcgtagtcaaaacttaagttatgaaactatccgtgtcgtagagagctggagattgttttgtgcctgagttgtcttataacattatatactttgtagaccctgtcgaagtagatcatgtgaagtgaagttggtagctctgttatttgtgaacc

SEQ ID NO: 27279 - DNA, 914 bp, Oryza sativa
  ref <308>: DATABASE ACCESSION NUMBER: AK102721
  ref <309>: DATABASE ENTRY DATE: 2002-08-28
ggtaccccctcgcgcctccaccacacactcccacccaggtaaggagagggaggaggaagggaacctcgaaggcggcggcggcggcggcggagatggtttccctcaagctgcagaagcggctcgccgccagcgtgctcaagtgcggcaagggcaaggtctggctcgaccccaatgaggtcaacgagatctccatggccaactcccgtcagaacatccgtaagttggtcaaggatggattcatcatcaagaagccccagaagattcactccaggtcccgagcacggagagcccatgaggctaagcagaagggacgtcactctggctatggtaagcgtaggggtacaagggaggctaggctccccaccaagatcctgtggatgaggaggatgcgtgtgctcaggcgtttgctgcgcaagtatcgtgaggccaagaagattgacaagcacatgtatcatgacatgtacatgaaggtcaagggtaacatgttcaagaacaagcgtgttcttatggaaagtatccacaagtctaaggctgagaaggcaagagagaagacactctctgaccagtttgaggctaagcgtgccaagagcaaggcaagccgtgagaggaagattgccaggagggaggagaggttggctcagggcccaagagagccagcagctcctgcagcggcagctcctgctcaaactgcagcggcacctaagaaggcaaagaagtgaacacctggcttgaagtgtggtcgtcttagtgaaaccagtggaggtgttagctgaattttgaaatacgaaccgtttggcctagtatttaagtatcttccaaagtctgataccttgaacattatgtttcatgctgctggatgtagtagatgcttatgcaaagttgttttttcaaaggttgatggtgatcttaacctt

SEQ ID NO: 27280 - DNA, 3044 bp, Oryza sativa
  ref <308>: DATABASE ACCESSION NUMBER: AK102722
  ref <309>: DATABASE ENTRY DATE: 2002-08-28
gccgctcgacgccatcaccacgcacttgagagagagagagagagagagagagagagaaaccctaagcctcgcccgctatccagccaagcaccgatggcgacggacgcgaacccggaggcggcggcgccgccgccgcagttactggtggacgagggctacgagttctgcgcgcccaagttcttcgacttcgtctgcgacgagacggaggaggaaatccgcgccgccgagcgctggttcgaggcctccgccagccacgccccttccccgttcgctccgaggatcaaggagtcgagggcggaggtcaagatcgagagcctctgcgacttcaccgacgcggagccgattccgaaggaggtagcagtggaggaggcagcaggaagcgccgccaatccctcgcagaattctgatgggaatgtgcaacagaataaggacggctccatcaaacttgtccatgaagcaaatcccagtgaaaattgtgtcactgacggcgatcataagcaccaagaaagtgatgcaatgttggagtcgccaccagcagaggaggatgagaaggaatcgccaaaatccttcgagtttgtcccttccaatgcaaaatcagatgttgcttctagcacaccgaagattcagaggcctccacccgtcaaagctgtcactacggtgcctacctgtcccaagctgacagtgaagacagaagccttcactccgaaggtgcaggcaacgaactcctccagaggtcttgcacccttgactggctcaagggcacatccatctgctttgaagcagtcgatgagcgtcaagaggagtgtgatcaaatgccctcgtgagttgctggctgggaaggccgctactgctgcgaatgaaatcgcacaagaaaatcaagctgtcaagagacagaagcttgatgatgggaggacaagacagatactgaacgtgaagacaaggaccctgcctcacaaggggagaggaggtggtctagcaggaagcaccgagatgagcctgtcggccatgaggaagcaccgtgacgattcacactctctcaaggaagtgactcactatatatcggcagcagagatggtaaagaagttcgagtctgggactagagagttggccatccctcacaacagatcgctttctcatgaggatgcagcaaccgcattacaaagaagaacaaagctgatgctaacaaggccaaaggaacctgagttccagacctcccacagggtccgtgctgtcagagtgaaaagctctgctgagctagaggaggagatgctagcccaaattccgaagttcagagcacggccgtttaaccaaaaaattgcggaggccccttcatttcctcctcttccaaggaaagctccacagcttcctgaatttaatgagtttcatcttaaaacgatggagagagctacacgacatgcagacacctgttccgaagcttcttccgtggggactatcagggtaagctcccttcacttaacctggttgctaatatcagtatgtaaattcttcttcttattagtctcctaaaaattaaaattcttggcattactgaaagtttaatcaaatcttgcagagtcagagcagtaagccactgaccttgacagcgccaaaaccaccccaacttgagacagcattacgagctagaccaccaagggtgaaaagttctcaggaattggaactagaagaattagaaaagggctcccaagttcaaggcaaagccactgaacaaaaagattctcgagagcaagggtgatattggtgtgtttccacatctaaaggctcaaccaacagcccccaaggaattccatttctctaccgatgatcgcttgggtcctcctgcagttgtggatctatttgataagctctctctttgctcagaatcttcatatcatagcaagaaagatgtgcccagattgacaataccaaaccccttcaatttacatacagatgaaagagggcatgagaaagagaggcagctagctgcacaactgctgcaaaagcaattacaggaagagaaagccaggattccgaaggctaatccttatccctacacaactgactatccagtggtacgtgcaaagtaacataccgaatattacatgtcctggttgctgaccatctcatattctgctagccttaacattttctctctcttcagataccaccgaagcctgaaccaaaaccatgcacgaggccagaaggctttcagttagagagtttggtgaggcatgagatggagcaacagaggataatggaagaaagagagaggatggagagggaagaggcccagaggagagtagtgaaggcacaccccataatgaaagaggatcccattcctcttccagagaaagagaggaagcctctcactgaagttcaaccacttacgttacatgttgatgaaagggcggtccaaagatcagaattggacaatatggtgaaggaaaaggaaataacttacaagagattgcgagaggaaaatgaattcgcacaaaagattgaggaagagaaagcgttgaagcagctcaggaggaccttggtgccacaagcacggccctctcccgaagtttgacagaccatttcgtccccagagatcaaccaagcaggtgacgaggccgaagtccccacagcttcaggtcgaccaaagaggggcaagaaggcacgccttcatcagatgatccaactctccggctcatcttgttgtcgtctatcggttacccactggctgctgctgttttctcttctgttcttgacgtcaagatcatccccaattctcgcagcgattctttctgaccaatacataaataggccgatccaatcctgttatatagtcagtcaacacagctgacggcgtgtgtatgctcctttagggttctgctgatgcttgactgcattattgtaaattcagtttgtgtgctgtgtgtgtgtgctgttcgatgaacgacaataggatgacaccctgtcagtgtcctcctcgtctgtttcgacgaatgcaagttgtattcattatttgtttatcatctctgaactatcctggagttctgtcg

SEQ ID NO: 27281 - DNA, 2613 bp, Oryza sativa
  ref <308>: DATABASE ACCESSION NUMBER: AK102723
  ref <309>: DATABASE ENTRY DATE: 2002-08-28
gctggatcccccttgcggtctcgctacctcttcctctctctcgtcggctcgtcgccggcgcgccacctccgccgccgttgaagccctcgcgttcgccgcttctctcccccaaccaacgaagccctagcgcgttcgcctcgccgcccaccggcgatgctctccggcgtcaagtttatcccccgggagcagatcggcgaggatgccctaggcggcgccggctcggcggggtccgacagctccgaggataggcggcggcggaagaagcggggcaggaaggggagggacaaggaggagaggcgggaccggaggcgccggcggaggcggagcaagtacggctcggactccgaggaggggtccgatagcggagactcgatcgaagaggaggaggagaaagggttgagccggagcaagcaccggaggaagcatcagaggcggcgccatgagttctccgatgacgacgatgatgataacgaggagtccagtggtgaatctgataagagaagaggcagtcgcaagagcaagcttggaggtgccgcaggtgatgatgatgatgaggaggaggaggatgagggaattggaggtgaggagttgagagctagtgatattgtcaggaaggagatgggcctcgaatggatgctcaagtcggcaagcagtggtcgggcggagagcagccaagctggcggggctgacaaagatgaggaggaggttgcacccgaggaggtgaagaaagccaatccaaaggaattgaatccatacctgagggataatggcagtgggtaccctgatgaatctagcccttcaaatgcaggcaaccagttgcttgcttcctctgtggttggtgatggaggtgctagctggaggctcaaagctttgaagcgtgcaaaagagcaagcagctcgtgaaggaaaacaacttgaggaggttgttggtgagagatggggctcgttaggccacttagctgcatcagtgtcagcatctagagctgccccttcgcatgctcatttacatgccattagaggcagaaaagctgggccagcaggcagctcagaagaacattccaaagaaaatccaaaggagggtcagcaaggtggagacagtggtagacgtgaatacttaaaagatgtttcctctcggcatcatgccatgagaaaacctaaacctgattctgtaccatggaaaaggaataggcagaatatttcttctgaggatcaggcacttatctcttcagcgatagcaggaatcaataaggttctctaatgatggaagctttttggaaaagattaataatcttgaaagccagactgtaaattttttgactgcagaggttgatgagctcaagtctgataagggtagctcaaagaaagcaccttcagttagcactcaaaagctaaatgcgaaccagttagcagcaaagattctgcagctccgaatgaaaggcaagcatgaagaagctgaacaactttcgcgagaaatggaggcggtgctggagaatgaggatactgctgttgaagaacctaggcatgaagtgaggagttcaaccaggaacacaataaagcctagtgcagctgatctcaggaaaagagaagaggatgctgaccggcatcttgcaaataaaattatgcacaataaacagtacaacatgtctaaaagtatagaggatgaatatgattttggtgatgcccccagtaagaaaggcaaaaggaggaacaaagatgcacatgaggagaggagaagcactcattggctcacaactcagaaagagcgctgtatgtattgcttcgagaacccatcacggccaaagcatctggttgttgctataggaaacttcacttacttgatgctgccacagcttgagcctgttgtccctgggcactgcattattctgccattgcagcatgagtctgcaacaagaacagttgatagaagtgtctgggaggagatccgcaactttaagaagtgcctcctgaaaatgttcgcgcagcaggacaaggatattgttttcatggagactgttataagcttggccaaacaacgcaggcactgcatgattgaatgcatccctatcccctccgaagtttcaaacaatgctcccatgtacttcaagaaggcaattgatgaagcggaagaagaatggacccagcatgacatgaagaaacttattccaacaaagggaaacctgcaccaagtcatcccagagaactttgcctactttcatgtagagttcgggctcgaccgtggatttgcccatgtcatagacgatgagagcaaattcagtgcaggttttgggttgaatgtcatcagagggatgctccagttgcgggaagaggacatgcacaggcgccgaaggcatgaatcgatggataatcagaaacaagctgttgctaatttcatgaaggactgggaaccctttgattggaccaaacagcttgattagatgtaaatacagtcaccagaacctctgtaagaacagccttctggaaattgtacgacgaatttttgtaggaaatgtcatgtcctgtattcatgttaacacatttgtttcttcacctgatactgaatgtagcttaaatctataatttcgaaattgacatcaaccccggccataacgccatt

SEQ ID NO: 27282 - DNA, 1685 bp, Oryza sativa
  ref <308>: DATABASE ACCESSION NUMBER: AK102724
  ref <309>: DATABASE ENTRY DATE: 2002-08-28
gatttctccctttgtaaaaaaaaaaaaacaactacagaagagagagagagagagagagagagaggggaagcgtcaacctcccgaatccatcgccgccgccgccgccgccggcgatgtctccgccggccgacaccgccgcgctcgcctccacgtccggcgccccgctcgcgcccctcgtcgccgcccagctcaacttcgtcctctcccaagccaacctccccatcagggtggggcagatctggtccggatgccgcgacggccgctacgccgatcgcttcacgctcgccatccccttctgcctcgactacgtctactgggacttcctgtacaatgcgctgtcgccgaaggtggcgccggatgtggtgttcggcccggacgacgaggggtttcagccgctagtcgatttcgatgagaccgggagtggggagaagagctgcttggcaaattgggattgccgggacacctcggccctcctctctctcatcaaagagctccgtgaattttatattgaataccaaaagaagcgggcagccgaggttgatgacgcaagactgaaatttgaaataagcacagttctgtctaaggaggggattgaagtctgcacggtatcgtccaatggtagaccagatgaggtgaaatttgctgtcccacttctggatctggaccttgccaaactggttcctggatgtccttggaaacttcctcaaaagatccatttgcaggctgtttttccaattagcagaagttactcctctgttccttctgcaccacgactcaaattagtctcaaccccagatttgaagtcatttttctcagttgatgatgttaaactccctccatgggttagatggaatgtgcatggctgagtatcttcctaacttggaagaaaatcttaaaatccaggttgtggaagcatcagcttcaattggttctagaagacgtttcattgaagcattggctcctacttttggaaggccattagaggctgatccgattttttgcagaaaagctacgattctttccatctcagggattttcacttttctggtccactttgtcattcccctccaattccctaagcatcaacctgtactgacattagagagttctcagcacttcaatgcccaggggttacctatcatgtcagctccagtaaatgactatccctggagccctagatgggatccaacagaaatggttgaacgcatctatgactttttggttgacgagtgccaaactttcaagaagttttgcagcgattctatccctcaacagaagtagctgataaggaagcatctctgttactgccggcttgctcggtctgctcgcaagttgcaacctgtattccccaacctggcaagtaaatttgtaagctcaagaagaagcctagtcaggcagtagaatccataagatttggataggtgcgcttctgtttgacaagtaaattgtgtacactagagcaaagctgggcatatgttttgttggttaaccccattgctgctggtcctagactcctaccttgtgattgctgggataaatggcaacccaattgctcctgccatgtacatacagataccgcacgtttaccaccggccgtttctttcactgtaaagtttgatgcaagtgacctctggctgctatggtttactgtacttaatgatttactagtactacattcatttcgg

SEQ ID NO: 27283 - DNA, 1284 bp, Oryza sativa
  ref <308>: DATABASE ACCESSION NUMBER: AK102725
  ref <309>: DATABASE ENTRY DATE: 2002-08-28
ggtccaccgcctcactccatccaccgcaccaccaccactaccctgcacctcgatcaattgaacgcgagcaaggaaagagagagagcgagaaagagagcggcaatggcgacgtcgcacgcggacgtggagaagggggcgaggaggaaggaggtggggaaggtgccgtcgccgctgtacccgcagcacgagggggagagggagtgggtgccgtggatcgtcccgtcgtcctcgtcgccaacatcgtcgtcttcgtcctcaccatgtacgccaacaactgccccctccacaccccgcctcgcagcggcaagtgcatcgcccgcttcctcggccgcttctccttccagcctctccacgagaacccgctcctcggcccctcctccgccacgctacagaagatgggagcacttgtgtgggacaaggtcgtgcacgagcaccagggctatcgcctcatcacctccatctggctgcatgccggtgttctgcacctggtcgccaacatgctcagcctcatcttcatcggcctgcgccttgagcagcagttcggatacgtacgaattggagcgatctacctcctgtctggcctgggcggcagcgtcctgtcctctctgttcatcagaaaccacatctcggttggtgcttcaggtgctctctttggactcctcggagccatgctctcggagcttctcaccaactggaccatttacaccaacaaggtcgcggccgtgatcaccctcctgttcgtgatcgcggtgaacctggcgctcggcatcctcccacacgtgaataacttcgcgcacatcggcgggttcctgacgggtttcctgctcggattcgtgctgctgatgcggccgcatttcggctggatggagcgctacagcctcccctccggcagcccgtgcagctccaagaagtacctcgtctaccagtggatcctgcttgccatcgccactgccctcgtcattgtcggattcgcggttggtatgaccatgctcttccgcggggagaacgccaacgacagctgccactggtgtcactacctcagctgtgtaccaacctccagatggacctgctcgaactgagaaatacaaggaggccatgaacaaattttctctgtactttttttctttttgcgtaatcctgtatgatgctgcaaacacatattctgtttatctgtagatagattaaagaaggattcttgatcgatcgatctcatactgtaggcaggctcgtcggggtcttccactcttcctatctcttgtacaattgattcattctttgtattgc

SEQ ID NO: 27284 - DNA, 938 bp, Oryza sativa
  ref <308>: DATABASE ACCESSION NUMBER: AK102726
  ref <309>: DATABASE ENTRY DATE: 2002-08-28
gatccgtttgctccaccactagtctttctctcctctcgtcgccaagcgaagcgagacagtctcgtgcgcctccggctttcctctccgacggcgacgcgccgacgtacgacgccgtggacgagcagcagcgctgtggatcgacgagcggcgatggcgaaggcgcggaagcagcagccgcagggcccgttcgccggcggggccgccgccggggagaggtcgttcctcgggttccagtaccaccaccaccaccgcggcggctccgtggcgccggcctacggcgacgacgacgacctccccgatttggcggaggctgatgtctggtacgcgccgtcgtcggaggggggcgcggatcatcgaggcggcggcggcggcggaggaggagggggagggctggaaatcggcggcggcggctggggcggagggaagcacaaggtgggcgggctgagccgggcgttcgcggacgggcggcaggtggcggcgtcggcgccggtgcaggtgcccgcgtggcccggccgctacgccgaccccgaccaggcggcgttcgcggaggaggagaagcgccgcgaggaggaggacgacgccggcgacggcgacggcgacgggtgggtgccgccgcacgtgtacctggcgcggcggcaggcgaggtcgtcggtggtggagggcgtcggacgaacactcaaggggcgcgacgcctcccgcgtccgcgacgccgtctggagccgaaccggcttcgacggctgagccagattaaaccggggagacaagccaattaggatttaatttcttctcttcttcgatttttccccctctcctaattttcttcctcttaaatttttgtgaaaaaattttgtaatatggtttaaattttgctctctcgttttatcttctcatcaagttaatgagaaaagaggaaaagcgtgtggtatgtagcatagtgc

SEQ ID NO: 27285 - DNA, 861 bp, Oryza sativa
  ref <308>: DATABASE ACCESSION NUMBER: AK102727
  ref <309>: DATABASE ENTRY DATE: 2002-08-28
gagcggctgcttcttcttcctcattccaatctccccccaatttcggttggattcgtggaggcggattggggatttggatttggattggagagaggggggagatggaccaggtgctgaacaaggtggggagctactggttcagcaagagggcgagcaaggagatcgactccatcggcgacgacatcagctcaatctctacaagcattggaacaggagctaaatggatggtgaacaagatcaaagggaagatgcagaaagcattgccagaccttctcaaggaatatgacatgccggcgggcctcttcccaagggatgctactaactatgagttcaatgaggagacaaagaagctaaccgtgtacattccttcagcttgtgatgtcgggtacaaggattcgtctgttctgcgattctttacctgtgtgactggctacctggagaagggaaagctctctgatatcgaaggcttgaagacgaaagtgcttgtttggaccaaggtgactgccatcaagactgagggatcgaaggttcatttcactgctggtgtgaagaagacccgcagccgtgacgcatatgaggtagtcagagatggtatccccatagacaagttctgagcttgtacctgccatgaaaatgtgatgtaattaattagttgacgccttctacaacaaatatcaattgtcatatctcgtgttatgacctatttaactgaactgtattgccataatattgattgtccggcccaagagtgtttctcagcaccttaaaaatttggtgcttatttggttgtgattgtgaatcttgtagacggttttatgtttacttagtttaaggccatgtttggcaccacttcaagtctcg

SEQ ID NO: 27286 - DNA, 2128 bp, Oryza sativa
  ref <308>: DATABASE ACCESSION NUMBER: AK102728
  ref <309>: DATABASE ENTRY DATE: 2002-08-28
gtggtggcctccgagtcgtcgcgcccggcctagggaaattgatctcccccgcatccccgtcccctcggcctcgactgcccacccgccgcctgcgccgatctccatctcgcgagggcgagtagcagcctgctgcttctgccgcatcctcgcaggccggctgttcagcacaagcaattcggaagttctgtctgaaactacactgaagattttggagggtccttaagcaggttttttcaaacatactgatggatggggaatcccagacgagtaaattatcatgtgagcacatgtactcttggtacttcaccagggaagaactggagaaattttccccatctaggaaagatggtattactgagataatggagtcagaaattcggcagttgtactgttcattcattcgggatgttggcattagactgaaactaccacagatgactatagcaacagcaataatgttctgccatcgcttctatctgtaccagtcccttgccaaaaacggatggcagacgattgcaacagtgtgcatatttctggcttcaaaagttgaagatacaccttgtcatctggaccaagtaattagagtggcctatggaacaatgtacaggagggacccagctacagctcgaagaatccaccagaagaccactacttgatgctatggaaaaacttgggatctctcagaaggaagtgaaacaagtagcttggaactttgtaaatgattggcttaaaacaacactgtgcctacagtataagccccaatacatagctgctggttcgctctacctggctgctaagtttcagaacgtcaagcttcctgtgcatggagggcatgtttggtggcaccaatttgatgttgccccaaaacctttggaagctgtccttcagcaaatgagggagatggttcacatgaaagcaaagctgtttgctcatcccagtccggctaagcaaaaggaagttctttttgaaggaatgctgctcatatcaaatagcccagattctgtgttgactcaatctagcttgtcagtaagcagctcgagtcctgaaattggagaccccaatgaccacctgcaggtggattcaagtcaagacatagtgcatattgaggatcgtagcaagtcatatcctgaaaggaatttatcgaatcttactgctgatatgaataatcccggtaaaacacacaataaagaaagcttggatcaggccttaaaaatcaaacatggtggactgatctcatgtaatcagcagataccattagatgcaattgcaaagattgatagcagcactgctaaatgcgtggaacagaatattggcatttgttgcagctcaagtaacacattcaatggcaaaatcttgaacccgttctcaataagtcagcgaagtggtgataaaacaaagttatgctcagagggtggatcatcgcttacagatgtggacagcaaaagcactcaatctgtcgaaccgcccactacaatttgtaaccataccagtgacagtctcaatgtggacagtttgtgctctgatcagagactggctaattccactgcaggtaccacggagaaggcatcatttgtattgcctgtccagataaaggttgatcatttgtgtgtggagcgtaaaaaggtagatgtggcacggataaaggatttgttgatgaagaggaagagacgaagagaaagacaagggcggtgcattccttcagttgacctaagtgaagaagcctggattgagagagaacttgagtctggtatagtttttaaaaaagttgaccatgttgttgcatcgtatgatttaagtgatgaaggctggattgagagagaactggaatctggaattgttattggacaaaaaaatgaccagcctgtatctttagatggtttgactgaagatgattggattgagagagagcttgagtctgggattatagttgaaccaggaccagctggtaagaagctaaagtcaaagcttctttcagagggtcatgagataatgaatagcaggtgggaaataaatggcaaatcaatgcaaaatcaagtcacatagaatatgagatatccatacagataggagcaccattgtttactcgtgttctttatttgattgaattaactatacacctcgtgtactt

SEQ ID NO: 27287 - DNA, 2015 bp, Oryza sativa
  ref <308>: DATABASE ACCESSION NUMBER: AK102729
  ref <309>: DATABASE ENTRY DATE: 2002-08-28
gaccacacacacccacactggcagcagctcatacacatagctagctcagctgagacacacacacacacagtgagtagttcagctcaaagctagcatcagcagcagagctaattaacaaacatggcgtccgggagcagcggcggcggctacgcggacgagaaggggccgggggcggcgacgatgcaggcgctggggctgcagcagcagcacggcggcggcggagaggtggaagaggagtcgtcggagatgggggagaagacggcggcgaggacgcggctgtcggggctgctgtggcacggggggtcggcgtacgacgcgtggttcagctgcgcgtcgaaccaggtggcgcaggtgctgctgacgctgccctactcgttcgcgcagctgggcatggccagcggcctcctcttccagctcttctacggcctcctcggcagctggaccgcctacctcatcagcatcctctacctcgagtaccgcacccgcaaggagcgcgacaaggtcgacttccgcaaccacgtcatccagtggtttgaggtgctggatgggctactggggaggcactggaggaatgtgggactggccttcaactgcacgtttttgctgttcgggtcggtgatccaactgatcgggtgtgccagcaacatctactacatcaacgaccatctggacaagcggacatggacgtacatcttcggcgcctgctgcgccaccaccgtcttcatcccgtcattccacaactaccgcatttggtccttcctcggcctcctcatgaccacctacaccgcctggtacatcgccgtcgcctccctcatccacggacaggtggagggtgtggcgcactctgggcccacaagcatcgtgctctacttcacgggggccaccaacatcctctacaccttcgggggccacgctgtcaccgtggagataatgcacgcgatgtggcggccgcagaagttcaaggcgatctacctgctggcgacggtgtacgtgctgacgctgacgctgccgtcggcgtcggcggcgtactgggcgttcggggacgcgctgctgacgcactcgaacgcgctggcgctgctgccgcggacgccgtggcgcgacgccgcggtggtgctcatgctcatccaccagttcatcaccttcggcttcgcctgcaccccgctctacttcgtctgggagaagctcgtcggcctccacggctgcccctccctctgcaagcgcgccgccgcccgcctccccgtcgtcctccccatctggttcctcgccatcatcttccccttcttcggccccatcaactccgccgtcggctccctcctcgtcagcttcaccgtctacatcatcccctccctcgcctacatggtcaccttccgctccccgcaatcccgccagaacgcggtggagcggccgccgaggttcgccggaggatggacgggggcgtacgtgataaactcgttcgtggtggcgtgggtgctggtggtcggcttcggcttcggcgggtgggcgagcatcaccaacttcgtccaccaggtcgacaccttcggcctcttcgccaagtgctaccagtgcccgcctcaccccgccgccgccgccctctcgccgccgggtgccatcgctccggcgccggcctcgatgctgccgccgttcaactccaccgccgccggcatctttgccgctccggtgccgtctcctgctccggctccggcaccgatgcatttcgtccttggtcaccaccaccatcaccggcaccaccgccacggcctctagctaattaatcgagatcaatcaagatcatgattatcagaggttgggtttgcattattgcactagtttttagcgagctactagctagttgatcatcactgcaagattgttaattagcgctagtaattagtaaaagtaagcctcttttcctaatcctattgtatgctttgcttctttcttcttcttctggttactgagagagagtgagagtgagaatgtttggtggtggggtatgcatgtcagagacacgtttc

SEQ ID NO: 27288 - DNA, 2834 bp, Oryza sativa
  ref <308>: DATABASE ACCESSION NUMBER: AK102730
  ref <309>: DATABASE ENTRY DATE: 2002-08-28
ggcggtagctgctctgcttcttctccatgcccatggtcgactttcactgagagtggtgtgctacaaacagtaaacagttggtggcacacggccagccagtgtgagactgagagaaggagctgatcgagatctagtacgtacgtagcaatatggtaggaggaggtgggtacaggcagaagctgatccaggtatggaacgattggcaggtgagcgtgctggtgctgctcagcctcaccctgcaactcctcttcctgagcacggcgggcgcacggagacgggcgcagccgagctgggggaagaaaacctacttctgggctctctacatcggctccaggttcatcaccacctactccctcggcatcctctcccgcgcctccacgggcgacgccaacgccgacatccaggcgttctgggcgtccctcatcctgttccacctgggaggccccgacgacttcaccgccctgtccctcgaggacaacaagctctgggatcgccgctgcctggagctcttcatccaggtctcgaccacactctatgtcttctcccgctacgtgctcgaccccggattccgccgcttcatcgtgccgttcgccctcatcttctccgccggggtggtcaagtacgtggagcaggtcgtcgcgctgcaccacgcgacgatggaggcgctcatcaagtccgtcctgggaaagcccgacgctggcccggactacgctgacaccattaaccgattggacgggattatgagatccggcgcattgccgtccctcgacatcaagaacgaacgagttgaccgcccaaactctgatccggaggccaacgtgcaggtgaaagattacagcgaagatgagcaggtggccatcaaaaccatccggtcagcacactctctgttctcgagattcagtgtcctgttcgcggacggcatcttcagcttcgaggacaggcaggagagccaggccatgttcttgcgcaaggacgcgaggtgggcgttcaagatcgtggagatcgagctgggtttcgcgtacggtcggctctacaccaaggcctcggtgtcccgcggggcgaggctggcggtgcgtgtgtgcagcctgtcgctcacgctcgccgccggcctctgggcggcgctggcgatcctgcgggcgagccagtaccggcagcggcaccggtgcgtgacgtacgcgctgctcgccggagcggcgctcaacgacgccgcgatactcgccgcccacgccttctccgtctggtccctggtgcacggcgactggctgagctggtgctccgtcatgctggtgaagcggaggaggtggtcggcgagcatggcgcaatccaacctcgtcaccttctgcctccggaagctgccttccaacaacgactccgacccggcgccgctctcgtcgtcgtttcttctccggcggctactcctcggcggcggccgaggaggaggagtgcaacaacaagacgcatcgcctgctcctgctctttccaccacgttagcgtccatggacgaattccagaagctgttcgagagacgttccctgctcgaccaggtccgttctggaagcttctggagcaagtacaagcataccaagtatgtcccggtgagcgagaagctcaaggatttcatctacgcccagctagaggagaaggttcgccgtctcagcgagtacgacaagaggatggagagggagcgtgagcgtgagcggaagcgagtgagagctccatctccatctccatctccatctccatctccatctccatctgcatctgctacgactccaacccaaaccggaacgtcgacgacgacgacgacgagtagcatgtacagcattttgacggattgcaggggggaccaagtgatgaaaaaggagcggatcagcaacctgagctggagcctggagaagaaggagttcgacgagagcctactgatatggcacatcgcgacggacctgcggttccgcgaggaggcacaggcggccggcgccgccgcctccgcggcgagtgcggcgaccgtcgatcagcgagagaccaggaagcacatggagatcgcgcgggagctgtccaactacctctactacatcatggtggtgcacccgctgatgctgtcgtcgtcgacgaccatggcgatcaagaggtgccgggacacgtgcgcggaggcgcggaggctgttcctcaaggaccacgtgatggcggcggcggggaaagggaagggcgaccggcggcgggcggtgggcgaggacaacgcgcacagggtgctcctggacgtggacacgccgctgcacgcggcggtggtgaagggggacaagtgcaagtcggtgctgtgggatgggtgcttcctggcgagggagctgaggcagagcatggccgacccggggaggaggtggagggtggtgtgcgaggtgtgggtggagatgctgggctacgcggcggtgcactgcggagggtaccagcacgcggagcggctcaaggacggcggcgagctcatcaccttcgtctgcctcctcatgacccacctcggcatggggaagcactaccggaccgaggttggggatgcctacgcccacctctcgccctacagcgccgcggcctagcgcatctgtattagtactacactccagctaacctgttgcttgtactacctcgattggtgaacagagtttgataatatatgggtgtgtttggataatgggttaggagaggtgggattgggaaatagaaatgatggagggataagatgaaatggagtgagaagaatggatggctatgattgaaacttatcctttgaggggtaagaaatcatattccaaacccattatccaaacatggcctatgtgattgtt

SEQ ID NO: 27289 - DNA, 1008 bp, Oryza sativa
  ref <308>: DATABASE ACCESSION NUMBER: AK102731
  ref <309>: DATABASE ENTRY DATE: 2002-08-28
gactcctccccttcgcagcagcagcagcattgctgctcctcgccgcgccgccgccggcgacggccgacgacccgggcctcgccgtctactggggccgccacaaggaggagggctcactgagagaggcctgcgacaccggccgctacaccaccgtcatcatcaccttctacaacgccttcggccacggccgctactccctcgacatctccggccacccgctcgccgccgtcggcgccgacatcaagcactgccagtccaggggcatcaccgtgctcctctcaatcggcggccagggcggcgcctactccctccccaccaacgcctccgccgccgacgtcgccgacaacctctggaacgcctacctcggcggccaccgcgccggggtggcgcgccccttcggcgacgacgcggcggtggacggcatcgacttcttcatcgaccagggcggcgccgaccactacgacgacctcgcccggcggctcgacggctacaacaagtactaccggggcagggtcggcgtgctcttgacggcgacgacgaggtgctcgtacccggaccaccggctggagaaggcgctggcgacgggggtgttcgcgcgcatccatgtgaggatgttcggtgacgagcagtgcaccatgtcgccgaggtactcgtgggagaagtgggcggcggcgttccccggcagcaaggtgtacatcgggctggtggcgtcgccggagcaggacagcgcgtggatgtttcagaaggatctctactacgagatgctgcagttcgtcaggtcgctgcccaactatggtggcttggccatctatgacaggtacttcgacaagaaggccaactacactggtgagggttaattagctagtggtcatcgtctttgctgtctgaagtgaagactagatttttaccattatgtaaaagatctgaataaagacacctcttttttctgtaacattgtgattttgatgtacttcaataatggacgaataaaatgaggtctcaaaagct

SEQ ID NO: 27290 - DNA, 2417 bp, Oryza sativa
  ref <308>: DATABASE ACCESSION NUMBER: AK102732
  ref <309>: DATABASE ENTRY DATE: 2002-08-28
ggtccgctagccccctcctccctccgttggtctccgcccacccagaggaaaccacccgcccccggtccccggaggaaagcttcggccatggcggcggcggcggcggctcggaggggatgcctggtcgcgcttctggcggtgctcttcttggcctgcgccgctgaggggggtgcggcggcggcgtcggcggcgcagcagcagcagcagctacggcggcggaggcatctgctgcggcggcagcggcaggtgcacagccacctcaggcggctcaacaaggcgcccctcgccagcatcgagagtcctgatggagacatcatagactgtgtgcacatctccaaccagcctgcctttgatcaccctttcctcaagaaccacactatccagatgaggcctgattaccacccagaaggcctgtatgatgagtccaaggttgcatcacagcagaacacccagacaatcacccaaatgtggcacaagaacggcgtgtgcccggagaacaccataccaatcaggaggaccaagaaggaggatgtcctaagggccagctccatcaggagatatggcaagaagaagcaaaagagcaccccaaaccccatgtctgtcgaccctgatatgctcaatgagagtggccaccagcatgcaatagcatatgtggaaggtgataagtactatggagctaaggctaccatcaatgtgtggcagccaagaattgagcaggccaatgagttcagcctgtcccagctctggatcttgggtggttcctttgggcaggaccttaacagcattgaagcaggatggcaggttagcccagatctgtatggggacaacaacactagactcttcacctactggactagcgatgcgtatcaggcaacaggatgctacaacctgctgtgctcggggttcatacagataaacaatcagatagccatgggcgctagcatctccccactctccaactatggtggttcccagtatgatatcaatattttggtctggaaggacccaaaggagggcaattggtggttgcagttcggtaatgactatgtgttaggctactggccatccttcctcttctcctacttggcagacagtgcctccatgatagagtggggtggtgaggtggtgaactcggagcctgatggcagccacacctccacacagatgggcagtggccacttccctgaggaaggatttggcaagtccagctacttcaagaacatacaagtggtggattcatcaaacaatcttagggcaccaagtggtattgggtcattcactgagcaatccaactgctatgatgtgcagaatggcaacaatggtgactggggcacatacttctactatggagggccagggaaaaacccaaactgtccatagtagaaatggaaaaattctatccatgcccctaacaaacccttgacacctctgtattatgcagtaaattagtttacacctcttctctttttctcctcttggtttttgttttggtttcaccattttcccaccaggttattaacttctaggtaagtgtttgacatgtgaaatttgttctcttcctcagagatgttggtctggctcttgggaggagtgcggtcaagtttctgaagagaaacaggcctgtttggttggttggtttgtgcacttgtgcctcatgttttgtcaaatattttttgttttctcccatgcatgccttcaacttgattgttggagccttggaggtactgcacttgttaagttgaattcaattaattaagctgttggtgcatgtgtgtggcctttggttaatacctgtaccagtatgggtttttctatcctgaaaaaagttgctaatcaagtgcttagctattggaatatgtgcaaagatgccaactttttgtgtgctacgtttggtggccacacttgggtcttctggaaagcggcattaaagttggttaagcatatggttagacctgggacttgcattctgtgaaggcaggtggagttcacattgcaagcaacagtgcaagcaccgcaccattgcttcagcaatcttcaagctcctgactattggtggccactgattgatttggttgtgagctgcctaactgaattgacatttttactggtctacggtttgattctgactactgcttctagtgtaaggcttttggatttcagtgctctagttgtggcatccagttcacaaatcacttgttcaagtcttcaagatgtaaggtttgattctgtccagctataacgcacaaggtgagatggaattcgggacgattgattttctggctggtcatttgatatgtttcatgccaaataacggtggaatgcagagcatgtctggataaaaataggagtactaaccagatccgttgacggctgcaattttgatattttagtccttttataaaactattttacaaact

SEQ ID NO: 27291 - DNA, 3115 bp, Oryza sativa
  ref <308>: DATABASE ACCESSION NUMBER: AK102733
  ref <309>: DATABASE ENTRY DATE: 2002-08-28
ggagagcgagagagcaaggccattggcttcgatctgacgcatgagtcggcatggagggcgtcctggtgagcgcggcgaccggagtgatgaactccgtcctcgcaaagctcacggccttcctcggcgaggagtacaagcacgccaagggagtccgcgacgacctcgtcttcctccggtccgagctgagcaccatgaatatagttctgcaaaagctagcagatgtggatcagctcgacgagctcagcagagactggagggacagggtgcgggatctcgcctacgacatcgaggactgcatcgacctctccgtccaccgcctccgcggcagcgccggcgaaagcggactcgctgccaaggtggcgcgcatggccaagaagatcggagcgttccgtcagatcgcgagtcagatccagaagctcaaggcccgtgtcgtggaggtcagcgagcggcgtaacaggtacactcttcatggacttgtaccaactagctcggatgcttcctcctcgaccaaggttgatgtccggctgtgcgcgctctggacggaaacgaagcacctcgtcggcatcgatggccctagggatgacatcatcagtcggttgatggagcagtagcaggagtcgttgtcatcggtgcagcacggtgtcaggatggtatccatcgtcgggtgtgcgggcttgggcaagaccactctggccaaacaagtgtacgacaaaatcaaaggggaattgcgagtgcaaggcctttgtttcggtgtctcagaaaccgaacataaaggagcttatcctcaacatttctaatcaagttggcaacaagtcaacaaacatgtcggatgatgtagcaaatctggtggataatcttagggaatgtctcaagcaaaaaaggtatattgtcgtagtggatgatatatggaacccagaaccatggaacttcattggagaagcattggtcaaaactagtcctggtagcataataattttgacgacacgtgtgaaagaagtggcgatgtcatcttcatcttctcatggtggttttgtttatccgatgaaacatctcgatggcgctcactccaaaaggttgttttacaaaagaatttttgactgtgaagagcaatgtcctcctgaatttgaacaagcttctaaagagatactggaaagatgtgatggtatacccctagccatcatttccatatccagcttcttggctgatcgtcaatcgttatatcactggaatgaggtaaaaaaaattatcagttctccaataccaggaaataaggatcttgagaccatgcaatcagtgttagcactcagttattacaaccttccacatgatttaagaagttgcctgttatacttgagtgcattcccagaagattgtgaaattggaaagacccgtttggtaagcagattgattgcagaaggatttatccatgcaagaccaggagaaaatctatatgaagcagggctgaggtatttcaatgtgctgataaaccagagcttgatccaaccatggaatgagcactacggtgaggtgctgagctgccctgttcacgacgtcattcttaatttcatagtgtcccaatcagtagaggagaactttatgaccttgttggatccgtctggtcctgtacctttgcagcatagcaactgctgcaaggttcgtcgcatgtctctccagggtagctactgccaagagaaatttgcctcgagcatgaagtcgattaagcctcatgtccggtcacttgcttgttctatggactgcacaggattgcatcctctatcggaatttaaagttgcaagagtactggatctagaagggtgcgaatcattgacaaacaaccatcttgctaatatagaaaagttagcctatttgaggtatctgagcattagcggaacaggagtaagtgtgctccccgccaatattgggcgtctccagcatttggagacattagatatactagatactcaagttaaagaattaccaccatccattgttctacttcagcaattggttcgtctgtctgtcaattctgacgtcatgttccctgcagaaggtgttagcaagatgcaagcattggagcagctaacaggtctcttgcccttcaatcaaccggtaagctttttgaaggagctaggtgagcttaccaagctgagagtactagcggtatcttggattcctgaccatgttagagattctgatgaggcccatgccgagcatgaaaagagctacgagaagattttcatctcctcacttaatgcactggacagacatagccttccatatctagatctgtctctttattattcttattcggatatagctgccaaacgcttcttgtttgattcgtggttcccttccctaaaaaacctccggagattgagcatggtaaaccggttcaagacgacaaccattccaagttggattcgccttgctgccaagcttgagaaattagagctcagtaaagcatatgttactcaggacgatctcgaaatgcttggagacctgaaagctctcgaatatcttgcccttcccttttcagacacacaaggatcatggctcaccatcagcaaccatggtttccgatgtctcaagtttgcctttctttgcaacgtgttgtttatgcatgattccatgcctaatctgaaggacctccacattggcattagattgaatgtggttggtgagaatgattccttccagcacctccccaacaccctctgcagagtccatgcctggatttctggcaatctagatgcggtctcaaaactgaaagaaaaaatcttgaacattgcgaacacacatcccaaccgtccctcactcacgactgcgacatacattcagtagcactagaggtggagcagcgaaaaacagaagcgtcaatgagccgcaggacgatggcttttgcatcaatggctaccttggcttggtcctggagttggcacagcatttgtgtttcatctctaccatttttactcagttgcataattaccattttcaaacttgttcacttgtttcaattttcatgtatttgaataagcacgctacgtttggttgctcctctagccccatatgttatggtttgctagctctatccattaattaaactggagtaaaatgc

SEQ ID NO: 27292 - DNA, 2688 bp, Oryza sativa
  misc_feature (1534)..(1534): "n"=any one base of a, t, c, or g
  ref <308>: DATABASE ACCESSION NUMBER: AK102734
  ref <309>: DATABASE ENTRY DATE: 2002-08-28
ggcggtcgtgcggctgcgtccctcctcccgttcccggactctacgccccgcggagaacgaagccgccgcggcgcacggattcaccgaggccagcgacggcggcaactgctcctcccctcttacaaggttacacgatgttttctgtgaggtgcgggccgcctgcattcgcctttggattggaaagggctgccattacgcatccttcaaagttcagtactttagtggtatgtggtgccaggggcccgaggccaagatatcctcgtgtgtggaaaactcgcaagagaatcggaaccgtttccaagtctcaaaagcttgtcgaatgtgttaaaggcttgtctaatgtaaaggaggaagtatatggtgctcttgattcatttgttgcatgggaattggagtttcccttgatagcagtaaagaaggcacttaagacccttgaagatgaaaaggaatggaaacggataattcaggttattaaatggatgtttaacaaaggtcaaggaaagacaatgggaagttattacactttgttgaatgctttgattgaggatggacgagtggaggaagcagaagagctgtatggaaaaatattctcacgatatttggagggtttgcctcatacctttttcatgagaatgatatctttatattacagactagaatcatatccgaagatgttggaggtaggaatcccaatatattatacttttgttctaatgtacacccttcttatgttaattctggaccatggtttcccttgcatggaggaacagaagtgaacttgtaaaaattttctgctaacagcctaacacataagtattgttaagatagtaagttgtaattttgtttaaattttttctttgtttttgtactggttttatttccacctaacagtgtactgatgagagatatgtggactaggaaaacctagcagtgtgctaatcttagagagctaggtatttggatatcgtttagtaagtttctcatgataatagcctgtggtatgtatcagcagccacattgttagaaataatattcatgggttggatttatttcttccatgtgactatcatttggcgtccatgtttttttagtgctgcctttgcttgtatgcttaatggaaagtcttcattgctgcttactgcactgacaaactacattttctatggtaccatttggctttaacatgatgagtgtttcagactgttatcattttgcaagttttttaatatcttaggtcctcctcgaaaggtccactgccaaatggcatcttaagtgaatagctgtattgaatgttattgagaagccgatgctacacatatcccctgatggaaatttggtagccatattttatgaaaagaaaaagaaaatttggtaggtatggaatttctgattccaaataatgttgaaacaagcccaaggcccacctgtgatagattatcaagtcaagtgcgaagattctatccttttgaaagtttcgtgtttcatatatcgacctgacttggtagcttgggcccttttttggtggaggataagntttagcttaaagttcccagaagattaagctaccccaaacagggcgtgggttattggtcctctcatgaagctcaaggccactttctgccaagaggctgaagcctatctcaaccagcctatgcaataagcctgaattgctcccaaaggaccttgcttataagcaatagtcatttcagtacagcggatggcacagcttcctgttgcagctatggtattaactgttttaggaattttgtgttccttttcgtagtcatgttggatgagaaaacataatccattattactatgactttaacttactcccagaagagggcaaagttgcattctttgtacaaagagacacatttgtgttacttgacaaaacaactgttagttcaccaacttgggactaaatatgtggtttgggtctcccgctcatgttctgaacccaacctttttttgttgttgagaagttatactcaaggaaacattggtagaattgcttatttattgccaagattctaaagatctaatcattgttgtctttcttgtaaatttgccagatctttgctgatatggaggagctgggtgttagacctgacggttcgattatcagaatgcttggtgaggtattccagaagttagggatgttggacaaatatgtaaaattaaagaagaaatatccaccaccaaaatgggaatatcgacgcatcaaaggcaaacgcatcagagtaaaagtctacccaaaagacgaaattgaagaaccaatgagaaaagctggcacagatgaagtggaagaggaagaaaacatggatgtagatagtgaattggaagaagcggcaagtgcaggcctggacaggaatgtattggacgaagcagcttgtggagaccttgaatttgtgtagttcagagctttcctttggtattattcatgcctgcttcatcaaagcaggttagaacaatgaactgataagaagtaactgactagttagattcagttttgtgccatgaagtcatggattgccacattagaagatgtagaatatgtaaaacattagctcattacagatttaattagcacgattagcatgttatacaaggccatgttgttctagaacaagagtttcctcggagtttgtagtccttgtactgatttatgatatcattccttagagc

SEQ ID NO: 27293 - DNA, 1342 bp, Oryza sativa
  ref <308>: DATABASE ACCESSION NUMBER: AK102735
  ref <309>: DATABASE ENTRY DATE: 2002-08-28
ggacctctcccgccgccgccgccgtcctcctccacctcctccgctctctcgcgcacggcgcacgcgcccgaagccctagaccccccggcggcgaagatggcggcggaaggcggtgccgccgctcgggcgctgtcccagcgggagcaggacatccagatgatgctcgccgcggacgtccacctcggcaccaagaactgcgacttccagatggagcgctacgtctacaagcgccgcactgacggtatctacattattaaccttggcaagacctgggagaagctccagttggctgcgagggtcattgttgcaattgaaaaccctcaggacatcattgtgcagtctgcgaggccctatggccagagggctgttctcaagtttgctcagtacactggtgctcacgccattgctggtaggcacactcctggtacatttaccaaccagctgcagacctcattcagtgagccacgccttcttatcctgactgaccccaggactgatcatcagccaattaaggagtctgcacttggaaacattcctaccattgccttctgtgacactgactctccaatgcgctatgttgatattggtattcctgctaacaacaaggggaagcagagcattggttgcctattctggcttcttgccaggatggttctccagatgcgtggtacaattctcccaggacacaagtgggatgtcatggttgatctgttcttctacagggacccagaggaagcgaaggagcaagaggaagaagaggcggctctggtggctcctgattatggtgcggttgcggaatatgctgccccagcggctgatacctggggtggagaatggggcactgacgctgcagctcaacctgctgccattccagcacaggctggtgctgactggactgctgctccagctcctgcagccggaggatgggacacggctgctgcccctgcccctggatgggaacaaggcagtgcaccagtcccagcggcagcacccacccctaactggggggagtgagtgaaagagtaactgatccagttcatgggtcagaggctgagtttgttgtcgggagcagctggtagacactatttaagtagctttaatctttttacagtactgagttatttagatgcaaatcaaattttgtgttcttgacaatgctgggactgcgaactagccagccttttttttgttacaatctcatggatagctttatttcaagagcaattctgctttgcgaacaaagtgtatgtgtttgcaacaacaaattgatggggttttctcctcatagttcttattgttcactgtcagatcaatgctatgctcttttcactgtattcttgcc

SEQ ID NO: 27294 - DNA, 3347 bp, Oryza sativa
  ref <308>: DATABASE ACCESSION NUMBER: AK102736
  ref <309>: DATABASE ENTRY DATE: 2002-08-28
ggcgctctccgtcgcttcgcctctctccccggctcccccaaaccccaaaccccagctcccgtctccgtctgcttccccggccgcccgagctcccccgtacggccgcaccccacccatccaccccgccgccgggatggagctgaggcccgggatgtcggccctcgtcacgggcggcggctccggcatcgggaaagcactttgcattgctcttgcacagaagggtctatttgtgacagttgttgatttctctgaagaaaatggaagagaagccgcttcattagttcaaaatgaaaataaaaagtttcatggagatcttaaagttccaagtgctatgtttattaaatgtgatgttactaatgcaggtgatctttctgctgcctttggaaaacatgtggacacatatggtggactagatatttgcatcaattgtgctggaattgccatcaagacactagtttatgatgatagatctgatggaactagcacatggaggcatgctgtaaatgtgaaccttgttgctgttattgatggtactcgcattgcaagtcaaattatgcgatctgggaagaagcctggtgtcataataaatattggttcagccgcaggcctttatcctatgaactttgatcccatatatagtggaacaaaaggtgcatatacaatcacatatataattcttattttttgggcagaagattgctgttgcaatgaaagtccaacttggattataatttgatcatttatttgtgaaaaataatatgcatgctaactgtttatctagatggttcaagattctttgcaattacaacttgtacatgatccacatgttgataaagatatatggccaactgtattttccaatattaactccacattcattttatattatcaaatatgtttttcacgctatgccactgtgatcgcaaatattgtatttcagctggcgttgttatgtttacaagatcacttgctccattgaaacgccatggtatacgtgtcaatgtactctgccctgaggtatgaatatattacataactagaggcaaatatgaaatatttatttatttttgtcatttctgactcatagtattccagcatatgtattctgtccaaaacttgtggatttgctgatatgtttggtagtatatcagaatattaacttgatgatggtacaacagacagcacacccagctgtgctctctgttacataagttcttattacatagaaatattactagaatgatcacataaagctttccatagggccaactctactatttcttagaaaaagaaagacgaaaagtgattggtcactacttggattctcaaggaccaggagcagatatccttatgaccatccgtgcacccattaaaattgcaagccttatataactctcatttttagttgtggtagagttgtatgaacatgtagtattgtagttgagctcacaggtaaaattaactaagtgggcaaaagttgatgataattgcatatgagaaaaaccgtggatatctggaaagagttgatatctgcaacttgataatttccagattgcagaatctccaagtcataaattcacatggcttcaaatttatcctaaacaaactgttctatgattctatcattgtctcattatcaaacgctggatgctgtgaaggcaatgatgctccatgatcattatcaaacatgatctattttatggtttgttatgtgcagtttgttcaaactaatatggcagagcaactaagtcgtcgaataatagatgtaactggtggatatataaagatggaagacattgttaatggtacatttgaacttataaaagatgaaagcaaggctggtgcttgcctttggataactaaacgaagagggatggagtactggccaacaccagaggaacaaagaaagtatatgctcaatcttcccaagtcaaaaaggatgttaacacaaaataccttttcgactgtccaaactcctgagttctatgagaagatagttgttcacacacttagccataattttcgcgatgctacaagacttgaacgtgtgcgcttgagattgccggttgaaccacacaatgctctggtcaaaataatatacgctggtgtaaatgctagtgatgttaacttcagtgctgggcgttatttcagtggtggtgctaaagaaactgctgcacgccttccgttggatgccggttttgaggtgatggatgtcctcgtacttctgtgttaaactttttaaaggatgctcaatgttggttaatgtttttaagatatacaactacctcctctgccttttattttcccataatattccttagccttttctcatgagaaattctaatttatgcaggctgtgggcatcgttgcatctgttggagattcagtgaaccatattaaagttggcagtcctgtagcccttatgatttttggggcctattctgaatttactcaggttccagccaagcatcttcttccggtgccaagaccagatccagaggtcgttgctatgctaacatcaggattgactgcttcaattgcccttgagaaggcaggccaaatggcatcagggcaagttgttctagttacagctgctgctggtggaacaggacaatttgctgtgcagctcgcaaaactagcaggcaacaaggttgttgccacatgtggtggcaaatgtaaagctgcacttctgtcttccttaggagttgatagagttatcaactaccaaaatgaaaagatcaaagatgttctgaaaaaagagtttccaagaggagcagatatcatatatgaatcggttggtggggaaatgtttgacttatgcttgaatgcacttgcagtccatggacgccttattgtaattggtatgatctcccagtatcaaggagagcatggatggaagccacggaactacactggactatgtgataagattcttgctaaaagtcaaactgtggctggttttttcctaatccagtatgctcacttgtggcaagatcatcttgacaaactttttgacctgtatgcctctggaaagctaaaggtatgcctcgagcctccaatgtaaatttctgtttggccctatgcatgactagggtcaaaacgaagctacatcagtaggacctttatttgggtgatgaggcagaaatctaacgaagatacacaaataacaaaagccttaaattattctaccatttcttgtttctcttcatactgttctggcatccacaatcttatgaaaatgtaggtattaggcaataaagtattcccatgacctggtaataagcattgtggaagtggatagtaataacaaatactaataagtagtaagcttatgacccagttgtaag

SEQ ID NO: 27295 - DNA, 1577 bp, Oryza sativa
  ref <308>: DATABASE ACCESSION NUMBER: AK102737
  ref <309>: DATABASE ENTRY DATE: 2002-08-28
gaaaggccggtctttccctgcacgttcaggcagtgtgggatccatagtaacttgtacccatccatcccgtgaggccgtgatccagctcttgtttctcctttctttcagttgcatgtacacaaagttgcacaaatgtgttgctttctgctggtctctgtactgctagccaccaatctcaccgacgtagccagtgcacagagatggaggcagacgagcggcggcggcaaggacaggtgggacggcctcctcgacccactcgacgccgacctccggcgcgacatcatccgctacggcgagctggcgcaggcgacgtcggacgcgctcatcggcgacccggcgtcgccgttcgccggcgcgtcgcggtacgcgcccgacgcgttcctccgcaaggtgcgggcgtccgacccggacgcgtaccgcgtcacgaggttcgtctacgcgacgtcgagcgtccgcctccccgacgcgttcatgccgaggcccgcgccgtcggcgggcgcggcgtggagcggggagtccaactggatggggtacgtggccgtggccgccgacggcgtcgccgcgaaggccgggaggcgggacatcgtggtggcgtggcgcgggacgaagcgcgcggtggagtgggccaacgacctggacatcacgctggtgccggcggacggcgtcgtcggtccgggcccgggctggacgcagccgtcggtgcacagggggttcctgtccgtctacacgtccaagagtttctcgtcgccgttcaacaaacttagcgcgcgagagcaggtgctagctgaaataactagacttctgcgcgcgtacaagaacgagaactgcagcatcaccataacgggccacagcctgggcgccgcgctctccacgctcaacgccatcgacatcgtcgccaacggctacaacgtccgcggctcgtcccgcgtcccggtccccgtcacggcaatcgccctcgccagcccgcgcgtcggcgacgatcagttcaagagggccttcgactcgacgtccaacctgagcctgctccgcgtccgcaacgcgccggacatcgtgccgaccatcctgccgtcggccttcttcaaggacgtcggcgcggagctgctcgtggacacgcgccggtcgccgtacctgaaggacccggcgggcccggcccagtggcacaacctcgagtgctacctgcacgccgtcgcgggcacgcagggcgccggcgacggcgcggggttcagccttgtggtggaccgtgacctggcgctggtgaacaaggaagtggacgcgctcagggacgagtaccaggtgccggcggcgtggtgggtggagaagaacaagggcatggtgcagaacgcgagcgggcgctgggtcttgcaagatcacgaggagggcaaccttgcaatgtgatggatttggggaattttgtggaatccaataaactgatgggtttattgcttggatggaagttttccaagaaaaacatgaatagtaagggccgtggaaatgcagatataaattatgtatgtacgtctgaaaattctgagttgtaactgaaaattcttacggcccctttgaaacgtatgattatc

SEQ ID NO: 27296 - DNA, 2358 bp, Oryza sativa
  ref <308>: DATABASE ACCESSION NUMBER: AK102738
  ref <309>: DATABASE ENTRY DATE: 2002-08-28
gaggttttgcacgacacacattgatcagctcacctcttcatcctcctgcacgcgagaatggccatggcgacgccaatggctccccgctccacgttcgccatcttcctcatcctcctgctccgttccggccactctccggcggccgcgttctatctcccgggcagctacccgcaccgctaccgccccggcgaggcgctggccgcgaaggtgaactccctcacctcgccgtcgtccaagctccccttcccctactactccctcccgttctgcgcgccgcagggcggcgtcaaccgcgccgccgagagcctcggcgagctcctcctcggcgaccgcatcgagacctcgccgtaccgcttctccatgctcaagaatgccaccgccttcctctgccgcaccgacccgcttccccccgccaccgccgacctcctcatgttccgcatcgacgacgcctaccacgtcaacctcctcctcgacacgctccccgtcgtccggtatgtcaagaacctggccgcgccaggggtgttcgtccggtctaccggcttccccgtcggcgtgcgcgccgacgacggcgagtactacgtgtacaaccacctcaagctcaccgtgctggtcaacaagccgcggaacggcaccaccagggcggaggccctgatggcgaccgccgacgccgtcgagctcatcagcttcgccggcgggagcaaggacggcggcgggtacaccgtcgtcgggttcgaggtcgttccgtgcagcgtggagcacgatgcggcggcgatcaagggcaagaagatgtacgacgagctgccggcgagggcggccgccgggtgcgacccttcggtggtcggcatgcgcgtgcgggccaaccggccgctcgtcttctcctacgaggtggcgttcgtggagagcggcgtcgagtggccgtcgcggtgggacgcgtacctggagatgggcggcgccaaggtgcactggttctccgtcctcaactccatcgtggtggtggcgttcctcgccgccatcctgctcgtcatcctgctgcgcaccgtgcggcgcgacctcgcgcagtacgacgagcacggcggcgaggcggggttggcgccgcaggcggacgagctcgccgggtggaagctcgtcgccggggacgtgttccgggagcccgcccacccggtgctcctctgcgtgatggtcggcgacggggtgcgcatcctggccatggccgtcgccaccatcctcttcgcggcgctcgggttcatgtcgccggcgtcgcgcggcgcgctcgtgacgggcatgctcggcatctacctcctcctcggcttcgcggcggggtacgccgccgtgcggctctggaagacggtgcggcacggggacagcgccgggtggaagcgcgtggcgtggcgcgcctcctgcgccttccccggcgcgggcttcgccgtcttcaccgcgctcaactgcgtgctctggtacaacggcagcacgggcgccgtgccgttcctgctcttcgccgtgatcctcctcctctgggcgttcgtctccgtgccgctcaccctcgccggcgggctggtggcatcccgcgtcgggcacctcgagtacccggtgaagacgaacaagatcgcgaggcaggtgccggcggcgcagtgctcgccgtgggtgttcgtggcggtggcggggacgctgccgttcgggacgctgttcatcgagctgctgttcatcatgtcgagcctgtggctggggagggtgtactacgtgttcgggttcctgctggtggtgatggcgctgctggtggccgtgtgcggcgaggtgtcggtggtgctcacctacatggggctctgcgtggaggactggaggtggtggtggcgcgccttcttcgcctcgggctccgtcgcggcctacaccctcggctacgccgtctactacctcgtcttcgacctgcacagcctcagcggcccggtctccgccgcgctctacgtcggctactcgctgctcatggcgctcgccgtcatgctcgccaccggcgccgtcgggctcgccgcctccttcgccttcgtctactacctcttctccgccatcaagctcgactgatccatggcgtcatcgtccgcactgtccacgtcatttcattatgtaggtgatctatgcgttttattactacatgataataagattattattttttgttcctcgttttggtgttttccattttgtacttcatgagtatacaccgtagtagtactagatagaaacgagtttgagtttggtttaaaggagcactattacaagatttcactttgtatttatatctgcacgtgtcagctgtttgacttccactgcctttgcttaagatctatccatgtgtcaagtgtgacc

SEQ ID NO: 27297 - DNA, 2040 bp, Oryza sativa
  ref <308>: DATABASE ACCESSION NUMBER: AK102739
  ref <309>: DATABASE ENTRY DATE: 2002-08-28
ggaatcgatcggccacgtctcctcctctccgttccgttgctcgtacggcggcggagctccgcgcggcgctcctgtttagtgcgaatctggtcgttgcaaccaaagccctagctttggaactggaagcctggagcgaaggatggagagcccgaagcggaagcttgacgacgagtccggcggcgaggcggcggcggcggggctgcacctgctgctgcacgagatgctgctccgggctcgccgggagggggaggagcccgacctgctgccggacgagcagctgcgctccaacgaccagctccagcaagacgagatgctggcactggaggcaatttatggagacaatataggcattttcagtgcaaaggctggtctatggtgtttccaggtccatgtgcactgggaaattcctgatggtaccagcatatccacagagctatcccagggtgataaccatgaccaaaatagttgattctttgacacattcagtgtccagcacttggctccaatttcattgacatgccttatgcctccatcatacccaagccatcgcgctccatactttactctcagttcacagtggttggatgccgtgaaagtttcctccctttgtctcatgctggacacaatctggacacagcaacttggacaggaagttgtttatgcgtgggtgcaatggctgcagagctctgcgctttctcatcttggttttgatgatgggatactcatacaacagcctggtagtatgatgggtcctgtggatgttcgtgctgttgcagagattgcgtctgtagagtctgttgcacaatggttaatcagctacaatgaggagcaatgccatgaatcttttctaagtggccttcatgactgcatgatttgtttcaccgagtacggggcattacttttgtcggaggtgtatggaaacgtactcaaggatgcatgtcacagaaggaacagtgctgaaattgttgtgtcctaacgacaagtgcgggggcatcattcctccaagtctattaaaaaggttgctaggagatacagattttgaacgctgggaaagattgatacttcagaagactctagactcaatgtcagacttggcttactgtccaagatgtggagcagcttgcctggaagacgaggagaacaatgcccagtgccccaagtgcttcttcagcttctgcgcccgctgcagagatcgccgtcacataggggagaagtgcatgactatagaagaaaagctaaattccttacaggatcgcaccgtggtgccttttttaagcaaagacagctttgccagtaaaatgaacttgtcaaatgaaatatccagcatcaaggaagtgctccgttcttctgttcgatgtccacattgtggtactgccatctcccgagtatcaggctgcaaccatatgttatgcagtaactgtaggcaatcgttctgctatggctgtggcaaggcagagaatcatggccattcaagtgagccctgcagataccaggagaatctggcaacgaagaagaatccaaccgtcctcattgaggaggtgaagaaagaactggaggggggactgtcaagacagcatccgtgcccaaattgtcgccaaccaaatcctaagatgggaaacaacagccatatgttctgctgggcatgccaggttcattactgtgcgcagtgccacaggatggttcggaagagctccgagcattatggtccccgtggatgcaagcagcacagtgtcgaccctgagatccccctcagattcaaggcaaacaaaaacgatgactctggttcgtaacacttctgtgatgatctgttggcagagagcatcggtttcgactgtggcgtatttccttctagagccgttgcatcattacggtacatgttattacatgcggttaatattatcctatgcagtttcaaggagcaactttgcacacatatttttgttgtggaagattagtaaactgacgtagaggataatcagttcgtgcaaagcttgctgaattttaatcaatcttataatattcaaagcacattaacctttc

SEQ ID NO: 27298 - DNA, 2607 bp, Oryza sativa
  ref <308>: DATABASE ACCESSION NUMBER: AK102740
  ref <309>: DATABASE ENTRY DATE: 2002-08-28
gaaacgcacatttgcccgcagcgccgcggcgcgcgaggctaccccgaccccgacgtggtctcctcccacccatacacccttccgcttccacgcccacacacagaacccaattcccctccctcctcctccaccagcccctccctcccacacacaccacaccaccaccaccaccacccacccctcgtatgcaattattcacgcccagtcgccgcctccaccgccgccgcctgctcgactcaccaccgcagggcggcctcctcctgccgcatgggtgactcgacggtggccggcgcgctggtgccatcggtgccgaagcaggagcaggcgccgtcgggggacgcgtccacggcggcgttggcggtggcgggggagggggaggaggatgcgggggcgcgcgcctccgcggggggcaacggggaggccgcggccgacagggacctcctctgcccgatctgcatggcggtcatcaaggacgccttcctcaccgcctgcggccacagcttctgctacatgtgcatcgtcacgcatctcagccacaagagcgactgcccctgctgcggcaactacctcaccaaggcgcagctctaccccaacttcctcctcgacaaggtcttgaagaaaatgtcagctcgccaaattgcgaagacagcatcaccgatagaccaatttcgatatgcactgcaacagggaaacgatatggcggttaaagaactagatagtcttatgactttgatcgcggagaagaagcggcatatggaacagcaagagtcagaaacaaatatgcaaatattgctggtcttcttgcattgcctcagaaagcaaaagttggaagagctgaatgagattcaaactgacctacagtacatcaaagaagatataagtgctgtggagagacataggttagaattatatcgaacaaaagaaaggtactcaatgaagctccgcatgcttttggatgaacctgctgcatcaaagatgtggccctcacctatggataaacctagtggtctctttcctcccaactctcggggaccacttagtacatcaaatccagggggtttacagaataagaagcttgacttgaaaggtcaaattagtcatcaaggatttcaaaggagagatgttctcacttgctcggatcctcctagtgcccctattcaatcaggcaacgttattgctcggaagaggcgagttcaagctcagtttaacgagcttcaagaatactatcttcaaagacggcgtaccggagcacaatcacgtaggctggaggaaagagacatagtaacaataaataaagaaggttatcatgcaggacttgaggatttccagtctgtgtaacaacattcacacgatatagtcgcttgcgtgtaattgcggagctaagacatggagatctgtttcactctgcaaatatcgtatcaagtatcgaatttgaccgtgatgatgagctatttgctactgctggagtctcaaagcgcatcaaagtcttcgagttttctacagttgttaatgaaccatcagatgtgcattgtccagttgttgaaatggctactagatctaaactcagctgccttagctggaacaagtactcaaaaaatgttatagcaagcagcgactatgagggtatagtaactgtttgggatgtccaaacccgccagagtgtgatggagtatgaagaacatgaaaagagagcatggagtgttgatttttctcgaacagaaccctcgatgctagtatctgggagtgatgattgcaaggtcaaagtgtggtgcacaaagcaagaagcaagtgccatcaatattgatatgaaggccaatatttgctctgtcaaatataatcctgggtcgagccactatgttgcagtgggttctgctgatcaccatattcattattttgatttgcgaaatccaagtgcgcctgtccatgtttttggtgggcacaagaaagctgtttcttatgtgaagttcctgtccaccaatgagcttgcgtctgcatcaactgatagcacattacggttatgggatgtcaaagaaaattgccctgtaaggacattcagagggcacaagaatgaaaagaactttgttgggctgtctgtaaataacgagtacattgcctgcgggagtgaaacgaatgaggtttttgtttaccacaaggctatctcaaaacctgctgccaaccacagatttgtatcatctgatctcgatgatgcagatgatgatcctggctcttattttattagcgcagctctgctggaagagcgatagccctaccatgttaactgctaacagtcagggcaccattaaagttcttgtacttgctccttgatgaaatcagtggttttcatgagatccctagatagcttgtatatttgatgtatacagttgtttccttttcgtgccattataccccaaatgggagtggaggtattactgatctccaacatagggcgcaaagttttgaaggtaatcagctgacatagggtttcgagggctcgaaatgtgcatagtccagaattctcatgtataggtttaaagcagtcaagtaattgattatacatatgtaacgtgagaattgagaaatgaacatcaaataagcttgtttggttgc

SEQ ID NO: 27299 - DNA, 2449 bp, Oryza sativa
  ref <308>: DATABASE ACCESSION NUMBER: AK102741
  ref <309>: DATABASE ENTRY DATE: 2002-08-28
atcgagattcgcgtggccttgtggtcaccgccgccgccgccgcctagatctctcgctgcgtctctccctccctcccctccggcgatccgcgtagatctgggcgggaggcggcggagatccgcggcgaggaggggagggaggggaagcaagcaagcaaagcggaggggcatggagctggcggtgggagcgggcgggatgcggaggtcggcgtcgcacacgtcgctgtcggagtcggacgacttcgacctgtcgcggctgctgaacaagccgcggatcaacgtcgagcggcagcgctcgttcgacgaccgctcgctcagcgacgtctcctactccggcggcggccacggcggcaccaggggcggcttcgacggcatgtactcgccggggggtggcctgcggtcgctcgtcggcaccccggcctcctccgcgctccactccttcgagccccaccccatcgtcggcgacgcctgggaggcgctccgccgctcgctcgtcttcttccgcggccagcccctcggcaccatcgccgccttcgaccacgcctccgaggaggtcctcaactacgaccaggtgttcgtgagggatttcgtgccgagcgcgctggcgttcctgatgaacggcgagccggagatcgtgaggcacttcctgctcaagacgctcctgctgcagggctgggagaagaaggtcgatcggttcaagctcggggagggcgccatgccggccagcttcaaagtgctccatgactccaagaagggcgtcgacaccctgcatgcggatttcggggagagcgccattggcagggtggctcccgtggattcggggttctggtggatcatacttctacgggcatacaccaagtccaccggggatctcacgctcgcggagacgccggaatgccagaagggaatgaggctgatactgagcctgtgcttgtctgaggggtttgataccttcccaacattgctgtgtgcagacggttgctgcatgatagatcgcagaatgggtgtttatgggtaccctattgagattcaagccctgttctttatggcactaaggtgtgctcttcaattgcttaagcatgataacgaagggaaagagtttgtagagaggattgcaactcgtcttcacgctctaagttatcacatgcggagttactattggcttgatttccagcagctaaatgatatttatcgctataagacagaggaatattcccacactgctgtcaacaaattcaatgtcatcccagattctattccggattggttatttgattttatgccttgccagggtggttttttcattggtaatgttagtcctgcaaggatggacttccggtggtttgcacttggaaacatgattgctatactatcatcccttgctacacctgagcaatcaacggccataatggatctcattgaggagcgatgggaagagcttattggtgaaatgcctctgaagatatgctaccctgctattgagaatcacgaatggcgtattgtgacaggctgtgatccgaagaatactagatggagttaccacaatggaggatcttggccagtactactatggctgctcacagcagcctgcatcaagactggccggccacaaattgcaaggcgtgcaattgacttagctgagagaaggctgttgaaggatggttggccagagtactatgatgggaagcttgggcggtatgtcggcaagcaggcaaggaaattccagacttggtctatcgcagggtatttggtcgccaagatgatgcttgaggacccttctcatctcggaatgatatcactagaggaggataaggcaatgaagcctgttttgaagaggtctgcctcatggacaaactaagatgtcgacgaaaatttttagggaagcaaagtcagtttgggaacaaaaattcttttggtagctcttctctgctcatccctccgtttgacttttcgaaccggaaaggtttgtttcatctggatttcccggttgtacaatatgtcagcccatttcttagctaaaaagaagcaattgcggaaatgggtgttttggtttcaatccctgcttgtaagaagattcctgctttgggtcaaaaatcttaaagctgattccagtttcctggtcttttgatggagagaagtgctactctaacgaataataaaagctcatttttctgcagtgcctcctatccagagggttcgttaacttgctgcctgagaagggcaagtcatacaaactgtgtgccttgtatgtttcttcctcttttcgttctcttacaaaattgaagttgtacttgtgttcaaggaaagatcttggcaaaagcttttccctggtcccctggttggatatcacagtatcttgggttcttgagacattgttggaacatgcttgctagtttgtgcaagcaagtgataataattcatttggagttatctcaacgactttatcttcg

SEQ ID NO: 27300 - DNA, 1596 bp, Oryza sativa
  ref <308>: DATABASE ACCESSION NUMBER: AK102742
  ref <309>: DATABASE ENTRY DATE: 2002-08-28
acgcctccgccgcgctccacgacctctccctccgccccaaagggaagaagatgctcgtgccgctcacggcgtcgctgtacgtgcccggcacgctggacgactccgagaaggtgctcgtcgacgtcggcaccggctacttcatcgagaaaactatgactgaaggcaaagaatactgtgaaaggaaaattaatttgctgaagtctaattttgatgaactagttgaggtatgctattgacttgtcaccaaattgaactgttccttgtatttgtatatttaccatttttattccatctgaaggataaatgctttatctttcatgttgtttttgaaatgtttgaaactctgaattgcatgaattttagaggatttttgcagtaattttgcataaatagttcaattcccatgggcaagtggtcctattgtggcctaactgaatagaaacactcaggatgccaacattgacaggttcacttttacttgagtaacttttgttattcattccatgcaaggtagaaatggtttgatggcatgaaattaataggaaaacaaaattatatttccatccatgtatgctctgaacatgcaagtcttttgattggttcatcctatctggtcaccagattcttctcatgctttacttatactggtataccaatatcattttgggattcgtataaaccagttctgtgccaccagatcaccacccaccaccagactagccttgcagactgtcactggccaagttggatgccgaaatggaattcagtgcctaacacaattaattagtgttagcctttctgattatattatcattagtatttgcataaagatatcaatgcaacccactaggcatcacaagaaacacacaaatggtttgaaggttcatttaccaaaagtcaaaatttcttattgccaaatgtcaaggctattataggtacatgtttggtcaattctagcatgtaaaatactggaatgtgctatgatatggtggaaggtagcataaacttcctactttgtgggacacatgactatattaacatatttgcttctcttgtctgccgatgctttattttgtgacgatttctttaagacattaagtaggttgtctctatggttagtaacaggattatcctgtaacatatgaacattctacatttacttgcagatggctacgaagaagaaaaacatagccgacgaaatgggtcggcttctacaagccaagctgaggcagtcatcgccgagcccgagttcatgagacccgaccgcacctcctgtctccaccttgttagatggccaggttgagtagtttgtggcatctatctagccaacatagaaaatttttagctgctgctctggtcgtgtgtctgtgcaaaggcaaccggttcacttccatggtttactgaaagaacctgcctcatcaggttagcccagaagccggtgttgaacacgcaaattttattggctcaagtcgcaggtagccgaattgtgataatcatttgtgtggttgttaaatcagaatggctgatttcattagacattttgctgctgttccctgtttctggaagacgatattttagccatctttctatgtgatg

SEQ ID NO: 27301 - DNA, 2781 bp, Oryza sativa
  ref <308>: DATABASE ACCESSION NUMBER: AK102743
  ref <309>: DATABASE ENTRY DATE: 2002-08-28
tgatataaaccaagctctctctctctctctctctctctctctctctctctctcttctcatgaccggccattgccgccactggccgatctcctcttccacagctctgcaagccaagtccttgcgccatcatgtttgcctcgacgaggtgaacccatttttcccttttcccctctcttttagcccccacaacaagccaccaccgccactccttttgttgccacggtcgagctcttgtcgtcgccgtttcggccttctccttcactttctccgccagccaccgcactccccggatgctttgtgctcgggaacaccacccgccgccggcgtcgccatcttccagccgccggaaaaccggcgcccctcctctccttctcctctgctgctcgtgctggaaagaggagaaaagaaggaagagacgggaggaagaaggagaaaaagaaaaagaaaagatactgacaggtgggcccctgcacagtactatttcgcttttctttatttaactcaaaatccaatctttagaagcccatatctcctaaactgtagatccgattctagtgaaatttggacctaaattcatctaaattcaaactcttcattttcataccaaatttgctattttaatattttatttgaatttccttaatttattcaaataccatttgaataaatatttgatttaatcttatgattgaatttacaacttaaacttatatttgcttttcaaatattttcttttatctccaaaataccctttagccacttaaaggccatcggttggaactttacgccttccatggggacgttcgcgcggtctacgaacctctacgtcggaccgttggttgtaaagcccggcaaaaaccaaacccaaggtcgaagtgctgctcctggcaccccacaccttgatgcgtatagcggtcggagcttcactatcctctcgacctccattgcacgccgcacagttaactctcgagctttgtgtgaccctagccgctccgccgccactcatggttgtcggagtaacacttccaccccactaaacctgcacccacctcctattcttctagccgatatgctgtctatcgacaccggctagaaatggtaccaaatctagtcgttatgttgtccaactctagcgacgactagcaaacacctaaaaccctagccgatatttatcctacctcgatatcggcctaaacaactaaaccctagccactattctacaaaagcccaaccttgacccatattagccacatacctatttaaccatatcaactatccagtatatttcctatcatccaaatcacgagagccttcacataaaatataagcaacattagttgcttgattccctctttaccttagcctccaaccctctagaacctccacataaaatattagcccagtaatccctatgccctacaaaagagataggttataccttaaaccctagccctcttaagctgtttatcgttttcttattattttatggcttttattgaatttggttcttcctctttctcagtagagtttattgtgttttggatgacaacctttggtatttcgagaatcggataatcaggttgcctatcttggatttatttgcgttagagcaaggcaagttattattcctcccctttgagcataatgatcatatattcttatatctctattctatgcattagtcatacatgatttcaaatgcataacctgaacatagcaaccagatatgctagcttttgcttagccctgcctagttagactgcataaaatataatgaacttagattgggacagtacggtagagatggttgatttccgggtggctagtactgttccaaccgacataagactaccaagtacatgtgaagaacatacgagtacgaccgcaattctcgtatgggcatagacctagctgattaagttatctagcaaaggtggtacctctgtgtagtggttcttatttaagtcctcgcgcaggaggcaaatttatgccgcgaagggcaatattgtgatatttaccgaggcgcaggtaaatatttgtttgagataaattatgatgtcatgtgacttgtttgtgaaccctgattgcgatgacatggtgtcatacaatcagatctctctaaagaccccgggaacgccataactcctctcactgctgataatgttacgttcagagcgtatggggattatagttcatggaacaggtaccactgatgttagtaaccgaaaagctttgccataacaaggctaatgtgtttggcacgtcatggattgcgggtaaagcgtacatctactgcagtatgaatatcctcaaaactattcaaatagccgtgctcgcggttatcgggcattgggactcactatggcatcttggatagaaacctaatttgaaattttattaaatacttctgcatttaaaacattacaggttttctacttctatattctctgctttctgcaagtaaatctagctctacacagatattacctctcatgcattcattgttgaataatataatagcttgcttagtacgttgtacttatccttacttcaacccctctttttcagagtctatttggagtttttgccgaagctgggagttcaatcacataagttagtttcctttaaaactagtcttcaagtctagtatagttagacggtttaattctatagtaaaacggcagaattgggtcacagtatagcttctgctgtaatagttagccacaaatttgtaaatgtcctattattttatataaatatatctcctttggagtcttgacc

SEQ ID NO: 27302 - DNA, 2510 bp, Oryza sativa
  ref <308>: DATABASE ACCESSION NUMBER: AK102744
  ref <309>: DATABASE ENTRY DATE: 2002-08-28
gagtagggttttaggaggcaacacgccgccctgcgccgccgccgccgccgccgccaccgccaccgccaccgccagattctcctaagcggcgatggccatggcacggcgttccgcctcccgtctcctctcctcgttccgccccttctcgctcctcctccaaccgctcgatgacgccccttcgctctcggccgcggcggcagcagcgtcggcccgccgggggatgtcttcggcgtcggcgctgcgggcgcgggacgagaaggaggtggcgaggtggcgcgagtcgatggaccggatgcggaatatcggaatctccgcgcacatcgactccgggaagacgacgctgacggagcgcgtcctgtactacaccggccggatccacgagatccatgaggtgcgtggccgcgacggcgtgggcgcaaagatggactccatggacctcgagcgcgagaagggcatcaccatccagtccgctgcaacctactgcacctggaatggataccaggttaatatcatcgatactccaggtcatgtggatttcactattgaggttgaaagagcactccgtgttcttgatggtgctatacttgtgctatgtagtgttggtggtgtacaaagtcaatcaattactgtcgatcggcaaatgagaagatatgaaattccaagggttgcatttatcaacaagttggatcgcatgggagctgatccatggaaagttctcaaccaggcacgttccaaacttcggcaccacaatgcagctgtacaggtgccgataggattagaagaagagtttgaaggcctggtggatcttgtggagttgaaggcttataagttcgagggtggtagtggccagaatgttgttgcatctgatgttccatccaacatgcaagacttagtcatggagaagcggcgtgaacttattgaagttgtttctgaagtagatgatcagcttgctgaagcttttctcaatgatgaaccaatacaatctaatcaactcaaggcagctattcgaagagcaacagtagcacgcaagtttataccagtttacatgggaagtgcattcaaaaataagggtgtccagccgcttcttgatggtgtgcttgactatttaccttgtccaatggaagttgaaagctacgcacttgatcaaaacaaatcagaagagaaggtcttattggctggaactcctgctgagccacttgtggcattagcatttaagctggaggaaggtcggtttggtcaattgacatatctaagaatctatgatggggttataaggaagggtgatttcatttacaatgtgaatacagggaagaagattaaggttcctcgcttggtaaggatgcactccaatgagatggaggatattcaagaagcacatgctggtcaaattgttgctgtctttggtgttgattgtgcgtcaggtgatacatttacagatggatcagtgaaatataccatgacttccatgaatgtccctgaacctgtgatgtccttggctgtctcccctatatctaaagattctggaggacaattttcaaaggctctgaatcgtttccagaaagaggatcctactttccgtgtaggtctggatccagaaagtggagagacaattatttctgggatgggtgagctgcatttggatatctatgttgaacgcatcaggagagagtacaaggttgatgcaaaggtcggaaaacctcgtgtgaacttcagggaaactatcactcagcgtgctgaatttgattacttacacaaaaagcaatctggtggtcaaggtcaatatggacgagtttgcgggtacattgagcctcttccatcagaatctgatggtaaatttgagtttgataacatgatcattggacaagcaattccttcaaacttcataccagcaattgagaagggttttaaggaagcttgcaattctggttcgttgatagggcatcctgtggaaaatattcgaattgtgctgactgatggtgcttcacatgcagtggattccagcgaacttgcttttaagttagcttctatctatgcttttagacagtgttatgctgctgctagacctgtaatattggaaccagtgatgaaagtggaactaaaagttcctacagagttccagggcacggtaaccggtgacatgaacaagagaaagggtatcattgttggaaatgatcaggaaggcgacgacacagttgtggtttgccatgttccactaaacaatatgtttggatattcaacagctcttcggtcaatgacacaggggaaaggtgaattttcgatggagtatctggagcacaataccgtatcgcaggatgtacagatgcaactagtgaatacgtacaaggccagcaggggcacagagtaatacagaaaaaaaagaaacagtcacttagttaacgttgcattttgtggcccttaatgatgctaggacatcactagtagagtgattcttctagattacataaacaaattttggtttcactttgtatgttaacattgtattttacggc

SEQ ID NO: 27303 - DNA, 3431 bp, Oryza sativa
  ref <308>: DATABASE ACCESSION NUMBER: AK102745
  ref <309>: DATABASE ENTRY DATE: 2002-08-28
gagcactaccactctcacaaaccaatcaagaaacacaatacgtcccatgacgatcatgatgagcctgaggcttgaattatccctcgtcctcatcctgacgccgatcgttgcagccgtcgcctggtggtggcagcagcagcagcagcgatgaggccacgttgcttgccttcaaggcagcgttcagggggagcagctcaagtgcgctcgcctcctggaacagcagcaccagtttctgcagctgggagggcgtcacgtgcgaccgtcggacgccggcgcgggtggcggcgctgacgctgccctccggcaatctcgccggcgggctccctccggtcatcgggaacctcagcttcttgcagagcctaaacttgagctcaaacgagctgtatggagaaattcccccgagccttggccgcctccggcgtctagagatcctggacattggaggcaactcgttttccggtgagctccctgccaatctgagttcctgcatcagcatgaagaatctgggcctcgcctttaaccagcttggcggccgcatcccggtggagctgggcaacacattgacacaactccagaagctgcagctgcaaaacaacagcttcactgggccaattccggcatcgctagcgaacctgtcattgcttcagtatctgtacatggacaacaacaacctggagggcctgatcccgctggacctcggcaaagctgcagctctacgtgaatttagttttcagcagaacagtctctccggcatatttccgtcctctctgtggaacctgtcaacactgacggtgcttgcagcaaatgacaacatgctacaaggaagcattcctgccaacatcggtgacaagttccctggcatacaatactttggattggcggataaccaattcagtggagtaataccttcttctctcttcaatctttcatcactcacaattgtgctcctttatggtaatagattcagtggatttgtgcctcctactgtgggaaggttgaaatctcttcggcgattatacttgtatggcaaccgacttgaggcaaataacaggaagggttgggaatttatcacttcactaaccaactgcagtcagctgcaacagcttgttatctcagacaactctttcagcgggcaacttccaaactctgttgtcaacttgtcgaccacactccataagctctacttagataataatagcatctctgggagcatacctgaggacattggcaatttgattggcttggacacgctggatctggggttcacttccttatctggagtgattccagcgagcatcgggaagctatcaaatttggttgaagttgccctgtacaacaccagcttgtcaggcctcataccatcatcaattggaaatcttacaaatttgaataggctctacgcatactacaccaatttggaagggccaatccctgcaagccttgggaagctaaaaacgttatttgttctggacttatcgaccaaccgtcttaatgggtcaatcccaaaggaaatcttggagcttccttcactctcttggtacttggacttgtcatacaattctctctctggaccccttcccatagaagttgctaccttggctaacctaaaccagttgatactgtcgggaaaccagttgtctggtcaaatacctgacagtataggaaattgtcaggtgctggaatcgctactgctagataaaaactcatttgaaggcggcatacctcaatctttgaccaacctgaaaggggctcaacatcctgaacctaaccatgaataagttatctggtaggatccccgataccattggtaggattggccatctgcaacaactatttctagcacagaacaatttttcaggacccatcccagcaactctgcaaaatttgacaatgttgtggaaattagatgtgtcattcaataatttgcaaggagaagtaccagatgagggagttttcaagaaccttacgtacgcatcggttgcagggaacgacaacttgtgtggtggaatacctcagcttcacttggctccatgtcccattattgatgcaagcaaaaacaacaaacggtggcataagtctcttaaaatcgccctgccaataacaggatcaatcttgctgttagtttcagctactgttctaattcagttctgcaggaagcttaaacggagacaaaatagtcgagcaacaatcccaggtactgatgaacactatcatagagtttcatattatgcattagccagaggaagtaatgaattttcagaagctaatttgcttggcaaaggaagttatggttccgtctatagatgtactttagaagatgaaggtgcaattgtggctgtaaaagtgttcaaccttcgacaatcaggatctgccaagagttttgaggttgaatgtgaggctttgagaagagtacgacatcgttgtcttataaagatcatcacctgttgctcaagtatcaatccacagggtcacgagttcaaggcattagtttttgagtacatgcccaatggaagcttagatggttggcttcatcccgtgtcaggcaatcccacttctagcaacacactgagcctttcgcagagactcggcattgcagttgatatcttggatgcactggattatcttcacaaccattgtcagccaccgatcatccattgcgacctgaaaccaagtaatattcttcttgcagaagacatgagcgctaaggttggagatttcggcatatcaagaatcctccctgaaagtatagttaaagcactgcaacattcagacagcatagttggaatcagaggttccattggttatattccaccagagtacggagaaggttctgcagtctccagactaggtgatatttacagcttaggcatattattgcttgagatatttaccggaaggagccctactgatgacatgttcaaggattcggtggatctgcacaaatttgcatcagcagcatttcctggccgagtcctagatatagctgatcgaacaatctggctacatgaagaagcaaaaaataaagatataacagatgcaagcataacacgaagtattgttcaagactgcttggtttctgtccttagacttggcatatcctgctcaaagcaacaagccaaagatcgaatgttgttagcagatgctgtgtcaaagatgcatgcaatcagagatgaatatcttctgtctcaggtggttaagaaatgaacagtaaagtacttgagctaaatgttgggtgaggacgtgaggtccacatgtagagttgatgattgcattgggaaataatcagaggtacacaaggtgttatagcattatattaagcttagatgcatgtcagtgtaagagatgcatacagaatgcaataatgttgattgcacgatgtagaagtacgagagttttggcttcttacacaatgtgagtaagatttcattgcc

SEQ ID NO: 27304 - DNA, 2434 bp, Oryza sativa
  ref <308>: DATABASE ACCESSION NUMBER: AK102746
  ref <309>: DATABASE ENTRY DATE: 2002-08-28
gagcctcctcctcctatcgctgctgcgccggcgccaccccctgtggatctagccacccagaggaaggagagggtcgccctcttctcccctctcatctccaagccatcactgcctccctctttctctcccaatcctcggtgagctgcagatccggtttgggggccatcggaatcgatgttcttggcctccccaacggtctccttgctggtgaatccgcgcccctcaaaggtgacgcatggaagccgaagccacccccaccgccgtcttctcccgccaccgcccatcctggcctccttctccaccctcttcctcaccttcacctcgatgccggatcttgctttagggtcgccagatttggtaagggaaggacataggagcgttggggctgagtgattggagaggcagcagctcgggcacgacattgacgacggtggttgcggcccggcgacgatggcaggtgcaacgacaacggcagcagtggctcggtttgtcctgctttctttgttcttctctttttattttttcccgtcttatttcgctccaagaaaggcagcccaacagttaatgccattttatatagtatgtaatggcatgtcatctcgcctggatgaagtggagtcaaactagactaatattgcattattagattaatcttacttctctctcagcagcaatatgctttaggcttaattcattgtgatgaatatatatatacggatatcccaatttacatgtcaaagatgttagtgtgaagcagtgtttagttgttaactaagttgcgtttagttttattttccttcagccatatgggaaactctagatgtggttgcagtacatatatgccagaattcaatctatcaacttatcaagaactgcgattttgtattatgtgttcaaaattacctactctcttaacatataaaatatccacctgttagaacaattatttagtttttactttttggagaggagttcaccaaaattgttctttggcaatataacatgccagaactattttgtagtttccacatggaggttatgcatttagtaacatataccttgatctgtagatttcatggggcatggtatcttaggcagtgctttgtttatatagcattttacatgactatccacaaacattaagaaattgtgattctgaaataatatgggatggttatattgtccagttgctggaatgtgtttatgtacattttatacttgcatggaaatccttatctaaatctttatttccaactttaggtgatagatttaccatgtttctgaaaatatgttaaagtccaaaaagatatctatttatcttcagtaaaatttaaaatgtaatctaatttaggagttcttggatcaggtttttcttggattgcatgaccaattagctgatgaatagtttcatattcaacactgaatcatcaatagttggtcaaattttacacgcagaatgtgatattttactactcttagattgccactgggataattggctcacttctgttcagctcattatttgtggttcacatgataacttttttttttaagttaactcattttgctccatactaacaaagaattgtgtgcttcgtgcctcggtctagcgaatcttagaagaggcaaatacacttaacaacatgaaatcatttttatgtattgtgttttatacactttgagctaatatggcaactctaaaattacaatattacaatgctaccccatgattctcattccaaattttggtatgtacaaaccattcattgtagttgccccgtataactcaataggatactaggggaaaaatggttgctttatgatggagatatagggtggtagcatcctgcataaagagataatctccacacctcttcattttcagtttttgtttgcatatccaacatatgtatataaattcaaaacaataattatttttgagtgacagaattgcttttcttcttttctaagctaggcagcgtgatctgcaatcattgggggtgatttcttctccaaaacaagcaggtgactttctatagtccaccaaggagtgatggcaggataaaagtgactcttctctaccatggtgatccatcccagaaagcttctccgaccactacatcctattttacattgagagttcaggttaaagtttccaatccaaccatacgctcattcatttcttccttaaaatagaaatatttgtgttggagcattttcagaattcaaacaagcaaagttctgtatagtatcacaactacctagcatcagtgataaatatagatgctactcaaagctttttagtatagtattccttttcaccagagttgatatgggagagaaattatagaactcctggaaagtgatgcagttttgtatagatgtgggatatttaagtatcttaatctgttgatttaaaattattgtcattggc

SEQ ID NO: 27305 - DNA, 3026 bp, Oryza sativa
  ref <308>: DATABASE ACCESSION NUMBER: AK102747
  ref <309>: DATABASE ENTRY DATE: 2002-08-28
gaccggtcaccggtaaacccgcccccgccccgcccgccgcaaccccagcgaaccaaaccaaaccaaacgaaacgaaacggagtagattcccccaaggccccaacctcctcctcgccttcccacctgtccacctccccccctccgccgccgccgccgccttcttcccgggggcggggcggggagaggaggcgcgggggtgcgggggtttagtatctcctctcgccggtggccgcgcggggaggtgacggcctgagattctcgccgcgtccgcccgtcgttctggtggtctcctcctccgccgccgccgccgcccgcgtgttgggggagagcggtttggcgtgaatcgggccggggtgagcggacgccgccgccgttggtggctgcttcatggagtgcttcctgctcagcctgaacccgttccggttcaagccgatttggccgccgaggaccgcgcccaaatctccctgaaaccctagggtttcccctcctccctgcccggggatttcgagaaaaaggaagtcccgggcggcgcttccccccaacccctcgtttttttttttgggttcatctcgtgtgttccgtgaaattctcgtcttctcggaggtttctgaggggagggagaggctgggctgaccggctcaaggtgttgtgaaaggacatgagcttgctgcgagaggctccttgtctcgtttagtttgagttcgggctgggcgtcccttcttctataggtgacggtggtggtggtgctgctgctgcgagggatggcgaaggaggaggacggcggcggcggcccggagttcgtgaggtggagggaggacttcgtgtcgcaggagaggggcagccgcgtcgtgcattactacctcgaggacgccgcgggcgcgtcgcacctcgccgtcgtcggcacggaacggagcctgcgccacatgctctatgtggtctcggaggatttccgggaggcgcagggtgccgatggcggcgggccgggggtgtttgcgcgcaagtggcggtcacgccgtgaggtggtggattggctcgcctccttccttccggcgaagtccctcgcctcgaaactttcaaaatttggatcacatatgggtaatgacattggattggatggatacagtgaacctgatagctttatgggtcacaatctggggaaagcctgtagctcggacattatgtggtctggttcgtcctggacttgtggcaagcagctttaccactataaagctttttgtcgtaatggtaccacaatatctacccactcttttgtgcttgtcatgtctgaggaggaaagtcgctatcttgcatacttggaagatatgtacgaagataagaaggggcagaagaaggttaaagtgcgatggtttcatcaaaaccaggaatttgcttgcgctatacctcctccccctcctcatccttgcgaagttttcatcactccttattctcaagtaatcagtgtggagtgtgtcgatgatattgcaactgtgttaactcctgagcactatgaaaaatgcgtcaatacattgccaaattcttctatggtgggaatccgtttctgctttcgccaatacagtaaaaataagtttaaacgttttgacctgagatcattgcgtggatattttagtcaagctgttgttttgtccttaaaacttcccccagagcaagaaaaggatgatggttctgatatcataaaaacttttgagcaatggacacctgggaagacaaagtttcctaagcagtttgagaggctttactcaaaatgtttgggaactaaaatctgccgaggcccacaggaagactccatagcatcttatcagaaaccaagcagtaagcaatctcccagaaaacatctctcagtcaagttcatagggccccagaatcagcgtatgccaacctacaatgttggtgacagaatagaggtcttgtctcaggacagtgggattgtaggctgctggttcaggtgtacagttctcaagtcatgtactaatcataacaaattgaaggttcagtatgatgatctccagaatgctgatgatagtgggagattggaggagtgggtacctgtatcaacattggctcgtcctgataaactgggattgagatgcccagagcgacgcagagttaggccacgccctcaacaaaatagtttggctgacggaactaatcttttacctggagctgctgttgatgtatggcaatttagtggctggtgggaaggagttctagtcagtgcagacaacatttcagctgatagcctacaaatatattttccaggcgagaacttctttagtgtatgccagctaaagaatttaagaatttcgaaagattgggtcaagagccactgggttgatatagaaatgaaaccagatgtgttatcgaaaataccttcggttggtgttcaaacaaggcaacctgataatctgacatctgttgagaggccggactccagaaattctgcaatgtctgaccaagagcttgcagccatacaaacaaactctagtgaagataaacaaacaggagctgatcagccagcagaagttagtttgactgatatggcctctgcttttgcagaggaccagaaacaaacagttctaggaaagcgacctagggatgatgatgctgaacaacattgcaatggggaagtaggcatagatgttggcaaattgtgaagtttgggaagcgcaacctcattagacgtatgtacatagctatagatatggtaattggaccccagcagaggggttttttactaggttgctgatatcagtgagcatcgacatcttttttcatacacgtgttcccttgttttactgttagcttcccactttcaggctttctgtcaccagatacagaggttgcaaactaaatattacccttaccagtcatattgtatagcagtctgattgatcattgcttctcttatgttttcctccggagtctggactatagtttcagtttattctcaattgttaatatagtttaagttcatatgaataacattcttgtcctagcttgcttgtgcc

SEQ ID NO: 27306 - DNA, 2189 bp, Oryza sativa
  ref <308>: DATABASE ACCESSION NUMBER: AK102748
  ref <309>: DATABASE ENTRY DATE: 2002-08-28
gagtcctcctcactgtccgtcccaagaaccactcggtgcagccgccgccgccgccgcagccagtgccattgcaagaatcgcgagggggtattgaggttgggcggcgagatgagcatgtacgggagggacccgtggggcgggccgctggagatatgccacgactcggcgacggacgacgaccggagccggaacctggacctggacaggggggcgctgtcgcggacgctggacgagacgcagcagagctggctgctggccgggccgggggaccagggccagaagaagaagaagtacgtcgacctcggctgcctcgtcgtcagccgcaagctcttcgtgtggacggtcggggtgctcctcgccgccgccgtcttcgccgggctcgtcgccggcatcgccaaggccatccccaggcaccaccgcccgccgccgccgccggacgacttcaccgtcgcgctgcgcaaggcgctcatgttcttcaatgcccagaaatctggaaagcttccgaagaacaacaatgtgcattggcgtggtaactcgtgcatgaaggacggactctcggatccggcagtcgggcgcagcctcgtcggagggtactacgacgccggcgacgccgtcaagttcaactttccagctgccttctccatgaccctcctcagctggagcgtcatcgagtacagtgctaaatacgaggcagttggggaacttggccatatccgtgataccatcaagtggggggccgattacttcttgaagaccttcaactcaacggcggataccattgatcgtgtcgttatgcaggtggggagcggtgcaacatcacccggttcgactcaaccgaacgatcactattgttggatgagaccagaggacattgactaccctcgcccagtagttgagtgccatgcttgttcagatcttgcggctgagatggctgcatcattggcagcagcatcaattgtgttcaaggacaataaggcgtactcgcagaagctggtacatggtgctaccaccctcttcaagtttgcaaggcaaaaccgtggaagatatagtgcaggtggttccgatgctgcaaaattctataactcaaccagctactgggatgagtttgtatggggtggttcatggatgtatctcgcaaccggcaattcatcgtacctgcagttggcaacacaccccaagcttgcaaagcatgctggtgcttactggggtggtccagactacggtgtattcagctgggacaataagcttactggtgcacaggttcttttgagccggttaaggctcttcttaagtcctggttatccatatgaagagatcctcaggacattccacaatcaaacaagcattattatgtgctcttatcttccaattttcaagtctttcaacaggacaaaaggtggtttgatccagttgaatcacgggaggccacaacctcttcagtatgtggtgaacgctgcattccttgcttctttgtacggtgactatcttgaggctgcagatacccctggctggtattgtgggccccatttctacccaattgaaactctgcgcaattttgcaagaactcaaatcgaatacatcttaggaaaaaatcctttgaagatgagctatgtggttggttacggaaaccgttaccctaaacgtgttcatcatcggggtgcctcgatcccaaagaatggtgtccactacggttgcaaaggaggttggaagtggagagaaaccaagaaaccaaaccctaacatcatcgtcggagcgatggtagctggccctgatcgccacgacggcttcaaggatgttcgcaagaattacaactacacggaagcaactctagctggcaatgccggtctagttgcagcattagtagcattgtcaggtgaaggccatggcgtggataagaacactatgttttctgccgtgccgccgatgttcccttcgcccccaccgcctccggcaccatggaaaccatgattggctgccactatctgattctgattcattttgtatacggcttatttagattagtgtttttctcccttgttctggaaatgctgggggaaacctaacagaaaagaaggcgtcaggtttttatctttgtttctcccattgttgtatacttgtataatccccatgttatgtaacactattgctgttctggtatgaacctagtaattaatactatctttcctcgt

SEQ ID NO: 27307 - DNA, 2110 bp, Oryza sativa
  ref <308>: DATABASE ACCESSION NUMBER: AK102749
  ref <309>: DATABASE ENTRY DATE: 2002-08-28
ggtcgcccctgtctcgcgcggcgcagctgcgaagaggagagaggagcgcgcggttttggcggaaaaaacgaagcatcggcgacgacggcgagcagatcagggcggctgcgattcgcggcggcggaggcgcaaggaagccactccccatcccccagccccacacgcagcaggtggcagcgtcccgtcttccacttcttcttcattcatctcctgtgaatgtgaatgtgatcctgtcctgctgcttcttccatttccagttccaccccttctctcttgtgcatgcttttgttcgtgcaacacccaacacccaacagggaggggaggggggcgatcgacatggtgcgagcaccggcaggggcagatccaccaccattcctccagacacgcatggacatggccgcctcctcctcctcctcttccctctctcaatctcactctcagtctcagacgcaggcgcacaaggtggaggaggaggagcacgccgccgacccaccctccccatcccgtaacgcctcctccaagtacgacttcgtcaaggtcaaggtgtggcttggcgagaatgccgatcactactacgtcctctccaggttcctcctctgcaggatgctcaccgtcaccaagattcctaatcatgttgccattaagattgccctcgaactcaagaaattgcttgtcgacaacagcctgcttgatgtttctcagagtgacttagaagctaacctattcaagctgatggagaagcggggatacggcgaggattatattaatcggtataaaatgatgaccagattccatcatcaaagagtaccactagtagttttagtgtgtggaactgcttgtacgggaaaatcaacaattgctacgcaactagctggaaggttgaatctaccaaatgttttgcagacagacatggtgtatgagttgctacggacatcaacagatgcccctcttacttcggtgcccgtgtgggctcgggattttgattctcctgaagagcttatcacagagttctgcagagaatgcagagttgttcgcaaaggtttggctggtgatttgaagaaggccatgaaagatgggaagccaattatcatcgagggaattcatttggatccaagcatttattttatggacgaggaaaagagagatgataattcaaaaatggagaaaaaggtagctgaatgtgaacagtcaccagcatctgtagagagcaagacagaaaggcaacaagaaaacgaactacatgagaagagaatggatgacagtcaggagtgcatgtctgaggagggaggaataagtgaagggctatcttgtgctaaaagccacgtaattagctcttctgattctgcatattctaaagagaaaaatcccagagctgaagacgaaggacataaggatttggacctacagaaaaacaacaccaccaagaaggacaaacctgctgctgaaccaatagtagtcccaattgtgttgaggatgtctgattttgatcacaaggcattgctagaggaatggacagccaccagggcttccagggataattgtcttcctcaggatcatcgaaagcttataaacaaccttaagcttattcaggactatctttgttcttttgagtcgcaggggttgaccgttgttgacatttcagcgaactcattccctcagacactagattggcttcacagctatcttcttcagtgcatcgaacgtggccttttggctgcatgttcagaaagtcccaagcaaggtgggagctaacggatacagatgagcgagagggaagcccgcattagtcttgcttaacatatactcactctgttccaaaataaaccaacattgtacggatgtgccacatcctaatacatcttggacacaagtactagtatgtgtcacatcgggtttattttgggacagagggagtatgtcacatatatgatgcttgtaaaattgtgcttttagtgggttgataatcaggaacttgtgcgttgccgccatccataaacgttggcagtggaaatgtaaccgagtagagaactccatagttcgataaaaaccttttagagctggaataggaaaaggaaaattaaaaaaaaaagctcaaaaaaggttgacaacc

SEQ ID NO: 27308 - DNA, 2281 bp, Oryza sativa
  ref <308>: DATABASE ACCESSION NUMBER: AK102750
  ref <309>: DATABASE ENTRY DATE: 2002-08-28
ggctccattgcaaatgacctcactcttttgaggacgaactaacaatggcttatgggcttgatcactctgagtggctggaagttaaatatatcaacaaccatgctctgtttgtagggtacctgtcgatggccgtcaaaggggtgggcttcttggtgggtttatggaccaccgttgttcttcttggtggcttcgtctctatgcttgagaagaaggatttctggagtctcaccatcatcacactcgtccaaacagcaggggtgttcgatgttctcctgaacgaaaagctgcgccatgctgtgaattcagtcgatggcttcttggttactatggacatggtgttcaggtgcgaagacgaggagttcgactcgggcatccagttgtggcgttcacgagcaggacgtcttgtgacgttcatccaggcggtggtgttcgccatcatactgtgccctctggctgtgctctacctgtctgggctggtcatcagcactagtctatcgctgtggcgcctcatacagcacgactacggcgacggcgacggcagcgccaacctgactccggcgctcaatgtgctctactcactggcactcttccagggcgtcctcttcttctaccagtgggtgtcctacttcgccagcttcccggaggcgctctcgtgcatatcgtcgctgctcgacaccaccaccacggagcagcaggaacagcagcagcaagacggagacagtgcgccgtccgctcactacagggatctcatggtgctgggccgcgtcatccttcagaagctcgccgccgccggcgagcacaacctttttctcatcggcaaaaagcagagcactatctccaaggccatgctgcccgtcagaaaagacctgctccacatccacaacaacggccatgtcgacgcatggaaggacatcgtgaccgagtcactgcagctcatgtcccagcttgtcagcgcccctgggaagaccggcgacgatctgcgctcccacatcttgacgattcacaaagacgacatcagagtgaataacattatcatctgtaagcaatgccaaagcaacaagaagctccacatgcaggccattaacatcttcacacagcaacagcatcctatggaagcactttcgacgacgtcttcgaatatagacacaacatatagcggaacgaacatcaggctgctcgtagacatcttcttgactaacaaggacgcctccacaagaaaaatggcagttggcatactggcaatactgctgtccgaccaaaataaaagcaatgccaatgccaatgccaccattatcttcaaggcaagtgacaccgttgtccgtgatctcaagacagtgcttttagatgatgaggaaacagaatacagaatatgcgcagcagaaatactcgagcatctacacaggacaaaggaagcctcctatctcaagaaactgatggaagccatgcaaaatgtgctaccgaagattctcaacgaaatatttatctctctctctccacctaagcaaggagaaaagcaagcagaaaaggcagaaaaaggaacagacggaaccaagacagatcctgacattgaagaaggtgctggtgccgttgcttcgaaagataatgtcgacgtcaatgaccagaaggaggacattggtaagaaaaaaaaggacaggacgaggaaactacatgcagctttactgtcacttagtgtggcaatatttgaaaaacggatcagagatggtaaagatttggatacacttgctggtgaaattgcccgaggagactctgcatccagctttgtcggtaagctgaggacgatggtagatcaaaacagtgaacaaacagtcaattgcctgagaattctgaagattgccactaggatgatcatatcactgctaaaacttgaaggatgctaccccaaacaagagctggagaacttgatggtatctctgtccaaagcttccgaacaaatgtttgaactggaagcgttgatgatgttatctagcagcgaccataccggaaagaagactgaaagcttcggttctctcgtgaaagaagcagaaggccttatgaagaataagaaggaaaaaaatgtggcaactacaccagctagcactatgaatggaaaccagtagattgagtagattatcaactaatctgctgatattcacaataaagaactttggcgttcccagaaaattgtttgtcataaagatattctgtaggataaactccttattctgtagcatgtgtgctgaaatctagctatttgtcccatctacttatcaaacattcaagt

SEQ ID NO: 27309 - DNA, 2215 bp, Oryza sativa
  ref <308>: DATABASE ACCESSION NUMBER: AK102751
  ref <309>: DATABASE ENTRY DATE: 2002-08-28
ggtttgtgaggtgaggtgagttgagttggggattgattgattgattcggattgggaagaagaagaagcaggggagcatgggcagcaagtcgtacccgacggtgagcgatgagtacctggcggccgtgggcaaggcgaagcgcaagctccgcggcctcatcgccgagaagaactgcgccccactcatgctccgcctcgcgtggcactctgctggcaccttcgatgtgtcgtcgaggaccggcgggcccttcggcaccatgaagaaccccggcgagcagtcccaagccgccaacgccggcctcgacatcgccgtcaggcttctcgaccccatcaaggaccaacttcccaccctctcctacgccgacttctaccagcttgctggcgttgtggccgtcgaggtcaccggcggacctgaggtccccttccatccgggcaggcaggacaagcctgagcctcctcctgaaggccgtcttcctgatgccacacaaggttctgaccacctaaggcaggtcttttctgcgcagatgggtttgagtgacaaggacatagttgctctttctggtggtcacaccctgggaagatgccacaaggagagatctggctttgagggagcctggacgtccaaccctttgatctttgacaactcttacttcaccgagcttgtgagtggcgagaaggaaggccttcttcagctgccaagtgacaaagccctcatggctgacccagccttccgtccactggtggagaaatatgctgcggatgaggacgccttctttgcggattacgccgaggcccacctcaagctctctgaactgggatttgctgaggaataagaagcctttagagagcgggatatccgcaaaagattaatgccgatttgtattttgcgccttagagtcagtacgatcaagactgtcgtggcggttgtaataaaaattagtgtgctttgggccatctttttatgtgattccaattgtctttctcttcattcttgctttgatgctctttgtctggacctctagaccgccgtattgtactgtggagtttcaaagttaccaagctatttgctgtcaagataactatggattgaattccccttgatggatgaaagctcattagggatagctccagtaacgttgtgtgtccatccttgagcactctcaacatggaacaattgcgtacttttggggaaattctgcatctgaattggttgcaccaaatgaccaaagatcaagcactgcaaatgatggggtgctgatgcagatagatgctggtatctgtcctgtaaagctgttgttacttgcattcggagcaaccaggtttttcatcatttccgtactgctgatggaaattgtcctgtgaaaaaaattgctggagatattcattacctgtagtggaagggaaaggctaggatttgatgactgcagctcttgaagtggaccatctaggtggttgaagctgacatcaaggacagcgatgctgctgaacaacaacgaatccattggtagaccaccggagagagaattgtgggagaggttgaggtgcaacaacttggtgagattgctaagggatggagagatgctccctgcaaggcctttggaaggcagcgagatatctctgactgtgttttcacctctgcagttgatcccttcccatgaacagcagtcagtacctaacgcccacgacatgttgaggctgccgttgtgttcaggtgagagctgcgcaacgaagtcgagggagctctgctcctgctatatgaaggaactggtgggagaggcaaaggtgagcagcagcaacagcataacacaaagctcccaaaaggcatgggggatttgtttctgaatctggactggaaacacgagaaatgaaatcatagggaggctgtacatagtgcaaataacagaatctgaagtttcattctctgaatgtcatgatatccaacctgaaagtcagagctaagaatgatgttcatctctaagtctaagacaaagtcagagaatgatgtccacacgatgcaaaaataatggagtgaaattcctgggcaagtacagtcacgtagaaccaccagttagcatttccctgttatatatagtagcatatctctgattagatgtgtgatttgccatactgaagtccgcagcttggaccaaaattttgtaggtaaggcgagccgtattatggaggattcactggaggtacaatacatgggaatttac

SEQ ID NO: 27310 - DNA, 1084 bp, Oryza sativa
  ref <308>: DATABASE ACCESSION NUMBER: AK102752
  ref <309>: DATABASE ENTRY DATE: 2002-08-28
gagcggagagaaaggaggagaaaagtagtaaagaggaaaggggggagtgagtctcccgagcaacggctctccactactagcccacagctcccaagaatctctgccatttcttgagctggtcgatccatcggggagggagagaggtcgaggaggcggcggaaggggagaggatggggtctggatctttcctcaagctgctggccaacaacttcgacgtcctcgccgggccattagtttcacttgcttatccattatatgcctctgtgagagcaatagaaacaaaatctcctgttgatgatcagcaatggctcacttactgggtgctgtactcgtttatcactttgtttgagcttacttttgctccagtaattgaatggcttcctttttggtcctatgcaaagttgttcttcaactgctggttggtcttaccttgcttccatggtgctgcttatgtttatgatcactttgtgcggccaatgtttgtgaatcgtcaaatagtaaatgtctggtatgttccaagaaaagaaaacctgagtaaacctgatgatgtgctatcagctgcggagagatatattgaacagaatggaccagaagcatttgagaaactcatcagcaagtctacgaggccttcaacctccaaaagaagcacaaagcaatctatcttggaggaggtagaatctgaacacatggccagggctgaaagagaatcatggggcgaaaatccattctatgataaaaattatcgatgctagaacaatctgttgttcacgaccacatactcatcaggttgccggcttatctgggttgaggataaagctttccatgtatctgacttcaggatttgtactttgatgcatcatgcatccactgaatgtcattcagtcccagttcccagaaccaattgtgcattggctgaactattgtaaataggtgctagtgttgacaatatcccttagttcttaaatgatgttatgtaattctgttaatctgccttgcgtggtagtgacaacctctggacttggttggcagttatatttttcccttcttggagaagggccagaattcaaaaatagtcctgatatct

SEQ ID NO: 27311 - DNA, 1355 bp, Oryza sativa
  ref <308>: DATABASE ACCESSION NUMBER: AK102753
  ref <309>: DATABASE ENTRY DATE: 2002-08-28
gacacgcgcagctttttgcttctgcaattctctctcctcccaaatcgcgagctcgtcggaagctagggcctcccgctccgatcagatcgccgcgccgccgctgctccagggtacctcaaaaatagaagatgcaaggggggagaggcaggagggatggtttcttcggttttggggacccctttccaggtttgggtagctttggacaaccagggagcctaatgtcaagtttctttggtggggcaaatccctttgatgatcctttcttcacaaaccctttcggtgctatgatgggacctagcttgttacagccaagcatgtttgggagctttgggtcaagcatgtttgggcctcatggaaatgtcaatggactgagcaatactggaggcttccttcagcaagctcctgaaccaagcaggccgagagggccaataatccaggagctatcttcagatgatgaggatggcgcagatgtgaataaagaagatgagaagaggaatgataaccctaggaagcatccaaggatggcccgaatgccatatgtggaggatcctgacgaagatactgaagataataaaagatctaggcacgagcagtttgaaagggggtatgccagagccagcacatcgcgtccacaacctcatacatttatgtttcagagctcaactgttacgtatggcggtccaaatggagcttgttacacgtcttcagccactaggaggactggtggagatggagttacatttgaagaaaggaaggaagcagacacgaccactggtaaagccactcacaggatttcacgtggaattggcaataagggccattcattgacaaggaaactgagttctgatgggaacgttgacacgatgcaaactttgcacaacttgaatgaagatgagcttgctcgatttgaggaatcgtggcagagaaatgcagtgcaaaatctgtctggttgggatcccagagtgaacatgcttggcactggaactgctcgttctggcatccgagatgggaatcagatgcttacgcttccagcacctggccctggtcaatcccgtggcgccagttcttctaggacgaagaggcccacccagaacacatcttcccgccgcacttagttccccagtagtatatgcaacatactgtttccacccaaaacaaatgtaactcgtgctcaccttggcaaatgatctgttagtatagtacttttgtgtcgtttctatgctcagcttgcatgcagagctacacgggaaatgtaagaaaagaaaacctgcactttacccaggttggtctctttgtgaccaaaactgtcagtctgtcacttgctggactaagcaatggtacttgctcttaactcg

SEQ ID NO: 27312 - DNA, 3009 bp, Oryza sativa
  ref <308>: DATABASE ACCESSION NUMBER: AK102754
  ref <309>: DATABASE ENTRY DATE: 2002-08-28
ggttttctctctcgctcgctctcgcgttgcgcctgcgccccttccaccccgcagccgccggccgcttccaattcgactcctccccctcgccgccgcggaagccgccgggccgcgcgccgccgccgattccccggcggattcgagagactcgtccgccgatcagaggagaggagaggaggcacccgcctccaggagtagaggaggaggaggaggcggcgtgaatttgttttttttttcttttttggtgtgtgtgggtgtgtgaattgcggttcgtgtggttcgtgtctagtgggtgaggcaccccccctagggtttgagggcggcctcgctagggtttgggcccccccgcgcgaggggagggaggaggaggctgccctagcggaggaggaggtggaggtcgccccctggtgttgtggggaggaggaggcggctgaggcggaggtcggtgtggtgtggttgtggtgtcgcattgcggaggacgattgattgtgctggtgggcgctgattggatcggagggaggaggaggagccatccctctctccccgccgttgctaggtgggtagatggtgagaggcgccggctgccatggagcaggacttaccggcgctcaagccgcaatggctggtgcagggccaggtcaccaccacgggagccgccaacctctggaccgtagcttcgccccgcccaggcccagataaccaaggtaggggtggttcatcaaggaaccattcatcatctggccaccaccgtgaccagaattctaggacatcttcgtcacggatttcctcaaatgggccccgtaaacatgaccgggaccgggatggtatgggaaagtcgaggggttatgcaagttttggtagaaacagggaaagggagcgagagaaagaatttgactcccgtgacagagagagtaggtccattacagcagacggttttgggtcgtttagtacatgtagaccggaaagggatagattgaatcgttcccgctcgaggacagattcatggaataaaggtgtagttagtccaaataattgtaatacctctagaaacaatactggtactggtggctcctttgaacgagaatttccacagctgccttttgatgacaagaggcaagatatcaacagagtaccatctcctgcctctccaattcagagaactgttgcaccggatcgttggaattcactgctagcggatgtccctggctcaagtgagccaaagaaaaacctgggtgtatcttctgtattacgaccggctcctagtaaacagcctgaggcagcgccgaacagcgggatctcattgagcatggcggagactgtgatgcaagttcctttgtcagttgggcctcagttatcgatggaagcccaaaagatggaagaaatcagtttaagacagaacactctaaggcctatgacatctccagcaatcaaatcttcagtaacaaattcttcaaaaacaaaaggtgtgagaaatggagatccttctggtcccatcaaggcacatcaatcattaataccgtccacaaatggctctgctcgagctccagttaaaactgatctttcaaaggtatctcacgcaggaaatctaaaaatcctcacccgagagcaaaactgtactatacacactgccaaagactgtcctgacaatcctatgagtcctcctccagctcctgttgcttcagtggaaccactgaaaaagccatgtgttagccaaaagcttaaggttgccacccatgacattcctctctctatactgcaaagtgcttatgtagataaaaaattaaatgcaagagataagcatagattctttgagtcgttgaggatcaagtcttcaaatggttcaagctcaactgctgagtcaggttgtccatcaccatccagtgtagctgatgtgaaacaagattcttgtcttaatgttggaaaagatgtatccttgtatcattctggaaaagatatatccttatatcattctggaacaaaatgtatgggaaatggaaagtgttcctgtgaagaagcaaattcttctgatggatctcagaggcatctgtctgataatgagaacaattcatccttggatcacactgcagatggggtttctcagaatcttctagtagaaagcaggtccatctcatcatctgaaccttctgataggggagatgaattccgggtgttcctatcaaacaataccgaaggcagttcatcatcagcacctgctgattcagatgatgggtacaagagatcccagtctggcagtgaggaagctagttcatcctcagagactaccgaaccaggagatgaggagcatccagctgaggatagtcttcctgctgattttgtggctttcatgatatctctcggctgggaaaaagacaaaaaggtggaacctttgggactggaagagattgctgtcactgtgagggctaatgaggagctagagcagaaacttttgtccatggaagacaatgccaacatcaagatcgttctcctgtatatctattcgggcagagggctggataaggagctgatgaagcctaacgcaggggataaaaacaatgcttgaagaacgcaggtgctagggagtaaggccacagtagctatctgcaaaaaaaatgcattgccaatcacacatcagtgagcaattgggcgttggttttgtttggatgctgagaagacaggtagcaaagggagtcttggcctgaattttgtcttagattaacaagtcaagattattttttttcctctattgacgcttgtccagcaatttggggaggtgggggttcactggtagctctgacaattttttgcttgataaaacagaggaagtttaggatttgtcgtctttttcccaggaataccaaaatgtaagtccggttattggaggcgcatggctgtgctgtcctttaaaaagaataggttcaagttttcccccttctcagggcttatctttgttttggaaaaagataagatgggtttttaacatgaggaaaggtgaatagttatattggtccc

SEQ ID NO: 27313 - DNA, 2522 bp, Oryza sativa
  ref <308>: DATABASE ACCESSION NUMBER: AK102755
  ref <309>: DATABASE ENTRY DATE: 2002-08-28
gatccgccaccgtcagatccagatccaacagccaaccttccctcaccacgtccccttctctctctctctctctctgccagcgccgaccaacctcaggcgccgcgatctagtcggctctgctcttccgccgcccgcgaatcccccccctcccccaatggctctcgacgccgccgcgccgtcgagcggcggcggcggcgaggacgaggccgtgcggccgctgctccccgcggaggcggaggaggagctggacgcgacgtacgcgccctacgcgcggcgggacgcgtacgggacgatgggacgcgggccgctccgggccgcgcggcgggtggagttgtacctcagggcggccctcctcgtcccgctccggttcgtcgccgggatgctcctgctcgtcgcctactacctcgtgtgccgcgtgtgcacgctgttcgtggacgaggtggcggaggaggggcggccgcggctgcgcgggtggaggagggtggccgtggtgcgggcggggcaggggctctcgcgggcaatgctcttcgtcttcgggttctactggatccgcgagacccaccggagctaccccaatgctgaggtcagtatcgagaccttccccactttctctgtttctcagcatgtgatttgtgtggccgatttgattcgtttgctccgatatgtactgtggtgatgtcacatgtatacggcgtactgtttggtggtcaatgatgattttggaaaaacccactgatgattttgtgatgccgatgtggatgcgggagtctgggagcacagctttttttttaattttttttgctgctgttagtaggcataataaatcaatgacattgcgttagatggttactgcgttatgaagctgcgactcagcatctctgagtagtttgtggctataccagatcaatcatggggccatgagtagtttgtgacttatctcggaatttggatttcttctccgtcggagcatgtagaattgtggactatgtcgactgatagttgctaccactagtaaattgcaaaacaacaagaagaaagttttattagcaattccatttgatacgtattcattaatggcatgaatgttatttaccgttgcagtaatacatgagatctttatgacttcaaattgctcaaatgcttaaacgtgatctttaaatcatttgagagaaactagggaagtgccatgattggcataaagacatgaagtgggaattcattaatttgatttttttttttaaaaaatatgattggctttgtagagtgttcattgtatagattgatccatgttacagaggtaatttaaaattatgttttacttgcttcctgagctgctacaaaactatggaacaaagctttattgccaagagaacaatacacaatccgacaggcaagttttcaatccagaacctaacattaatagctacagtgtagtttgattttgcttttttgtcgagggtacagaatgcagaatgaagcttctcttgcatggtttgtaagtctcgctggacaaaatttgagaaggaattgttttctttaaacttgtttgtattgctttgtagaagtactgtatgccacttttctatgtccatgtgactaaacttgtacaattttgttgtctggtgccccatcatgctgttataatattgtgctcaggatgtacatcaaggtcaatctgaagaattggaattaccaggggcaattgtgtctaatcacgtgtcttatgtagatattctttatcacatgtcagtttcttttccaagctttgttgcaaaggagtcagtgtccaggttgcccctagttggtctcataagcaaatgtcttggatgcattttcgttcaacgagagtccaaagcttcagattctaaaggtgtctcaggtgctgtaactgaaagggtccaagaggcttatcaagataagaattcctcaatgatgttgctatttcctgagggtactactacggatggggattaccttctgccatttaggacaggagcctttcttgcaagagttccagttcagccagtcattttgagatatccgtacacgatgtttagtccagcctgggactccatggatggggcacgccatgtctttttgctcctctgtcaatttgtaaattacatagaagttgttcgtttgcctgtatactgcccatctgagcaagaaaaggaagatcccaagctctatgccaacaatgttagaaaactgattgcaacagagggcaatttaattttttctaatctcggtttggcagagaagcgtgtatatcatgctgcactgaatggtaatagtcgtgctatacatcagaaagatgattgaaagctattgggtcactcttttgtatactgatagtggaggaacttgtatctgtgtataccatctttagctgatgatgcgttgtatactttccttgtttgaggagcatggtgaataccttcgtcctgatactacactgtataaaatcattgatcatcatagtttaataatggtttggcacattcttttgtgctttggcactc

SEQ ID NO: 27314 - DNA, 2847 bp, Oryza sativa
  ref <308>: DATABASE ACCESSION NUMBER: AK102756
  ref <309>: DATABASE ENTRY DATE: 2002-08-28
ggcttcttctgcttcacgctttcaccatttcacccctcacgccttgctctctctctcttccctctccaatggtgaacagaatggcggtaatccaaaagcgagggaatacaatcaaaccaagaaattaaatttaaatgagaagaaaaaatgcacagataatataaattgagacaccgaaatcaagaactcgtataaaaagcccaccaccaccaccgcttctctcctctcccactcctctccttctccttctccttcttcttcctccattggcatctccaagaaacccaagcctttctacgtgcttcgagctcggccaccggccggcggacgcgcgcgcgccagccaccatgtccggcggcgccgtcgccttcctcctgctcgtcgccgccgccgccgtggccaatgccgccgtcacctacgaccgcaggtcgctcaccatcaatggccagcgccgcatcctcatctccggctccatccactaccctcgcagcacccccgagatgtggccggacctgatccagaaggccaaggacggcggcctcgacgtgatccagacctacgtcttctggaacggccacgagccagtgcagggacagtactacttcagcgacaggtacgacctggtgaggttcgtgaagctggtgaagcaggcagggctctatgtcaacctccgcatcggcccctacgtctgcgccgaatggaactacggtgggtttcctgtctggctcaagtacgtcccgggcatcagcttcaggactgacaatggtccattcaaggcggcgatgcagacgttcgtggagaagatcgtgtcgatgatgaaatcggaagggctgttcgagtggcagggcggcccgatcatcctcgcccaggtagagaacgagtacgggccgatggagtcggtgatgggcagcggcgcgaagtcgtacgtcgactgggcggcgaagatggccgtcgccaccaacgccggcgtgccctggatcatgtgcaagcaggacgacgcccctgaccccgtgatcaacacctgcaacggattctactgcgacgacttcacccccaactccaagaacaagccttccatgtggacagaggcctggagcggctggtttacggctttcggtggcacggtgccgcagcggccagtggaggatctggcgttcgccgtggcgaggttcatccagaagggcggctccttcatcaactactacatgtaccatggcggcaccaactttgaccggacagctggcggcccgttcatcgcgacgagctacgattatgatgcgccgatcgatgaatacggtctgcttcggcagcccaaatggggtcacctgacgaaccttcacaaggccatcaagcaggccgagacggcgctcgttgccggcgacccgaccgtccagaacatcggcaactacgagaaggcatacgtgttcaggtcgagcagcggcgactgcgcggcgttcctgtccaacttccacacgagcgcggcggcgagggtggcgttcaacgggcggcggtacgacctcccggcgtggtccatcagcgtgctgccggactgcaggaccgccgtgtacaacaccgcgacggtgacggcggcgtcgtcgccggcgaagatgaacccggcgggcgggttcacctggcagtcgtacggcgaggccaccaactcgctggacgagacggccttcaccaaggacggcctcgtcgagcagctcagcatgacgtgggacaagtccgactacctgtggtacaccacctacgtcaacatcgactccggcgagcagttcttgaagtccggccagtggccgcagctgaccgtctactccgccgggcacagcgtgcaggtgttcgtcaacgggcaatacttcggcaatgcgtatggtggctacgacgggccgaagctgacgtacagtgggtacgtcaagatgtggcagggcagtaacaagatctccatcctcagctccgccgtcggcctcccgaacgtcggcacgcattatgagacgtggaacatcggcgtgctcggcccggtgacgctgtccggcctcaacgaggggaagagagacctcagcaaacagaaatggacataccagattggcctgaagggggagaagctgggggtgcactccgtcagcgggagctcctccgtggagtggggcggcgccgccggcaagcagccggtgacgtggcacagggcctacttcaacgcgccggccggcggcgcgccggtggcgctggacctcggcagcatggggaagggccaggcgtgggtgaacggccacctcatcggccgctactggtcctacaaggcctccggcaactgcggcggctgcagctacgccggcacctactccgagaagaagtgccaggccaactgcggcgacgcctcccagagatggtaccatgtcccaagatcatggctgaatcctagcgggaacctggtggtgctgctggaagagttcggcggcgacttgtccggggtcacgttgatgacgaggacgacatgaacaggaggaagaattgaagtggagatgatttgaattgtggataatttagcagggggaattgcaggattggggatttgggagcgaaggaaagtgggggcgtatagcaattatctatacatacggcgtagatacggatacggctgggtatacgtacatacgtatacgtatatgaactggtagagtactgttatttattgatggctgccgcgctggccggccgtacgccggagcggctgcaggaactgcggctccggtcacggctgccggcggccggtgtacggtcgccgtcgattatttattattttactagttatttattctgagccgtggatgatggctttgagatcagtgc

SEQ ID NO: 27315 - DNA, 932 bp, Oryza sativa
  ref <308>: DATABASE ACCESSION NUMBER: AK102757
  ref <309>: DATABASE ENTRY DATE: 2002-08-28
agagagagcgaggcacagctaccggcggcgcagccacacagcagcagcaggtgaggaggagaggagacccgccgccgccgccgccatgggtatctcgcgtgattccatgcacaagcgccgcgccacgggcggcaagcagaaggcatggcgcaagaagcgaaagtatgagctcggaaggcagcctgccaacaccaagctgtcaagcaacaagacagtgaggagggtgcgtgtccgtggaggtaatgtgaaatggagggccctccgtttggatactggcaactactcatggggaagtgaggccgtgacccgcaagacccgtatccttgatgtggtctacaatgcatccaacaatgagcttgtcaggactcagacccttgtaaagagtgctattgtgcaagttgatgctgcccccttcaagcagtggtacctcactcactatggagtggatattggtagaaagaagaaggctcctgcagccaagaaggatgctgaggggcaggatgctgaagctaccacagaggaagcgaagaaaagcaaccatgttgtcaggaagcttgagaagcgccaacagggacgcacacttgacgcccacatcgaagaacagtttggcagtgggaggttgctggcctgcatttcttcccgccctgggcagtgtggccgagcagatggctatatccttgagggcaaagagctggaattctacatgaagaagctccagaggaagaagggcaagggtgcctcagcttagagcaagtctttctttgttgctggttctacactgaaagaactacccttttttgttccctgagagctcctatgttatgtttgcagacgcatagctgtttttttaggattaaacaactttagcatgatgacatgagaatgggttatgtactctggatgttattaagttaaaatatttactttctgcc

SEQ ID NO: 27316 - DNA, 2906 bp, Oryza sativa
  misc_feature (529)..(529): "n"=any one base of a, t, c, or g
  ref <308>: DATABASE ACCESSION NUMBER: AK102758
  ref <309>: DATABASE ENTRY DATE: 2002-08-28
gagcgccgccactaaacaaatccgcgacacaatcctccgccattaaactctctctctcctctcgacaccacatcacagcagtgaggtggttgttggcggaggagggaggctggctgctgctgctgctgccgccgcctccatccatggcggcttctcctcctcctcctcctcgtcccctgctgctgcttctcccgttgctgctctggggcgtggtggttgcggcggcggcggcgacggatacgttgaggcagggggagtcgctgacgggggcggcgacgctggtgtcgtcgccgtcgggggtgttcgaggtggggttcttcgcgccggacccgaagctgccgtcgcggctctacctcggcatctggtaccgcagcatctcgccgagaaccgtcgtctgggtcgccaaccgcgccgcgccggccaccgcgccgtcgccgtcgctcacgctcgcggccaacggcgagctccgcgtgctcgacggctccgccgcggacgcggacgcgccgctcttgtggaggtcgaacgcgtncacgcagtccgcgccacgcggcgggtacaaggccgtcatcaggacaccggcagcctcgaggtgcgcagcgacgacggcacgctgtgggacagcttctggcacccgtcggacaccatgctgtccgggatgcgcatcaccgtgcgcacgcccgggaggggcccctccgagccgatgcgcttcacgtcgtggaccagcgagacggacccctcgccggggcggtacgcgctcggcctcgacccggccaactccggccaggcctacatctggagagatggcaatgtcaccatttggaggtcaggacaatggactgggcagaattttgtgggcattccttggagaccactgtacttgtatgggttcaagccagcaaatgatgcaaacttaggtgcatactacacttacactgcatcaaacacatctctgcaaaggtttgttgttatgccaaatggtacagacatctgttacatggttaagaagtcagcacaagagtgggagactgtctggatgcaaccatcaaatgagtgtgagtactatgctacgtgtggcgcaaatgctaaatgcactgccatgcaagatggcaaggcaaaatgtacctgcctaaaaggatttcagccaaagttgcttgatcagtggaatatgggaaatgggagtcaaggttgtgtcaggagcccacctttgggttgtcaggtgaaccaaactggggatggatttctttctatcccaaacatcaagtggccggatttctcatactggccatctacggtgcaagatgagaatggatgcatgaatgcttgcctcagcaactgctcatgtggtgcctatgtctacatgactacaataggatgtctactgtggggtagcgacctgatcgacatgtaccagtttcagagtgggggatataccctaaacctcaaacttcctgcttctgagttacgctcacatcatgcagtttggaatagccacaatagtgtctgcagtggtgctatttgttttgctagcttgcctcttcctgtggtggaagcgtgggaggaatatcaaagatgtgatgcacaaaagttggaggtcaatgcatacgtctacacgatctcagcagaatagtggtatgctggacatctcccagtcgattccttttgaagacgacacagaggatggaaaaagtcatgaactccaagtatactcctttgaccggataaaagctgccacttgtaatttcagtgactccaacaagcttggagcaggaggatttggtcctgtatatatgggaaaattacctgggggagaagaagtagccgttaagaggctttgtaggaaatcaggtcaaggcccttgaggagttcaagaatgaggtcatacttatcgccaaactgcagcatcgcaatcttgtgagactattaggatgctgcatacagggagaagagaagatcttggtgtacgagtacatgcctaacaaaagtctagatgcattcctcttccatcctgagaagcaagggctcctagactggaggaaaccgtttgatataattgaagggattgctcgagggctgttatatctccaccgggactcaaggttgcgagttgttcatcgtgatctcaaggcccgccacattctcctggacaaagacatgaaccccaagatttcagatttgggaatggcaaggatgtttggaggggatcaaaaccaattcaacacgaatcgtgtggttggaacatttggctatatgtcgccggaatatgctatggaaggcattttctcagtaaagtccgatatttatagctttggagttctaatgttggagatcatcacaggaaagagggctttgagctttcatggtcaacaagactccctaaacattgcaggatttgcatggcgacaatggaatgaagacaagggcgaggaactgattgatccattgataagagcatcgtgctcacttcgacaagtcttgagatgcatccacattgcattgctatgtgttcaagatcatgcgcaagaacgtcctgatatccctgcggtcatactgatgttgagcagcgacagctccagccttcccatgccaagaccgcctaccctgatgctccatggtcgttcggctgagacgagcaaatcaagtgagaaggatcagagccactccatcggtactgtgtcaatgacacaattgcatggaagatagcttagcagggacaacattgtgaaaatcattaacagcttggttgttctttttttccccttttctctgctattacaaaggtattgtcttgtgtagattagtattcaggggccttcactcatgctaatttgtaaaataacatttatgtcatatataaaatggcatgtaagttttgtgaaatgaagctattgttgttagattgatttgtg

SEQ ID NO: 27317 - DNA, 1959 bp, Oryza sativa
  ref <308>: DATABASE ACCESSION NUMBER: AK102759
  ref <309>: DATABASE ENTRY DATE: 2002-08-28
gctccttccctctcctctcctcctctcgtctcgccctcctcctccccacctccacaacccaaccccacccccacccccacctcctcgcggagatccccctcctcgccgcgctccccgccggaatccgcggcgagcggcgagcgtcccgagccccggatcgccgggaaccgcgccggatcccgcgggggctcggccgccgcgagcgagctctccccggcggcgtttccccggcagatccgatccgaggaatcctatcgcgagggcgttggcgctgttgggcggggtggggggaaaaacttctgcagaggaggaggaggaggaattggggggaggccgtggcgacgcctaggtcccttgcgccgtggacgccatgattgagcagttcgtcaatttcgtcatccggccgccccggtcagagtataatccagatcagtatttatgggagacggagtttatccttgctgggcgcaagtacaaacgactagacttggagcttacgaatgcaagaggccttacaataaaatgcagccactatgttcctgctttcattccagagaatacttctcttccatgtgtgatttactgccatggaaatagtggatgccgggcagatgcaaatgaagctgctgttatactgcttcctgcaaatatcactgtttttacacttgatttttccgggtcaggtctatcaggtggagattatgtaagccttggttggcatgaggcctttgggggcgatcgatgggtgctgttacaagcctactctatggagcagaagattcctcgattgctggaatggtattggatagtgctttcactaacttatatggcttgatgatggagcttgtggatgtctacaaaatccgggttcctaaattcacggttaagatggctgttcagtatatgagaaagatcattcagaagagagctaagtttgacataatggatcttaatgttttacagttcgctcccaagacgtttattcctgcattgtttggtcatgcttcaaatgacatgttcattcagcctcaccactgtgatcgtattcaccaggcgtatgggggggataaaagtataataaaatttgagggtgatcacaactccccaagacctcaatcatattatgattcagtttcaatgttcttctataatactttgcatcctcctcaattgcctgtgaaatgctccaataatctaggtgctttcaaagttggcacggtgaccaatgagagtttcatttttgagatcattagtggtctacgaggagctggaaccaattcatgcagttcatcaatagatgcatcgaaatttccaaatgctacaacaccagtagttgaattgctgtcagagagtgtgaatcagctgtccattaagaatgacagtgacttggattttcttttagacgagaatcgcaccctctcagaaattgatggtgatagtgctgggtcacgcttgcaggacaaatcaagtgggcacaatgaggaatcctgctcatgtacaagctctaacagagaaagttggggtagatgttcctctttagggggagctagtgacgactcattccctggcgatattagtgataagcaagagaatatgactgtaaaggctctggcaacaccgctaagacagaaagacagcaaatcgacaaccccaaaaacaaaggagaagaagaagtcactatggaagaagcttaaccgtgagagggcaggggtgggtgatagtctatcgcaacgtttgaagatgtgcctcagtcattcttctcgtcacaagagagtcaaatcatctgggatagtgtaacaacttattagccttgacaaagtccatctcaacgaatcactgacactgatcagttccgtgaacaccgaatcgccttgatttgattctgacttacctgctggcactaccagtgccagattgtaacttgtaacactggtgagtacatactcgattgccatggcc

SEQ ID NO: 27318 - DNA, 1934 bp, Oryza sativa
  ref <308>: DATABASE ACCESSION NUMBER: AK102760
  ref <309>: DATABASE ENTRY DATE: 2002-08-28
gaaacctccaacaacttttacaccaattgtaactgtaatgggcctgactcactccactcccttgcgcttgcgccggccctagccgatctcccctctcctcgtcctcggcctcctccacccccacggagaggtctcctcgcgacttcacccgccgcctccgcgccgatctcatctccatccccccgcgagcagcggcggtgccggtgccggcgtcctgctgcttccgccgccggtgagcaccccgtagacctgtggtgtggtgcggtgcggggaggatggcggagccgtctaaggtgatccacatccggaacgtcgggcacgaaatcgctgaggctgatctgctgcagctattgcagccgtttggcaatgtttccaagatcgtcatgctgcgtgccaagaatcaggcacttctccaaatgcaagacttgcataattcagtgagtgcgctgcaatactacagtactgttcaacctagcgtaaggggaaggaatgtgtacatgcaattttcgtcccaccaagaacttaccactgaccaaaactctcatggacgaaattcagatcaggagtcagaacccaaccgaatcctcttagttactattcaccacatgatgtatcctataactgtggaggttctacatcaagttttcaaagcttatggatatgtggagaagattgtcacatttcagaagtcagctggttttcaagcccttatccagtatcagtcactccaagaagctatggatgcatttggtgctttgcatggaaggaacatatatgacggttgctgccagctagacattcaatattcaaatctaagcgaactgcaagtccattacaacaatgatcgttctagggatttcacaaacccatcattgcctacagaacagcgtccaagggcctctcagcaaggctatccagatccaggtggtctttatgccttccaacaaccaggagcttcatatgcacagatgggaagagctgcaatgatcacagctgcattcggtggaactttacctcccggggtgactggtaccaacgaacgttgcacgctaatagtcagtaatttgaacactgataaaataaatgaagataagcttttcaatctgttctctctatatgggaacatagtccgaatcaaaatactgcgcaacaaaccagatcacgcccttgttgaaatggctgatgggtttcaggctgagctagctgtgcattatctgaagggggcagtgctatttgcaaagaagctcgaggttaactactcaaagtacccaaatataacaagcgctcctgatgcgcacgactacacgacttcaagtcttaacaggttcaacagcaatgtaatcaagaactaccgtcactgctgcgctccaaccaaaatgatccacatttcagccctcccacaagagatcacggaggatgcgattcttaaccatgtttcagagcatggttctgttgtaaacacaaagctgtttgaggtgaacggcaagaggcaggcgctcatccagttcgagagcgaagaggaggcgaccgaagcccttgtatcaaaacatgccacctcgctggagggtaacacgatcaggatctcattctcccagatgcagagcatatagaaactcatcgtggggaaacttatccagctaatcggatgacgagtagcaagttttatttaggaaagcattgaactttagatgtgaatcctgttctgtcttctcctgtaggccgatgctttgtcttttgctgtaccatgctgtgagactgactgaacaagcttgacgttggggcctttagctgcaccaaatggttttaagcttcttttctttcccttgttggttttaggcatccaaggattgtgtctggatattgtgctgttctaagagagagttctgccctgccatgaacaaatcgtgcctgttgatctaaaaaaaagttgtgtt

SEQ ID NO: 27319 - DNA, 1657 bp, Oryza sativa
  ref <308>: DATABASE ACCESSION NUMBER: AK102761
  ref <309>: DATABASE ENTRY DATE: 2002-08-28
ggggctgcttcctcgcctgcttcggcgaccgccgccgccggcggcagccgcggaggcagtctccggcgaggtccccgccgccgcggccggaccatgttgctctgctcggcaaggcgttgacggcggtggatgtggaggcgaaggaggaggtggaaccgccgccactgttgcaggaggcgaaggatgtgttgctggcaccgccgcccatgccggtggaggctgcggaggaggtggtcactggcgcaaggcccggaaaggagctgagtgagcagaaggcatcgccagcaagctctttgctgccggagaagcaagtaacaccgccactctccccggtggcacactcaccacctttggcggaagcagttgtttgcactcctgatccagaactcagggaggtgggcggacaagagagccgcagcagtggcaagaagaaagtaacgttcgacatgaatgttacggcatatgaaaacactgcaccggctgaccaagaggaggaaccaccagagcctgtcagtatggtagaaaatgaagatggaaaacacatgcaaaaggatgtgctgctcccggagaatcaccgttaccggaattgctcagacagcgaagaagaagaagatgagtatggtgaggacgacaactacggtgatgatagtgatgaggaggaggaggattttgtagactgcaagattgatttagtagacaaggatgaactgtacactgaagatatcaagcaggagtcccatgagtctcttttctcattgcaaatgtacaaagatcagcagaatgacaatgaagtcagcagccctgcacctaagagcagtagtacctctgtagaggaacaaagccctctaattcagagaaacaatcatcgcgacagaggccagtatgtccgtcctgtgctgaatttggttcagaatatgtcacagtggaagggagtaaaagcccaagcagcaccagctaaaaagtcgaataaggagaatgtaaattcagtgccaaaggtaggtgcaacccctgaaaattctatcaagaaggaagtttctgtggatgcgagcctctctacttggttggtttcttcagataactcaacagtagacaaggtgcaaagtggatctccttgttccatttcaactgtaaaccgagatgaaaggcctgtcctgggtgctttgacggtcgatgaccttaagcaatcatcagctacatcatctccacgaaggtctcccagccataaccgtgaagaggcgatcttgggtacggtgggaagttactggagtagcaccaagcaagacaatgcacactgttcttcaagatcagattcaggaaccaatggaatccccaatacgacaagcaaatacagagaggtgcattcaacactcaagtcatatgtttcttcagatttttgaatgatgtactgatgcttcagtgggttgctgcaggacaaaagggtaaactggcactcaactcccttcaatgtcaggctggatagagcactgaagaaatcctctgcatgagcttgtttctcttcatttaagcgtttgaaaattttcaagtgtgccaagtccttgtttgttgtccaccttgtaagaatgtgtaagatttagagtgtgaagccaatttcatttcatgtacatgaaggtgcagaagttcttctggattttggacc

SEQ ID NO: 27320 - DNA, 1150 bp, Oryza sativa
  ref <308>: DATABASE ACCESSION NUMBER: AK102762
  ref <309>: DATABASE ENTRY DATE: 2002-08-28
tggtggctcgctggacacaacacacacccacacccactcccccactctctctccggttcatgtcctgctgctccccatgtcgcccccactcgagctcgactacataggcctctcgccgccggtgcccgccgccgccgatgccgccgccgacaacgacctgaagggcaccgagctccgcctcggcctgcccggctcccactcgccggaccgctccccgcccgccgccacgctcgaccttctccccgctgccaagggcgccaagcgcgggttctccgacgaggcgcgtccgctgccggcgtccgccgccgccgccgccgccgccgggaagggcaagaaggcggcggccggcgaggaggatgaggatgcggaggaggaggacaagaaggtcgccaccgcgccgcaggcgcctgctgccaaggctcaggtggttggatggccaccaattcgcagctaccgcaagaacacgatggctactaaccagctgaagagcagcaaggaggatgctgaagcgaagcagggccaggggttcctgtacgtcaaggtcagcatggatggtgccccctacctcaggaaggtggacctcaagacctacaagaactacaaggacctgtcaactgcgcttgagaagatgttcattggcttcacaactggcaaggatggcttatctgagagccgcaaggatggtgaatatgtgctgacttatgaagacaaggatggagactggatgcttgttggcgatgttccatgggagatgtttgccaactcttgtcgcagactcaggatcatgaaaggttcagatgcaattggacttgctccaagggcagttgataagtccaaaaaccgcaactagaatggtttctgccccacagtcaaaagcaagatggagatcaaatgactgtagggaattttctgaaaaccaagaagtctaacagttttaagatggagtctgccttatggtctgtactacatggtttgctattgtgaaagttaaaaaaaaaggtgtcttgttatgttagcttcgccaaatctcctagggacataaactctatttgattgtgcccaagtctttgtacgtgtgttaatgctattcgtgtaaatggtttggacaccatgtgctactgctatgattgagcacccctacctactttgc

SEQ ID NO: 27321 - DNA, 1890 bp, Oryza sativa
  ref <308>: DATABASE ACCESSION NUMBER: AK102763
  ref <309>: DATABASE ENTRY DATE: 2002-08-28
ggcatcgcatcctctccccacacaatccccacccggcctagcgagcgagagagagggaagggttgcgacttgcgactcgcgagcggcgagatggcgaaggacgtggagatggcggtgcggaacggagacggcggcggcggcggcggctactacgccacccacccgcacggcggcgccggcggcgaggacgtcgacgacgacggcaagcagcggcgaaccggtaacgtatggacggcgagcgcgcacatcatcacggcggtgatcggctccggcgtgctctctctcgcatgggcaacggcgcagctcggctgggtggtcgggccggtgactctgatgctcttcgccctcatcacgtactacacctctgggctcctcgccgactgctaccgcactggcgatccggtcagcggcaagcgcaactacacctacatggatgccgttgcggcctacttaggtggctggcaagtctggtcctgtggtgttttccaatatgtcaacctggttgggacagcaattgggtacacaatcacagcatccatcagcgcagcggctgtgcacaaggccaactgctaccacaagaacggccacgatgccgattgcggtgtctacgacaccacgtacatgatcgtctttggagtcgtccagatcttcttctccatgctgcccaacttcagtgacctctcatggctttccatcctcgccgcggtcatgtcattctcatactcgaccattgccgttggcctctcgcttgcgcgaacaatatcaggtgctactggtaagactactctgactggcgttgaggttggagttgacgtcacttcagcccagaagatctggctcgcgttccaagcgctcggtgacatcgcgttcgcctactcctactccatgatccttatagaaattcaggacacggtgaagtctccaccggcggagaacaagacgatgaagaaggcaacgctgctgggggtgtcgaccacgacggcgttctacatgctgtgcgggtgcctggggtacgcggcgttcgggaacgcggcgccggggaacatgctcaccgggttcggcttctacgagccctactggctgatcgacttcgccaacgtctgcatcgtggtccacctggtcggcgcctaccaggtgttctgccagcccatcttcgccgccgtcgagacgttcgccgccaggcggtggccgggctcggagttcatcacccgggagcgccccgtcgtggccggcaggtcgttcagcgtcaacatgttcaggctgacgtggcggacggcgttcgtggtcgtcagcacggtgctcgccatcgtgatgcccttcttcaacgacatcctgggcttcctcggcgccgtcgggttctggccgctgacggtgtactacccggtggagatgtacatccggcagcggcggatacagcggtacacgtccaggtgggtggcgctgcagacgctcagcctcctctgcttcctcgtctcgctcgcctccgccgtcgcctccatcgagggcgtcagcgagtcgctcaagcactacgtccccttcaagaccaagtcgtgatcccgatcacgacggccttttttttttgcttttgcatcctgatgaaaaaagatttcagaaacatatgcacaacaaatgccggaagttagccaagagtttggtcaccagctcggtgcgttggtcggtcaggaggaggagggttcaacttgtgtaggttaagaaatgctagagagtatggagaccatcttcgattgctgctcatgtatagaaaaaagaggaagcttcgtattcatgtaatgaatcggaatgtttaacaaacaaggcttgttctgaactcttctcagggacaggcatggataacagattaaagataaatgaatgtgttagacaagggcc

SEQ ID NO: 27322 - DNA, 2106 bp, Oryza sativa
  ref <308>: DATABASE ACCESSION NUMBER: AK102764
  ref <309>: DATABASE ENTRY DATE: 2002-08-28
ggggagagagatacgcgacaaaacaaatccgcccccgagaaaaggaggccacgaaattacgagaatgccactcaacctcgcctcctctcccgccgccgccgccgccgccaaggtctgcgccggcgtgcgcgcgtccccgcgccacctcctcccccgcgctcttgaccaccagagccgccgcgtcctcagcttgtcgtcctcgtcgtcggcggggcgtgcggcgggtgtgcgggccatggccgcggcggaggccggtgcgtcgacggcgacacaggctaagtcgagcgcaggagtcaaacaagcactgatatcattgtcggataaaacagacttggcctatcttgggaatggccttcaagccttggggttttctattatttcgactggtggcacagcatcaagcctggaagcagctggagttaatgttacaaaagttgaacaaattacaaattttcctgaaatgcttgatggtagagttaaaacattgcaccccagtgtacatggtggtattcttgcaagaagagaccaggagcatcatcttaaggcattgaatgagcatggcattgggacatttgatgtggttgtggtgaacttgtatccattctataacaaggtcacctctggtgtaatttctttcgaggatggcattgaaaacattgatatcggtggacctacgatgatccgagcagcagctaagaatcataaggatgttcttgttatggtggatcatgaagattaccctgctctattagagtatctgcaaggaaaacaagatgaccagcaattccgcaagatgctagcatggaaagctttccaacatgtcgcttcttatgattcagctgtctcagaatggttgtggaagcaatcgaacaaaggagatgtattccccccgaacttcaccgtgcccctgtccctgaaatctacacttcgttatggtgaaaatcctcatcaaaaagctgccttctatggggacaagagtctttctgtagttaatgctggtggtattgcaacagcaattcagcaccatgggaaggaaatgtcttacaacaactacttagatgcggatgctgcatggaactgtgtatcagagtttgagagtcctacgtgtgttgtggttaagcacacaaatccatgtggagtagcatcccgacaggatattcttgaagcatacaggttggctgtaaagggagatcctgttagtgcatttggtgggatagttgctttcaatacgacaattgatgaggatcttgcaaaagaaatccgtgaattcaggagccctacagatggacagacgcgaatgttctacgagattgttgttgcacccggctatacagaaaagggtcttgagatcctcaaagggaaatcaaagacattgaggatactggaggcgaagagaagtggaaaagggatgctatcactcaggcaagtcagtggtggctggttggctcaagagtctgatgatctaacccctgaagatatcaccttcacaacagtgtccgagagagctcctcaagacagtgagctctctgatgccaaatttgcctggctttgtgtaaagcacgtaaagagtaacgccattgtgatagccaagaataactgcatgttaggcatgggaagtggccagccaaacagactggagagtctgagaattgctttcaggaaagcaggagaggaggccaaaggagctgctttggccagtgatgcattcttcccattcgcttggaacgacgccgtggaggaggcgtgccagaacggcatcggcgtgatcgcggagccgagcggcagcatgagggacggcgacgccgtcgactgctgcaacaagtacggcgtctccctcctcttcaccggcgtcaggcacttcaggcactgagctagctagcctcatgaaccttgatcttcctgcaaaaaaaggaaaaaaaacatgggcatgtcagatcgatcgctctttctgtatcacaagagcatgcagatcgaccagcgtttgatcaccttgagaaaaactcttgacggcttgtactaggctgcctgccactggtgtgacagaatttgatcagcttgacattttgcaataagattcatggtgataataagattaggatgtctcgt

SEQ ID NO: 27323 - DNA, 1309 bp, Oryza sativa
  ref <308>: DATABASE ACCESSION NUMBER: AK102765
  ref <309>: DATABASE ENTRY DATE: 2002-08-28
ttgttcattggtgcatccatcattgttgctgaggctgtgcatacacgcaatcttggactcatgatccgtggccttgcagcacatgactctggcaagcaccttgtccttcgccgtcgtgctgctgccagtcagctcaccctgtattgcactgccattggtggcattggggctgcgctcatggctgctttcatgtaccacatgcttcggcgcactgaccagctcacaggcctttgggtcgtctccatcttcagtggccttatctggttcattggtatctgccatggtctcttcacaaaccgacccagcagctcatcgcccaccacagcatttgagcctaacttcttcaccaagctcagctacagcatgacccttgtgcgatacccacaggccatcggaagcttggttgcagtgttcctttcatctttcgccacaatgtgcatcttcaccagtggcacattgtatgctattggtggtgtttgcatcaagccagtccttgtgctcgtgctctggatactctacttcctgttcccgttgatctcacttccgctgctgcacccaatccagatcatcatccgtgctgatgctgttcgcatgcagctgcttgggttcatcatctgcctatttgtgtctggtgctggtttctacttcaagagccacaggtggagagccgctcacatcattgtgatcgctcttgtccagagcacagccaatggtgtgctgtactcatttggtcgcattctgctgctcgatgcctcgccaccagggaaggagggtgcttttgcggtgtggtatgcatttgtacgctgcattggtgctatgattggcttcgctgctgcatccgctgggcctgggcgtgctggaggatcgtttgctgctgcgttcctaggcagcttcctcggcatcattgttctgatctttggtaatgtgagcaacatcggggcgctgaaggctgctgggcatctgaagggaatggaagacgagaagaggctgggcatggagaaaggggaaggcatgagtgcggttgccgattccggcgagggaagggggagggtatgatgatgattaaatgggcttgtgggaaggaaagattggaaaattgctgtggaggttgtgtttgtgagagggatttgttcttctttcttgtttctttcttgttcatgtttcagtgacactgttaattcggtgctttgccccccttggatgcatgatgatgatgacatagtggtagaggaagtgtgctagttgttaatgtgttattctttgcttggaagacaattgtaactgatgatatggttctttgttcatcgcc

SEQ ID NO: 27324 - DNA, 2423 bp, Oryza sativa
  ref <308>: DATABASE ACCESSION NUMBER: AK102766
  ref <309>: DATABASE ENTRY DATE: 2002-08-28
gtactaaagctaaattttgatttgtatgaggagcctaacgatgatcaagagctatatatataactaaatcaagcgctcactgctcactgcttactgctctctcctgcacttaagcaacaaagcaattagagagagcgtagagctgatcgatcggccggcgatggagacgacggcggcggcgacggcggcggagcggcggcggccgctgttcacgacggaggagttgggcggcagggcggtgtacagggtgcaggcggcgacggtggccgccgggatactgctggtgctctactacagggcgacgcgcgtgccggccgccggcgaagggagggcggcgtggctggggatggcggcggcggagctctggttcgccgtctactgggtcatcgcgcagtccgtccggtggcgccccttccgccgccgcaccttcagggacaggctcgccgagagatatgaacaaaatctacctggtgtggatatctttgtatgcactgcggatccacaatcagagccaccaagccttgtcatctctaccatcctatcagttatggcatacaattacccatcagaaaaaataagtgtgtacctttccgatgatggaggttcaattcttactttctatgctttatgggaggcctccatatttgcaaagaaatggctaccattctgcaaaagatataacattgagccaaggtcaccagctgcttacttctcagagtcaaaagtgcatcacaatctgtgcatcccaaaagaatgggcactgatcaaggacctgtatgaagaaatgagagagagaattgatacagctaccatgtcaggaaaaattcctgaagaaatgaagctaaagcataaaggatttgatgaatggaactcagattttactttgaaaaatcaccagccaattgttcagattctgatagatgggaaaaaccgaaatgcaattgatgatgatagaaatgtgctaccaacaatggtatacgtggcgcgcgagaagaggcctcagtaccaccataacttcaaagctggggcattgaacgctttgatgagggtatcatcagtgataagtgacagccctgttatcttgaacgtggactgtgatatgtattccaacaatagtgattcaatcagagatgcgttatgcttcttcctcgatgaagaaatgggccagaaaattggatttgtgcagtaccctcagatcttcaacaatatgacccaaaatgatatatatggaaactctttcaatgttagctatcatgtggagatgtgtggtttagacagtgttggtggttgtctctacattggcacaggatgcttccacagaagagagatcctttgtggtaggatattcagcaaagactacaaggaaaactggaacagaggaataaaggaaagaggaaaagagaacataaatgagattgaggagaaggcaacatctttagctaacttgcacttatgagcataggacacagtggggtaatgacattggagtgaaatacggtttcccggcagaggatatcattactggattggcaatacattgcagaggatgggagtcagccttcataaatcctaaaagagcagcatttttgggtttagccccatcaacacttgcccagaatatactgcaacataagagatggagtgagggtaatctcacaatttttctttcgaagtactgctccttcttgtttggacatggaaaaatcaagttacaactacagatgggctactgcatatgtggattatgggtagccaactcactgcctacactctattatgttgtgattccatcactaggtcttgttaagggcacccccctattcccacagattatgagtccatgggctacacccttcatatatgtattttgtgtgaagaccctctacggtctttatgaggcattattatctggggatacattgaaaggatggtggaatggacaaaggatgtggatggtgaaaagcattacctcatatctatatggcttcattgacaccatccgaaaatgtgtaggaatgtcaaagatgtcatttgaagttacagcaaaggtaagcggtcacgatgaagcaaagaggtatgagcaagaaatcctagaatttgggtcatcgtctcctgaatatgtgatcatcgcaaccgtcgcattactgaacttcgtctgcctagttggagggttaagtcaaataatggcaggtgtctggaatatgccatggaatgtgtttttaccacaggccatcctctgtggaatgatagtaatcattaatatgccaatttatgaggcaatgttcctaagaaaggacaatgggagaataccaacagcagtcacactagcttcaattggttttgtaatgttggcattcctagtaccaatagtttgaggtccctaaaatgggatttgatgccttataaaacattgggtgtttccg

SEQ ID NO: 27325 - DNA, 3845 bp, Oryza sativa
  ref <308>: DATABASE ACCESSION NUMBER: AK102767
  ref <309>: DATABASE ENTRY DATE: 2002-08-28
ggagtcaatacctgcctaaagttgagttaccccttccgcctcagcgtcagtggccatgtcggatccacccacccaccaccagcaacagtgggcaataggccaatagctgctgctgcgacggcgacctcggcggcggcggcggcggcggtggcgacggcatgaagaacttcttcaggaagctccacatcggggaggggtcgggcgacggcgcctcctcgtctccccctccaccgccctcctcgaggaaggggagcggcggggtggggggtaatcatcacctgcacgccgagcagaggcagccatcggcgtcggcggtgtcgagctggcttgattccgtcccaggtcggcctcagccccctacgccgtcgacgccgtcggaggcggaggggtcgccgttctcgtcgtcggtagggtcgggggcggaggagaggaggcaatccgtggcggctgagaggaggagatcgcaggaggaggagtgggagaggaggcggtcgcaggaggaagaggccgtgagggagatgaggcggtcgcaggaggaggacgaggtggaggagcgagtgataagggagtcgtcggaggcggaggagaggaagcgggtcagggagaaggaggacgacgaccttgaggagttccagctgcagcttgtgcttgagatgagcgcgcgggacaatcctgaagagatggagattgaagttgccaagcagatcagcctgggcttctgcccgcctcagagctctactgcagaggccctcgcggcccgatactggaatttcaacgcccttggctatgatgacagaatatcagatgggttttatgatctctatgtgactgggaatggcccggcttcaataaccatgccctctcttaaagatttgcgagcgcagtcactatcacatagggtcaactgggaagctgtattggtacacagaggtgaagatcctgagcttatgaaacttgaccagacggctctaatcatgagccttgaactccgtgaatctaaaccttcagaatttgttggaaatgatttggttcagaaacttgctggcctagtagccagacacatgggtggaactttttttgattctgagggcatgttggtgaaataccagaaaatgatgagatacctgagaaccagtattggaagtgtagttgttcctcttggccaattaaaaattggtctggcacgtcatcgtgcactgctatttaaggttttggccgataacattggtatcccctgtcgactcctgaaaggaaggcagtacactggatcggacgatggggctttgaatattgtgaaatttgatgatggaagggagttcattgttgatcttgtcgcagatcctggtacacttattccttcagatggtgctgttttgtctacagaatttgaagaaagttccttctcaaataatcatcattttaacaaagataatgacatcaggcagttgggatcttcaaatagtttatcgaattctgcatgtagttcttttgagtgtgagttacttgacagaagatctacatggatcaacgttggtccttctgatagtgatggagctacaacgagccagacaagtaaaaacaatcaacaaaatacactatcagattcattcgggattttatctgttagcacattcactagtgaaaataggcctattacaaatgaatcaagaagtacagacgacattgctgccgcaaagaacaaagaaagatcaagtgtaacaattaattcttcgtcaacttcaccttcaccttcttccccagaagtaggcagtactccagctgtccggaggatgaaagtaaaggatatttcggagtacatgattaatgctgccaaagagaatccacaactagctcagaagatccatgaggttttacttgaaaatggagttgtagcaccacctgacttgttttcagaagattccatggaagagccaaaggacctcatcgtgtatgacaccaccctttttcaaagcaaggatgaaatgaaaaagaggatgaatgaacttgggtcgagggaatatgctgatcgtggtcatggtccattattgcctcatcatcctggacatgaactcccatcaaaagttcctcaccgggcacctctagactcacttaagccagttgagggtttgggcattgaccacccccctgacatccaagataacacatcttttatttctcagtatgaaccttctgcacctccccaggaagcttcatcgcagcttacaaagcaattgcctgttacggctgctgctgttgcaactgctgcagtggttgcgtcttcaatggttgttgctgctgctaaatcaaacaatgatgtgaactttgacgtgcctgttgcagctgctgcaacagtcactgcagctgcagttgttgccacaactgctgctgttagcaagcaatatgaacacttggagcctggtaatcagctgcatagtttaccaagtccctccgaagggaatgaatcaatcgagaaaagtgcagatgagttttgggataaacagaattttgaaattgatcatggtcaagataatactttggatcaagaaaaagattcagctgaagttcgccaggatgctgaaagaacctcagataagtcaagcggaacagagagtgcaaaatctgaaatcactctggatgatgttgcggagtttgaaatccaatgggaagaaattactattggggaacgcattggtcttggatcatttggagaagtttatagaggagagtggcatggaacagaagttgctgtaaagaagtttctgcaacaagatatttcaagtgatgctctggaagaatttagaactgaggtgcgaataatcaagaggttgcggcatccgaatgttgttctcttcatgggtgctattactcgtgtacccaatctttctattgtcacagaatttcttccaagaggtagcttatttcggttaattcatcgtcccaacaaccagttggatgaaagaaagcgcttaagaatggcacttgatgtggcacgtggtatgaattatctacataactgcacaccggtgatagtccatcgagatctgaagtctccaaacctactggttgacaagaattgggttgtgaaggtttgcgactttggtttatctaaaatgaagaacaagaccttcttgtcatcaagatcaacagctggaacagcggagtggatggcacctgaagtacttcgtaatgaaccatcagacgagaaatgcgatgtttttagctatggggtcatactgtgggaactttgtacattactgcaaccttggggaggcatgaacgccatgcaagtcgtcggagctgttgggtttcagaatcgtcgccttgatattccagataacactgatcccgccattgcagaaataatagcaaaatgctggcagacggacccaaaattgcggccatcatttgcagatatcatggcctcattgaaaccactgctgaaaaacatgaccgctcaagcgccaaggcagagagtacaacaaaccgacgagtaagaaaaaagaggatgttaccagctgcccgaaggcctaagtatagcatttttttttgttttttgtatagtaacaccaattgtgtgttcgagattggaaagcgtgatgatgttagtgtgctgggtatccatctgtgaagaccagcgctgccaaacccgtccacgatggaggaaaattgaacagcggcaagaaactgtgcaaacgcgaatcaaatgtttagcacagttcttccccaaaaacaccagtctcaggaaatcacatggcgggcggaagttacacatgcttttttcataccatctctcttttcctttatctcgtgttctccaccaaatggtggtatttgtgtaatatggc

SEQ ID NO: 27326 - DNA, 778 bp, Oryza sativa
  ref <308>: DATABASE ACCESSION NUMBER: AK102768
  ref <309>: DATABASE ENTRY DATE: 2002-08-28
gatcttcatcttctctgcttgctcctcccacacgccaaagcaattttagcccgtacccccctgcatcccaagcgcccgaaaccgcctctcccctacaccaataccaccaccgcttcctttccgatccgatcccttcccctcgatcgacggcggccatggcgagaatcccgctgctgctggccctcctgctcgccgtctccgccgccgccgccgcgcaggtcgggggtaaccgcggccatggcccgctggtgggcgggtggagcccgatcacggacgtgggcgacccccacatccaggagctcggcgggtgggcggtggagcggcacgcctcgctctccagcgacgggctgcggttccgccgcgtgacgagcggcgagcagcaggtggtctccgggatgaactaccgcctcgtcgtctccgcgtcagatcccgcgggggccaccgcgtcctacgtcgccgtcgtgtacgagcagtcgtggaccaacacccgccagctcacctccttcaagcccgccgccgcgcactgatccatccctccctccagatctatcttatctatgtctcttctgctccatctcgatcagctgttaaattttccctgcctaatctctctctgttaatcacacatctcatgtaattctcatgtatgatgagcacaagctaagtacctgtacttgttcggtctgagttgtgtccccgtgtgtgcggttcaatcttttgcatgtaagacagcgagtccacacttgtaatgaattagcgaataaaatggtgggattgg

SEQ ID NO: 27327 - DNA, 3248 bp, Oryza sativa
  ref <308>: DATABASE ACCESSION NUMBER: AK102769
  ref <309>: DATABASE ENTRY DATE: 2002-08-28
gggaggaagaacctaagcagcaaaccctagtcgcgactacaccaccaccaccaccattgattccgatggacttcgcggagctggaggcggtggagggcctccggtggccgtggcacgcgtggccgccgaccgcctccgccgccgcgtcgctcgtcgtcccgacctccgtcctctgcacgccgctgcacccggcggcgcccgacctcctcccgctcctcccctacgcgccgctccgctgcggcggcggcggaggagggggagggtgcggcgcggcgctcaacccgttctcgcgtgtccaccacgccacagcgcggtgggcgtgcccgttctgcggcgcgtcggccaacccgttcccgcgcctcctcgcccccgacgcgctccccgccgagctcttcccgacccactccagcgtcgagtacgcgctgccgccggacgccgccgaggccggcggcgggccgggccctccgtccgtcgtgttcgtcgtcgacgcggccacctcggggccagagctcgccgcgctcaaggcggaggtgctcagggtcgtgcaggggctgcccgagggggtcagggtcgcgctcgtctccttcgcggcgtcggtgtgggtgcacgatctcggcttcgaggggtgcaccagggtggtggtgatgaacggggagcgcgagctcgagtcggagaagatacaggaatttctaggtgttcgtgatgctcgatacaataagttggctatgccaaggtccactaaagtgcagagatttttgctgcctgtttctgaatgtgaatttaacatcacatctgcgatagaagacctgagatccatgtctgcttgcccacgtgggcatcgccctttaagagccactggtgctgctatttccacagctgttgcctcttctaaaaggttgttgttcacctaatgccggaggtcggatcatggtcttcacatctggtcccacaacagttggtccagggccttgtggtggaaaccgatctcgggaaagcaattggttctcatcgcgacattttcaatggcaaggctcctctcattgacaaagcccgagaattctataagaaagttgcaaacaggttaacagctcatgcattagttcttgatctatttgcttgttctctagatcaggttggggctgcggagctgagatacccaattgaagtgtctgggggcttaattggtgcatacagaatcatttgagtctgagcagttcaaagcctgtttaagacacatattcaatcgtgagggtgttggttaccttaacatgaactttaatgcaacaattgagatagtaacatcaagggaggtgaaaatttgtggtgccccttggtccctgcatctctcttcacaggaaaaacagctctgttagtgataaagaaattggggagggtgggacaaactattggaaaatgagtacagtggacagcaaaacctgcatcgtgttcttcttccgagtggactgtagccataatactgagcccccaactgtcttctttattcagttcatgacgaggtaccggcatggtgatggtagctatcgcctaagagtaacaactgttgcgagaagatgggctggacctcgttctcctgagattgcagcagggtttgatcaagaagctgctgcagctgttatggccaggcttgccgtgcacagggcagagacataccatgttagagatgtgataagatggcttgataagatgcttattcgctttactgccaagtttgggaactatgtccctgaagatccatctacattccggctgtcaactaacttctcgctgtatccccaattcatgtactacctgcggaggtcacagttcattgatgttttcaatagctcccctgacgaaactgctttctttcggttgatgttgaatagggaaggagttgtggggtccctaatcatgatccagccaactttattccagtactcgtttgatggcccacctattcctgtgttgctagatgtcagctccatctctcccgatgtcattttactatttgattcatacttctatattgttattcattatggctcaaagatggctcaatggaggaaacttggctatcataaggacccaaatcatgaaaatttgcggaagctgcttgaagccccagaagttgatgggggaggcactattgggtagacggtttcccagtgccaaaactcataaaatgtgatcagcatgggagccagggccaggtttcttctagctcggttgaatccatctgtgacacagaaaacacagctttcagatggttctgaagtcatattcaccgacgatgttagtttgcaagtttttattgaacacttgcaggagctggctgttcagggttagtgaggcatggagcctggggatgtttccacttttgcagttggacccacctctgatcctgaagatatagcttccagaaggattgaatgtcatattcacagatgatgttggcttgcaagtttattgaacacttgaagtaattggctgtgcaggattgatggatcatgtggactgtctatatgttactttctggtcttctgttatcttgaaagtcccgggagagctttactgcttggaaggatgggatctcctcgagttgttgtacatttcaccagctccagtttgatgttcccgtggccagcgatttaccagttgcggtgaaggtgccgaacatcttctgcagagcaagggagaggtccttgtagctgttgtacatcttcaggtccaccttgcgcaggtagggtgccccgtccatgctgaccttcacgaaggcagagctgttgctgccgctggcattggcagcgggctgctgctgctgcttgtcagcttcctcttccttcttgctcttcactgactggacggtcatgatgttcctgcggaacgaccgaactggtggccaacccactgcctgcgccctgatgtgtaacattggaaattagctactacatcgatttttttttcttttgctcagttttttcacatcttgttctaacttattggcgctgtgaaaaaactgagatgatttactttcgtgactggaagttccatccagctagatcatgcatgttacaatattcttgctggcgaccaactctgtgttaactaatgtattatgtgtgtatgcctgcagcaactttatggtagtactgtgtgtataatgaaaatgccatcaactttagttattgccacatgaatcatggccaccatgattatttcaggaattaattgtatacagatgtactcct

SEQ ID NO: 27328 - DNA, 2139 bp, Oryza sativa
  ref <308>: DATABASE ACCESSION NUMBER: AK102770
  ref <309>: DATABASE ENTRY DATE: 2002-08-28
agctcatcaaaaacgcctcgtggcgcaacaaggcgcactccaagctctcccacactgccaagtccatcctcgaccgcctccagaacccgccgccgccggcggctgcggcgcaggcaccgtccacgcccacctcccccacgacgcccacctcgtcgtcctcgcagccgggcccgctccgcagcctctcgctcgcggactcggagctgctgctcggcccgatcaactccgcgctcggctccggcagcgccaagctcgccgaggccgggctcgagctgctacacaggctgatcgcgcactcctacatccatggcgaggccgacccgtccgccgacccctcggcccagctcgtcgcgtccctcctcgatgccgcctgcaacgcgcttcacctcgacgacgagcacatcgagctcctcctactcaagacgctcctctcggcggtcacctccacgtcggtgcgcctccatggagattgcctgcttcgcgccgtgcgcgcttgctatgatatgtacctgggaagccgcagcgtggtgaaccaggccactgccaaggcgtcactcgtgcaaatgttggtgatcgttttccgccgcatggaggcagactcctccacagtgcccgtgcaacccatcgttgtggctgatgtgatcgagctgcctgaagctgcttctggtgcttcgcctgccgctgatgccaactttgtacagggattcatctcgaagatcattggagacattgatggtgcaatcacacctctggcacggacaacttcttcagcagctgcaggcgcaggtggagcagcggctcatgatggtgcatttgagacaagagcagcagaggaaggggcacatccagcagatttgcttgattcaacagacaaggacatgctagacgccaagtactgggagatcaacatgtacaaatctgctcttgagggtcgtaaggatgagattggtgtggagggggcagtggtgggcgctttggatgatgatgctgatgtgaggattgggaataaactgcgaagagacgctttcttggttttccgggcattgtgcaagctctccatgaagacaccacccaaggatgctccagctgatcccattgtgatgcgtgggaagatccttgctcttgaacttctcaagatattgcttgaaaatgctggggctgttttccggaccagcgagagatttctaggggctatcaagcagtatctatgcctctcgcttttgaagaactgtgcctcggcacatatgatagtctttcagctatcttgttcaatttttattagcttggtttcaagattcagaccaggattgaaggcagaaattggagtattctttcccatgattattctgagagttttggaaaatattgctcaaccaaattatcaagcaaagttgattgttcttcgtttcctggaaaaactctgtgctgattctcaaatcttggtagacatttttctcaattatgattgtgatgtacactcatcaaacatatttgagaggatggttaatggtctactaaaaacagcacaagggcctccagcaggcgtgtctaccacattggttccgcctcaggacaccacaatgaaaagtgaagccatgaaatgcttggttgctattctgagatccatgggagattggatgaataagcagctacgcattccagatcctgactctcctaaagtagagtcggagcaaaatgataatgatggaggacacgagatttcccacacagaggataatggagacgaatgtagtgaagcatctgattctcattcagaaatgtcaaatggggtttcagaggctgcatctttggagcagcgccgagcttacaagatggaacttcaggagggtatctctctatttaatcgaaagcccaggaagggaattgagttcctaataaatgccaacaaggtgggggaatcacctgaggaaattgctgctttcttaaaaagttcttctggtttgaacaagactatgattggagattatttaggggagagggaagatttatccctcaaagtcatgcattcatatgtggattcatttgattttcaaggcatggagtttgatgaagccattagagcctttcttcaaggtttcagattgcctggagaagctcaaaagattgatcggattatgg

SEQ ID NO: 27329 - DNA, 2662 bp, Oryza sativa
  ref <308>: DATABASE ACCESSION NUMBER: AK102771
  ref <309>: DATABASE ENTRY DATE: 2002-08-28
gttgagggcacccctcccttcccctggcgcccgcggcggcgctgatctgttcgccgctgtccgtcaggcctggcgcccgcgggggcaggcatggcgcgccgcgtccctacccgcccgcgcggcggtggcggcggcggcgtcccacgctcggagggctcgatccaagggcgaggaggccgcgcggggggcagtggcgccgaggacgcacgccacgtgttcgacgaattgctccggcgtggcaggggcgcctcgatctacggcttgaaccgcgccctcgccgacgtcgcgcgtcacagccccgcggccgccgtgtcccgctacaaccgcatggcccgagccggcgccggcaaggtaactcccaccgtgcacacctatgccatcctcatcggctgctgctgccgtgcgggccgcttggacctcggtttcgcggccttgggcaatgtcgtcaagaagggatttagagtggatgccatcaccttcactcctctgctcaagggcctctgtgccgacaagaggacgagcgacgcaatggacatagtgctccgcagaatgaccgagctcggctgcataccagatgtcttctcctacaataatcttctcaagggtctgtgtgatgagaacagaagccaagaagctctcgagctgctgcacatgatggctgatgatcgaggaggaggtagcccacctgatgtggtgtcgtataacactgtcctcaatggcttcttcaaagagggggattcagacaaagcttacagtacataccatgaaatgctggaccgggggattttaccagatgttgtgacctacagctctattattgctgcgttatgcaaggctcaagctatggacaaagccatggaggtacttaacaccatggttaagaatggtgtcatgcctgattgcatgacatataatagtattctgcatggatattgctcttcagggcagccaaaagaggctattggaacactcaaaaagatgcgcagtgatggcgtcgaaccaaatgttgttacttatagttcactgatgaattatctttgcaagaatggaagatccaccgaagctagaaagattttcgattctatgaccaagaggggcctagagcctgatattgctacctatcgtaccctgcttcaggggtatgctaccaaaggagcccttgttgagatgcatgctctcttggatttgatggtacgaaatggtatccaaccggatcatcatgtattcaacattctaatatgtgcatacgctaaacaagagaaagtagatcaggcaatgcttgtattcagcaaaatgaggcagcatggattgaatccgaatgtagtgtgctatggaacagttatagatgtactttgcaagtcaggcagtgtagatgatgctatgctttattttgagcagatgatcgatggaggactaacccctaacattattgtgtatacctccctaattcatggtctgtgcacctgtgacaaatgggacaaggctgaagagttaattcttgaaatgttggatcgaggcatctgtctgaacactattttctttaattcaataattgacagtcattgcaaagaagggagggttatagaatctgaaaaactctttgacttgatggtacgaattggtgtgaagcccgatatcattacgtacaatacactcatcgatggatgctgcttagctggtaagatggatgaagcaacgaagttacttgccagcatggtctcagttggggtgaaacctgatattgttacctatggcaccttgattaatggctactgtagagttagcaggatggatgacgcattagctcttttcaaagagatggtgagcagtggtgttagtcctaatattattacgtataacataattctgcaaggtttatttcataccagaagaactgctgctgcaaaagaactctatgccagtattaccaaaagtggaacacagcttgaacttagcacgtacaacataatccttcatggactttgcaaaaacaatctcactgacgaggcacttcgaatgtttcagaacctatgtttgacggatttacagctggagactaggacttttaacattatgattggtgccttacttaaatgtggaagaatggatgaagctaaggatttgtttgctgctcactcggctaacggtttagtgccagatgttaggacctacagtttaatggcagaaaatcttatagagcaggggtcgctagaagaattggatgatctatttctttcaatggaggagaatggctgttccgccgactcccgcatgctaaattccattgttaggaaactgttacagaggggtgatataaccagggctggcacttacctgttcatgattgatgagaagcacttctccctcgaagcatccactgcttccttcttgttagaatcttccccaatcgtctgggagcaaatatcaagaatatcgtaggtttttccctgaaaaatacgaggcttctatagaatctttgaactgcttcgaagctttttgcagctttgaagttctgagttggaattcttttctactacactctacagttgtactagaggaggtatcttttctctgtttgtgtaaatagcaagcagatcacctcatgtctgttttagttcatgttaaccaagagactataaaatatacacacgtcttggcagtt

SEQ ID NO: 27330 - DNA, 1664 bp, Oryza sativa
  ref <308>: DATABASE ACCESSION NUMBER: AK102772
  ref <309>: DATABASE ENTRY DATE: 2002-08-28
gagggagccacgcacattttcacacttcactctctctctctctctctctctcgtgcgccgcgccgcgccgcgcggcgagggtggtggtgggtgagcggcgagccgagccgggccacgggcggcgccgcgggaggcgtcccggcgagcggaggggaggggggcatccgagcgctgggggaggtagctcagcgggaacgggaacggggcgatcccccccggcgttctcctccccggtctctcctgtagctagctagctagccatggcggcgaatggcgagggtggcggcgacccggcggcgcggaggcggtgggatctgacgaacaagggtgccgagagcattccaatggtgaaagaggctgtggaaatgtccacagacgaagaatcagacggtgtcgttatatgtccaccagatggcaacaatgatgatcgagaggaagccattagtagtaataatcatgataattgccaggaaggcgaagtcacttgtgttaaagacccggttatagacagtgaaacccaggaagacaagtgtgtgaaccaagattcagttaagttgatagatcaagagaagtctggtccacccaaatcaccatctaaacctggcatttctgggtcagataggtccaaacgtactgttcctcaaccatttgccctttcttctcaaagaaaatctcatggaggaaatagtaaggcggctcatccatctggcaatggagaaaattctggtgataagagcaactcctctccagcaagtttgacaaagaagactgcaccgattactcccaagaagattgcacagcctgatcatatgcttcaccatcaagaggaggactcctgctctgtgacttcttcaaccacaacttcaacaagagctggcaaaaccaaggcaactgttggtgttgccccttcatttgtatgtgctgatcgtgctgacaagagaaaggagttctacacaaaattagaagagaaacacaaggccttggaagctgagaagaatgaggccgaggcccggaaaaaggaagagcaagaaacagccttaaaacaactaagaaagtccttagtcatcagggcaaagcccatgccaagcttctaccaagaaggacctcctccaaaggctgaacttaagaaggtccctccaactcgtgctaaatcaccaaagtttacaaggaggaggagctgcagtgatgcaccgccgacgccagaggcagcaaataccaccgcagcatctagtcgatcacatcgtcacagcattgcgaaccctaaagatgctaacagagtacaatgctcaccaaaaaatggcgtcgctgccaaaactagagctgtcaaacctgtgagctgaaggccctctggagattctagatcagccaagtgttgcgaatgtcgctgtacaaacctaactttagccgtctctcggtttcatggcattttgcatttgatttatacttcctgtcaccaaaagaaggccacagtgccgaggccggtgtgcttgcagctgaaccctttcatttcttttcttcttttcgcgttgctgtgtaagaactctgttgctgggaccatgtactgtgttccttgttgtaaatggtcgagggtttctgtcagaactcagaaggaagacactctgcccttttaaagcccttgatgaaccgttgcaatgttttgcttg

SEQ ID NO: 27331 - DNA, 1624 bp, Oryza sativa
  ref <308>: DATABASE ACCESSION NUMBER: AK102773
  ref <309>: DATABASE ENTRY DATE: 2002-08-28
gcagtttaatcacaagaagaagaagagagagaaaaaaagagagagaagaaatcacaccgcattagcagcagcaaaagatttcctcgtttcgcttcacgaatttttgttgccctcgcccaatccacagcgcgaggagagggagttctcgcggcgatttctcgtcgcccctctcggccgctgccgggatcgcagctcgcaagttttggaaaggaaacaggttgatgaagttggtcaaagggagcaaggtggaggtgttgcaggaagcggaggtgcccctaggttcttggaggggtgctgagattgtattaggcaatgggcagagcttctatgtgagatatgatccttctccagttgactcttgcgccgctgtcgagagggtgcagagaaggttgataaggccttgcccccctcgagacgattcagtatgctgggctgtgggcgacatccttgaggcctttgatagctactcatggaagattgctgagatggtgagagtgcttggcaaggatttctatctcgtcaggctcctcggatcttcgctggagctgagaacacatgcgtcggaacttcggttgaggaagcattggaaagatggcaaatggactgttcttcagaaggattctacaaagtgcttcggtggttcattcagaggtcaaccaaaatctggaaatcttggaagcaattttggcaagcaaaggcagccatattgtgcaatggacaacaatcttctactgaagaaccaaaaagctttggagggtgataagtctagaggcatgaagagaaaatcatctgctattacacacccaacccagtgcagtgaagtgactagaggcatggagagattacagacaccccatagagatggaaggcacgcagcgctggttgctggagtttctcctcgtttggctgaaaaggtagatgctgttgattccccatgcttaatgctgggtgaaaaatacatgcatgcttccttaaataagagaaaaaatggtgttcatacaactaacttggctggggtaaatgtggatactgaaaataaattccgtcctttaacaagtgcttatcctagtgacaccgagagtatctcatcctctgttggtagttgtagtccaagcagtagtccctgtagttcacgacacttttactcagcctaccaaactggtgatatctgtagtagaactgatggtgctgaagctgccgtatctgaaagagaaacatctcaacatgataagattataccaaaggaagatacccatttgctggagttgcatgcttatcgtgcaacaatgttggcattgtatgtttgtgggtcaattagctgggagcaggaggctttgttgactaatctaaggcttacactgaacatatcaactgatgaacatctagctgagttgaggagtatggtttcctcggctattacttctagatagcagttgtagttacttgcttggtgacttttatgacatctttgttgtcttgaaatcattgtaagttgggaaatcccattaagtatgaggtatttgagtagttgatgttctgtattacctgttaaaagagttacctagtcagatcatttttgtaccatagaccttccaagaaacatgaaattttgctacattttctc

SEQ ID NO: 27332 - DNA, 1130 bp, Oryza sativa
  ref <308>: DATABASE ACCESSION NUMBER: AK102774
  ref <309>: DATABASE ENTRY DATE: 2002-08-28
tcaacaccaaaaaggggaaagcaagcaaatcgcaagcaatcgcgcagcgtcgccgactcgccggcggcgaatccaccgacgagcaatccagccccccaatcccgccgccgcaccaccgcgcatacgatccgccaggaaggaaggaatggcgtcgtcttcggatccatgggtgagggagtacagcgaggcgtccaggctcgcggatgacgtcacctccatgatcgccgataggggttcgctcccgcagtcggggccggagatcatgcgccacacctcggccattcggaggaagataaccatcctcgggactaggctcgatagcctcgaggccttgctgtccaggattcctcccaagtccatcacggacaaggagttgcataagcgacaagacatgctttcaaatctgaaatctagagcaaagcagatggctacaagtttcaacatgtcaaactttgcaaacagggaggatttgcttggtcagagtaagaaagcagctgatgatatgagtagagtagctggtttggataaccaaggaatcgtttcacttcagaggcaagttatgaaagaacaagatgagggtcttgagaagctggaagagacagtactgagcacaaaacatattgctctagcagtcaatgaagaacttaccctgcatacaagattgattgatgatttggatgattatgttgatgttacaaactcacgtcttcagcgcgtgcaaaagaggcttgctattctgaataagcgcgtcaaaggtggctgctcgtgcatggccctgctgatatctgtcgttgctatagtgtttcttgcggtcattgcttggcttctcatcaagcacctgtaacctgtgtctaactcaaatcagtttgaaatgtgcagtctttcaaagatgtggatgctcccatctcatctctgtttcgtgagagtgtggaaaatggaatataattgcaacaaatcttcgttcagaagatgtgcaaaaagtatgttgcaacgttgcattgacacttgccaacaatttgtatagagcgtattgcctttctgtcgtaatcttttcataaattcttattcttgcgagacttgaattttaacaagtgttctaaacatactgaaaaaacacgcatattgatgtt

SEQ ID NO: 27333 - DNA, 742 bp, Oryza sativa
  ref <308>: DATABASE ACCESSION NUMBER: AK102775
  ref <309>: DATABASE ENTRY DATE: 2002-08-28
ggatttcactcgccgccgccgccgccgcctccctactctctgccgccgccgtcgccgccgcttgctccgtactcctcctcttcagcggcgatgaagggacggcaaggccagcgcgtgaggctgtacgtccgcggcaccatcctcggctacaagaggtcgaagtcgaaccagtacgagaacacgtcgctgctgcagatcgagggggtgaacaccaaggaggaggttgggtggtacgccgggaagcgcatcgcctacgtctacaaggccaagacgaagagcaacgactccaccatccgctgcatctggggcaaggtcacccgcccgcacggcaactccggtgtcgtccgcgccaagttccggtccaacctcccgcccacctccatgggcaagaaggtccgcgtcttcatgtaccccagcagcatctaaaagcatccaaggtttcttgcctatgctgcgaaactgatagttgtcaccgtggagggttttatatcagctagtcacttggttaaccagtcagaaatttaagcggttttgaggagttttagcttttctttttatttcggactatttgctgtatcatgatgacaattatttgaaggctttttagcggatttgaagctacagaggtttagcatttgtatcgtgatctcagccgtttgatatcgtatctgtatatctaaatttggttggcactgctcgttgagtatatttgaaaatgataggcagatggattcagtggttc

SEQ ID NO: 27334 - DNA, 2153 bp, Oryza sativa
  ref <308>: DATABASE ACCESSION NUMBER: AK102776
  ref <309>: DATABASE ENTRY DATE: 2002-08-28
ggttggacgggccaggctcgatgcggacggcccgcacgccggcgtcggcggcgcgcggcggccgggcgctgtacgagctgtacagggcggcgagccgcgcggcggcgccggcggcgcttctatggcggcggctacgaggactggagcacccgtcgcgttggcccgagcggctgggcaggccgtcggtggcgcggcctcgtccgggctcgccgctcgtgtggttccacgccgtatccctcggcgaggggatggccgcgctcccggtcgtacgccactgcgcccgcctccaccctggtctccccatcctcctcaccactactaccctctcatccttcgaagtgatgaaagacttgctcccggatggtgtcatatatcagtttgcaccccttgactgtcctgatgcaatagaaagtttcattggatactggaaaccaaatttgatacttcttatggaaagtgaactctggccaaacctcattttgtctgcagcagagaaagggattgcagtggttcttttaaatgcgcgcatgtcattgaagtctttcaacggttggtccttgcctctagggttgcagttagtctctttgatgctctccaaactatcacttgttatcccattggtatggagtggtggggttctaaaccttattttgatgtaaaattattgccattgtattcatttctatctgttccagagtactattcaagctgttcgttttcaattacttcatgcaccaccacagatcatccattttgctggcgatttaaaatacgctgttggtgacattgctgctggggagaaagaggtagctgcaatagaagatcttcagcagcagttcagcaataggcccatctggatggcagcttctatccacaaaggggaagatgaaatcattctccgtgttcatgatgagttaaccagggcgtatcctactctacttttaattctcgtcccaaggcatcctgaggacagcaagaatgtttctcaagtatgtcaatggtcttccttacccttttatatctggtcctgtttagttgatgaagtagttggtgggttgtactgcttatcttttagttttttttaatacattatcatattgggtaatctataggtgtagcattgttgtaatgaaaaaaagggaactaacttagttcactgtatgaagcttgaaattaattgcttataactgtttgtatacgattacttgaaatttcttatggttctagagcatgtagcatatgattctcacttcaatgctgatagtataatatgtatgggccacatctttagttctttactcatcttcttttagaccctgaagaaacagaaagtgaatttggtgctgaggtcaacaagagaagtggtgtcttcaaacaccagtatatatgtggttgatacgttaggtttgtgctatctcttatgccttaagtttgcacattttttcagtatggagtatggactgtgtatattcttttgaatgttagttaatgaatgaaataccatggaaaataggtgaattaagaatgctctacagggttactccaatagctgttattgggggttcttttttgcccggcttagctggacataatatttctgaggctgctgcagttggttgcgctgttatgactggtcctagtgttgggcacttctatcatatgctggtcgaaatgtggcaaataaatcctttagctgtcaagcaggtcaaaggagaatatgaacttttggaagcactaaaacaactgcttggtgattctagagctctggaagcatgtcaaagagccgcaaaagatgcgttttcctttatgtcagatggagttgtcaatcgtgtatggaatttagtccacccgttcactattggttcccaaacagacacatgcgacagcttctcgagtagttagtatggaaggcttgcacatggaagtatggaaaatcagggtagtcacatttaaaacattgacatcttctagtaacttgcagggacaggttgacaatgtatgagtcctctttattaggaagataaggtctcacgaatttctctgtacagtctgatgcacataacaaacttgtactcctagcatgccggtgacagatgacacaaatatcaaattaaaggccattagctcctcttagcaatctaacatttctgacg

SEQ ID NO: 27335 - DNA, 2734 bp, Oryza sativa
  ref <308>: DATABASE ACCESSION NUMBER: AK102777
  ref <309>: DATABASE ENTRY DATE: 2002-08-28
ggcagtgggcgccgccgccgccgccgaccgcgatgccgtcgatcgccggcgccggaggcgggcgcctcttctccgtgaacggagccgcggcctactggggcagcagccgccgccgcctcctcctcctccagcgcccgctcttctcgtccctcgccggcggcggcacgggagacgacgtgacgccgcatctgcccgtggtcatcgtcggagccggcccggtcgggctcgtcctctccttcctcctcaccaaattcgggatcaagtgcgcggttctagagaagaatgtggagttcactcggcatccgcgagcgcatttcatcaacaaccgcaccatggagatcttccggaaattggacgggttggctggggacattgagaggtctcagccaccagtggatttgtggaggaaatttgtgtattgcacttcactctctggctccattcttggttcagttgatcacatgaagcaggaagattttgacaagatcattagtcctatatctgttgcacacttctcacagcacaagttagttgatttgttactcaagaagctggatggcattggcttccagacatgcttgcctggtgatattggtagctcgactcaagatttggtgtgggaaaataagatttggtggggtcatgagtgtagttctgttcaactgacagacaaaggcattttgattggagcatcgtttaacgaagcggggaggatgcaggaaaggaagattcattttgggcttcttctaggggcagatggtgccagaagcacagtgcgtgaattggctggcatacatatgaaaggtcagagagacctgcagaaactggtcagtgtgcattttcggagcaaagatctcggcaagtatctatctcgtgagaggccagggatgctattctttattttcaatcctggtgccatcggtgtggctggttgcacatgacctggaacatggagaatttgtattgcagattccattttatcctccccagcagatgtttgaagatttcagcacaaaggtggttccagttggatatttttctctttttcaattcatcagcatttcttgcctcattcacatgtacaacttgtatcaaattgtatataagctttttttttcttctgaaatatatatttataagtattcttaaatcaactttagtatcttcttgctattgctatcctcagaattgaacatgtggtgcatagccattcttcaggctaaacatgatatgcttgcatccatgcataatctttttatatgcttcttatttggtgattctagatatgcgaagaaattatagtcaaatgggttggatgggagccatcagatgttcaggttttagacataaaaccatgggtaatgcatgctgaagttgcagagaaatacatgggttgcgacaatcgtataatccttgtgggtgatgctgctcatcgttttcctcctgctggcggttttggaatgaacactggtgtccaggatgcacacaatttggcttggaaattgtgcttactgcagaatggtgtggcttcaccatcaatattacagacttatgaatcagagcgccgacctgttagactctcctcacactcacaggctttctacaatccaattttaatctgtcgcaaaattcatgaataatgatatgcatgattgctaattgcaggttgccattttcaatacagaacttagtgtggaaaatttcaaagcagcaatgtctattcctgcagcccttggtcttgacccaacagttgcaaattcagtgcaccaagtaattaacagcagcctaggatcagtcattccaagaaatctgcagaaatcggttttggaaggattattttccattggtcgggcacaggtttcagactatattttgaatgagaaaaatccccttggatccttgagattagcaagattgagaagcattcttgatgaaggcaaaagtctacagctgcagttcccagcagaggatcttggcttccgttacgaattaggagcgcttgttgctgaagattgtgctgaaaccacttatgaagcagaaaagcagaagcattctaagaggtcaagagagtacatcccctctgctaaggctggctcacggcttccacatatgctaatgagagcattgtctacttcaaacgagggtgtgttctcaactctggatctagtaaatggggacaagcctgagtttgctcttatcattgccccaatgaaagtgtcatatgagcttgctcgtgctatgctgaagatagcagatgaactcaagttaccaaccaaaatttgtgttatatggccacaaggttcagttgatgctaaagtgaaagggagcagatcggagttggcaccatggacaaactatgttgatgtcgaagaagtacctagagctcctgttaattcttggtgggagatgtgccagataactagtaaaagtgtaattttggttaggcctgacgagcatatagcatggagaacagaatctgacagggtgacagatgcagattcagaagttaggagagtcttttctgaagttctatgtctaactagccgcatccagtaattgtcatcatttcagtgacaggagctaagtgtagttagggatctcagctgctcgatctgaactgccatgcagttcagtgttgcttgctatgacaaaatgccctgtccatgaccaataatttttgtttgtgtagttcttacgtacgctgattaccttgaaatgcatatgatcttaactc

SEQ ID NO: 27336 - DNA, 1321 bp, Oryza sativa
  ref <308>: DATABASE ACCESSION NUMBER: AK102778
  ref <309>: DATABASE ENTRY DATE: 2002-08-28
gaggtcaggagaggctccaacggtcacattatcctcgctgactccgccgcgcgccgcgtgctcgccttcctccccctcgcgccaccaccgccgccgccgagtcctcgtcaccggagagcgagggggtctccgccgtggtcgcctgcgcgctacgcggcgacgctgccggcttccttccgccggagtcaaccttgggggtaaggattgctgcaaacaactccagtttctgaataaagacagtgccgatattaatggataagaaacagacctcgttaggcactcctgtctacaggacaaatcccttcgattctgactctgattctgaagtgccctcaagaccgtcaagggcacaatctgtcccagtgcgacgcacagatcaatctatacaagagctggaggactatgctgttgataaagtagaagaaacatcacgcaaagtaaatgattgtgtcagagccgctgaagcaatcagagaagatgctacaaaaacactggttactttgcatcgtcaaggtgaacagatcacccgaactcatcgagtagccgcggatattgaacacgatcttagtatgagtgagaagcttttgggaagtctaggggggctgttttccaagacatggaagccaaagagaaaccaacagataaaaggaccgatttcacaaaataattctttcacaagttcagcgaaccacatggaacagaggcagaggctaggtatttcctcaacacgtcagccatctccaaatcaagtacatcgttcacctgcaactgcaatcgagaaagttcaggttgagatagcaaagcaggatgatgcgctctcagacttgagtaacatgttgggagagctgaagggtatggcattggatatgggcacagaaattgaaaggcaaaataaatcactggatgctttcggtgatgatgttgatgaactgaacttcagagttaaaggggcaaaccaacggggacgccggttattgggcaaatgatgccatcaggttgtcgaaccacagcaactctgtttctagcagttttctccatcccatgggattcaggacttgtgagtgcgattagcagatgcgcctacttcatctggatattctgtcgtgtctgaattctgagcaaatattcagattcccgtgttgtgttgttgtatgagaaatcgtcatatacacttgttgtatgataagttgatagcttcaattacttggtgtaggacataaccaccattccccttttctcttagaatcttgatgtaatctgtactcctaaatatgccagaacgagatgagaagagaattgaatcaagcgatagaattactcc

SEQ ID NO: 27337 - DNA, 2955 bp, Oryza sativa
  ref <308>: DATABASE ACCESSION NUMBER: AK102779
  ref <309>: DATABASE ENTRY DATE: 2002-08-28
gaaagtcgagggagatgagagaggagacttgttgatccaaatggcgccctcgttgttgtcttcccaactccaactgcacgccgacgacgtcgcaccccgcacgaactagacaaacacccacaccataatccaaaaccaaaacctcctcgccacatataaatccccatttgcgcgcggccgcctcgccggaggggagggtgtcgcaatgccggaggctgcggcggcggcggcgggccacatggatccggttggcgacgaggcggcggagaggagggagatggaggagaaggaggaggaggaggaggaggagtaggaggatgaggagttctacgagtcgctggatcggatcctgtcgtcgtcgtgctcgtccacgtccgcctccgacgacgacgaccagcagcaccggcggaggcggcggcaccacccgcagccgcagcagctgtcgtcgtccgcgacgttctccgcgtacgaggtctggatctccgagccgacatccgtcgaggagcgccgccgcgtgctgctgcgtcggctcggcctcgcccacgactccgagcccctgccgcacccgtccccacgcgtatcatcctcctcccctcgttcgccgaccccttcccccccgtcctcgtcgccgcctcggccggctcccgtggtggccgccgcggaggagcccagatccagcggccacgggaagccgccgcttgcgaggaacccgagcggcggcgcggagcaatgccggatccggaacctggacgacggtacggagttcgaggtcggggaggttcacgatgaggtggtccgggaggtcggcactggccggcagctcaccttcgaggagttcgagctctgcattggccgctccccgatcgtccaagagctcatgcgccgggccaccacagccgcatcatcctccacctccgaccacgccgccccagcatccaagccacggaggaagcctggaggctggctgcgtggcatccggcacctggcgggaagcgttgcatacgggcgcagcagcaccgatgagagggacaaggagaaggagaaggagaagaaggagagggaagcgcggcgcctgagctccgccaccgatgacagccttgacggcaacggctcgcgcaatgcagggagggtcagggtgcggcagtatgggaaggcgtgcaaggagctcaccgggctgttcatgacacaagaattggctgcccattcgggctcaatctggtgtatcaacttcagcttggatggacgataccttgcaagcgctggcgaggaccgtgtcatccatgtgtgggaggtatcagagggagaaagaaagggagaattgctcggggaaggtacggtggcaagggagaacggtggtggctgcagcccgtttcttgcagctgttgggaatggatcgccggagctggcaacattgtcattgagctgtgctgacgggggttttgtggagaagaagaggaggccaaggatgcaaagcagccggaagtctgttggctctgatcatctagttgtgcctgaatgtgtgtttgggttcagagataaaccagtatgctctctattgggtcacgccgccgatgttcttgatctatcatggtccaaatctcagtacttgctttcatcctcaatggacaaaactgttaaactatgggacattactactagtacctgtctgaaaacattttcacacacagactatgtgacttgcatccagttcaatcccgtggatgataacttcttcattagtggatcactggatgaaaaagtacgcatttggaatgtacatgatcgtaagattgaggattggaatgatcttcatgagatggtcactgctgcgtgttactcccctgatggacaggttgcactggtgggatcacacaagggaagctgtcatttatttgatacaactgaaaagaagcttcagtacaaaagtcagatagaactaagaatcaggaagaagaagtctggccagaagaagataactggcttccagtttgctcctggaagctcgtcggaagtcctgattacctctgcagattcaagaatccgtgttgttaatggtgatgaactcgttcacaaatttaaagggttccgaaatacaagtagccaaatatccgcttctgtagctccaaacgggaaatatgtggtctgtgccagtgaggactcccacgtgtatgtctggaggcatgacaatacttcccatccgagcagaagcaggagtgcagttgatgtaaccaactcatatgagcatttccattgccatgatgtcactgtggctatcacatggcccggcgctgaatcccgtggctcattcgggtcccgtagcagcagaaacagtgattcagacgatgcagtgatgaacacgggtcgggatgcccctgtagagaacagtgagcatgatctgaatggcactgtcaatagatgcaccaagcgcccagtttgtgaaggtgttgcaagcacaagcaatcctccagcggatggagtatcaacgtcctggcctgacgagaaacaatcgtctgccaagagcagtcctggtcactgctcatccgacctttgcattggagctttggatgttcagcgccggtcagcttggggattggtgattgtcactgcaggaaggggtggtgaaattagggtgttccagaatttcggcttcccggttcaagtgtaaagctagtgtgagaatattcagagatgtccgtttgtttactgtatagatatcgttagttttttctccatttcacctagttcttttactagctaaaagatttccctgtttcgctgtcaggttgggagccccagtagctcaatccaacttgctaagcaccacactattttttaccctctgttgatacaaggctttgtgtaattgtatggttaacaaccaatacatcgatttgtttgttcatatattgtttcttggttatacactgattgatatatgaagataatttctaactc

SEQ ID NO: 27338 - DNA, 1956 bp, Oryza sativa
  ref <308>: DATABASE ACCESSION NUMBER: AK102780
  ref <309>: DATABASE ENTRY DATE: 2002-08-28
gtactgcagtgcaggctgctcccacgccgcggctccgccgcacttgctcggccgtccacgccggcacggcgtgcctgaggccaccgcaccacccccgaggagggaggccggtgggtctcctcgccccccccccgtcggctgcgcgccttctccgactctcgctgcgccgcgcgggtggcgtgggccatgggcagccgggtgctcttgctccggaggatggagaaggggtggcggccgatgtcccgggcgctttatccctcccccggttctaccagcgtggcgcctccccatgagctgcgcgcgcctcggcggtgctcaccatcttatacttcccacaaggtttttcaccgagatgttgggttcttcagtgggtggcaaagttataaccttcaaatatattgctgtatccatacaagccgaccagtcaatagtcaaaatcataccatagcagaacctcagcagaaacaagaagatgttgcgctggttgatgaatctggtaggcccaaagcaaagaggaaaaagttaaaaggaaggagggcagtgacaagatttttgaaatccctgagatggaagaagaaaagggagtttcaaaggatgactgcggaggagaagattttgtacaaactgaagctagctcgaaacaaggaagaacgacttgttgcagctttgacgaagattgaaccggatgacccatcagaacctacccatgatcctgaggtgcttacacctgaagagcacttctatttcctcaagatgggtcaaaaaaagtaaaaattatgtgcctgtaggaagacgtggaatatatcagggagtgatcctgaacatgcatttgcactggaaaaagcaccaaacgctacaggtaattgtgaagacattcacaccagacgaggttaaggaaattgcctcagagttagccagactaagtggtggaattgtgctggatattcaagaagggaatacgattattatgtacagaggaaaaaactatgcacagccaccacctgaaataatgtctccaaaagttacacttcctagaaaaaaggcactggataaatcaaaatacagagaacgcctccgagctcttaggcggtacattcccaggcttgagcaggagcttgtagatcttcatgcacagatgaagttagctagagattaaaaaggacagaatgcagcggaagatattacttgtatttcagatagtgtaaacagtacatctgcgaaagaatattcttcttgctcagttcgcaagagaagtgtatctgatctcctgtcagaaagtatagaagggtctggaaggctagaggatgaaaattatgaggttagtgctgattcggcttcagagtctatcacatactctgaatccgaggatctctctgacatttttgagacggactcagaggaggagcaggtacaggaaagcaaggagcaaccgttgtatctagataagctggataagtttccctcagaaaataatgacaatgaaccagatgatttcgaagagcatctacgaaagattgcttccctttctgataggaccgattcatctgctaaagaactcaaagtatccgagcttgatgagattgataaaatcttcttgagagctagttcattgctgaagaaaaggtgacagttgggaatttgtacacagtgttcacgacatctaatgtgcactgccaaaaagcatttatatgcagcacaagcatcttgaaagaagatctgagatatatcggtaacaaagtggaaagtcatgtattaattcacagatgctgctgagagcggagaggatttggtatttcataatcttgctgggatttagtgagctatttaacctgaagtactgcaaccggtttgggaggttctggcgtttgctctcatgttccctgaaacaccattccgtttctcagttgtttagggtagccatgttatgatttataagaaagtgtggtggttttcagt

SEQ ID NO: 27339 - DNA, 2524 bp, Oryza sativa
  ref <308>: DATABASE ACCESSION NUMBER: AK102781
  ref <309>: DATABASE ENTRY DATE: 2002-08-28
gggccagccaaacaccggcgctccccacacccccgccgccgccggccgccgccgcctatgcccttccgccccacgctcccccgccggtgctcccacgaccccaagctctcctccttcctctccgccctcgcctccctcaccgcctccccctcttcctcctcctcctcccctttgccgcccgccggctcggtgcccgcctcccccacccccgccgcctacaacgccctcatgtccgcctactcccgcgccggccgccacggcgaggtcctccgcctcttccgctccctgcccttcgcccccacggcgccgctcttcaccacgctcatctcctccctcgccgcctcagggcggcccctcgccgcgcgcgccgccttcgcctcgctcctcaagtccggcgtcccgcccaccgcctccgccttcaccgcgctgctcaggtcgtcgagcgacgcgctcgacttcgtggacagcgtgttccgcgccatggaggccctgggctgctccccggatgccgccgtctacaactgggtcatctcgatgctctgcgacttccagctggtgcaggaggccctggggttcctcgaccacatgctcgagaacggaccgcgacccaccgctcgctccttcacagcgattctacgtgcttactgcgagcagggaaggttcttcgacgcagggagattagtcgatacgatgatccagaacggttgcccaccggatgtagtatcatacaccgtgctcattgaggggctctgccgtgttggggaattcagcacggtggaaatgatcttaggtgaaagtgagtcgcaagggtggatgccaactgctgttacatataatatttacatgtctggcttgtgcaggatggggttcttggatgaggcatttcgtcaagtagatatcatgcgcggcagagggctgtccgtgacagctgagacagtgcatattctcttcgattgtttgtgccgaaatgcaatgttttcagaagcagtgtgcttgctggaacatagtgaagagctgggctgggatgttgatgtgttttgctataacactctgatgagtaggctttgtgacgttgatgattttgccagggtcttgaagctgctggttgatctgttgaagaagggcattggaccagataagtttagttttaccattgcaattcggagcctctgccgagctgggaaacttcggctggcaaagtgccttatagaaaataaggggattaagtatgatgttgtggctttcaataccttgattcatgggttctgcatagctggggatttagacagggttcagcaaactcgtacagatatgatcaatagggatgttattccaaataattttactgatgcaatgctgattgatagtttatgtaaagagcgaaagtttggcgaggcaaaaagatttgttcttgactctttggtaaatggtttggtgcctgatcatcttattcgtctgaataattggttggtaaaagcaaaaaaaatgacactgttactgaagttactctatgaaatacgctgtaaaggaattgtggtagatacttccattatcagtccattggttagggtattttgctgggaggggtactgtcggcgtgacaatttctatcaaatttcacctatacttgacattatagtaacatatgtcgagcagtaatggagcgcagagcagtgtgattatgtgaaactcattttggttttattctctgctaagcaaacaatggttgacaattgctacatcagagataatcatctttcatcaggggaggaatagctgagtttgaacaaatgacacttagatttgaggagtccattcgaagctatcaagtttaaatgtgcttttagataaataatggacagagaggagccagtggtgacaagtcatgggtatggctaatatgctggaaggtgcacttgttgacattataagttctcaaccaaggtctcttctgcatatacatatgaatgcaaccttggaaatgaagggtggtcacgcatttgtcaagtgtactcatctgataagatgtctgagagcatgtctagtatgaacacatttgttcattcaactttggatcatcgatgtgaatttatcattttagccgagtaacaggaccatcttcgttttcatttggggtgtggaaggctggaagctgctaggggcgcatcaacctacttagatttgcctacccatttggatgatgataaatcacatgggctacacaatatacattcggtgtgccctacttggaaagtgatgtgctgttagaatgagaatggcataggcatactgtaattagcataagagtttgttggatggaccttgtaactcctgtctcctaagttccctgagatggcactgtaatagtaactagcacttctgagtcgtgtgtggagctctcagacctaacttatttgctagtagatgagtagagacacagaactgcttagtgctactgtttactgcctgaaacacagttcattcttctggtcaattcaatagggaaatgttgatacttcacacc

SEQ ID NO: 27340 - DNA, 2143 bp, Oryza sativa
  ref <308>: DATABASE ACCESSION NUMBER: AK102782
  ref <309>: DATABASE ENTRY DATE: 2002-08-28
ggtgctgtcgctgtgcctgtgcgtcggaaagaaaagaaaagaaaagaaaaaaaacactcgagtgtgcagtgtgggttgtgtctccgctccttgcgcctgcgctgcgctgcggcgatctccatctccatctctctctctctctcgagcagagcagagcacgccgtcatcctcgtcctgctgctgcttccggcaggagctcagctcggatccgtaggacaaacccaagcttggtcgtcggtgtgtttccggagaatgtgaccgcgccgcgccgcgccttctcttatcacaaatggcggctacaccagggagcagcaggccagcgaatgttgctgctgctgctgcgacggaggccagattccactcccacccaccacagcaggataggcggagtggatgggctggctgtttgtctggcttgtcatgtttcggatcacagaagggtgggaagcgtatagttcctgcagcacgtgtacctgatgggaatgcgtcaactagtcgtggaaatgcacaccaatctggtgccaattccaaccaaagtgcggctctgaatttatctcttcttgctccaccgtcttctccggtgtccttctctaattctgcaattccttcgactgcccaatcacctaattgcttcctgtcaatatctgcaaactctccgggtgggccaacatctaatatgtttgctgttgggccatatgctaacgagcctcagcttgtctcaccacctgtcttctcaacttacacgaccgagccttccactgcaccactgacccctccacctgaactagctcatgcaactactccctcctctccagatgttccatatgcgcggtttcttttgtcatctatggatctgaaaactgctggcaaagatcacaacatgccgtacttatctacagcatattctggaggttcagggctccaggcatcttatccgctttacccagaaagcccttcaagcagcctcatatcacctgcttcagcaactccaaggactggtctttcatcacctatacctgagcaagaggtgcctactgcacattggaagacatctaggtctgcctgcgacacaccatattccagggcttcgcccatccctgagcaagaggtctgcaccgcacattggaagacttctaggtctgcctgtgacacaccatattccaggaattcaccgtccaatatttttgggcttgattcagccgcctctagaaactacatgttagataataacttctttcggccagctgcatctgcccagttctacctggatcaggctcagcagtcatttccatataataatggtgggaggattagtgtctcaaaggacaaacaagatgttgaggaggttgaagcatacagggcatcttttgggttcagcgcagatgaaatcgttacaactcaaacctacgtggagataccagatgcgcttgatgaggggttcagtatatctccatttgggaacaatgctcctgctactgaggtggataaatcactcttcaatgtaaaagtgatcacaggcccaaagaaatctacagagcaaaagctttcaaatgggtctccacaaaatgtagtgcacctggacatattcaaaggaacaaaaggaggggatgtgtgtgaggatgaagggatggtgaaagattgccatccattcagaaaggggagggatgaaatatctctaaaacccatagaagtgaggaagaaagttgggggtggacagtcatgctcggatgcagagatcgagtacagaagagctaggagtttgagagaagccaatggagttgtgtcatggcgcagcaccctggcaaggcaactacagtaacgatgatacactaggcaggataataagtagtaaggactagaatccagagtacccctggccaggcctagcgtgtgtgcatcgttgttagtacaagtgagagtctttaggcgaagagtaggccatgctggtgatttgttctggggatttctactgccagatagatgatgctcctcctgtatttctactatttaaattccaagttcctcttttgtatactatatactactgtagtagacactctagtacaagtgaggcaacaagtgctcatggcttgtgcttcctgagtgatggctaatttatgatcgccccttgtgttatggtggt

SEQ ID NO: 27341 - DNA, 2448 bp, Oryza sativa
  ref <308>: DATABASE ACCESSION NUMBER: AK102783
  ref <309>: DATABASE ENTRY DATE: 2002-08-28
ggagcagccgctgcctcgtttacccaaacccaaacaccacctcctcctccgcctccgcctccgccgccgtaaaaccctcgccgccaccgccaccgcctccgccgccgcggcggatccgctcctcctctccctgccctgcgctgcgcggggcgtggtcgaggctcgacatggtgctgtgggagctgacggcgatcacggcctacttcctggggctcaggcggacctaccgcctcgcgctccgcatccagcgccgcctcatcggccccaaccaccccaggatccgccacttcgtctacaggtccctctcctctccttcccctccccacgccccgcgcgcgctctgatccgagcaatcggtacggattcgcggcgcggggacgcccaaatcgatacggattcgtccttgatttcatctttgttgggggaaaatcactggggcgaatcgcgtgtactacagtaccatgccactgggtagaaattgcgggcgcgccttccctgaaatctgtgataaacctgtcgtattgtgatgttgaccagcttcagttagctcagaaatgtcgctggcacaatacggggcgctaggttgggacattgccagcatttcgtttgggttgtccaaaccacagctttgctgctacatcctcacagctgcaattcgatttgtcatgttcattccgatgtgaccgtgtcaaccttgaaacttacttgcactatacccggtgttatacacaagtcccgtaatgaaatcttgtcaaatgctcctatttttgtgatagattgctcaacatggaaatatccctcaatcctcatatattcattttcctttactttgcaataaaagagattatacctgaatctcacactccatttatgccttccatccgcactttggtttgtactcatttgagatacagatacctgtaatactaatacgttaccttatattactaactatgcctccgcttttgcctaatgttactgaaccatgtaggcgtattgtccaaataaaagttcttgttatgtctctcgaaaaggagtatagtattgtagttttttggtgtattatataacctggaagttccatagcttgatgatccagtgtttctagcatgaaattgaatttttgatatgctgacatttttaaaatgtacacattgtactttatgctttccggcttgtccattgttgttcagctggacttgagcaaagtaactgtgatgatggatctgcatattgcgtacacaatcctgactccccatccatgtaatttttctggctaattttttggttttatgccatacctcacacgctgatggtttcaaccttgtccatatgtggatctaacaataatcctgtccagtctactaaatctgtccaattgcctttgtaaaaactaaggattgaaatgattcagataagcagttccttaaatggagtttcatcttcagttcttttgttgatccctgaatagttctagctaattaattactatagtacacaatattacatagtcatttcaattgattttacgtgaccaaacaattcttctctgcaggcgaacacgggatgttttcaatgttgcggtttcagtgcacaagaacattcagcagagagacctagaagttggtcggaaccttggtaacatgatccttcgctggcttgaccgcatgaagccctcagcacagattcgtccccatcctccaggcccaccaaatggcagctcagagcaattcaggcatctttcgagtacaagcaagagcacaggagctcagaagcctacatccaaaactttaccgtgcgatggtggaaaggtgttgttttcacctctgaacattcgacccaagtccttccctgttctaccgacaatgatgcagcccaccagaattagtgctagcagccagtgtaggcggatttcctactcatcattcccatcggccaccgctaagaggaatgatttcatgcagggtgtgttccgcaaggacattgcacagctcatggtgtgatgatctgtactgtcctggaattcaaagttcaattgacttagtttcgcgtagaacagaagtctcatgactcatgggtgatggatcctgcaataataaagggctgaacaagttttttgttgctcaaccagtttagcaaatagattttctaaccaatgatcataagacagtatgtggtattccataatggatatgtttactccattcgtccttgaaatgcgcaaaaggaactatgtaggattgaaacattatctcagattctcactacttcctcttcacttctctttttttaattgtcagatttccatttcagaaatggcactactttagagatatctcctttctccaaactgggagatttctttttcctaggaggaattcacctttaattttactgttgtatgacccacatatggaaatggttgaatctgttgctgttgcagaccgc

SEQ ID NO: 27342 - DNA, 2370 bp, Oryza sativa
  ref <308>: DATABASE ACCESSION NUMBER: AK102784
  ref <309>: DATABASE ENTRY DATE: 2002-08-28
gagccgcactcgcctcctctcctccactcctcctcccgcatccgcggaaaccctagcctcctctctctctctcctcgttcactcgttcctcgcgccgccgccgcgacccgcgagcgggaggaggagccatggcgccgaccaagggggaggggccagcgatcggcatcgacctcgggacgacctactcgtgcgtgggggtgtggcagcacgaccgcgtcgagatcatcgccaacgaccaggggaaccgcaccgccccctcctacgtcgggttcacggacaccgagcgcctcatcggggatgccgccaagaaccaggtcgccatgaaccccatcaacaccgtcttcgatgccaagcgtcttatcggcagacggttttctgatgcctctgtccagagcgatatcaagatgtggccttacaaggttattcctggcccaggggataagcctatgattgtagtgcagtacaagggtgaggagaagcaattctctgccgaagaaatttcatccatggttcttatcaagatgcgtgagatcgctgaagcttacctagggtcaactgtgaagaatgctgttgtcactgttcctgcatacttcaatgattcccagaggcaggcaactaaagatgcaggtgttattgcgggtcttaatgttatgcgtatcatcaatgagccaacagctgctgcaattgcttatggtcttgacaagaaggcgactagtgttggtgagaagaacgtgctcatttttgaccttggtggtggtacttttgatgtctccctccttaccattgaggagggtatttttgaggtgaaagcaacagctggtgacactcaccttggtggggaggactttgacaaccgcctggtgaaccactttgtccaagagttcaagagaaagcataagaaggatatcagcgggaaccccagggctttgaggaggctcagaacatcatgtgaaagggcaaagaggaccctctcctccactgcccaaactactattgaaattgattccctctttgagggtgttgatttctattccaccatcaccagagccaggtttgaggagcttaacatggacctcttcaggaaatgtatggagcctgtggagaagtgcctgagggatgcaaagatggacaagagcactgtccatgatgttgtccttgttggtggttcaactagaatccctagggttcagcagcttctgcaggatttcttcaatgggaaggaactctgcaagagcattaaccctgatgaagctgtggcatacggtgctgccgtccaggctgctatccttagtggagaggggaacgagaaggtgcaggatcttcttctccttgatgtgacaccactgtctcttggtctcgagacagcgggaggtgtgatgacagtgctcatcccaaggaacaccaccattcctaccaagaaggagcaggtcttctccacctactccgataaccagcctggtgtgttgattcaggtctacgagggtgagaggacacggaccagggacaacaatctccttggcaaatttgagctgtctggaatccctcctgcccctaggggagtccctcagatcactgtctgctttgacattgatgccaacggtatcctgaatgtgtctgccgaagacaagacaactggccagaagaacaagataaccatcacaaatgacaagggaaggctgagcaaagaggagatagagaggatggttcaggacgccgagaagtacaagtccgaggatgaagagcacaaaaagaaagttgacgccaagaattccctggagaactatgcttacaacatgaggaacactatccaagacgagaagattgcttccaagctgccagctgacgacaagaaaaagattgaggacgcggtcgagcaggcgatccagtggctggacaacaaccagctcgctgaggttgaagagttcgaagacaagatgaaggagctggagggcctgtgcaacccaattattgccaagatgtaccagggtgctggtgccgacatgggtggtggaatggacgatgatgctccggctgctggtgggagtggtgctggccctaagattgaggaggtcgactaaatcaatacaccttcgtatatgtgatgagaaaaatattgatcatacaccttttgttttcaaatcccagttggcaatcataccacttgggctactcgtactttctgttaactaaagacttattatcacctgatgcttgagtttggacttctagtctcagattcgaacagacattcagtaatgtgatgatgtttcagtttttaccaggtggccgcggcagaattaccccttttgttttactgctgtattacaattgcaattgattatgctaggtgggtttggcccccggttactt

SEQ ID NO: 27343 - DNA, 1454 bp, Oryza sativa
  ref <308>: DATABASE ACCESSION NUMBER: AK102785
  ref <309>: DATABASE ENTRY DATE: 2002-08-28
gggtgctcgggctcggacacgagggaagcacacactgtttcttccgccgtgcgcggcgcacgaaaacccgcacctcctccgcctccgcgcgcccctgctcggcggcctcctctcctctcccacccatggcgcccccaccggcttcctccctccccacggccgtcctcgcatggggttcgggggaggacgggcagctgggcatgggcggctacgaggaggaggactgggcgcggggagtcgccgcgctcgacgcgctcgccgtctccgccgtcgtcgccggcagccgcaactccctcgccatctgcgccgatggccgcctcttcacgtgggggtggaaccagcgcggcacgctcgggcacccgccggagaccaagacggagagctccccggcccccgtcgatgccctcgccggcgtcagcatcgtgcaggcggcgatcggcggatggcattgcctcgcggtggacgacaaggggagagcatacgcttgggggggcaacgagtatgggcagtgtggggaggaggctgagaggaaggaagatggaaccagggctctcaggagggacattccgatcccgcaggggtgtgcccccaagctgaaagtccggcaagttgctgctggagggacacactcggtcgtcttgacacaagatggccatgtttggacatggggacaaccatggcctccaggcgatatcaagcaaatatctacaccagtgcgggtgcaaggccttgagaatgtaaaggtgattgctgtaggtgcattccataatttggctctaacagaagatggaattttgtgggcatggggtaacaatgagtatggtcaactgggcactggagatactcaaccaagatcgcaaccaatccgtgttgaaggattatctgacctttcattggttgacattgctgctggaggttggcattcaactgcattaactaaagagggagaggtgtatgcttgggggagaggagagcatgggaggcttggatttggagatgataaaagtagtcacatggttccccaaaaggttgagcttcttgctggagaggatattattcaggtatcgtgtggaggaacccattcagttgcgctaactcgtgatggacgaatgttttcttacggtagaggtgaccatggccgtctgggctacggcaggaaggtcacgacgggccacccgatggaagtccccatcgacctgccgccgccgggaaccagcggcggcgactccggcgggcaatggcaggcgaggtacgtcgcctgcggcgggaggcacacgctggccatcgcgacatggacggaggcagacgagtaatcgatcgcctcttggttttttaaagccaaatcccggagctggtacagataatactaccgagtacttttcgtgcaataagacaaggctaatgttaaaatgatctctgagatgtatgagctgagtgatgaataaacaaggagg

SEQ ID NO: 27344 - DNA, 2802 bp, Oryza sativa
  ref <308>: DATABASE ACCESSION NUMBER: AK102786
  ref <309>: DATABASE ENTRY DATE: 2002-08-28
gacgtagccccggaggaagaagactctcggtcaagagtcaagacttcgaccaatcgaccaacacgaagcggcaaaggaaacgtcaccgtcgcggcgtcgccgatggagtcgtccgcctcctcctcggccgcggtggcggcggagggggcgccggcgacgggggagcagctggcggtgttctggcacgagggcatggtggcccacgacgccggccgcggcgtgttcgactcgggccgcgacccgggcttcctcgacgtgctcgaccagcacccggagaacgccgaccgcgtccgcaacatggtctccatcctccgccgcggccccatcgcgcgcttcatctcctggcactccggccgccccgcccacgccgccgagctcctctccttccactccgccgaatacatagaggagctcgtgcaagcaaatgccgttggtgccaagaagctgtgtgaaggcactttcttgaaccctggatcctggggtgctgcgcttctggcggctggaacaactttatcagcgatgaagcacatactagatggacatgccaagattgcctatgcgttggtccgcccccctggccatcatgcgcaaccggaccgtgctgatggttactgcttcctgaacaatgctgggcttgcagtgaagctggctctggattcaggacgcagaaaggttgctgttgttgatattgacgtgcactatggaaatggcactgcggagggcttctaccacacagacagcgtgctgacgatctctcttcacatgaagcatggttcatggggtccatcacatccccagagtggctcggtggatgagattggtgaaggcaggggtcttgggtacaatctcaatattcctttgcctaatggcagtggggatgcagggtatgagtatgcgatgaatgaattagttgttccagccatagagaagtttcgtcctgagcttttggtttttgttgttggccaagattctagtacgtttgatcccaatggaagacagtgcttaaccatggatggttatcggaaaattgggcaaataatgagaggcatggctgatcaacacagcaatggtcaaatattgatcgtgcaggaagggggttatcacatcagctattcggcatattgtctgcatgcaacactagaaggtgttctgaatctacaagccccgttgcttgatgatccaatcgcctattatccagaggatgagaaatacaccatgaaagttgtggacatcatgaagaaatgctggaaagaatctattccattcttgaaggacatatagaaatccatttcttttagatgcgagtgcccttgaacctcaatttcatatcagtgcaccgtctattcttatggccttttgactgaaagtacatgcattcattggagcaacattcgagtgcttgttcctttcataaacccctgattcacaagttctcaattcacattgatgggctgtttgattatgcaatggggcattggggctacagccacctgtattatataagcgcaccagttccaagtctgaaaccaagtgccaagtctgaattattgtctagcaaggaatgctacctgctgccacatcactcgtcaacttactgcctacagcaatactggaaggaatatatgtgggcgatgataaggtgatccattttactagaggaaggggccaggaggtcggaacaggaactttcattgacctcctccttatgagctctggtcctaatacaaacactccatgttcaatatgcaacaatgaaggtgccaccaccaatacggagacaaatggtgtggtatcctcttgcctcaactgcttcctgtcagggggcgccctctaccgtttcgagtatgctgtcaacccagcacttttccttgccaaagcgcgaggagggacgtgcacgcttgccccaactgatccagatgaggttgttgtgcgccgtgccaatcacttgctcagcaatggtttcaggtgctacaacctgttcaagagcaactgtgaggacttcgcgatatactgcaagacaggcctccttgtggcagagcaaggtgtcgtcgggcagagtgggcaggccatctccatcatcggtggacctcttgctgcggtgatttcaaccccattccgcctagtaaccacgaatatctatggaatggcggtgatggcagttggggtgtattgcgccagcaggtacgcagctgacattggcaaccggcgagatgtgctgaaagtggaagtggaggacctgactgctgggctggcgagtggcaggattcgtgccgtggagaacatcagtcagttggttgctccggcagaagcccaaggtctggccgtaaccgcacctgttgctgcttaaagtgcaccactgagatctatacattactccagaccttctgctgctaaatttatggatgtttcgttgtcaaatatcagctgaaattgtgtaccagagtgagcctcccattcagcaatagctgtacaaacaatgaaaaaacttatacgcccgtttctgccatcaactgttatgtgtggcttatctactgttgtataaattatgaacatggaagtgtggtgcttgtcgatttgcaactcaagattgtgacagctctcttattttaggcagtaattccacttcattaggagacgtttgcttgtaagtgggaaatataattcacctgacctgagccaacttgggatgtagaggttaactttcattcatggcctcattgggagttgttgggacacggaaaaactgcaattttgtttgagaattcatataacagcaaagctcataagccattttttcactcg

SEQ ID NO: 27345 - DNA, 2297 bp, Oryza sativa
  ref <308>: DATABASE ACCESSION NUMBER: AK102787
  ref <309>: DATABASE ENTRY DATE: 2002-08-28
gacatcctcccccctcctccacccgctgccacaccatccgtcgccgtcgccgtcgccccgctcgccctcgggttgacttgactcctcctcctcctcgtcctctctctgtagttgtacatacacctccccgccctccgcctcaccactctatttccgtcttcttcctcctctctatctctctcctcttggatttgtcaggttctttaccacggcggtttgatcggatccccaatcctgggttccggtggctctcgagcacagcggcggtcgggaccggcgaagaagcggcttttcgctgcggagggagtgcgcagggaagaaaatcacctccactgattttatagaagacgttgaatatatagtctacaaaatgatggctgctgagttaattaagcagttttcaaacatcaccctgggagaagaacaggagttatgtgatattgagcatgcactcaaggcactgcggaagaagattcttactttggattttgaaaattccatgcgtgttcatgatccgcaaaactcatttcagtacttggaagtgctgtacaaaattcggcagctgactgaaaggttagggagcttacaccctggtggggaagccaaagagcataatgagctcatagtatatgctggcgacctttttgatatggcaatggcaaggcttgaagaggaatttgtttatcttcttacgcattacaaacaaccaatagaacaaggacttgtttctttccggtctacagaggatggcagtgtggatgatttttcaagcagctcattcaatgaggaacaatgtgacggtaagacaacacagactgaaactactggaggatcagaatattttgcgactgatttgattcaacatggtgcactctctgctgtcaagtccattgccaacttcatgtttctgagtgaatatgataaggagtgttcccaggcttacataagcacacgacagagtgcagtagatgagaaccttgggtctcttcgtattgacaagctcagcatggaagaacttttgagcaccaactggaccaagttaagttcattgataaagaggtggaatcgtgcaatgaaggtctttgtccaagtctaccttacaagtgagaagcgccttagcaatcatgtctttggtgaactttcagaatcaaccgcagacttgtgtttttatgagatttcattgagctcagtcatgcaacttctgaccttttatgaatctgtagcaattggacctcctaaaccagaaaagcttttccgtctgcttgatatgtatgaggtcttaaatgatttactccctgaagtagaattcttgtttcaagaaggatgtgatgatatagttttgactgaatataatgaagtcctgctacagctgggagaatcagtaagaaaaacaattacagaattcaagtatgctgtccagtcctacacttcatccaatgcaatggcccgtggtgaagtgcatccccttacaaagtatgttatgaactatataaaagctctcacagcttatagcaaaactcttgattcgcttctaaaggacacagatcgaagatgccagcatttctccactgacattcagtctatggcaaaccaatgtcctcattttactgtcagtgcattgcatttgcagtcagttactgcaattctagaagaaaatcttgaagctgggtccagattatatagagatgatcgattacgaaacatctttatgatgaacaacatctactacatggtccagaaagtgaaaaactcagagcttaaaatctttcttggtgatgactggatccgggtgcacaatcggaagtttcagcagcaagcgatgagctacgagagggcatcgtggagtcatgttctctcttttctgagtgatgatggcttgtgtgctgctggggatggtgcttctcgtaaaatcattaaagagaaattcaaaaatttcaatctgtcatttgaagatgcttatcgaactcaaacaggatggtctatcccagatgaccaactccgtgaagatgtcaggatttcgatatccctgaaaattatacaggcctatcgtactttcacgggacgatactatagccgccttgatggcactaggcacctagagcgatacataaagtataagcctgaggatttggagaaacttttgctcgatctttttgaaggagctcaaaaaacattgtagcttgcagagtgtagaacttaaaacacagttattcttgatgaaatgtgcagttgtaatatttggtttgtattaagtaaaatggtatagttggtgattatttttatatgctgttttcctg

SEQ ID NO: 27346 - DNA, 1772 bp, Oryza sativa
  ref <308>: DATABASE ACCESSION NUMBER: AK102788
  ref <309>: DATABASE ENTRY DATE: 2002-08-28
gtggcccaatactgctcctacaaagacactgccacattccttctccttcctcctgcatactgtctctctctctctctctatctgatcagctgttccgcttcctcctcttcttctctcccccaaccccgtagccctcccacccatcgagccaggcggcggcgcgacggccggtggctaaggcggcggccggtgccaaaatctcgagcaatcgcgtcgcgccgtctggccggcttgcgacatcgctcgcccgagagcgtcgtcgtcttcgagcttgtgccgcgcggcgccgtcgccgcgtggtccgagggccccgtgccaccgcgtgcagagggcagaggcccatcgcctcctcctcgagccaccgcgctgccgtgtgccgtcccccttgtcgtcctcgagcccctgcgtcgccgccggccgccggggctcctcctcctcgtcctcctcgtcatcgacgccccaatcggcaccgcctcctggtcgttaaaaccatcctcgggcctttcgccaattggaaggcgccatcttttccgcattctttccatccggattccggccgctgttgctgtctggcggaatatctgtttcgccagattttcttgcgtttcgatttctttttattattttcctgagagagagagagagagagagagagagagagagagagagagagagagagagagggttccttccatttcgctgctgcgccaaagaacacaactttcccaattccttttcgcctccctgtagaggcatggagtgggacaaggccaaggcgtcctccggcgaggcggtggacgacaggggcagaggggaaggagggctcgggtacgtgaaggtgatgacggacgagcagatggaggtgctccggaagcagatctccatctacgccaccatctgcgagcagctcgtcgagatgcaccgcgccctcaccgcgcagcaggactccattgcaggaatgaggcttggtaatctgtactgtgatcctctaatggttcccggaggtcacaagatcacagcaaggcagcgatggacaccaaccccaatgcagttgcagattcttgagaacatctttgaccaaggcaatggaacaccaagcaagcaaaagataaaggacataacagcagagctctcacagcatggccagatctcagagacaaatgtctataactggttccagaacaggcgggcacgatcgaaacggaagcaagctgctttaccaaataataatgcagaatctgaagctgaagcggatgaggagtccccaactgacaaaaaacccaaatcagataggccgcttcaccagaacatagccatgagagatcacaatagcgaaaggatctcggagatgcaccactttgacacggagcatgagcaaatccgtcgtatgatgtatgcatccaatgacagtagctcgcgatcgtcaggcagtttgggccagatgtccttctacgacaatgttatgtcaaatccaagaatcgatcatttccttggtaaggtggagagccccgggagcttcccccacatgcgatccggtgaaagctttgatatgtattgatgacgcggcaattctggattctggttactagaaaattggagtttcttcgattgtgaagatcattgagttggagattagacaatgcttgttgatgatactatgggcatgttggcaagtggcatggtttgccagattttgactaaaccaaatgttgcttcttggctatgtacaatcctctatagcttcaatgagcagttttccctatgttgtcctc

SEQ ID NO: 27347 - DNA, 2086 bp, Oryza sativa
  ref <308>: DATABASE ACCESSION NUMBER: AK102789
  ref <309>: DATABASE ENTRY DATE: 2002-08-28
gggaaggaggaggggaatcgcaaaaggcgcctccagaaatttctctcctctcctcttcccccaccgcgtcgccccatctcgccgccgccgccgccgccgccgccgctcgccgccggttcggagaccgcgtcactgattggcctgcctctcctcgcaccgggggtttttccagcgcccaaatctctcggcggggacctccatgccggcggtggaggggatgcgggacgtggtcgccaccgtgagcggctaccacggcgacgagcggcacaggctggtcaggctcatcgcggagaccggcgcgagctacgtcggcgccatgagcagatccatcacccacctggtgtgctggaggcttgaggggaagaagtatgacatcgcgaggaggcttcggacgcgcgtcgtcagccaccggtggttcgaggactgcctcaaggaggggaggcgcctccccgagaaaccctacatgctggaaagtggtgaagaagcagggccagtccctgagctgcccactttcccgcgttcacgatccaagagaaatgcaagcatggaggatagatgcttgaaagaattacctgatgatttctgcaatacttcatatgcgaccgatgtgcttgtggttgctgattcaggttctgattgcaatcatcagcgatggtctgattcctccctactgaaagaaaattttgttggtgatcgcgataattctaagattggtgcaacacacgtgaaggaaagaagaaaacgtttaaagcatgcacaaaattcaaccaatgaagatgcactagatgcagaagacaatatttctaggctcatggcaagacaagggcgttatgagtcaagttatacttcatctcggagcgcatcaaatcagaagggagatttgttaaagcttctgcataatgatgatgctagcatgatgagaaaaagaaatagtctcatgaaaaaggaaacaagaaccaagcttgcaggctatcttatagaaagctgtgaaaatggaagtttgacagacagcttcgatgaacctcaaatgtcggatactccgcccactgaagatcgaagaaaaataaggaagacaagactgcgacaaagtacgttggacagtatatatgattatggtgaagccagtgagcatgatcctgaaaaaagtgaggatcaagaaaattttgaattgggtgaaagttcaagaagctttcagtcaagtgattcatccagacaagaaccagctttctgtactgagaaaacaaatcaaggaagcattgacattgcagctgatgatgacaagggagatgatgagaaagccactttggaagaaccaaccagttgtcaagggcaagctgaactttcctgtgtcatttgctggactgatttttcatccacaaggggcatcttaccatgtggacaccgattttgttattcatgcattcaagaatgggcggattctctgtcttctaggggaaaagtttcgacatgtcctctgtgcaaaacaagttttgcctggatcagtaaaatagatgaggctggtacatctgatcaagagatatactctcaaactataccttgctcaacttctaccgacactttcatatttgatgatagagtctacggcctcccagaatcaccgtctgggcaaggggcatgttaccagtgccactgtcgtgagcctgaggagcttcttctgagctgccatgtttgccggtctcaatgggtacactcgtattgtcttgatcctccattgacgccatggacgtgcatacactgcagagatcttcggatgctctatcagcgttatcgctagtctgaactctgaaacctggatattcgttgattagaggttatatatggctttcgcatttgaaatgcatcttctctgagctgatcatttgcttcaggccttgttatataggttgagaattgacaattactggcttcataattgcagtatgcaaattgttgtactaattgtgaagttgtactgtttttgggtaaatcttacgtgcccagtctaccaaattggagtactccctccagttccattttaattgacgttttggacaatgacacggtctataagatacatctttgatct

SEQ ID NO: 27348 - DNA, 2193 bp, Oryza sativa
  ref <308>: DATABASE ACCESSION NUMBER: AK102790
  ref <309>: DATABASE ENTRY DATE: 2002-08-28
gacggatccgcacgctctccaccgctgccgcccaccacccgttcgacggaattccccacccgtcgctcgcccgccaccgccgcgtcaaccccatcgccttctcggccgccgtcagggcgtccgacccggcctccctcccggcgctccacgccgtcgccgtaaccaccggcctccacggcttcgccgccgtgaccaactccctcgccgcccgctacgccaagaccgggtcgttcccttccgccgtcggggtgttcgccgcggcgcgggcgagggatgtcagctcctacaacaccatcctctccgcgttccctgacccggccgaggcgctcgacttcgcgtcgtggatgctccgctccggcgccgtgcggcccgacgccgtcacgtgcaccgtcgcgctatcgctggccgccggccggggggagggcttcctcgtgcggcagctgcacgcgctggcttggcggtccgggctcgcggctgatgtgttcgtcggcaacgcgctcgtcactgcgtactcacgtggagggtctctcggggaggccaggagtgtgttcgacgatatgccggcgagggacctcgtctcatggaacgcgttgatctgcgggctcgcgcaagacggcgactgcccggccgaggtgattggcgtgttcctccggatgctcagggacggcgacgtccagcctgaccggatatcggtctgcagcgtgatcccggcatgtggcggcgaggggaagctcgagctcggccggcaagtccatggctttgcggtgaagctgggcgtcgagggatacgtctccatcggcaacgtgctcgtcgcgatgtactacaagtgcggcgctcccggcagcgcccggaggctgttcgacgccatgagcgagcgcgacgtcgtgtcatggaccacggccatctccatggacggcgaggacgccctcacgctgttcaatggcatgcggcgagacggcgtgccgccgaacgaggtcaccttcgtggcgctgatgtcggcgctgccagcggactgtccggcgaggggagcgcagatggtccacgcggcgtgcctcaaggccgccgtgtccggcgaagcggcggcgtcgaacagcctcatcaccatgtatgccaaggcgcgtcgcatggacgacgcgaggatggtgttcgacctcatgcctcgccgggagatcatcgcgtggaacgctgtgatctcgggctacgcgcagaacggccggtgcaacgacgccctcgagctcttctcgtccatggccaggtgcctgacacccaacgagaccacgttcgcgagcgtcctcagcgcggtgaccgcggtggagacggtgtccatggcgtacggccagatgtaccactccagggctctcagcatgggcttcggcgacagcgagtacgtcgccggcgccctcatcgacatgtacgcgaagcgtggcaacttggaagagtcccggaaggcgttccacgagacggagcagcggagcctcatcgcctggacggcgatcatctcggcgaacgccaggcacgggagctacggcgccgtcatgagcctcttcggcgacatggcgcgctccggcgtcgcaccggacggcgtcgtgctcctcgccgtcctcacggcctgccggtacggcgggatggtcgacgccggcagggacatcttcgactcgatggctgccgatcgcggcgtcgagctgtggccggagcactactcctgcgtcgtcgacatgttaggccgggcagggaggctggcggaggctgaggagctcatgatgcggatgccggcggggccgagcgtgtcggcgctgcagagcttgctcggagcctgcagaatccatggcgacgcggagatcggcgagagggtcgccagaattttgacggagaaggagccgacggagtccggcgcgtacgtcctcctgtcgaacatctacgccgacgtgggcgactgggacggcgtcgccaaggtgaggaggaagatgagggacagaggcgtcaagaaggagatcgggttcagctgggtggacgccggcgctggcgaggcactgcatttgcacaagttttcgtcggacgacacgacgcatccgcgtacagaagagatatacgcagtggccgatgtgttaggctgggagatgaaatttctgaagaattgttcgcaaatggaaatgatcttgatctgatacatcagtataaaattaatcgaaactg

SEQ ID NO: 27349 - DNA, 2101 bp, Oryza sativa
  ref <308>: DATABASE ACCESSION NUMBER: AK102791
  ref <309>: DATABASE ENTRY DATE: 2002-08-28
gctagcagttcttccttccgttccttccctctatctatcctccgcctcgtcctcgccacgcgcgaaggcggcgtcgatcggttcccccatttttctcatcgatccctcgtggcctcctccccgccgccgcgccacctcgtctcgaagatttctttgatgcgtggtggcagtggcgtttggatcttggtgccgccatgagtccgccggggaggaaggccccggccggtgcgggcgggatccgtcggtggctctccaccgtcgtcgtgtcggtggtggctcttgtgctaaccctagtagtgatatcgctatcggtgggctcgtctctgaccggggcatcgctacacgagtacctctttgtcagacctagtgattcatccaagcttactgatgggaacatgaatggtactgccgttggtgttccattacaagaggaagtgttgcagggtggcaaggaagtacccgtggagcacggtgttcagagtggcggcgtgaattcgagcgagacgggtgaaatcgataccaaagtacaagatccagttgttaccgatgataccgcgtcagtgcctgatgagagaaatctccctgtctcatcggattcatccgacaatcttcagaagactaatgaaggtagctgtgatctataccatggacattgggtttttgattcttctggaccactatacacaaacaactcttgcccgatcatcacgcagatgcagaattgtcaaggaaatggtcgacctgataaggattatgaaaattatagatggaaaccagaacagtgcatcctaccacgctttgatggaccaaagttcctggagttgatgagaggcaagacaattgcatttgttggtgattcagttgccagaaatcagatggaatccctcctctgcattctgtggcaggtagaggccccagtaaaccgtggtagccgcaggatgagcaagtggatttttaggtcaacctcaacaattatcgtccgcatctggtcgtcttggttagtgcacaggtcaactgaagctgtggggtttgctcctaagggtatcgataaggttttcctggatatcccggatgagacctttatggaatttatcccacgttttgatgtgcttgtcctctcctctgggcactggtttgccaaacggtctgcttatatcctgaatggcaatgttgttggagggcagctctggtggcctcgtaaagctggaaatatgcagatcaacaatgttgatgcttttggtacatctgttgagacatgcctaactgctctagctaccaatccaaatttcacaggtatagctatcgtgcgcacatattcaccagatcattatgaaggtggggcttggaataccggtggatcatgcactggaaagactaagcccttggatgtggtggtgaggaatggattcacggacaccatgtatggaaagcaggtttcagggttcacaaaagcagtgcagaattctgggaaacatggttccaggttgaaattgatggacatcactgagccctttgccctgaggcctgatgggcatcctggtccatatagaagtactgacccaaacaagaagacgcaaagaggtccagatggaaggcctccacctcaggattgcctacattggtgcatgccaggacctgtagatacatggaatgagatgttgctagagaccatacgaagagagttcgagggagtgagaagctgaagaaaaacactcattggctgcttgatttctatcatgtgatacgacctgcaaaaactaattaagcttctagcattggtgtatacctcattacatatcgtgttgttgttctcccacagataggaaggaaatatagcttttggttggacaaaaaaacaaattgtaggcatgttgtcaacagtcgggatagaagtacagaggggtagacagttagagagagaggttatgatggatgatactgtgcaattgatctgtatctagttttttgtctgacacattcttggagatatgatccgttgacgaattttgtggaactacatatgatctcatatctcgagcacctgtcaatctatgaggcagatgctgattttggtttataacagatgaaagagaacttgttc

SEQ ID NO: 27350 - DNA, 2165 bp, Oryza sativa
  ref <308>: DATABASE ACCESSION NUMBER: AK102792
  ref <309>: DATABASE ENTRY DATE: 2002-08-28
ggcggccgcagcggcgccggcggctccggcggcgctgagactgagagcgcaccactccgcagccacaggcggaccggatcgacgatgcctgcggcctccgccgccgtcccagcgaggctgaagcgggaggactacccacgcaccaagcacgactccctcttctccccatggaaggttcttgtcgggccgtcggactgggaggaccacgccgccggcaaggaagggatccagaggtacagggtgctcaacctgccggagaacttccctggcctctacgagctgggcgtcgcgagggcctccgacgagggtatcagggcggctcggcggtggaatggatccggtggtggtggcgtcgtcgtcgtgtacctcgggcaggccgacagcgtcagggcgaggctccagcagtacggccggacgggatcgcacttggacgccgggaacccaccgccgtccgccggcgaagcggagacgaatacgcgggcgacggggaatgggttgttcagggaagttttcgtcagaggctactccttggtgttccgatgtgctctgatgggtaacaaacaagaagctgagaagactgaggctcggctgcttagagtgtttgattacgcatggaacaagcttcagaacggtggtcttcgccgtgaagaaatacttatcaagttagaacaaggggcagtcaacaatagatcatctctgcttagcagagtacggcacttcaaacaggaagtgttcagagagaaagcaggtataaagataagcagaaatgggtctgttgatgtctcatctggcattatgaaaaatatgctcccaagaattcgaacatttgttggcttcagacctcagctagttaactctggtgacaatgttgacaaggaaattggcattcgctggaaaatacatctgaaggtaacagttatggcaaacaagcacgtcgaagttctgaaggatacaaagtcaaaagagtcaatgttgtaaaacgaagaactatgccagaacaagattctaacgatgtttgtggagtgatgctggaagatggctcctcttgtcttgaccatccagtacaaggaaggaagaggtgtgaattacacaaaggtagaagactaggaagaatcacagtcaatcctaaaggctcctcttgtagctattcttgccaagttgagattccagttgttgaatccatatctccactaactgaaaatgaaagcgagtcagatcaagcacagcaaaccagtgaactcctctccaaatttttgccagcaacagtgaaaaaatcatcaagaccatggtatagctttgaagcgaaagaaataaaaactggagaagctcctatagaagatggaaaacaggaaacctctgaggtcattgatatctgtgaagccaaaaagagtgacaactctgcctgcaccaacaaagtaatttcaggaagtaaaaaatgtcagctgcataatggttgcaaagcagaagagtttgtttcatctcgagtcattgatttgctccagaatgaagaaaaggtcaaaagcatgacagttgacaagctcagtggggaggagatttctcatggtaaatatcagtcccaagagaatcagccttccggaagaatgtggtttgagctgatcaaattgcagaatcctaccagcacactgtcatccaaaggccagggacgtcagaaaagagtgacaggcaatgtcgcagctatctgtgaagcgttgacggacaacagatgccgtgaaacaataccaatggcaggaagagaaagatgcgatgcgcatgaaggaataaaggtcaccgatgcttcctctgtaccgttttccggaagctcaggatggccatcaatctgtggtgctcgagcttcggattgttctccttgtaagaatcagccaattgcagggagaaagagatgcgcgatgcataaaggccaaagagcatgtcggaccccctcaatcgactgagcagacatgatatgagtgatgctcaattgcttacgttcattcagtcatttgttgtaatagcattttcagtaaggaaaagtaaaccaaagaaagctgttttcttgccccgagttttgattggttattcgttgctgcttgtaaaccaaaatagacagtcaaacaaaccatgtaacttgatacaactttttttagggactcaacctctattacccg

SEQ ID NO: 27351 - DNA, 2866 bp, Oryza sativa
  ref <308>: DATABASE ACCESSION NUMBER: AK102793
  ref <309>: DATABASE ENTRY DATE: 2002-08-28
gagttttgcatctgccgtctccgacgaggcgacgaggcggcgggtggcggcgcctccgccggcgtacggctgcccggacgctttcgtctccggtgctcgcctaatgtgacagggatatgcagctaggttttgagttgttatcgtgttcccactgacactactttatgatcataagaaacatcaatagcaatacttcctgataccagcccaatagaaggagatgatgaagccaactacaaaagaaactgttgcaacccatgtagttgacctgaagtcatcttcagtgctagccatattgtattgactgtcagagtcttctgtacatattgtgagacctggattgccagatacatcaacctttacccctctaggcaactcaggcatggggccagagagctggttatagcaaagagacaagtagatcaatcccttcaggtttgcaaacgaggatggcacctgaccggacaagtggttgtctgaaagatcaagtaacagcaagttacttaaagctccaatgctggatggaatagacccctggagatggttgtgacttagtataagagcaccgattttggttggcattgtaggaatggttcctgtcagctgattgttcccgagatcgagggtgctgagaaactgcagagagctgatcgaaggtgggatcacaccactgaaattgttgccatgtaaatcgagataacagagcttggacaataggaccaatgttgaaggtatctctccagagaatgagttcgcactaaggttaagtacttccatatttgtcataccagaaaatattcttgggatatatccactgaaattgtaggtttggagcttgatgacctcaagttgctgaagatttctcagctcatcagggacaacaccttgcagcttgtttgttgacagatccatgagcaccatgttattgcatttgccgagttgtgagggtataggtccacttagctgattgtcatccaactccaggtaagccaatctgatggcattacctattgattcagggatgctcccgcttagcaagttgcaaccgagtctcaggtggtagaggctccgagagaaattcccaggaatgagcccttcaagcctattggcagtgaggtcaatggtctccaaactatctggtgagaggagatcagagggcatctcaccattgagcatgttgtaactcaaatccaacattctaatgttcttggtgattccttgaggaattgagccagaaagtttgttctcattacttgcaaaccgaaacaatgtggtgacattcagcaagctctgtggaattttccctgtcaggttgttttctgaaaggagcaaaatcctgagttttgggaagctcaagaagccatctgggacgtcatcaactagattattctggcttaggtccaacagagtaatattcccatatctgaacaaacccatcggaattctaccactgaaattattaccggagaacaccagttcttccaaagaggtaaccatgcttgtagggatagggccttcaaagccattggaactaaggttcaagcttctcagttttggcaaataattcagctgggtacttatgttgtcatttaaagagttgaaggacaaatcaagaacctctagctcatgaaaaccggagaaattgccaagatgactggatagcctattgtagctgagatcgagcacttgcaattctgccttcatggggcaaggagagaattggcttggcaagtcagtgaaggagtttctagagagattaagggagtgtaatgtatcaagaaggcatatagatgcaaggatggtggcattggagaggccatatccggggagggagagcctggtgacaaaagaagaggatgcagcagaagtgcaatgaaccccactccattcgcacggatttgagctggtgttccagctcttggtgagagatgaatccatggcactactgaccaagcccaggatatctcgcatgatgttctcttgtgccttgttcagttgcattggcgatttctcggtggccgcagccatcgacacgctcagaagaaaggtcagaaacagcaagcacaggctgctactgctagcaggagcgcggtgccgactgatcacctccatggctacttctcagttctctctccactctcctcggcaactctgtcgattcaagatatcgactggttacatctgaagtacactggtgcaattttcagttagttgcttatgtgaagttgtgaattatacatatatagagattgcattagagggaaatgccaaagagtcatccaggaaggggtcaaaagtttgctttcaccactttaccttgtgtgacactgtaaatttttttatggcgtgtgaatggagcagagcagagaacactcaccgttcagtgtgacttgcactgatttcacctggcagatggatccattcaggatgttgtggccgtcggcatcacatttgacaccagcactggcttagcctttgtccctttttactgggcttgtggctactgaaataatttgagctggtttggaggaacggtcaagataagagatgacttgcaaagaaacgggtgaaaaggcaccataaagatgatatcaatatttaccttttcaaaagaactccatactatcaggttgccctttcatggaaggagcaaaatcctgagttgtggaagctcaagaagcccgtctgggacgtcaccaactggagtagattattctggctgaggtcatccaagagaggaacattttttttaaaaaaaaagttagaactttcattgctcactactctcttggtaaaaaaaaaaaaggcctaggttagatttttctgggacggaggcagttgagatatgcaagagaggaagatttcc

SEQ ID NO: 27352 - DNA, 1554 bp, Oryza sativa
  ref <308>: DATABASE ACCESSION NUMBER: AK102794
  ref <309>: DATABASE ENTRY DATE: 2002-08-28
ggttccctcctctcctcctttctctctccctcctcccgcgcgcggggtctcgccttaacgtttgccgcatatgggggcgacgagcaaagcgtaggccggagggagggacagggagagagagagagagaggctttctggctcgctctctctgcacgatctctcgtcttgttggattatacagccatgacatggtgcaacagcttcaacgacgtgcgcgccgtggagaacaacctggccaccgccgccgccgtggccgcggccaagaagcagcagcagcagcagcaggtctcccagcacgtcaacctcatcaagacctgcccctcctgcggccaccgcgcgcagtatgagcaggcagcggcggcggcgacgatccaggacctgccggggctgccggccggggtgaagttcgacccgacggaccaggagctgctggagcacctggaagggaaggcgaggcctgacgcgcggaagctccaccccctcatcgacgagttcatccccaccatcgagggcgagaacggcatctgctacacccatcccgagaggcttccaggagtcggcaaggacggcctgatccggcacttcttccaccgcccgtcgaaggcgtacacgacggggacgcggaagcggcggaaggtgcacaccgacgagcagggcggcgagacgcggtggcacaagaccggcaagacgcggccggtgttcaccggcggcaagctgaaggggtacaagaagatcctggtgctctacaccaactacggcaagcagcgcaagccggagaagaccaactgggtgatgcaccagtaccacctgggctccgacgaggaggagaaggacggcgagctcgctcgtgtccaaggtgttctaccagacgcagccgaggcagtgcggcggcggctcggcagcgacggccaaggacctctccgtcgacctcgtcgccggtaacaacatcaaggctagcaatgctgctgctgaacaccaccataacgacggcgtcggcggcggcggccacggtggcaacaacagcagcatgctgaaggaagctgcaggcattgtagatttctacaacccagcggcggcgctaatcggctacagccaggcggctcctaacaacagggcggctgcttctgctcatttgacgatgcctaactttgaggtgcacacaggaggtgcaggctttggcccctgatggatggaagaaaacaaagcaaattaaacatatttgactgatgatatatataggttagatggagagggcagggcaggtatatgatggcaaatgtgcatcatgcatgctagcatggtgtaatttgcatcgagtgaaaaaaaaggagtttactaaaccgtctacgtacgtattactggacaataaggagtgtgtcgagtgagttgctgcacagatgttgaagcgtaggggggtcgatattcttacagtgttcattattgttacatgtgtacacatatataacttgacattctcaatttttttgtgtaatgatatatatatatatatatatatatatatatatatatatatatatatatatgttgttctat

SEQ ID NO: 27353 - DNA, 1773 bp, Oryza sativa
  ref <308>: DATABASE ACCESSION NUMBER: AK102795
  ref <309>: DATABASE ENTRY DATE: 2002-08-28
gactccgattcctcttctttcgcccaaattttggctcaacatttcgcagcgcaatctcgagctgaatcttggggggtaaagctttgcttcttggaatcttggtgcggtttttgggggagatttgcgagcgtttggagccgagaagatgaacagggagaaatccccgatcccgggagacggcggcgacgggttgccgccgcaggccacccgccgggcgggccctccggcggcggcggcggcggcggagtacgacatcagccgcatgccggatttcccgacgaggaaccccggccacaggcgcgcccactccgagatcctgagcctccccgaggacctcgacctgtgcgcggccggcggcggcgacgggccgtcgctgtcggacgagaacgacgaggagctcttctccatgttcctcgacgtggagaagctgaacagcacgtgcggggcgtcgtcggaggcggagggcggagtcgtcgtccgccggcgccgcccatggagcgaggccgaagcaccagcacagcctgtccatggatgagtcgatgtcgatcaaggctgaggagctcgtcggggcgtcgcccgggacggaggggatgtcgtcggcggaggccaagaaggccgtgtccgcggccaagctcgccgagcttgctctcgtcgatcccaagagggcgaaaaggatttgggctaacagacatctgcggcaagatcaaaggaaaggaaaatgcgatatattgctgaacttgagcgcaaggtgcaaaccctgcaaacagaagcaacaacactgtcagcccagttggcactgctacagagagataccagtgggctaactactgagaatagtgaactgaagctacgtctgcagaccatggagcagcaagtccacttgcaagatgctttgaatgacaccctgaagtctgaggttcagcggcttaaggttgcaaccggtcaaatggcgaatggtggagggatgatgatgaacttcggtggcatgccacaccaattcggaggcaaccagcagatgttccagaacaaccaggccatgcaatctatgctggcagcacaccagctgcaacagctccagcttcatcctcaggctcagcagcagcaggtgctgcaccctcagcatcagcagcagcagccattgcaccctctacaagcgcagcagctccagcaggcggcacgagacctcaagatgaaatcgccgatgggcggccagagccagtggggagatggcaagtcaggaagcagcggcaactgatgcgtcatttacaaatttacaaaaaaattccccaaagtttcggtgtaaggttgtggtttaacaaccatggagatggtctgtttcattgagatgatgatgatgtgcaagagtagttatcatcatcatcatcggtaggttcaggttggcttcagcttcagtcatacagttgggtggatgttcagttgaagagtttatctgtagctggttcagtaaggaaatggtcgaataatcaagaattccaggttaaaatctttcgtttctttggtaaggtagcacatcaccaagatgtactgttgtagtgttgtctacagttccataaattcaagtagccagtatacgctgttgtttagtttttctccggttttttagaggtagaggcgtttctagtgttaatcgagaggtatactgtataccttctgattaacatgtaaatcactcaacacctctacctccataaggaccggagaaaaactcaattgtttaattaagatgccattcatgactagatgttctctgtc

SEQ ID NO: 27354 - DNA, 1172 bp, Oryza sativa
  ref <308>: DATABASE ACCESSION NUMBER: AK102796
  ref <309>: DATABASE ENTRY DATE: 2002-08-28
ggtcgtccacctccgaccgacggctatgaaggccgccgcctccccgctccgcgccgccctcctcctcttcctctcctcctcgccgtccccgcgtctcgcgctccccatgaacccctcctcctcctcctcctcccgcggcgccgcctcctgcactccaaggccgccgccttcgcctccccgcagcctcgcggcggcggcggcggccgaggggggcgacgcggcggcggaagaggccgcggcggcgatgggagcgaccgcatcgacgccctcggccgcctcctgacgcggatcttgcggcacatggcgtcggagctgaacctggagatgaggaccgacggctacgtgcgggtccgcgacctgctcaagctcaacctgcagaccttcgccaagatccctctcaagtcccacaccgtcgacgaaatcaaggaggcggttagacgggataacaagcagaggtttggtctgttggaggaagatggtgagctgctgattcgagctaaccagggccacacagtaacgactgttacttcagagagcttgttgaaacccattctatcagcagatgaagtctctgtttgtgtgcatggaacatacaggaagaacctcgattcaatcttgcatcaggggctaaaacgaatggcaaggttacatgtacatttctcaagtggcttaccgacagatgggggagttattagcggtatgcggcagagtgttaacatcttgatatatttggatgtcagtatggcactgcaagatggaatgaagctgtacatttcagacaacaaggtgattctgacagagggtttcgatggcgttgttcctgtgaagtacttcgagaaaattgaaacatggccagggagagcaccgataccatttgaaaaatagagaacactgttgtaattttgctcatgcgtatagcgatctacttcttcagttcatgggaattgtgccctgaaaggccgaaagaaatgtaattttgcaaacaagtttaggttatgctcgtttgagaaatggagaggtagacattgttgtgaagcttcagtaagctgttcttaatgttgattgggtcaatggctcctccagtttatccaattccatctttgcagttactactaatcttgtaactgagtatattgcaatacacaattggctacgactgacgatttatgtcg

SEQ ID NO: 27355 - DNA, 2625 bp, Oryza sativa
  ref <308>: DATABASE ACCESSION NUMBER: AK102797
  ref <309>: DATABASE ENTRY DATE: 2002-08-28
ggttgattccgcgcattagccaccccacctctccgcgtgggccccgccaaatctcctcttctcttcttccaccgccgcggcggcttcgcttcgcttcccaatccttcacatccaccaccgcctcctcctcctccccgcacgcctcgccgtcgccggcgaaaaccctagcggcgatctcctcgtacccatggccagctacggcgtcgacacgcggccggcggccgcggcggcgggaggcgggggagcgggagcgggagcggcgggggagggggcgctgtcgttcctgtcgcgcggcctccgggaggacctgcggctgatccgcgcgcgggcgggggagctggagacgttcctgaccgcgccggtgccggagccggagctgctcgcgcggctccggcgcgcgtactcgtcgtcggcggggaccacgcggctggacctgtcggccatcgggaaggcgttcgggacgggggtggtggggagggggagcaggggggcgaggtgggggtgggaggaggtccaggaggccgaggagtgggagcccatacggatggtcaaggcgcgcctcagggagatggagcggaggcggcagtggcaggccaccgacatgctccacaaggtcaagctcagcttgaaatcaatgagctttgtacctgaagcatctgaggaagttccaccgctagatttaggtgaactcctggcatatttcctaaagcaatctgggccattgtttgaccaacttggtataaaaagagacgtgtgcgataagctggtggaatctctgtgcagcaaacgcaaggaccaccttgcatataattcatttccagcaagtgaaccatccgcattcagcaatgacaatgctggtgatgaacttgacctaagaatagctagtgtcgtgcaaagtacaggacacaattatgaaggtggattttggaatgatgggcataaatatgaaacagctgacaagaggcatgttgcgatagtcaccactgccagtcttccctggatgactggaacagctgtaaatcctttatttcgagctgcttacttggctaagtcttccaagcaagatgtaaccttggtggtgccttggctttgcaagtctgatcaagaacttgtgtatcccaatagcatgacatttagttctccacaagaacaagaagcttatatgaggagttggctggaagaaagggttggtttcaagacagacttcaaaatatcattctatcctggaaagtttcaaaaagaacggagaagcataattcctgcgggggacacttcacaatttataccatcaaaggaagctgacattgctattttggaagagcctgagcacctgaactggtaccatcatgggaaacgttggactgataaatttaatcatgttgttggtgttgtgcatacaaattatttggagtacattaaaagggagaagaatggtgttattcaagccttttttgtgaagcacatcaacaatttggttaccagagcatattgccataaggttttgcgactgtcaggagctacacaagatctccccaagtccatgatctgcaatgtacatggtgtcaatcccaagtttcttgaggttggagagagaattgcagcagagagggaatctggccagcattctttctccaaaggagcttattttctagggaagatggtctgggccaaaggttacagagaattgatagatttgtatgccaaacacaagagtgatttggaaggcatcaagttggacatctatggaaatggtgaagattcacatgaggtgcaatcagcggctatgaagttgaacctaaaccttaactttcataaaggccgggatcatgcggatgattctcttcatgggtacaaggtttttataaatccaagcattagtgatgtcctttgcactgcgaccgctgaggcattagcaatgggtaagtttgttgtctgcgcagaccacccatcgaatgattttttcaggtcattcccgaactgtttgacatataaaacatcggaggactttgtcgcgaaagtgaaggaagcaatggcacgcgatccacaacccctcacacctgagcagagatacaacttatcctgggaggccgcaacacagagattcatggagcactccgagctggacaaggtcttgagcagcagcaacagggactgcaccaccagcaccagtggatgtggtaaaagtggagacaataagatggaaaaatcagcctcgttgccgaacatgtcagacatggtagatggtgggctggccttcgcccactactgcttcactggcaatgagctcctcagactgtcaaccggagcaatacccggcaccctcaattacaacaagcaacatagcttggacctccacctcttgccgcctcaggtacagaacccagtatacggctggtaagatactccatatatacaattagtagtagtatttctctcagcacatagatagctctgtaatttgtttgtaacactagttttcgtttttctttttgtctaccatatgccgaaggcaatcttgttcattattattgcaaactactactacagtactactacaaactacatgtgttagatagaagtgccattttcactggccttcatattcatattaaagcagagttgttc

SEQ ID NO: 27356 - DNA, 821 bp, Oryza sativa
  ref <308>: DATABASE ACCESSION NUMBER: AK102798
  ref <309>: DATABASE ENTRY DATE: 2002-08-28
ggctcagctcaatttgagcaacagaaacactaacacgtcaccaataatggcgtccctcgccaactcttctgtccacctcctcctcctcgtcgtggtgctcgccgccgccgccgatgcggtgacgttcaccatcgtcaacaagtgcgggtacaccgtgtggccggcggcgctgccgtcgggcgacggcaatcagctcgacccggggcagagctgggccgtgtacgtgccggcgggcaccaagggcgcgcgcgtgtgggggcgcacgggctgcggcttcatctccggcggcagcctagggcagtgccagacgggcgactgcggcggcacgctgcggtgcgcggccgtcggcgcgccgcccgtcacggtggccgagttctcgctgggccaggcgagcaaggacgactacttcgacatctcgctcgtggatgggttcaacgcgccaatggccatcgtgccggcggcggcgggcgggcggcggtgcccccgcggcgggcctcggtgcgcggcggagatcacgctgcagtgccccggcgagctgcgcgccaaggccgggtgcagcaacccgtgcagggggaacagcacgtgcgggccgaccaaggacacggagttcttcaagaagctgtgcccggagacggtcacctacgcccgggacggccaaggcaccaccttcacctgccccgccggcaccgactaccagatcgtcttctgaccatgatgagcttggtctcgtacagggacagtaataactatcttagttcctgtacttgtatatggtggtaaataaaacctcgcactgagtgaatcacttgtttgggataacg

SEQ ID NO: 27357 - DNA, 1601 bp, Oryza sativa
  ref <308>: DATABASE ACCESSION NUMBER: AK102799
  ref <309>: DATABASE ENTRY DATE: 2002-08-28
gaccagaattccaagcaacgaactgcgagtgattcaagaaaaaagaaaacctgagctttcgatctcttcggagtggtttcttgttctttgaaaaagagggggattaatggcgacagccgggaaggtgatcaagtgcaaagcggcggtggcatgggaggccgggaagccgctgtcgatcgaggaggtggaggttgcgccgccgcaggccatggaggtccgcgtcaagatcatctacaccgccctctgccacaccgacgtctacttctgggaggccaaggggcaaacacctgttttccctaggatcttgggccatgaagctggaggcattgtggagagtgtgggagagggtgtgaccgaactcgcgccgggcgaccatgtcctcccggtgttcaccggcgagtgcaaggagtgtgatcactgcaaatcggaggagagcaacatgtgtgacctcctcaggatcaacgtcgaccgcggcgtcatgatcggcgacggcaagtcccgattcaccatcaaggggaagcccatcttccactttgttggcacatccaccttcagcgagtacaccgtcatccatgtcggctgcctcgcgaagatcaacccggaggcgcctctcgacaaggtctgcattctcagctgcggtttctctaccggttttggtgcaacagtgaatgtcgcgaaaccgaaaaagggccagaccgtggctattttcggtcttggagctgttggtcttgctgctatggaaggtgccaggctgtctggagcatcgaggatcattggtgtggacctgaaccctgcgaaattcgaacaagctaagaagtttggctgcactgacttcgtaaaccccaaggaccacagcaagccagtgcacgaggtgctgattgagatgaccaacggtggactcgacagggccgttgaatgcacgggcaacatcaacgccatgatatcctgcttcgaatgtgtccatgatggatggggcgttgcggtgctggtcggcgtgccgaccaaggatgatgtgttcaagacccacccgatgaacttcctcaacgagaagacgctcaaggggacgttcttcggtaactacaagccgcgcaccgacctgcccaacgtcgtcgagctgtacatgaagaaggagctggagctggagaagttcatcacgcacagcgtgccgttctcggagatcaacacggcgttcgatctcatgctcaaggggggagagtctccgctgcgtcatgaggatggatgagtagagatgatgatgatctatctctctctctctctctcttgcagtttcagtgcatacaagaaaccaaaaatgaaagcaaaaaaatggatgagaagtttgaggttttccatttaagtttaataatggtcgtgagacagggcttgtgtggagtcagctctgtttactccctcctttcatggcttgatcttgtttattgtcagcattgtggcttagcagattttcaccagttttaccctgtaaattagtaccattctgaaatcgtaataaactactagcagtgtgaggtactattgctggaactgaattgattgtgcagtaaagaggtgaatagcagccagtatgaaggttttacaatttg

SEQ ID NO: 27358 - DNA, 2017 bp, Oryza sativa
  ref <308>: DATABASE ACCESSION NUMBER: AK102800
  ref <309>: DATABASE ENTRY DATE: 2002-08-28
gtttgggctccttcctttccccattctcactctcggccttccttccacggcagcgcctcccactgcgccttcgccggcggcggaggaggagggaggtgcggccatgggtcacggtgtcagctgcgcccgcaccggcgacgagcacgacttcttccgggcggcgcagctcggcgacctcgacgccctggccgccctcctcgccgccgacccttccctcgctcgccgcgccaccctctacgaccgcctctccgtcctccacatcgccgccgccaatggccgcatcgaggtgctctccatgttcttggatcgcggggcgccgccggacgcggtgaatcggcacaagcagacgccgctgatgctcgcggccatgcacggcaagatcgactgcgtgctcaagctcctccaggccgacgcaaatatcttgatgttcgactcggtgcacgcgaggacctgcctccaccacgcggcgtactacggccacgtcgactgcctgcaggccatcctcgccgccgcgcagaccacgccggtggccgactcatggggtttcgcccggttcgtcaacgtcagggacgaccacggcgccactccgctgcatctcgcggccaggcaggggcggccggggtgcgtgcaggtgttgctggagaacggcgccattgtgtcggctttgacaggatcatatggcttccctggaagcacgtcgcttcatttggctgctcgtagcgggaacttggattgcatcaggaagctgcttgcctggggagctgatcggctccaaagggattcggctgggagaattccctattctgttgcgctgaaacggaaccatggagcatgtgcagctttgctgaaccctacatcagcagagcccatggtgtggccatccccacttaagttcatcagtgagcttgaaccagaagctaaggctctcctggaagcagctctgatggaagccaacagggagagggagaagaaaatcctgaatggcacaaagtactccctgccatccccttcgcccggtgatgacagtgccgatgacgatgcatgctcagaggtgagcgacacggagctttgctgcatctgcttcgaccaggcttgcaccattgaggtgcaagactgtggacatcaaatgtgtgcaccgtgcacgctggcactgtgctgtcacaacaaacccaatccgacgaccctgacaccgccctcaccggcctgcccattctgccggggcagcatctcacggctggtggtggcccaaacaaggtctgcttgtgatcctgacaagcagtcatccctgcagctcacccggaagcggtcgcgtcgatctcacaacctcagtgagggcagcagcagcttcaaagggctaccttcggccatgggctccttctcaaagcttggccgtggctcgagccgcatggcggacagtgacagcagcaacctggacaagcctgagcacgatctatgaaagcagaacaacgcacggacaatcgccgcatcatcctcaaaacatccgttggtatcagaaacccagatgaaaatccaatggctaatttggagcaactttgatccatggaaagttaaatagatagggactaaataagtagaaccctccactccccattgtctgtgtgcccaccctatttttcggcttgccgggttaagcttagcatatgcataggagctctgaaagaccagagagagagtgagtgagtgagtgagagcaattcatcatcaatcacacagtgagtgttggtgtggttaagggatgcatgcagcagagatgtgaaacggggttcatgttcgtcacctctaaagttagcctgccatggcatgtgagctctgcgccggcctgacccctcctcctctgtgtgatgaatcatgcccccatttttggcccttgtctcgtgttataatggtgcgagttcatgtcctggtgatgctgcagccatcagcagggtggtccattggatcgccatgaattcagcagctgcggtctctgcctatgtgatgacattgtatgtaccgt

SEQ ID NO: 27359 - DNA, 3484 bp, Oryza sativa
  ref <308>: DATABASE ACCESSION NUMBER: AK102801
  ref <309>: DATABASE ENTRY DATE: 2002-08-28
gttcccccgaaccaacgccacccgctcgcccgccaccgccgcgccctcgcctggatctacccggcccgccgtcccattcaccaccgagagccgtcgtcgtcgccccccaccgtcggcccacatctccaccgccaccgcgctcctcagtcgctccaaggcatcctcctcgcgtcgtcactcgccaccgcccgccgtcggtcctcccgccagcgccatccaccaccgtcggcgtcgtcggccctactccgcagccggcgacgcccccaagatctgcgccgtcgcaacctcggcccttctccaccaccgccgccgccctcctccaactccgccgcggctctcctccagcaccgccgtggacctcctccgccgctgtgtagttgtagtccaggtctacaaaagcgatggtgctatgttagcctaagtagctttctaaacttgaaccagcctggtgataaccctgataacatggaggttaatccatcggccactgcgcactctgggaatagtgtcacttcatcgggaagaagggctagaggtccaaccaggatgccctcgggcatgtacactatcacagcagtagatgaagatgggaatcctacatctccaaaatcggcactcaccccatattccaatgctataggtgtcattgctcgggatgacatccccatcaagtaccgacactggaagaaagctgatgtagatgaattggagtggacggtaccaaacagatataaggaccttgcttgggaaaggttgaagcggacattccagtttcctgagggttcagaacaacgcgcaaaggacagggcccttcagaggatgtcagttagctttaagaaatggaagtcggaccttgccagcaagtttataaggaagggcctgacaccaaattttgaagacaataattatcgaaggatccgccttttctgggatgactttgtggcctacagagcatcagaagaggcaaaggagattagtgaaaggaaccaagccaattcggccaaaaatctgtaccctcaccgtctcggccctagcggatatgctaagaatgtagacaaatggcgagagagggaagatgagctgctggaaaagggaatcgagatcgagacgaaggattggagccaacgggccaagaattaccaatacgctcgaggggcaacactttcgggtataggtgagttggtacacaagggtccacgagagcaagaagtgacacagaggctccacgatgcccatcaaaagtcctcagagggttcttttgttccgaacagggagaaagatgagctcacacttgcattgcagaatgatgagcatccgggacgcacaagaggagtaggcctagttccatggagggaaggttttactgaagacggacataggtaccggtctcggagatataagaattccggagaccaatcagaagagataaggcaactgaaggatcaaatggcactgataatggcgaggctcgatagtcaggatagaggcgatgctggccgtgtaatcagcccaggtgggaggaaaagcagttgtgcgtcaactaaggttcctcaagaaccggacatggctcgttaccctgtggatgacatcactgtacgtactgcatgcaggctgcatgtgccacttcaaaacatcactcaagaggtggcacgcggtatggcacatcccgtaatggaggggggaaagatacacagtaatctgataccaagtggctactcaagggtcgaagtgggggacgtgccgagcagatacagggcagtccagcttgattttgctccagagaagggaataaacactcttggagaagccgtccacaacataatcctgtggcgcaagcgtttcattgtcttcccttcaggagatagtgatgatgagccaagcgatgatgggtctagctctgaagggctttctgtctcccctcgaaggatgccaactccaccaccattgccacgtaagagccagtctcctccaccggcacaacgtaagagcccatctcctccaccagcagaacaccataggctagcttcttcagacccaccgaaaaaaagggggcgcctatgtaaaacatcccagatgttcgaacccccatctctgaagaagaccaagaaggcgccgttgcctaacatgtctgagccaactttgaaggaaaaaaaaaaggaggcagcaaacgtaaaagtgccagttgcaatacaggaccacttcattcgcatggcaagaccacctgccccactagtacctatttcgaacttccgacgcacaatcaggaaaaagaaattgcaagaattttccaaggaagaatttgagaccagcaagactatgcaagattttctagaaggtgcaaggctgaacagtttatttgatgtacgcaatattgcgaatgccccattggcagctcagtacaaactcggtcattctttgactaccgatgaatatcgcaacatcgttggcaattgtactcagatgaggagggtagaagagtggtacttacagatggctaaggagggtaaggagatgttccccgtcttttacagggacgaggactttcatcactgtgatggtatattttgggtcccatttaaagaactatttcaactatacaatctgatggagctagacttatcgctaattcaattatggacattaatggcggcacttgaatgtagaacgacacatggcaaactaggattcctcgatccacaaataatcaattccagaaatattgaccagttaggcgataagtctgaacaagcagtggtcgactatgtgcctcactggatccttcttgtgatccatttaaacgattccaagattgttgtcttcgatggactgaggaccccacaagccaagttccaatctgtcattgacaccctcaataaggcacttgtgaggtataagaagaagtgtattcgacacgctccgcgtgcaaatacattccgggtttgggcccacccttattgcttacgccaggatccgggcacgagtacatgtgggttctacctgatgagatttatgtcgattttcatggaggacaacaactggaacattatggatgccaagaaattaaagctcccgacaagtaaattgttgccacatgcttgtttcggcctcgctgaacaactctgtggattcatcttcaatcatatcatctcgtcagatggcgcatacaacatttcaaaagctcctactgggctagtgggtttcatcgaggctggttgccctagtgacactttagatagccgttcaacaaccaaggagatgtaggcttagaataaatattagtgggcagaacgtaccctttaaacattttctaagtatcttgtagattagttatctggattgatgtggttttcttaatgtcttgaacatgaaattcactatgatggatttaatctgtttatctattgcttccttgaacacttttctgttctttgtattggggttaattgtagatggcatgaaaaatgtatatccttttatattatcc

SEQ ID NO: 27360 - DNA, 2358 bp, Oryza sativa
  ref <308>: DATABASE ACCESSION NUMBER: AK102802
  ref <309>: DATABASE ENTRY DATE: 2002-08-28
ggcatcgcatccctaaccctagctcccggccctcgcccacacccgcgcccgcggcggccatggcggcggaagccccaccgtcgtcgtcgacctcctcctccgcggggccccccgccgcggccggctccagcggcggcggggcggcggcctcgccggactcgtacatcgggagcctcatcagtttgacatccaagagcgagatcaggtacgagggcatcctctacaacatcaacaccgaggagtccagcatcggcttgcgcaatgttcgatcatttggaaccgaagggcgcaagaaagatggagtgcaaattcctgctagcaccaaagtttatgagtacatacttttccggggaagtgatatcaaggatttgcaagttaagtcatcaccacctccaccgccaccaccacaaccagctgccccgcacaatgatcctgccataatacagtcgcactactctcagccagcatcggcttcttcaagtttgccttctgctggaagtgcagtattgccagacctcagctcccaggcagctcaatatgggcttcagaggccaagtgttcagagcaatattcctctatatcaacctgggagtgttccatggggatcctctgctccaccttctgctggaaatgcatcaggcctttcagttcccccaatgtattggcagggatattatccacctggtgggcttccacctcatttgcagcaacctcctttgctccagccaggattatcagttccccagggtctccaatatgcaggattgaatcccactctatcgtcagggccacaaaaactgtcagaactgcagccccccttgctgcaaccacctggtactacccaaggcccttcctcaggtatcctgcccactacaacagcaccttcttctgctaacttactatctccagaaacttcaaagccccttctgccgaacatgggtcctttgtttactcctccagttccatctgtgggcgccacccttcctttagctagcctgccaacatccattgctgaaagtagtgcaatggccccacataattttagttcgcttgtgagcaataagactgcggatattccaggttcaacattggcataccaatcagtgtcacaggcagtttcttcgactgttgcttcatctagctcagcccatatggatatgcccgtacctttgttggcatcatcaggtcaactactgcagaatgctccatcgatgctttcatcatctcagtccatgcagacacctttacagatgagcagcaaagatttcaaggcagttgaatcaaaaactagggttgtagaaccattgctacctgatccaccgtcacgtgctcttcctgaaaataatgagcctatattgccattgccgaaacaaacacctcaaaagtacaatggagctggttcacacagcaatcaccactacaggggccgtggaagaggtagaggcagcgcgttttcgcagtcagtaacaaattttactgaagaatttgatttcatggccatgaatgagaagtttaacaaagatgaagtctggggtcatcttggtaagaaatcccattcaagggacaaagatggtgagctgggcgatgatgtgtttgatgaagacctggaggatgaggaaacagaaaatcctgagctagctgctaagcctgtttatgtcaaggatgacttttttgattccctcactagtggaacatttggacgtggagggcaaaacgggaggtcaagattttccgaacagcgcaaactagatacagagacttttggtgatttcccaaggcatcgccagccctatcgtggtggggggcgtggttaccgtggcggcggtcgcgcccgtgggtcatactacggtggcagagggtatggaagcatgggagcaaggggtgggcagggtaattcttaccctcaccgtggttcctactgaaggggctgatgatgatagcagatatgtactgtcagtcataccggctggtgctgtatccttcaccatgatgcaccagctcttactgttgtccaaataaatggaacttagcgtgccccttgtgttggcaggggccgtataggtttgatgtccggtggtttatacccctagagttgtcagtagatgggggcagctgatgctctatcatcatatatagtaggtgcaaagtgtgcctcttactctttagggtgttaccatgcgagtgggatttagtttgtataggcggatctcattcctggtacaccatgctgggcttaactcactcggtgactcttttgtctcttttctagacttagctgtgttgtttgtttttgtacctttatatgctaaagagattgctttgactttgaatttgaagtgcttaatcatcaagtttacc

SEQ ID NO: 27361 - DNA, 2237 bp, Oryza sativa
  ref <308>: DATABASE ACCESSION NUMBER: AK102803
  ref <309>: DATABASE ENTRY DATE: 2002-08-28
gatggaggtggaggtggaggtggagatgtcgccggcggcggcgaaggccgccgtgtttagcccttactcgagcccgagcacggcgttgctcctgcagaggagggtcgtttcatgggccaaggagaccggttcgccggcgacggtgagcgtccacgtcggcgacaggagcttcaacctgcacaaggatcctctggtgtccaggtgcgggtacttgaggcaggcgattctccggtgcggcgacggcgacggcgaggtcgtcgagctgccggcgagcttccccggcggcagcgaggcgttcgaggtgatcgggctgtactgctacggcgacgcggtggcgctcgacccgttcaacgtggcggcggtgcggtgcgcggcggagttcctcgacgtgtccggcctcggcgcgcgctgcgacctgtacatcaaccaggtggtgctgcagagctgggacgacgccctcatcgtcctgcagcgatgccagccgctgctccccgtcgccgaggagctcctcgtcgtcagccgctgcgtcgagtcgctggcgttcatggcgtgcatggagatcctcgaccccgacggcgacgagcagcggcgcgagcgcgaccagccgggcctcctcgccgccgccgcggcgcgcggcctcgccgggcgccggtgggacgccgagctcgtcaaggagctcgccgcgcgcgacctctggatcaaggacctcgtcgccctccccttcgagttcttcaggcggatcgtgctggcgctgcggcgtcagggcatgaaggagaagtacgtcagccccgtcgtgctcttctacgccaacaagtgggtgctctccaagaagacgcacaagttcatggcgagcacggacaccggcgacggcgagaccgacgccaacaggagggccaccgcgatcctgcagggcgtgatcgacctcctcccactcgagtcgtcggcggcgaccggcggcgccatcccggtgtcgttctacttcgcgctgctggcgcggtcgatcaccctcgagctcagcgacgagagccagacgaggctgcgcgaactggtcgcgtccaacctgcaattcgcccgcgtggacgacctcccgctgccggagccagagcaagacgccggcggccaatccatcgccggcagcccggaggtgagggcgatggagagcatcgtcgcgagccatgtctcaatgcaaagaagaggcgcggaggccgtcgcggagctctgggatcggtacatcgcccagatcgtcggtgacccgaagctccggccggaccggctggccgagctcatcggcgtcgttccggccggcgaccggaaatcccacgaccatctctacgaagcaatcgacacatacatcgtggagcatcccggcttgtccggcgacgagaaggcgtcgctgtgcggccacctcgaatgccggaagctgtcgcacgaggcgtgcatccaggcggtgcagaacgaccggatgccgctccggctgatcgtgcaggcgctgttcgtgcagcagctgcacacgcaccgcgccttcaccgagtgctccgactcgttccggtgcatgcactcgggggagctcctcgtccccgtctccggcggtcaggcggcgagcgccggtgtcctccagcagctgcattggctccatgcggtggggatcgcagcggcggtgcgcgagtaggatcctgcgcatcttcgcgaggctggccgtgttcgggagagggagcaggtcgtcgtcgtcgtcgtcgacgtcgagggggaagcagagcaagtgcagggcaagtgcagagcagctcagctcagtggcctgtagaacgaagcacgcagcgagggactgagcgagaggtaaaaaaatgacgagacatttttactacacacgtggaaaagaaattgcagatcatactgtaaaccctgctatgtttacaaaaccgtacggttactgggttatcacgtgaccatgtggttttcacgataaccacgtggttaccatggtaaccgtcaaactgcgggtgacggtaacccataccaaaggtttgatgaactgtgaaccttggctacgagtagtagtgtggtagtagtatgtgagcagggtactatgtagtctgtacatattgctgttgctggcaatgctgaagaattgaagagtagtttgtagttactgtcaggtggcctggtcagcactttttcttaggtcgaaaattctgaatatctgtatagttcatcggtattaaaaaggtttattttccttc

SEQ ID NO: 27362 - DNA, 2515 bp, Oryza sativa
  ref <308>: DATABASE ACCESSION NUMBER: AK102804
  ref <309>: DATABASE ENTRY DATE: 2002-08-28
ggggttttcgcggcggcggcggcggccgtcgttcgcatcgcggcggcgctgcagcgagaacgccgtctcggctcgcgtctggaattgctgctcggtggcatcgccttcggatgtgctcgacaccaccagcgggagccggggaggtagtgcgccacccgggagcagacagcttggaaatggatcgtctccaccgccggcgacatcgtcggctgaaaggagaagctcgaggatccgttcctggtacttggaggattgaacagagtaatttagtgatcaatttgtgatgatgatcgtgcaggtgcgttcagtttggaaacctctctgaagatccatgccatcagtttgcatcctggtgcttccattgaacaccaacttagttatgttttcgccaattgtggatgtaattccattttcaatgtcagtgagttagctatatgcttgatagggtaggtatgtcaaatttatagtttaagtaattcattttctattgattgctctttcacagtaaagagttgcgagccagagtttctgatgtcttcttgaacttgtctttaaaagctatcgacatatcgggcgtttcgatggtggtcattgatggactgaaatgtttcatggaccttaatcttccattacagacgacattcttagcggaagttcctcttgccaaatccttgactggggttctcaaaatctgtggtcaggtgctgcctgaatttctttaaaatttacaatcctcgtagcaggattggcttttacttgttaactgtcatattataacatcactcatgctcttcttgtcaccaagcagatttgtcactgctgtaagttttgactgttttgtgttccttttcatctaattctcatgtgtcttcattaatgatacacttttcgttggagtagttcttaacttcttgttttgaaaatgcagttaagtactttgcctgtaagaagttatactcaatgcatccaatgttgtcagacgaagaagttacagtaacaaggtgcagactgctaaagtcaccgacttctatgattgtgatccagcaaatcctggacagccctttgcaccattcctctttttcaagcgaagcaaaaaaaggtacacaacacacagtgaatcagtgacagatctctgtatctttaaagtgcatgaacatgtctaaggagtaacttctttttatgcactcctttttggtacgatcctcttcatcttgctctcttctcccattccgtgcatttcaaacacatcaatagattcttgtgctgctgagctgatggcaataagaaagaaaagcttctctgcttcagcatctttcttcatcaagtgttcgtcctaggctcctagtaatcactgtaaagagccttttggactggagctagatggctagatgctgaacaatcaatcacaaaatggaaggtcatggtgtgttgggaccatgatcagcaaatggcatgttgatacatcacgaaagctaagttttgcatgtacagcttggtgtgtcatatcaatctatgatcacctctgcttgctgctttaagcctctcttcttttgtaataggcaacctgtgattttgttctctcctatgattcctctgaagttaagtctcagtggcaagcaattccagcattttgcagacaatgatccaaacaaaaaattaaaattcctacttatcttcatgaagcttccatgcacaagcttgttgtgtattactatcacctctgattgctgctttaagtctcttcttttgcaggcaacctgtgatttcgttcaatcctacgattcctctgatgttaaatctcagtggcatgaaattcgattgcgttttgcagacaatgatccaagcaaagatattccttctcatctccatcttcggagacgaataaacatggacacttgatgcagaagcctgtcttggagaaacatctctgatggatggacgaggcaattcagcagagcccttctttgtcatgactaccatatctgtctctctgcacaactcagatcttctccacaggtaactaaaatagttaagagcacatgattaagcatgcattaaactagtcaagtaccctccttttggcagcaagctcgatcgagcttatcgtaatccctgtgcaaaggtagttcaggccaaaaacagatacattgattaattgggttagcacaagtattaaatttgcaagttgacacttaaagaggggcgatgatgcatcgcatctcttgcaagcttgcctccatggccatccaagcctgtcagcgtcactgattatactaattaagcatgcagtgtaatcatgctttcatgctccatttgttttgttgtttgtgttgattgattggtgtgcgagagtcctattttttcatgaaaaactttgtgcccgctccttttccttcgatttggagatcggccaagttcgcctttttattatgaggcgtggagaatgtcgtgttaaaaaatactgtatgcaaggacatagggcagaggaatacctgcttataaaatacggcttatg

SEQ ID NO: 27363 - DNA, 1145 bp, Oryza sativa
  ref <308>: DATABASE ACCESSION NUMBER: AK102805
  ref <309>: DATABASE ENTRY DATE: 2002-08-28
ggatggactcctccgcggcgtcggcggcggctgcggcggcggcgccggtggtgctggtgacgaacgacgacggcatcgacgcgccgggactccgcttcctcgtcggccagctcgtcgccgcccgccgctaccgcgtcctcgtctgcgcgcccgacacagacaggtcaggtgttagccactccatcacatggcgccctgcactccgctgtaaacgagttgatatagatggtgctacagcatttgcagcctcagggactcctgctgactgtgcttctttaggcatatctgggaagctctttgatggtttggttcctgatctggtagtcagtggaatcaatgttggcaacaattgtagatgccatgttatctattctggaacagttggcggtgctagggaggcattcttgtacgggattccttcattagccatgtcatatgattgggtcgcaagtcagagcagtgttaacgacctcaaagtagctgcagaggttgttatgcctctgataaataatgtgatggctgagataaagaatgggacatatcctcaaggatcattcttgaatatagatataccaactgatgctgcacaccacaagggatacaaaattacaaagcaaggaaggtatatggccagaattggttgggagcaaacagtttataagaagcctgcggtagaaagttaccagacagcaaacatggatgttgacagtgaaaaggacagtgaagtagatacttcatcagagaatgacctattgtttaaaagagtgcttgtgaggcgaagttatgatgaagaggaaggggatgatatcgaccacaagtgccttgtagatggatatattactgttacccctttgggagctctatcccgcgcagaagctgatgtcataccatactacaaagcttgcttgtcacgtctgtgatcaggatacttttgtggcccactaaactgaaaaagttggtgtcatggttgcaagttgcaaataaagttgcatgaatttcagttattctagatgattgttactgatgtattgccatattatgtacttccgtgattattcagagcatatgtatcacatagctcttactatttataactacagttccacaataattctttggtattatatttttctgagacttgttgc

SEQ ID NO: 27364 - DNA, 4246 bp, Oryza sativa
  ref <308>: DATABASE ACCESSION NUMBER: AK102806
  ref <309>: DATABASE ENTRY DATE: 2002-08-28
gtgtgtagagtccaatccaatccaatccaatctccgctgacatctccccactccaagcccacacgggccacggccacacatcgacgctctccgtccgtagcatgacaccaagaaccgcggcggcgctgtcaggtctactccgcggcaagaatgcagtgaacctcgcaccagggcaggtcccgaagctgcttgctacgcgcgcgtcacctgcccgggtggaggatggcgtctgtctccgtgaccctcccggtgcccgctacccgctcgacgaaattcctcgccgggatgccgcggtgggcgccaaccgcgtactcttcgactatgcgcggcgcgggatggtcctggaggtcctggatcagttctctgtcgcgtgccgcggcggcgtgctggttgacagcgccacgctgtcctgtgttctcaaggcttgcagatcagtgccagacagagttcttggggagcagctgcattgcctgtgcgtcaagtgtgggcatgatcgaggtgaggtcagtgccggtacgtcgcttgtcgatatgtacatgaagtgtggtagcgtctgtgaggggatagaggtgtttgaaggaatgcctaagaagaatgtcgtcacgtggacatcgttgctaactggttgtgcccacgcacagatgcattcggaggtcatggccttattcttcaggatgcgtgctgagggtatatggcccaatccattcacattcgcgagcgttctctctgcagtagcgagccagggtgcacttgatcttgggcagcgtgtgcatgctcaatcagttaagtttggatgccgctcgtccgtgtttgtctgcaattctctgatgaacatgtatgcaaagtgtggattggttgaagatgccaagtctgtgtttaattggatggagaccagagacatggtgtcatggaacacgttaatggcaggtcttcaattgaatgagtgcgaactggaagcgctacaactgttccatgaatcacgagccaccatgggaaagatgacacagtcaacatatgctacagtgattaagttatgtgcaaacctcaaacaactggccctggcacgtcaactccacagctgtgtgttgaaacatgggtttcatttgactggaaatgtaatgacagccctcgcggatgcttacagcaaatgtggtgaattggctgacgctttaaacatattttctatgactacgggatctcggaatgttgtttcatggacagctattatcagtggatgcattcagaatggtgacattcctcttgctgttgttctttttagcagaatgagagaagacagggtcatgccaaatgagttcacctactctgcaatgctgaaagcatcactatccatcttacctccccagatacatgcccaggtcatcaagaccaactaccagcatatcccatttgttggaactgcacttcttgcttcatactcaaaatttggcagcactgaagatgccctctctatattcaaaatgattgagcagaaggatgtcgttgcatggtccgcaatgttgtcttgccatgcccaagctggtgactgtgaaggtgccacatatttattcaacaagatggccatccaaggaatcaagccaaatgagttcacaatatcaagtgtaattgatgcctgtgcttgcccatcagctggtgttgaccagggtaggcagttccatgctatttcgatcaaatacagataccatgatgcaatttgtgtgagcagtgcacttgtgagcatgtactcaaggaaagggaacattgacagtgctcaaattgtctttgagaggcaaacagatagagatttggtttcatggaactcgatgatatcagggtatgcgcagcacggttacagcatgaaggccatcgaaacatttcgacagatggaagcttcgggtatccagatggatggcgtcacattccttgctgttatcatgggatgcactcataatggtcttgttgtagaaggccagcaatactttgactcgatggtcagggaccacaagatcaatcccaccatggagcattatgcatgtatggtggatctatatagccgtgcaggcaagctggatgagacaatgagccttataagagacatgccattccctgcaggtgcaatggtatggcgcacattgctaggtgcttgcagagttcaccaaaattttgagctttggaagttttccgcagataagctgctatcgcttgagccacatgattcatctacatatgtgcttctctcgaacatttacgcggctgcaggaaagtggaaagagagggatgaagtgaggaagctcatggactatagaaaggtgaagaaagaagctggatgcagctggattcagatcaagaataaagttcactcctttatagcctttgacaagtcacatcctatgtcagatcagatatataaaaagctcaaggtaatcataaccaggttgaagcaagatggttattcaccgaacacaagctttgtgcttcatgacatagcagaagaccagaaggaagccatgctggttgcacacagcgagcgactagctcttgcctttggcctgatagctacaccacctggaacaccccttcagattgtccaaaacctaagggtgtgtggagactgccatatggttatgaagatggtttcgatgattgaggacagggagatcatcatgcgagactgcagcaggttccatcacttcaatggcggggcctgctcctgtggtgatttctggtgaatgaaggggcagaaccaactgactggataaggtgtacgccctggcagtgccaattttaacaatattactgtgagttgacattagagtattgggttgtctatagttgatatcagtacaagcccacaaatagtgttgtagttgcttgtagaagcagagatcagtgttaatactagagcattggtttgttagcattgccagagaaagccagttgccacaagtggtataattgctttatgcagaaacaggaataaacttgctctcatttttttgggctttatgtttgatgaagtgaaaccgttcatcaaagcagcatgtttattaccttctcaagtttgggcatgctgaattacaggaatctacagctacactggaccgcaaagatatagaagttcttttcaccggttcagttatgcattcataatccacaacaagcagttttacttgtgttttaatattggagtggctctacaatgcctgtgcaaagaacaaaattgtcctatgtttgaatgaatgtattggtaatctgatggcctcaataacactaactatattcaacaaggacagttttcagaaataatgccatacagtagtctaagcaacattttgtttaacaggagatgaacaaactcatgagaaagcacctccagaagctcaacttcactgcaccagtcagatccagccatggaaggattaaaaatcaaaggaatggaaatcattgttgtgctagtggctctgggtacgtagaagattcttcaactgcatgcagttcatctagctcccattgagctatgcagttcatgaagtgcagtaagctagagctgatcagaatgacatttgaaggtttggacgatacagatttgaataccagcatataatgaagaacaggacatcatgtatacttggaaagtacctggggaaaatgtttagaagagatgagcagggactgaaatctcttggtagtggtacttatccccgtggaatttcttcggtgggtcatcataatccttcttggtggtgcttcatcttgggtcatctccttaaacttgaaggaatgcactgaaggagcggatatgatggttttgattgctagtgctgcagttctccaatttgctgtggcactgttcatcaaagttttctttttcgcctgagattgtcttttttggtgttgctcaggtctgcctctccttttaccttttggcgactagataccatagcaccaaaaaccttcccaacagtacacggaccgtgcctttatgaatgtgagcttgatgttttgtctgctcccatcattctgttctggcgagcatccttttgaggaccaagtggactagttttacttgacatacatattaacactagattgatagaccttgtgttttgttcatttctaagggttttttactcatctagttccaagaacttcactgtatattccaattcagaattgccgagtgtcatctaaatttgcatagtgaaccttggaccattttgaagtacaataaccatttgactatattttg

SEQ ID NO: 27365 - DNA, 2654 bp, Oryza sativa
  ref <308>: DATABASE ACCESSION NUMBER: AK102807
  ref <309>: DATABASE ENTRY DATE: 2002-08-28
gaatcctgacagaggcctcctcgtcagtttgcccttgcccaccgctgccgcctccggctccggctccggcgatccccatccatcccgccgagcgagcagggggcgccgtcgttcgtccagctgcttccgccgcatccatcctgtgatggtgaacactgacggtgaaggtggctgtgaaggcgggggtggagatccgatgtgtgttgacgataatgctatcgtcgcagttgagacgggcgttggtgtagatcaaggaattgggtcgcagcatgacgatgctggtggcgacagggtcatggaaggacaaggggcggttactaactctggtgatgaaatggggatgagggcgtatggtgatgaagccgagactgaagaggcagcaacggttcatggcagcaaggagggcaccgaggaactactccgcaaggtagtgtacagcgaggaggcggcgtacaagctgtactgtgactatgggcaccgcatggggttcagtatccgaaaggggaagcagtcctactttactggcacgaaaaggatcaggaccaaggattacttctgctccaaggagggcctgaaagaaggggagaggcttactgatgcaaacttcaatgacccacatactaggacgaattgcaaggccatggttcgcttcagagtgaataaccacggggagtggaaggttatcccgcttggtctctgatcacaaccacaacttggcaagacctgaagaacgacatcttttaccgtctgcaagatcacttatagcagggaggtctagttctgtagagacgtcaaagcaagattcactctcatgctacattagtatggcaaggacacttgccatagggaatgcagatttgcagaagccttgtaagacaccttaagagcagggcaaatgaagatggtatgttctattgggatgttcaaatagaccgaggcggtcggatgactaattttttctggcgtgatggcaggagcaggattgactttgactgttttggtgatgttgttgtgtttgatgcaacttatcgcttaaacaaacataatttgatatgtgctccgtttgttggtgtgaaccaccattggcagaacaccatgtatggctgtgctctattagctgacgagtctatgtcatcttttgtgtggctatttaaatctttcttggaggcaatgggcaatcggcatcctcgctctatttttaccaatcaagatcaagttatgtcaaaggcaattgaggaagtatttccaaatacatgccatcgcatctctcgctggcacatacaaaagaatgctgcttctcgtcttggtacacttaatggttcccaagcatttaataagctgttcaccaagtgtatgcagggatgtgactcagaagctgagtttgaggaaacatgggcttggatgctcagagagtttaagttggaggataaccaatggcttaagaaactttataaactcaagcagaagtggtgtggtgctctcaaccaacacacttttgatgggtggggttgaatatgagccaccatgtgacagtctgagtaacatctttaactgcattgccgagaaatttacctctccgtctacaattgttggttgttgtggacaagttgagtgaagattggcgtgaaaaagagatcgatgaagacacgcggtgcagcccaaagcctcctgcttgtattataaagcacagtgatattttgaatcatgcagcaaaagtttatacatacagaatctacaagttgtttgagacgtattttcttgatggatgtggagccacaaaattcaaggagcttcattgcgaagacaataacagatatcaatttgagatgacaatgcaagggcgaggatcaagagtctgcacagttcattttgatatgatgacaatgcaactcaattgcagctgtagtaagtttgaaacaatgggtttgctttgtccacatgctcttaaagctcttagcatcaagaatgtgtgcagtattccagaaacctatatactgaagaggtggaccaaaggtgctaagaagtgtgtttttaatccaaagcaatatgaatcatcctatcaagaatgtatggatgatgaagctgcatactgcagccatgttatgcgctatgcttatgaccttgttacaaaaagtcaaggaaacgaggaattgaggaaatcactttgggagactcttgagagtggagaaaaggaattggaaaaatatctagaaaatgttacccagtatgcactttcctatgccacttgaaagaagcatcgactaaccttttagacttactgctgacaatgagaaagatgtacttctgggttctttagaagatgtgcccgagtttccaccgactcagactcaaactgtactctaagaaatgaaaatataaacttttgaaacaaggtacaagtttgtgtaagtcgttattctttaagcttctctcatctttgtgaatacccatgaatccatgtttattaaattgatacacaattcagtggtgtttttaggaatatattgatggtagccggttggaactgggcaactggccagtttgtgttagttagtttagattggtaataaggcaagtgtagtatgaacataagttagtttagattggtttattttgtgttgaatgacgtttctgaagtctgaacacctcttatg

SEQ ID NO: 27366 - DNA, 1998 bp, Oryza sativa
  ref <308>: DATABASE ACCESSION NUMBER: AK102808
  ref <309>: DATABASE ENTRY DATE: 2002-08-28
gacccatccatccctagcttcctcgctgcttcgcccgccacgtcaccctcctcctcctccccttttttttctctcgctcgcctcgccatccatggcgtcgatggcgaaccagcagtagtagtagtccaccccaacgacgcgcgcgagccagctccggggtacccgccgctcgtgcccgggggggaagggggtgcaccggggagccgtcgcgccgcgcggctctgattcttcccgttcccggagatttgaaccatggagtctttacgtgacatggtcctcccaccaggatttggattccacccaaaagatactgagctcatttctcactatctgaaaaagaaaatacatggccaaaagattgaatatgagatcattccagaggtggatatatacaagcatgaaccatgggatttacctgcaaagtgcgatgttccaactcaggataataagtggcatttcttcgctgctcgtgacagaaagtatcctaacggttctcggtcaaatagggcaacagttgctgggtattggaaatccactggaaaggatcgagccataaaaatgggcaagcaaactataggaacgaagaaaactttagtttttcatgaaggccgcccacccactgggagacgtactgagtggatcatgcatgagtactatatagatgagcgtgaatgtcaagcctgccctgatatgaaggatgcatatgtactttgtcgtattaccaaaagaaatgactggatcccagggaatggcaatgagttggacaacagtgatcctcatccagaaccatatgatgctcctccatcagttatcagtactgaacagctaaatcctgctgctgaaccagttgtcggtgttgaagctgcaccagttaccgttgctgaacctgacggtgttactacgtcagctatcactgctaatataccatctcctagtgatgacattaatctggatgattggttgaatgaactatttgatcctttctttgaccctgaacagagtctggcttctgctgatctgtctccagatgaacaaaatgttgaatcatcgaacgtaggtgctttggctccaaaggtggaacaagactattctagtcctaacgagaacgtagtagatgatacggagtacttgttgcctgaagatgtttacaacatactgcaccctggtacagatgacttcaatatgctccagaatcctttggatcagtaccccattcaatatgcaaccgatgtttggagtggaattcagaaggaagaactgtggtcgccccaggccaatgctgagcctagtcagtcgaatgaagctgctgataatggaattataagacgttatcgtagtatgaaaacacctgaaactagtgtgccgcagttcaagggtaaaactcaggctaaaatgcgggttgggatcaacaagatggctacgagtagttctgaatctatcaaccagactatcaagtttgagaacagtggtcgtcttgttgagcaccagaagaaccaagcgcatgatgtagcttctaccaagcggtcagacgcagggaagccaagtacagagctcagcagcaatcgaggatttctcaggggtatccgaaatgcatttgcaggctgttcggatgctcgatggaacatgatacttgttgcgggtttcgctattggagtcgctgtggtagcgcttcatataggccaacgccttggattaagccagagagatcagcagcatacctagcctttaggtttgcaggttactgggtttctatgctttttgcaatctggagaaacgtaaacaaactccgatctttggttggtgcagaacatttgatgtatgcgccgttttttttgtgttggttttgtacatattattatcttcggttttggtcgacttttgttctcgccagctagtagtactatgttgacgaatgtagaagaaaacctcaaaaaaaaaagaacaaatgaaaaaaaattgacgatgaaaatttatataattaaccgcttgcattgtacc

SEQ ID NO: 27367 - DNA, 2365 bp, Oryza sativa
  ref <308>: DATABASE ACCESSION NUMBER: AK102809
  ref <309>: DATABASE ENTRY DATE: 2002-08-28
gatcgcacactccaagctaagcctaagcgagcgagaaaaaatagcaaaagctagccggcaagcaacgccaactaattaggggagagagatattcatggctccggcggcggtggctgcggcggaggcggggtcgaaggcggcggcggtggcggggaaggccgtggcggcgtgcgagcgcgacgcggagaagctggagttcatcgaggagatgacgagggggttcgacgcggtgcaggagcgggtgctggcggcgatcctggcgcggaacaacggcgccgagtacctccgccgccacggcatggaagggcgcaccgaccgggaggcgttcaaggcgcgcgtccccgtcgtcacctacgaggacctccgcccggagatcgagcgcatcgccaacggcgaccgctccaacatcatctcctcccaccccatcaccgagttcctcaccagctcggggacttcggcgggggagaggaagctaatgccgacgatagaagatgagctggacaggaggcagatgctctacagcctcctcatgcccgtcatgaacttgtacgtgccagggctggacaagggcaaggggctctacttcctgttcatcaagtcggagacgaagacgcccggcgggctgccggcgaggccggtgctgaccagctactacaagagcgatcacttcaagcaccgccccttcgacccctacaacgtgtacacgagcccgacggcggccatcctgtgcaccgacgcgttccagtccatgtacgcgcagatgctgtgcggcctcgtggcgcgcgccgaggtgctccgcgtcggcgccgtcttcgcctcgggcctcctccgcgccatccgcttcctccagctccactggagggagctcgcccacgacatcaggaccgggacgctgagcgccaaggtgacggagccgtccatccgcgacgccgtggcggaggtgctcgcggcgcccgacgccgagctcgccgcgttcgtggaggccgagtgcgggaaggacaagtgggaggggatcatcaccaggatgtggcccaacaccaagtacctcgacgtgatcgtcacgggcgccatggcgcagtacatccccacgctcaagttctacagcggtgggctccccatggcgtgcaccatgtacgcgtcgtccgagtgctacttcggcctcaacctgcgccccatgtgcgacccgtcggaggtgtcgtacaccatcatgcccaacatgggctacttcgagcttatgccgcacgacccggacgcgccgccgctgccccgcgacgcgccgccgccgcggctcgtcgacctggccgacgccgaggtcgggagggagtacgagctggtgatcaccacctacgcggggctctgcctaccgcgtgggcgacatcctgcaggtgaccgggttccacaacgcggcgccgcagttccggttcgtccgccgcaagaacgtgctcctcagcatcgactccgacaagacggacgaggcggagctgcaggccgcggtggagcgcgcgtccgcgctgctgtccccctacggcgccagcatcgtggagtacacgagccaggcggacgcgaccaccatcccggggcactacgtggtgtactgggagctgatggtgcgggagggcggcgcgtggccgccgccggcggaggaggagggccgcggcgtgttcgaacggtgctgcctcgagatggaggaggcgctcaacgccgtgtacaggcagggacgcaacggcgaggccatcgggccgctcgagatccgggtggtgcgcgccggcacgttcgaggaggtgatggactacgccatctcccgcggcgcctccatcaaccagtacaaggcgccgcgctgcgtctccttcggccccatcatcgagctgctcaactcgcgcgtcatctccaagcacttcagcccggcttgccccaaatacagcccgcacaagaagtgatcactcactacactacacggtccagttgagctagacgacacaacgatatatagccttctactacaactactactaccagcactcagtcccagtgcttatacagtcggtgtcagtgtcagtgcgtgtgtaatttctcgtgtttaaggcagagggcatcagggccatactcctggatgcctgcttctttgatcttagatcatgctgtccagtggtagttaccatgtaatcatgtgtgagatgttatttctgaagtggaaatggcgagtgtttgtgatggggtaagctggtaacgtcattcttggccgaataacataataggccttgttggagtatctaccaacaacttctgttgacccatatgtacttttttctgcttgtgcaaaaatgggagtgaactagtgactctgacaccccaggaattcaacccc

SEQ ID NO: 27368 - DNA, 824 bp, Oryza sativa
  ref <308>: DATABASE ACCESSION NUMBER: AK102810
  ref <309>: DATABASE ENTRY DATE: 2002-08-28
gagccggaggccgacacgaggtaagaagcccagaagccctagcgccgccgcagcagcagcagccatgggtatcgacctcgttgccggcgggaggaacaagaagacgaagcgcaccgcgccgaggtcggacgatgtctacctcaagctcctcgtcaagctgtaccgtttcctggtgaggagaaccaagagtaacttcaatgccgtgatcctcaagaggctcttcatgagcaagaccaaccgcccgccgctctccctgcgccgcctcgccaagttcatggaaggcaaggaggagaacaacattgctgtgattgttggtacagtcactgatgacaagaggatccaagagattccgaaaatgaaggttactgccctgaggttcacggagacggctagggcaaggattgtcaatgctggcggcgagtgcctcaccttcgaccagcttgctctcagtgctccgcttggggagaacacggtcctcttggggggtcccaagaatgcccgtgaggccgtcaggcactttggtaaggctcctggtgtgccgcacagccacacgaagccatatgtgcgctccaagggaaggaagttcgagaaggcccgtggcaggaggaacagccgtggattcaaggtctaagtcagctcctgtttgcaagtgttgcgatcggcattgtgcgaccgttctgtttgagcaatcgacagtaattagtagtcacttctctactgagactagcaaaacttaattgtgtcatttctgaaagatattttgaaggatcctttctacctacctacatgcgtttgtgggcaagaagacaatgttttttgtttcc

SEQ ID NO: 27369 - DNA, 1096 bp, Oryza sativa
  ref <308>: DATABASE ACCESSION NUMBER: AK102811
  ref <309>: DATABASE ENTRY DATE: 2002-08-28
ggaacacccgcacgcaccgcagtttagccatatcgccgccgccgccgccgccatgctcgcctacctcctccacgcccccgccgccgccgccgccgtggtgcccagcccgctctccctccgctcgccgccgaagacgcccttcctcccgacgtcccccatccgcgtgcccacgccgaggcggcgccccgccgcgttctcctccgccgccgccgcggtggtgcccatcgcggcgtcgctgctcgagggccccgtgctggtctgggccgggaggctctgcctctactacgcgctcctccacatcggcctcgccggctccccgcgcaaccccttcctcgcccacgagattggcgatgatggcgccggggacagcgacctagggttctcgaagtgggcggacaagctgcgcggcggcgcgccaggagaaaacgaagcccaggataagaggaagctagttagcaaatggaaaccaacaactaaaggcacgctgaagaggacttaccgagttcgttcagtagaagaaggtcggcggattcttaaagaaattgctttggttctctccgaagatgaccactttgtggacgcctccagtcacaagggttgtcaaataaggagggaaagtgcgcacggcgagagtgtgtgctgctataatgtgagagctctgttcgatgagcttcctacccctcacctagttctggagattacagctttccctgctggacctctcactgataatgactaccgcaaggccgagaggctcgaaatggtgctgaggatgagtgcttccatttaatttcagaacacccattttccatttcagcttacttttgcccaagctgtaaattttctaccgatggggctcgaaatggtgctgaggatgagtgcttccatttaatttcagaacacccattttccatttcagcttacttttgcccaagctgtaaattttctaccgatgggcctgtaaattgattcagtcttgctaagaagttaagaactacttgtaaaacctgagttctgctcaatctttctagaattctaatatttgtgctcagtctttctagaactctaatatcaagaagtctttgtcatagacctt

SEQ ID NO: 27370 - DNA, 2280 bp, Oryza sativa
  ref <308>: DATABASE ACCESSION NUMBER: AK102812
  ref <309>: DATABASE ENTRY DATE: 2002-08-28
gaactaggcaaagcagcgtaacacccaagttacctccgctcccctccccaccgaatccccccgattggtcggcgatgtcggcggcgcccccgcctccccccccggagtccccggtcgccgccgccgccggcggaggcgacaaggtgctcgccgcggcgcagcacatcgtcaagtcgctggcgacatccaagaacgccgccgacgacatgatccgcatcctctcgggcttcgacaaccgcctctcccagatcacctccgacctcttcccctcccccgacctcgccgctgactccgacgaacgggggaaccccctgtgggggcagatctcggccgcggccttcgacgccgccgagcagctcatccaggtctgggacggcaccccggaggcgctcgtcttcgaggccaccgaggacgaggtcgccgagtacctctccgcggtcgacgtggccatcgagcacctcgcgcgcggcagcggcggcggcgccggcggcgcggggtcctcctcctcctccaccgcgggccgcgccggggtcgccgtgcagctcgccatggcgcgcctcgaggaggagctgcgccacctcatggtccgccacgccgtgccgctcgaccccacgggcctctttttctccctgcgccgcctttcgctcggctccatggacgacctcgacacctcctccgagttcgacgccgccacgccgcaaagcatcgacgtcgcgccggagaccgcgcgcggggggcccctggtcaaccccttcgaggaacaggtgttcgaccccgtgcgccctgaggccgtcgacgacctccgcgccatcgccgaccggatggggcgcgccgggtactcgcgcgagctcgccgacgcgtaatgcggaatccgccgtgacctgctcgacgagtacctctccgcgctcggcgtcgagcgcctcagcattgacgaggtgcagcgcatcgagtggaagcacctgaatgacaagatgaagaagtgggtgcaggcggtcaagacggtcgtgcgtgtcctgctcgctggtgagcgacgcctctgcgatcaggtgctcagtgtgtccgatgagctcagggaggagtgcttcatcgaatcaaccaaaggttgtattatgcagattctcagctttggggatgctgtggctgtgtgtccccgctcgccagagaagctctcgcggattcttgacatgtatgaggcacttgcagaggtgatccctgagatgaaggatttgtgcttgggcagttctggggatggtgtgatcagcgatgttcaggcgaatcttgataggcttggggatgccattaggggtacacttttcgagtttgggaaggttttgcagctggagtcatcacggagggcaatgacagctggtgagatccaccccatgacacgctacgtcatgaactatttgaggcttctggttgtttacagcgacacacttgatgccctcttggatgacaatgccgatgaccaaattgatttggcaagagctgaggatcaggatcaggaacacttggagagcatgacccctcttggaaagcgccttttgaagctgatatcttatttggaggctaacttggaggaaaaatctaagctgtatgaagatagcgccctggagtgcatattttcccatgaacaatttgctgtacattgttcaaaaggtgagggactctgagctcggcaagattttaggtgatcactgggtaaaaaggcgtaatggcaagatccggcagtattcaaagagctacctaaggatttcctggatgaaggttttatcttttctgaaggatgatggacatggaagtgggagcggcagcagcagcggcagtggcagtgggcattcaagttctcggatgtccatcaaggagaagttcaagaacttcaacctggcctttgaggaaatatacaggaaccaaacaacctggaaagttccagatcctcagctccgagaagagctgaaaatatccatatctgaaaatgttattccggcatatcgtgcttttttgggaagatatggtagccaagtggatgggggaagaaattcagggaaatatataaaatacaccccagaggacttggaaagtcagctttctgatttgtttgagggtgcaccggggccagccaaccactctagaagaagaacatagttcatatttggcaagccctgttaaaggtatgattttgtccaaggattgtaaattgctttacacttctttcatgtgtgttcttgctacctttagtagtcattgcaacaccataatacaatacaaggacctttcgtt

SEQ ID NO: 27371 - DNA, 2484 bp, Oryza sativa
  ref <308>: DATABASE ACCESSION NUMBER: AK102813
  ref <309>: DATABASE ENTRY DATE: 2002-08-28
gatttgacggaggagcggaagtgaacaaccgcgccacgccatggggcgaagcgagtcggcgtccgcaggatttccctctccgcccgtgccctaaaccgctcgccgccggcgacgttgcgcccccgaccgcgagtgggccggcggcgatgtccggccccgtcgttcccctcgcctggacggctcaagggccctgcgagccctcccctggctctggcccgctccccgtttccgccgccgctagcgatccgccggcgccctcctcgtcggtgcccgccggcggtcgtgagccctccgctagcgggctgccccccgcggtgactcctcagcttggggatcatgatcaaggtggtttacctaactgtgtgccaaaagtggggatgacctttaattcagagaacgaagcttatgatttctacaactcctatgctagaaatgttgggtttagtatccggaagaaccacgcaaatactagggcggatgggagtctttgctccaaatatttcctgtgcagcaatgaagggcagccggtggcaagcactacccagccggggtggaagaaacgttcttcaacaagatctgattgcaaggctcgtcttcagttctatatttcccgagaaggtatctggacagtgcagaaggttgagctcgatcataagcactatctcgtaagtcctgataagtcacacatgttaaggtcccagcgccgtttgacaccgtcatatcaacagatagtgaatgaaatgcggcaagaaggtattacagcagctgatatgcaaagagtatttcggcaatggtccaggggagctgaaaatgtgcatcttctgaagaaagatactcagagaaagtacctccaaccaagttatgcacagaaattgcttgagtatttgaagaacaaacaaacagaaaatccttcatttttttatgcagttcagctgaatgatgatggtcgaatagcaaacttcttctggacagattgtcaagctattgtggattatgcttgttttggtgatgtcgtgtcttttgatacaacatttgaaacaaacaagtttgaaatgccgtttgctccatttgtggggactaaccatcacaaacaacccattttgtttggagcttcgctgatatatgatgaatcttcagagtctttcaattggctgtttcaaaccttccttacggcaatgtctgggaagcaaccggcaacaattttcacagatccctctgctgaaataataaagtctgttaggttagtgtttccaaactcaagtcaccgcctgtgtttgcggcatatctgtcataatgctgttaagcatttgaatcacgtaatttgcaaccatccagaatttctatctgattttaagagacgtatctatgaagaaaggtctgtaacgttctttgacttgaagtggaaggaattggttaacgcatataatctagacggcaatgattggatgaataatttatatgcaatgcgtgaaaagtgggctgctgtgtattcccgtgactcattttacgctgacatgatgacaatccaaaatgctgaaggcacaagtgatgcattgaagaattttcggaggaaactctgccttccagaattcttagaggagtatgagaagtgcataactagtttccgccaaaatgaactagaagcagattataattcccgtcaaaccagtccggttccctatgttcctgatttgcctatgttgaagacggctgctgagtcctatacaaggaatttgtattcgcattttgaagaagaattcaaaaaattgttcactctgtcttgttcgttgctatcacaagacagaacaatcagtacttacaaattgacacctttaaattctgaagaagaagcatatgttgtttttaattctgaggatacaacagtatcatgttcttgcaggatgtatgagtgcacaggtatgctatgcaagcacgcgctgcgagtccttaactacagcaatatttttacattcccctcacactatgtttacaaaaggtggacaaaatatgcaaaagccggactatttggctgcagaaacaattcccaaagcggcaatggaagttcgatgttaagatgtgcgcgtatatctcaaaagatgcactcagttgctctaagatattcgatgtcagaaaaggcgcttcagtttttggaaagtggggtagataagttgacatgtgaagtagaaaatttacttagtcacataaacttaaatggaaatggaaatgataccggtcaatcttctggtttttgcaatggtgcaatggcagaaagtttaggccattcagaatcaatgtacagcgaaggggcctaaccgcctaacctgcaaaaatactagaaaaaagtgttctcaaggaggaaaatggaaatgcactgctagaaggagaggcacctacaatcaactgttattttctgtttatgttaaattcaaatctcagttcttaactgtgtgaggcactactccaaaaaggaaaaaaaattcaaag

SEQ ID NO: 27372 - DNA, 1262 bp, Oryza sativa
  ref <308>: DATABASE ACCESSION NUMBER: AK102814
  ref <309>: DATABASE ENTRY DATE: 2002-08-28
gtaacccaccccaccaccgacactctctcttctccgctcctcctccgccgatcacgcgctccgcatccgcatcgccggcgacgatgaggacgtcgcgtgcggcggcggcggcggcatctctgccgctgctgctgctggtggcgctactcgtggcggcggaggggaggaggcacaaggacggcagcggcgacgaggaggcgaaggcgtgcgacaaggggtgggagtgcagcgggagccggttctgctgcaacgacaccatcaccgactacttcaaggcgtaccagttcgaggagctcttcgcccaccgcaacgaccgctcgctcgcccacgccgccgggttctgggactaccacgccttcatcaccgccgccgcgctcttcgagccccgcgggttcggcaccacgggagggaaggaggttgggatgaaggaggtcgccgccttcctcggccacgtcggcgccaagacctcctgtggatatagtgtcgcaactggtggtccattggcttgggggctttgctacaaccatgaattgagcccaagccaaagctattgtgacaacagcaacgaattgtatccttgtgttgaaggagtcgagtattatggtcgaggcgctcttcctgtttactggaactacaactatggtattatcggtcagggtatcaaacaggatctgttgaaccacccagagttattggaacagaatgcgaccctagcatttgaagcagcaatctggaggtggatgactccaatgaagaggaagcaaccatcagcccatgatgtattcgttggcaactggaaaccaaccaagaatgacactttgtccaagaggtatcctggctttggtgctacaatgaacatcctgtatggcgatctcatctgtggtcaaggctccatcgataagatgaacgtcattgtatcccactaccaacattatctcgacctgatgggtgttggtagtgacaaagctggagataacttggattgtgctgaccaggtggcgttcaatccatcctcaaagaatttggactcctaagtaatctgtgttatatagacggataattccctgtaaatttgaggcacagacagctagcttcccaaacaaagaaaagcgtatacatggtacttttaatagctcccaagtaccacctgtgtttgtttgcgaaatttgtagcctatttatgtaagtgtccactatgttctctcatttatatgtgacaatacatattacacactgaagcagataattcacattcaaacgtgc

SEQ ID NO: 27373 - DNA, 1158 bp, Oryza sativa
  ref <308>: DATABASE ACCESSION NUMBER: AK102815
  ref <309>: DATABASE ENTRY DATE: 2002-08-28
gcgtgacgccaccacgccgcctcgcctcgacccgatctcctctccacccacccgatccacccgccggagaggaaggccgctcgccgccgccatgctcagggtcgccgggaggcgcctcaccaccgccctcgcctggcgccccgccgcggcggccggcgccaggggcccgctcgccgggggctccctccccggcgacgacgaattctcgcgtgagccccagaggccgcgcttcgccgtggattccccgttcttcgccgcttcgaggggcttttcctcagaaactcttgttccaaggaaccaggatgtaagcttgactgagcttccagcaacagtgtcagctgtgaagaatcccagtgcaaagattgtatatgatgaatataaccatgaaagataccagccaggtgacccaagtaaaagagcgtttgcatactttgtgttgagtggtggaaggtttatttatgcttcgcttctgcgcttgctcgttttgaagtttgttctaagcatgtctgctagcaaggatgttcttgctcttgcttcccttgaggtggatctctctagtattgagcctggcaccactgtgaccgtgaagtggcggggcaagccagtttttatcaggcgcaggacagaggaagacatcaacttggcgaacagcgttgacattggatctcttcgtgacccacagcaggatgcggaacgagtcaagaaccctgagtggctggttgtgattggggtgtgtactcatctgggctgcattccacttcccaacgctggtgactttggtggctggttctgtccatgccatggatcacattatgatatatcaggtagaatccgtaagggccctgcaccatacaacctcgaagtcccgacctactcatttctggaagagaacaaattgctcatcggctgagattacattgaccacagggtttaaaatcttatggcacttctattctctgttggtttgacgtttcacctttttgttgctctactttgttggacaccttctagtaaagaataatgagctgctacttggctactgttaattaatttccaagtttggttctgttacctgaaatcaataggagttatcttgtaattgtcttacaagctggcacagtgaagcttatatgttgtcaactgacatcccttctcttc

SEQ ID NO: 27374 - DNA, 3073 bp, Oryza sativa
  ref <308>: DATABASE ACCESSION NUMBER: AK102816
  ref <309>: DATABASE ENTRY DATE: 2002-08-28
gtgggttttggaattttcggccgccgttgcgtggttgggggaagagcagcagcagcagcagccagcagccggagggcgagccgaagcgcgggggacgcggcggctgctcggcgtcgctcgctcgcgcctcgccgcgtggctggtttgcaggacgggggcgggcggttgccggcggtgacggtgggcgagggggggctccggcgaggatgagcggcggcggcggaggaggaggaggagggggagggggagggaggggggcggcggcggggccagtgccggggtccgcgaggaagctggtgcaggggctgaaggagatcgtgaaccggcccgacgcggagatctacgcggcgctgcgggactgcggcatggaccccgacgaggcggtcagccgcctcctctcccaagatacgtttcaagaggtaaagagcaagcgcgacaagaaaaaggaggttaataaggaggcgcttgagccaaaatctagaggagcagttaactccaatagtcgagccactagagctggtgcagaccgtagtggacgaagcagttcagttcagtctggatcaagtggtgctgataacatgtcctcaaggtcatcaatattgggacctggcgtgctagcaactaattctacacagaagcaaactgttccaagttctactgtaaacaaggatgttcttcacgatggatcttttggagcaatgcaaccatcgtcgggatttcagaacagttggtgtggggtgccaggtcagatgtcaatggctgatattgtgaaaatgggcagacctcaagtgaggtcttctagcaagcctgtggcttcaacagacaacgcctattctggccaaacctcatctttctcaagtgtggtaaaccagaacccaaacaaatctgcaagcactgccccaccaacaacatttgagcaaagatttcctgttcttcaagatcctattcctcaagttaagaattccagtcatgcttctgctgataaccatgagacacaagagagtgattggtttcaacaggatgggacactaccagggagtcaattaacagtccctgagacatcccgtgacatatctttacctgtggcatctttggaatcatcaacgttggttgctgacgatgcgaactcgtataataattctcatgtaggagagagcagctcagctataccttctgatagacacctggaaattattgatggcaacaaccattttaataatggtttattgcacaactcaagtgcataccagtctcgagggaatcactatgatgataacgatgatgatgatgatgaagctgaagtttctaatgttgatgtggaatctgcttcggcaaacattcagcacctaagcctacagactgaagatctagttgcaagtaaatctaccgaagataatccagcggttataatccctgatcatctacaactcgcaaatgcagactgtgggcatctgagctttggtagttttggatctggtgccttctctgggttgcttccatcaaaggtccacaaaaatggagtggaggaagtgcctgttccagatgaatctccatcagttgatcaagaagatgtcaggaatcaagacaacaatgttgctctaaattcttcaacaaatggggacgttgaagccagaattggcactagcatggagaatactgatgaaccttcagtttcacagcctgatattctgacgcagggtgctgtagatgtgtcaagtctacaatacaatctgccatcagtttcagatcatgtatattcaaacacaacacaaccaagtacgatggagagctcacagggagacatacaagtgcaacatcttcctcagttttcaagtttactgcaagcaaatactctacacaacaacttgctgggatcaaatcttcccaaccttcgggactttgacttttcaccattgctatcaacacaattagttacaaaatataacccaccagtaccgactaccagcttaccagcaatctccatgcaggagacattgaagccagggggattctcgaatgcacaacctacacaaaatcttcccagcgcgagcattccgtctgggcctcctctcccacaacaattatctgtacatccgtaccctcagccaactctgccccttggacctttttccaatctggttggctatccatatttgcctcaaaactactatctaccatcagcagcctttcagcaatctttctcaagtaatggacctttccatcaatctgctgctaccactggggtgcctggtgtcagtatgaaatattcgatgccacaatacaagggcagccttcctgctacaagccaaccacagccttcatcagtggtctccggatttggaggttttggtagctcaaataatattcctggaaatttcggcttaaatcagaatgtcccctctgcacccacaactatggggtttgaagaagctttaagcacacagttcaaagataacagtcaatacattgccttgcagcagaacgacaactctgcaatgtggcttcatggagctgctggttcaagggccgtttcagcggtaccacctggcaacttctatggtttccagggccagaatcagccaggtggcttccgccaggggcagcagccctctcaatacggtggccttgggtacccaagcttctaccagtcacaggctggtttaccgcaggagcacccgcagaaccttactgagggaaccttgaacagctctcagaccactccatctcagccatcgcaccagatctggcaacacatctactgagtcctgccctcgtgggagaagcccctctacactgccaggtgatctggtgacctggcatgcgccatgaaatgagcagactagctgagctgccgtcttgcgcgcggagaagagtggacaatgctttctacagtttcgaagtatgttgctgttttttcttcttttcttcttcacttgttgcgtgcgtccggggactaatttcagctgttacgagtttactcgatagtgagttgctatgttgtaacggtaagtcctaatttcatctaacaagagctgcttcttataccctgtgtgattcaacctttatgttcttg

SEQ ID NO: 27375 - DNA, 2504 bp, Oryza sativa
  ref <308>: DATABASE ACCESSION NUMBER: AK102817
  ref <309>: DATABASE ENTRY DATE: 2002-08-28
cagaagaagagctcactaccttctcctccggctcttcttcagtatcgaatcctctcttctcctcgtgcccaccaccaccaccgtagcaatggcgggcaacgggccgatcaacaaggaggacccgctcaactggggcgcggcggcggccgagatggccggcagccacctcgacgaggtgaagcgcatggtggcgcagttccgcgagccgctggtcaagatccagggcgccaccctccgcgtcggccaggtggccgccgtcgcccaggccaaggacgccgccggcgtcgccgtcgagctcgacgaggaggcccgcccccgcgtcaaggccagcagcgagtggatcctcaactgcatcgcccacggcggcgacatctacggcgtcaccaccggcttcggcggcacctcccaccgccgcaccaaggacggccccgccctccaagtcgagctcctcaggcatctcaacgccggaatcttcggcactggctccgatggccacacgctgccgtcggagacggtgcgggcggccatgctcgtgcgcatcaacaccctcctccagggctactccggcatccggttcgagatcctcgaggccatcaccaagctgctcaacaccggcgtcacgccgtgcctgccgctccgtggcaccatcaccgcgtccggtgacctggttcccctgtcctacattgccggcctcatcaccggccgccccaacgcgcaggccatctcgcccgacggcaggaaggtggacgccgccgaggcgttcaagctcgccggcatcgagggtggcttcttcacgctgaaccccaaggaaggtctcgccatcgtcaatggcacgtccgtggggtcggcgctcgcggccaccgtgatgttcgacgccaacatcctcgccgtcctgtccgaggtgctctcggcggtgttctgcgaggtgatgaacggcaagccggagtacaccgaccacctgacccacaagctgaagcaccaccctgggtcgatcgaggccgccgccatcatggagcacatcctcgccgggagctcgttcatgagccacgccaagaaggtgaacgagatggacccgctgctgaagccgaagcaggacaggtacgcgctccgcacgtcgccgcagtggctcggcccgcagatcgaggtcatccgcgccgccaccaagtccatcgagcgcgaggtcaactccgtgaacgacaacccggtgatcgacgtccaccgcggcaaggcgctccacggcggcaacttccagggcacccccatcggtgtgtccatggacaacgcccgtctcgccatcgccaacatcggcaagctcatgttcgcgcagttctccgagctcgtgaacgagttctacaacaacgggctgacctccaacctggccggcagccgcaacccgagcttggactacgggttcaagggcaccgagatcgccatggcctcctactgctctgagctccagtacctcgccaaccccatcaccaaccatgtccagagcgcggagcagcacaaccaggacgtgaactcgctgggtctcgtctcggccaggaagaccctggaggcggtggacatcctcaagctcatgacctccacctacatcgtcgccctgtgccaggccgtcgaccttcgccacctcgaggagaacatcaagagctccgtcaagaactgcgtcacccaggtggccaagaaggtgctcaccatgaaccccaccggcgacctctccagcgcgcgcttcagcgagaagaacctcctcaccgccatcgaccgcgaggccgtgttcagctatgccgacgacccgtgcagcgccaactacccgctcatgcagaagctccgcgccgtgctcgtcgagcacgccctcaccagcggcgacgccgagcccgaggcctccgtgttctccaagatcaccaagttcgaggaggagctccgctctgcgctgccccgggagatcgaggccgcccgcgtcgccgtcgccaacggcaccgcccccgtcgccaaccggatcgtcgagagccggtcgttcccgctctaccgcttcgtccgcgaggagctcggctgcgtattcctcaccggcgagaagctcaagtcccccggcgaggagtgcaacaaggtgttcctcggcatcagccagggcaagctcatcgaccccatgctcgactgcctcaaggagtggaacggcgagccccttcccatcaactaagccaagatcccatcgccattgccattgtcatacacccatcatcgaggaggagaggagactaaaaataaaagaaaacgaaccgcttcgtgtatcttcagacagaaaagaccctgtattttcttcgttcgttgccgtttggtttatagtgatctcgtgttctttgtgttagctgctctgctcagcttgccagccatggcggcaaagcaagcggcttttctaagatattgtcgctaaactgtattttggggtgaaagtattgctactcgattccatccttaaaaagttgtggtaatagaaatgttttgatcct

SEQ ID NO: 27376 - DNA, 827 bp, Oryza sativa
  ref <308>: DATABASE ACCESSION NUMBER: AK102818
  ref <309>: DATABASE ENTRY DATE: 2002-08-28
gaagagagagagagagagagagatggatcatcaccagcaccacgagcagcagcagcagcggatggtggagatgcggatggggatggcgatgggcgaggcgtacgtcgggggaggagaggtggtggcgcgggaggcggcggcgcaggcgctgggggcggtggtgcagctgcacttcgacaagacgctggagaagaagcgggcggcggacgcgcagaagcaggagctgtggcgcctcttcctcgccttcttcctcttcctcgccatcctcctctccgccgtcgcccagtccccgccgtcccgcctccagtgccgccacctctgggcccccgccggcctcctctccctcgcccacctcgccttctacgccgccgtcgcacaccacctccgatgcctcaacggattcaggtaccagcggcgttgccacaagctgaccctggcgctggcggcggacaggctgcggatgctcaagtccggcggcgacgtggtggcggccgccgacgtggaggtgccgtaccaggagccgcccgagagctacctggccaagttcaagcgcagctgggccatccacttcgccttcctcatcaccaccttcgccttctccgtcgccgccgccgtcgccatcctctgcttctagctctcagatctcctctcaactggactactcctccaatccaatcttactagtaggagattttgattgatcatcagatcagatgatggaagagtcgttcgttgtttatctctactgtaatccctccctctctttctctttcttgtcgtattcattgtgatttattagtagaatgttctatgttaattgcccttct

SEQ ID NO: 27377 - DNA, 2398 bp, Oryza sativa
  ref <308>: DATABASE ACCESSION NUMBER: AK102819
  ref <309>: DATABASE ENTRY DATE: 2002-08-28
gagtactccgctccgcgtctagccgcgggtgacgtcagcaccaccaccatctgcttccccctccctccctccctcccgtctcctccccgattccatcgcatccgcatacaaaccccaaccctagccgtctccgtgctagggccgccgccggcgaggaggcgaagggcggcgaggaggaaggagccagaagtcgccgtcgaggctgctccggaggcggaagaggggagggaggaggagatcgaggtcgcggatttggggagggaaggcggcggagagaagaagatggaaggcccggacagcggggcgcgcagcgccgacaagcaggccgtcgaggacgaggggaataccactccagtacctgatacggtccaggtgggcagttcaccaaagtatagagttgataaaaagcttggtaaaggaggatttggccaagtatatgttggccgccgcatgttagctaacggtccaggtgcttctgaggtggcgctaaagtttgaacatagaaccagtaaaggatgcaaccatgggcctccttacgaatggcaggtttacaacgccatcggtggcattcatggggttcctcgagtccactataaaggacgtcaaggcgaatactatgttatagttatggatatgctgggacccagtctttgggatgtttggaataataattctcacacaatgtctgttgagatggttgcgtgcatcgctattgaagctatctccatacttgagaaaatgcattcaaaaggatatgttcatggggatgtgaaacctgaaaatttcttgctagggcctattggaactcctgaagaaaagagactcttccttgtcgatcttggtttagctaccaagtggagagatgcttcaactggcctccacgttgactatgaccagcgacctgatgttttcagggggacagttcgctatgctagtgttcatgcacatctagggagaatcggtagccgaagggatgatttagaatctctagcttacacactagtttttcttctacgggggcgtctaccttggcaaggttatcagggtgaaaacaagggtttccttgtgtgcaaaagaaaatggctacgtctccagaatcattgtgctgcttttgcccacaaccctttagggagtttgtagagtatgtggtcaacttgaagtttgatgaagaacctaactatgcaaagtgtatatcccttttcgatactgtagtgggcccaaatccagatatcaggccaattaacaccgatggtgctcagaagcttatacatctagttggccaaaagagaggtcgcttattgatggaagagacagatgaacaaccaaagaagaagatcaggatgggtatgcctgcaacacagtggattagtgtttataatgccagacggcctatgaaacaaaggtatcactacaacgttgcagattcaaggcttgtacaacacattgacaaagggaatgaagatggtctgtttatcagttgcataacatcttgctcaaatctgtgggctctaatcatggatgctggcactgggttcacttcccaggtttatgaactttcaccacattttcttcacaaggaatggattatggaccaatgggaaaggaactactatataactgcacttgctggagcaaataatgggagttccctggtagtgatgtcaaaaggaacaatgtatacacaacaatcctacaaagtaagtgatactttccctttcaaatggataaacaaggaatggagggacggtttttatgtgacttccatggcaacagctggaagtagatgggcagttgttatgtcgcgtaatgctggattttctgatcaggttgtcgaactggacttcctataccccagtgagggaattcaccagagatgggacaatggttaccggataactgcaactgctgcaacctgggatcaggctgcattcgttttaagcgtcccaagaaggaagcctacagatgaaactcaagagacgctgagaacatctgctttccctagtcaacatgtcaaggagaaatggtccaagaatctctaccttgcatcagtatgctatggacgtactgtatcctagaaatctggccatctagttgaagccatttcgagttctaggcttctcgcattggtctctgctcagagtgcagcggcttatgtgatgctggcaagttctgaatgcgacttagcgtaccctgactatcgtgctgtcgtgaagatatttaatggctatcgttcttaattatagaagagcttgtacagtagtaaatgtttttgtagttcgtgtaatcgttcatgtagtgtactgttaattgtagtgcaaggcgttgtcagatgtgtacacctgtccgatatgattgaactcctatctaatcgtgtgaaagcatgaggttcctgctcgcc

SEQ ID NO: 27378 - DNA, 1569 bp, Oryza sativa
  ref <308>: DATABASE ACCESSION NUMBER: AK102820
  ref <309>: DATABASE ENTRY DATE: 2002-08-28
gataagattcttcattcttgttctcctccccctctcctaacccctgcttcagcaaggagatgctcaccttctccacttcatcctcatcacagccacattgcattcgcaaccactccaccatctctcgccgatggagcaggcacgcgttggctcagccatgatcttcctactcctcgctttcctgtcagaggtttctgcatccatatcgcagcagcagcagcagcaatgcggtggtgcatcgtctgcaggagtgagagctggcttctggctgccatcctcgagccactactcgcctctcggcagcatcgacacctcgctgtacagccatctctactacagctcgctctccatcgacgagacccgctgcgccgtcgcgccgccgtcctccggtgaagagagctccattctttccaatttctcgagcagcatcaagtcctccggtgggggttttcgctgtcaagaccatcttgtccattggcacggatgagttcagggaggatgtgtccaatgccgccttctccaggatggcctcggagaagaaccttcggagagcgttcatcaactcgtcgatcgaattggctcgtgccaatggcttcgatggcctcgacttggcgtggaggtttcccgcaacgcagctggacatggagaacctcggagatcttctcgcggaatggcgagccgagatcatggaggattcgacgaccagatcgaccgagcctctcctgctgacggctactgtttacttctcgaaccacctgttcggcatggccgacactaacctcaactacccgatagacgacatgtcgagcagcctcgattgggtgaacattatcacgttcagcctgcacaagaacagcaacgtcaccacggctgacgcgcctctctacgacaaggattctcacttctcggctagctatggtgtcatctcgtggctggatgcagggctccctccatgcaagcttgtgatggggatacctctgtttggaaggtcttggttcctcagaaacaaggacaagaacgggctaggagcaccaactgcagctgctggaacaaagcagagaaagagcaaccagatcggcgtaatcgcgtacgcagagatcgaagagtacctgaagtctcagagtgtttttgttactcatgacaaccagtcagtggcagactacttctacagcggtgatctctgggtcagcttcgacagtgccgtggttgtgcaggagaaggtggagtttgtggcgaagtctcagttgcttgggtacttcctctcgaccatcagctttgttgactcaaactacacattgtccaagcaagcatcacagtcctggaatcaatatcatgtttcttcatatgcgcaaggtagttttggaattatgcaagaaggagctataatccaagatctgcatgcatcaacagggtcaccaagtagttggtattcaaaaactctcagctacttgttattgtcaataatacttgtattggaggttctataataccaagaacagccgtaatttgtaaacaggccagattgcacaaatagtttcagatgataaggcttataacactacatttatg

SEQ ID NO: 27379 - DNA, 1899 bp, Oryza sativa
  ref <308>: DATABASE ACCESSION NUMBER: AK102821
  ref <309>: DATABASE ENTRY DATE: 2002-08-28
gatcgtctcatcgccccaaacccccctctcctcgcctctcttcctcctctcgccaaatgatgaagtccctcttcctcttttccgcccaccccaagccgcctcctctccccccatccccccacctccgcaagctcctccggctcaccgcctccgcctccacatccgcctcctccccgccccgcgccggctgctctcggggccccgcccatgccaggccccggcccagcccccgcccctccccctcctcctccctctacgcgcgccccagcctcctcgacatggagcgcggccgcgccgcccgccgcgccgacgtcgacgcgttcctcgcctcgctcggcgtcgacccgggcgagctcgccggcctcgagctccccgccaccgtcgacgtcatgcgcgagcgcgtcgagttcctgcactccctcgacctctccaacgaggacctcgccgcgtacccgctcgcgctgggctgcagcgtccgcaagaacatggtccccgtcctcgactacctcggcaagctcggcgtccgccaggacgcgctcccggacctgctccgccgctacccgcaggtgctccacgccagcgtcgtcgtcgacctcgcccccgttgtcaagtacctccagggcatggacgtcaggccgcacgacgtgccgcgggtgctcgagcgctaccccgagctcctcggcttcaagctcgagggtaccatgagcacctctatcgcctacctcgtcggcattggcgtggcaaggcggcaggttggcagcgtcatcacccgtttcccagaggtgctgggcatgcgggtgggtaagatcattaagcctttcgtcgaacaccttgagggcattgggttgcagaggctagctattgcaagaatcatcgagaagaagccatatgttcttggttttgggttggaggacaaggtgaagcctaatattgaggcgcttctggaatttggggtgaggaaggaggcattagcattcattgtggcacaatacccagacattcttggaattgagctgagagacaagcttgctacacaacagagcttgtttgagtctagcattttggtcagcagtgaagattttggtagagtgatagagaggatgccacaagccattagccttggccgaactgcagttctaaagcatgttaatttccttacatcttgtggcttcttgctctctcaggtcagcaagatggtcgtagcatgcccacagctgctcgcattgaacatggatataatgaagatgagctttgagtacttccagaatgagatggagagggatttggaggagctggttgaattccctgcattctttacatatggccttgagtcgactgtaaggccacggcatgagatggtggcgaagaagggattcacatgctctcttgcatggcttctaaactgttctgatgccaaattcgatgagcgcatgaaatatgatacgattggcatcgaggaaatggaagttgataactcttttgacacgaacactttgtcggagcgagtagaggatgaggtggaagatgaagatctggatgaggatagtgattatgacagcaccgatgatgagtttattgagtaacatgcttcaagtatcaactgtttgctgacgaacttgcatgtaggtcttcagcttgatgctctgttgtacatgatatgatgcagtcatgcggtcactaggtggttgtttttgaaggattggcttgatcaacaaatgctggatatataaaattgtagcttagaggtccaatgcattcagatatccttgatctgtgtagtgctgtattgctcatatttgttactgacaagttggcatttccatttagaaacatatttttgagaaaaaatacctcgtgtggacagttcatatttcctgaatacgaaacttcattttaacc

SEQ ID NO: 27380 - DNA, 3161 bp, Oryza sativa
  ref <308>: DATABASE ACCESSION NUMBER: AK102822
  ref <309>: DATABASE ENTRY DATE: 2002-08-28
gagggcactcgtccccgtcgccgagacgccgacggccgcgagcgcgggaaaaatcccaaaccccaccaccaccagcgcgcgcgcgcgcctccgccgccgccgcggcgggacttcccggcgttcccgttcgcgccgtacccgatccagtcggagttcatgtccttcctctacggcgccctctcctccggccccggcgcgctcgccctcctcgagagccccaccggcaccgggaagaccctcagcatcatctgcagcgcgctccagtggctggtcgaccaccgcgacgccgccgcacggggctcgaccaccgccgccgcagccggcggcggtggggaaggagacggcgacgagcctgactggatgcgggacttcacgccactgccgccggagaagccgaccgcgaagaaggggaggccccccgccgcagcggcgcggagcaaggcgccgaggagggcggcggcgggttcggagaaaccggaggggtctgaggaggcggaggacgaggagttcttggttgaggagtacgagagcgacggcgaggtctgcgtgaggcgggaggcggggaagcggccgcatcgcggtggtggtagcagtagcgagagcgaggcggatggggaggaagaggaggaggaggaggtgacacccaaggtgttcttcactagccgcactcactcacagctctctcagtttgtaggagagctcaagaagacggaattcggatggcggctcaggacggtgtgcttgggatccaggaagaacttgtgcatcaacaaggatgttctgaagctggggagcgcaaaccggatcaatgagaggtgcctggagctgcagaagagtaagaagagcagcaaaactaaggtagagggtgacaacagaaaggtgtgccaatcaaagacctcttgtgggtgcccaatgataagaaagaggggtcttcagaaagaattcaaaagtgaagtgtcagagcaaggtgcattggacattgaggatctagcgcaattaggaaagaagattggaacatgtccctactacggtgcacgtgatatggtccgcacagctgacctagttgtccttccttaccagtctttattgctgaagtctgctagagaatcgcttggccttaatctgaagaacagcgttgtcataatagatgaggctcacaatttagcagattccctcactagcatgtacaactcaaagatcacatcttctcagctgaatgcaattctttcccacctggaggcatatctcaatagatttcagagtgttctgggagctggaaatcgacggtacatccaaacattgactgttttaacacggtcatttctacgagttctgacaagcaaccaagatgatgcctgcactatgacttctatgactataaaccagttcttgttctcccttgatatcgacaacataaatatagtaaagctttgccagtatgtgaaggaaagcaatataattcacaaggtaagtggatatgcgaacaaattgaacatcaatcaagatggtgtgaatcatttaagtcaccagcagcaatatgatgaaggaagtagtatagcaagctttcagacattggctgattttttgcgctccctattaaactgcaatgataatggaagaatcatagttgcaaggaaaaagttcagtggacaacctgaagatgcttatcttaaatttgtgatgctttgcgcagagaaaatctttttggagattacatgtgatgcatatgctgttattctggctggtggtaccctccagcctatagaagaaacaaggctacgcttgtttccaaacttacctccttctgatataaaattcttcacatgcaaccatatcgttcctccagagagtattcttcctatagctgttacacgtgggccatcaggcaaggcatttgatttcagctacagttcaaggagttctcacaccatgattgaagagcttggtcgctttctttgcaatgtagtgacgacagtgcctgaaggagtggtcatgttttttgcttcctatgaatatgaaagatttgtttatgatgcatgggcagcttcaggcatgatttccaagatttctaagaagaaacatgtcttcagagagcctaaaaacagtgttgatgtcgaaatgacgctcaacaaatacaaggaggcaattcaatcctgtagcaagagttcgcaagatacaggagtcactggggcacttctattggctgttgttggtgggaaaatttctgaaggcataaacttcagtgatgggatgggccgttgtgttgtaatggttggattgccttatccaagtccatctgatgtggagctgaccgagaccataaagtatatagaaaatatttctaaaccagttttggttgggggtgataattcctcaagcagcaaatatgatgatgaatgcaaacttcagcctggctttgatatattaagaaagtgcaacaaaggtggacgagagtactatgagaacttatgcatgaaagctgtgaatcaatctattggaagagcaatcagacatgcaaatgattatgctgcaatgctattggttgactcacgttatgcccatacttcatcaaacaggagttcctcttcccctactgacaaactaccccaatggataaaaacacgacttgcttgtgctcaaaattatggagaggttcatagattgttgcaccagttcttcaaactcaacaggcaaacgcattgaataattacagatcacacggtttcagaacagttcataaaagcaaacacatacagagctaaagcacagttaactcatttgatttagtctgctgattttccaaatatcgagaataagcttcaatgcttttcctaacgcatcgcaacaggattcaggacgatcaagcttcacttattgaatatgctgagcttcactgtgcagaacatgtttggggttgagctgtaaaagtgacctgaatgcagttgctaactgattcgataagatggagcttcatgtagatatattttgtggacacggtttgttcgtaagtaatgaacttatattcctggtgttctccatttaattaagtactgctgctgacttaggaactgccaagcttagccacatggggtgttttacggtaccctaaatgattgagccgtttgttgatttagatctaatggatttggttcacttatact

SEQ ID NO: 27381 - DNA, 962 bp, Oryza sativa
  ref <308>: DATABASE ACCESSION NUMBER: AK102823
  ref <309>: DATABASE ENTRY DATE: 2002-08-28
ggtcgtgcgcctcctccccgcggcgacggcttccgcgagccgcgtaaaccctaaccctaaatcggtaagcgaagcagcggcagcggcagaggcggcggcggaggaggaaggtggcgatggcggcgaagcgggagctctcgagcaccctcaggaacctcaagtttatgcagcgggcggctgttgcgcagaaggttgaggagaagcccaaggttgaggcggcggcggcggcggcggaggaggaggtggtgacggtgcctagcggaggtgttggctcgtcggttaaagtcgctcggaagtgcgtagttatcatggagggtaatccacaccctggagctgcaaagggtcgaatgtcattcctgaatttcaacccatccattgataaattaactcaagaggcaacgggtggccgccaatcacagttagcatcacctagtaataatcatcaggatggttcgaattccagcagaacggatgaagtatcaagaacaagatttagtgacttcaacattgatagttcagaaagcatatctctgaatgaactaaagaggaaacagcctgagcttgaaatggaaacaccaccatcacataggcagcccaagaccacaggtaagagtatcgatggtgattcatcttcccaaagcaatggccgtgggtctcacaagtcaaacaagcgtgaaaagcttgactggaatcttcttagaccacggaaatcaaaatgaagtccggagttagcgtagccaaaactttgctcttgtaccccatttgtactctgtatctgattagcattttctcctgtttcgcgagttatatctagaaagctggtaaccagtagtttatttacagtaaaatgtttgtccttgcctaatcttggtttcaactgttcccctgttcttgatatgttgtttactgcattactttgctgtaacaaggttctgcagcagcaatgagaaattacagttttg

SEQ ID NO: 27382 - DNA, 2754 bp, Oryza sativa
  ref <308>: DATABASE ACCESSION NUMBER: AK102824
  ref <309>: DATABASE ENTRY DATE: 2002-08-28
gcggtgaggcggccgccgcggcggcggcggcgaccgacgggcggcgatgcggaggagacggtggagaggagtgattccgttctactcccgggcatcactctcctggagcttccgttgctccggccggcgctatcatgccaccggggtttccgactttccctcccagaaggctttccctccccgtctccggccaactctggtctccggccatctcctcgtcggcgggggcaacctagcagtggactagcggaaggatcggaaggccacattcccagaggtttgcggctgtctctgttattgggaatctttacagcaacagtcttctcaccaattttgcactgaagaacagacccataactaccaattccaagaaaaattgcatctcggtcattgactacacgatgaatctgtgaaggcctgtactcggtgaacctaatcatctcataagacctggaagcttgctcctccatccaccagcgatgtttggtataaattgatactatggtttccgttctcctgagttcttccctgagtttctggttctccttgatggcattgttcgccctgaatctcaccaattatgaacagagatagaatgatcaggcaaaagaaacaatagtatattcaggctgactaacagacctccaagatcgccacaccttatggcttgttgccgatgttgggaacggcctcttccaagaaccatggctcaccaaggttcaaactgccgatcttcgacgatttcggctggatgaagctactgcttattggctgctgtgagtacactatggctgaatcttccaaggcttgcagctggtgaagattataaaggccaactgggggcaaggttggtccgttagtgggatggcttttcagtgccaacatctcaaagcacctgggattttcaatgtttttttggtgtcattccagaaaagattaccagacaatggtggatcagtcgatcactgagtttgtaaccgatcttttacatccatcactttcagacaattgtaaaggctaactactactgtactgggaggaggcgtcgccgtggtggtggcagagggagaatggagaagggattccgatccagttccgggggtcattctcgctggagatgccgttgctctggtctgccctggagggtttcctcccagaagcggcttctccggccaccttccgtcgggcagcctggctcgctctggtttggcggatggagcagaggcgcagtgtgcactccgccgtgtcgcgagtggccggcgcagattccttctgggccggcgagccatccagacaaggctttcacagtttcactcaagtactcaaccttgactatgagaggcactgctcttcatcggcttgatgtgtgttcacacatcagctcatcagctgcgagactcaggctcctattggtgagcttcatctgcaatctgcacgccagcagcggactgggccttgttactagactcagactcctcttcttgagcctgatctgcgatctccacgtcagcactgaagggagtgtggacgttgttgccaggctcagactcctcttcttgagcttcatctataatctccacaccagcagcagaagtttggacattgctgccaggctcagactccccttcttgagcttcatctgtaatctccatgtcagcagcagactgagcgtggatgtcgttgccaggctcaggctcgtcttctcgtgcttcatctgcaatctccacatctgcttcagcagcttgctgcagcacctgctccgctggttgattctgcacgcctgcttcacgagcttcaattccgttttgggcatcttccaccatcgcatcatcttcgacattgtggccaccctgaggttcttctgctgcaggctgaggctgaggctggacgttggcatctccaggcgcatcgtcctgatctcgccacaggctgctcttctcgatgccgcagtaccagagcaatccccagatgaaggtgatgagctcccctccgtactcgaggcaaatcttgtgtgcctcagcgttccagctgggcgcaatgtgcacgagcaaatcagcccatacacccgccaggatttgccaccgctgctgatcgtctggaattgtttcaagcaattgccttcccagtaccgcgcctttctctacgatggtcccgttcagttttttcagttcagcagcttcgggtgagaacaacccattgagcttgtcatactttgtcagcaaggagtcgcggtcattcataatatcagaagcgccaagctgtcaggcaacaggtcaggctgaaaaaccaccaagtgcgcgcagtatcgtgacaagctgtttgcaacaatgtagctagtccggagttgatcatcaccgagaatattttcagcaacgaggtacggctgaggagtgcagcagcagccgcagagaaaaattttcaggtcaagcaacgcccatcggaaatcctcaagcaatctcgcggcgctcaacgatgggacgtctcggggaagctcgcggccgcccaagccagcgagatccattgagcgcaatgcctgaagaattgcaggttttacacattctgggatcttgatggcggtgccaggcttttgcccttttaccctctctttgatgacgcctagagtagcacggtacatcaggttccagagcgacgggctgtaatcaaatgactgcaagaagtcgtactggtcgatgtatccatgccaagggtcagaaaagatcttacgacttaaaaaggaacttaacgttagaaagg

SEQ ID NO: 27383 - DNA, 2972 bp, Oryza sativa
  ref <308>: DATABASE ACCESSION NUMBER: AK102825
  ref <309>: DATABASE ENTRY DATE: 2002-08-28
ggcggtggcttcgccggttggcaagcgccgctccggcggcgagcagatcagcaggagcagcacggtgtagagagctccagcccgcctccattccttaataccgggttgaatgagcaggctcacctttcgcaaggaatgagatagttctgtcaagtctgagctgctgagcttggattgagcatgcaagcatagattttgcagaagacttgcggccatgtatttgtgtatgtcatctcggatcatggcagtgagctctctaatgaatgaatatcctggttccttcaacattgctgagcaattattgacactttccattgccagcatggctagtgcttgaccagccgtaatttgtagtgaccgatcagaatatgtgtttgatgatggatgttgggcaagaaatgcttggatcaacctgctaatgatcactcggattgaacctatctcctccctgctgttcccattgatggcaaggtttctgaggatctctgctgccagcttcttatgttcttggcttccctcagtgtctcccaagatttctgccaggtttctcaacaggaagggatgatctgacatcttctgccgaagggttataccaatttccccaccagtgtttgagagccttgtcagcaacttcagtgatgaacctttcagtatttttggctgcgtctcattactgtaccctataatcttctggatgaggtcttttgctttgctgatttccgcacagttgtcaggatcacattctgcaagtgtctctaggattgacattcccagtacaggaaggagatcatgctctatgaatgtctcctcctttgaagtttttttgcgctttgaaatcaattgccagcaaccaagcatccaggagttaagtcggttgttgttgtgaggatgatcttggtcaatatgctcttggccatcacccgtgtccacaatcgtaccttgttttccctcctggctgtaatatgtgtaaagtagcggatttcgtcgtctcaattggttttcagtgtccagaagtgaagatatgttctgcattgacccagggataccaataatttggaggctccttgaaagatcgacgatgacctttgtggcaaacaatctaacttgcgcatcctctggacttgtccagcccaacatgctgatcagtgtattcaatgtctctgtggaagtggtgagtctcaagagcagaagtgccttggtgcgcttcctttttagaaagctgtgcagcatttggatcccatagagctggttgctgggtgagtttgagtttgtgaaatccatggcaaaactggtcagttccatgattcttggagcaagtgcaccaccggaaacacattgctcgaatatgtacgaatagtacatgtctacgcatttccttccccacttccgtctgaacctgctttgacggactaagtgtatcttggggatgaatgaaaagatctcgagaacgcatgccacaatgtagagtgccccttgggtaaggactattacatagaagacgtctagagagaacttgacatttttcttggtgtctcctaaagtaccgtcaggatatgtatgttctctggtgcaattctttggaatgccgatatagatacccgatgttcgctgcgtcactgctgtcaaaatactttggacacatatgaccgttgttggttgtatcattgctatcacaacacgtacgactgctgctggtatctgcaagttgccaaatgactctaataccaaagcaaatatcaggaagaaggccatgggtgctactatataggcagagtccgaatacaggcttcccaatatcgctattacagcgcacatgcacaagaacagaatcactggacgcaaaaacgacatcttgcggcaacaaggactattcactattgaggttatgcatcgaaattgcaacttggttattgtcactatgatcactgccgtaaggagcaatgcgaaatatttccttaatgcaggcaatctgtctggatggggtattgatgtttccaggaacagacaaggcaccaacaacaggattgcagccaggggactccatagtgatacagctctgagttgtgggtcgccgaacagcttaagaatcactgggcatacaagcttggcaactacaaacagggacatggtcatacccagggttataaacggtgttacctttaccggacctagatgatacactggagctggactccatcggaactttgccaatctgaaattcgcaaatctgaactttgccatgacgcacaccatggcctcagccatgcatacaatcagaatcaacctgatcaggcgaggacgcctgaaagctccccttgtccggaagaagaattgtaaaacaaaaatggaggttgattgctgaccttgtggcttccaggagagctagcaacgttgcgcaattgaactcccgtgtggtgagcatcgtcgagaagccaccgaggatgacgacggttgcccatgtgaataccagagtaccgaggccgttgccggccctctctatgaacgcgatgatgcggacgaagcggttcaggtgcttctccggtggctctggcggcgccttgcaccgttgccgagttgctgcgtcgcccgctgggcgcgccatctttcttcaacgacttttttgcagtttgccgcgcggcggctagctcgacctccatgctttcacaataatatagagcgaggattacaaagagagagagacagttgactgcacttcacgatcgattggttcgtcaggccgcatgaaggacgcgacgctggagacgaggaagacggtggtcgggtcgaggccgccggcaacgaggtcattccaccgccgctggggtggccgacgcggctactggctgcgccacttggtcaatctgctcatcacacttggtcatagtgccacgtgcaaaatgcagactttttgtttactgaaatgcatttgactagctgttcgccaggagatctaattgagcaacctttggctg

SEQ ID NO: 27384 - DNA, 3185 bp, Oryza sativa
  ref <308>: DATABASE ACCESSION NUMBER: AK102826
  ref <309>: DATABASE ENTRY DATE: 2002-08-28
gtaaaccctagccacccctcttccccctcaaagcggcggcggcggcggaggccgctgcatcgcctgctaagatgtcgggcggcttcttccgggggacgtcggccgatcaggacacccgtttctccaacaagcaggcgaagctgctcaagacgcagaagttcgcgcccgagcttgaacacctggtggacatgactaaggtgaagatggatgtgatgaaaccatggatcgcgacccgtgtcaccgagctcctagggttcgaggacgaagtgctcatcaacttcatctacggcctcctcgaagagaaggaggcggatggaaagaagatacagatacagctgacaggattcatggagaagaacacagtgaagttcatgaaggagctgtggagcctcctactcagtgcacaacagaatgctagtggggtgccccaacagtttttagatgcaaaggaagctgagattcagcagaaaaaggcagaggaaagtagaattgctcaggagatccagaagaaacgggagaaagatggaagggagcaagaactagagaaacaaaaattgatgatagcttctccgattatttgggttcatatcgttctttacctcaaaactgctgtaggacggggatgccggtaattctagattaggtcctgatcgtgctgatgctgaggaggaaaaagaactggattctaagcatagctcaagaacaaagagccgggaaagccttaggtccaggagcatctccttgtcgcctcgcggtaggcggcgatctgtttctcctaggaggcgttctccatctccttccagaaattccatttcttttgggagacagcaacgatcttcaaggcgctcagtttcacctaggcgttctttttctccacgaaagcgttctccaagaagtaccccttcgatgtcgaggcggagatcaccgtattccagaagatcaccttcagtaccaagacatcgatctccgtcacctcatcgtagatctcatattcgcaggaaatctccaccttttgtgcgtcagagatcaccatctccacaccatcgccggtctccaggtcgtgcaccaagatcaccatctcctgcacgtcatagatctcctcggcgcaggtcatctctagacaggcattggtctccatctccaggaagacgtaggcctcggtccccttcacccggacgacgtaggccacggtccccttcacccggacgacgtaggccacggtccccttcaccaggaagacgtaggccacggtccccttcaccaggaagacgtaggccacggtctccatctccgggtagacgcaggccaaggtcacgatctccaggaagacgaagatccccctctcctcgaggctctccgcggttgaggtcaccaaaacgccctaggagatcgccaatttcacccagaagtcgttctgcaaaccgtcggccctctccacaacgaaggaggagtaccagtccacacgataggagcccaatccattctcgcaggagcttgagtagagacattgaaaaaggaacaaacggcattccctccagtaacgatgtagatgtgcttcaaaggaacaaagaaagatcacacgatgacaataggaatgatacagaagtgagtggccatctttcatcggattctgagcatcgtaagctgacaaaatccttgaattctccaaacaagccagaaaggaactcgacacgcgatagttctttgaagggcactgataagcacttgcccagtcaggtcagaacagatagcagtggagaagaggagggcagtcgtgcaagagagaatgcacgaaaagcaaattcatcacgcagaaaaattaaggatttctcagcagatctggaactaaagaaagcacatgatgatttgagccctggagaaaaatctccatcacaacatagtggcaaggagacaaggaggaaacagaacaatcaactgtcagagtcatcagaagatgagcgtgatggtagaagaacgaaacacacggttgattctcctgatgattcccaacagaaacagcacactcctagtagagttggaatgcacaactcttattcaaaggatggcatgaacagtgaggatgcaataaagggtttacgtgacggtatggcttctaagaagtatcctgctaaaatcgatgatgattctgagtcagaagatggaagtccttttcgaaaagataagagaaaagcacacggtaataacaacattgattctggcagttcaggttcagaagaatcagggaaacatagatcccattctgagaagcgaaagcataaaaagagccgtaagcataagagacgttatgatgacagttctgatgaatctaattcggagtcagatgacaaagagtccaagaggaggagaaaggaagagaagaggttgcgaaaagaggaaagacggcgcagacgtgaagagcggcaccgtagaaaggcagaccgtcaggccagcaaactaaaactgaagcatgctgaaactgttgatatggcttcagatcttgagaaggatcgtgaatctgactcagatgctgatgctaggaagaaaggttcatataatggaagagacgaatcggatcagcagaaacttgaaattgagcttcgcgagaaggctctggaatctcttagagcaaagaaagccatcaaccactaggctgaggaatctcttgctatgcatttacatcttttaaaaacttttcttttgcttatatcatgttctggaagtgtgcttatatgactcctatttaatgttctgtatgtttacgtggcagttgacctgagtaattgaggattcctgagctgtttgcttgatgcagctgtattcaggcttagctgctagttatctgattagcaccatgtgcacaagctttttatgttcctcagggtgatttaatccacacctcaacaacaaccaagttggtaacctctttgatgttgtgaatagtatcagagtacctgtttaaagttactgattcttggcttgaggtttgtgttactcccttcatgacttggttctgatcaagtaatgaaaatatgtatgtatttctctgatgcttgcttagggtgcactgttgttgagaccagacggaacgcccataagcaaatgttttgtactgttgagagaacacttcatcttgccctcttattttgcggttccagcatggagcaaatcgttatatttgagttgcg

SEQ ID NO: 27385 - DNA, 787 bp, Oryza sativa
  ref <308>: DATABASE ACCESSION NUMBER: AK102827
  ref <309>: DATABASE ENTRY DATE: 2002-08-28
gagcgagctgacccagagtgggctgggcttcttcttcgtcgtctcataccaatcgtgcggcggcggcggcggggatggcggcggcgttgcgcgggatcggagcgaagctggggaaggtgaaccacgagaaggtgacgagcgcgctgctgctgggctcattcgtggtgctggggtggcgttcgtgggagcagcagcacgagatcgacgagctggaggccaggaaggcgtcgctccgcgccgccaacaccgccatgtcctccgccatgtgggcgtggcgcgaggagctcttcgccctcgccgccgcgccctccccgcccatctccgcgtcccgcctccgcgtcatctacggggaggagcagccgcccgcctcgcccgcgtccaagaagccaggagcagatgctgaggaggaaccatttgctattgcatgaactcttttccagtgtgccttagcattgtgaaatagcaatagagatccctgaaggtgatgatgtgtttttagataatcctgtataattttgcaccgagatgcaaaccgtttccagcttaaacacaagtaacagtgctgtcctaatacagcttttcaattctatatagtgagccaatgaggggtctgtattttctgatgtcaatgttgtcctctccttgcatatttgcaaacaggaccagcacttcgatggtttaaatgattgaatccgtacttatgcttgtcttgtttgtaattgtagaagtactgtttgaatccaagtggaagatggaatggaagactcggtatagttgttttatctgg

SEQ ID NO: 27386 - DNA, 2455 bp, Oryza sativa
  ref <308>: DATABASE ACCESSION NUMBER: AK102828
  ref <309>: DATABASE ENTRY DATE: 2002-08-28
gagacgaacagcgccacggaattcatcgaaaaaaaaattatcgtgctcgccgaaagccggccgctttgagaccatccaagaaccgcgaatccttcctcccttcgacgaccttaatttcctctgccatttgagcccgccaaaggcggctccggtttcggattttttggtaggagagttggttggtttccggcgagggggggagcaggatgccgtccgtgctggtcgaccgcgcgacgaacgacatgctcatcggcccggactgggccatgaacctggagatctgcgacaccctcaatcgagacccagggcaagcaaaagatgtcgtgaagtctatcaagaaacgaattgcacacaggaatgcgaaggtccagcttcttgctctcacgttactggagacgatgatcaaaaactgtggggacattgtccatatgcaagttgctgagaaagacatacttcatgaaatggtgaaaatagtcaagaaaaggcctgattttcatgtgaaagagaagatcctcactctgatagacacttggcaagaagtttttggcggggtacgtgcaagatatccacaatactacgcagcatatcaggagctcttgcgtgctggggccgtatttcctcaaagatcaaatggttctgttccaatatttactcctccacagactcaacctctgcaaaactatcctgcatctttacgcagtgctcagcaagagccacctggatcatcagtgccagatttgccttcattgagcctagcagaaattcagaatgcacgaggcatcatggatgttctttccgagatgttggatgctttggatcctagtaacagagaggggcttaggcaagaggtcattgttgacctggtggatcaatgccgttcatacaagcagagagtggtagagctagtaaacactacctcgaatgaggagttgctcagccagggcctttctttgaatgatgatttgcagagagttctagcaaaacatgatgctattgctgcaggcgttgcagttaggttggagaaaacaaaatctctccaaaccaaaattgatagttctccacccgcaaatcctgggacttcaaaagcaccagttcaaagttcttcagggactgcaagtgccagcaaccaatctaccttagcacttcctgctccagcatcatccagtagtccaaaagctcctgcagcaccagtaccggttatcgaccttcttagtggagatgattacatcaaacctgaacctgcaaactcccttgcacttgttcctgtcacagaatattcagcagctgatcagaatgtgctagctcttgcagacatgtttgagcaaaataatgccaacagaagcaacaataaccttactaactcttttaatacatcggcaccaaattcaaatttccctgcatcacaagcatatcctgctccagtgcaacctgctctgcctcagcatcctgttgcttattcaaatggggtttcatccaatgccatcgtaccttactatgatgatcaaaatggaggccttccaccaccaccatgggagattcagcaatccatggacaacccaccccaacccacccaacttggccagatgccactgcaaccagggcaaccagtagggatgcacccccaatcaccacattctggtcagtttggccaaggatcattcatgtcaccacaacaaatggcaaatggtcagctaggaggaacacagccgcgacaatcaccacaaccgcagtccgcaccgaatctccaatacggagggatgatgatgtaccccaattcgatgcaagtcaatcagggagctggaatgtactcccaaccgatgtttgggggacagttctatggcatgagccatcatcatcagatgtatgctgttcagatggctggctatggatttggccagcaacctggagcttactacatcccgaatgcggcgtatgcttatgttagcgcgaatgagcttacccagaggatgaatgcggtttcggttcaggaaggtaattcacatggtggagcaatggcatccaggcctgaagattcactctttggtgatcttgtcagcattgccaagatgaaacagaacaaacctgcagctggcaaggttggtggcttgtaaggatgagtgattgagtgactagattcatattttctggtcatttgcagctgcaaaaacttttcctggcagtacataattttttctagttttgcagaaagataatacataatccttatccttattgccactttttgtgcgacgcaagaaggcatactaccctattgatgtaatttcagtttaggcaggattgtagggatataaattggaaagtaggttgagccttgagatgcttctggtgcctcatggcaaggttgtttatgtataaattctgaagtcatgtcataatcatagcagtttcatcaataatatccttatgtataaatgtctgataacaggtttacagc

SEQ ID NO: 27387 - DNA, 941 bp, Oryza sativa
  ref <308>: DATABASE ACCESSION NUMBER: AK102829
  ref <309>: DATABASE ENTRY DATE: 2002-08-28
ggaagaggaaaagctgttcgtctccccaaccccaaccgcgacgaactagggcgacgggccatcgccgtcgtcgccgccgccgccgcagctcgcgctcgctctcctcctctggcgccgttcctctttctcctgcgtcgccccatcgacctcgaccgctcagcgtctgtttgtaactttctgttatgggtgactacaccatccagattagcaccaagctaatcgaccagcttgctcgtgatgacgagaagatcaaaaagaaaaccaggaaacccaagcctaagaagactgtcaaacaacatcaacaagagccccaggacaactcaagggaactcccagcttctgaacccaaggctcctcctggctggccactgcagcctcccatgtatctccccgtaacccctgctcctccaccacccccacctgctttttcagagctggaagccatccgtgccgttctggaagagagcgaaaaggttcaggagaagctggataagcagcatgctgggatgcgtgatgaactcatcaagaaatcaaaagacctgcgtgacaaggagttcaagctgccgtaccaaaaccccacgccatgcactgaggagaggtcaaactgccgccagtgttacgtgagcaatgcacaggacccactcaagtgtgctgaggcagtcaagagatttgaagcatgtgttcgcctggcgaggcaaaggggcaacacaaaagttgctcagtagccctggaagatttgtgatgaggaaagaactgatatacgattttgctttgctgtgatgatttaataacctggaattttgatgagacctaagacatatttctacaattctaatggcatcgcaccaggctaggtgaggaagctacagatccttgagtttagggattctgtattgcaaatattgggtaagaatgaaacatgaatgctgggtgtttttccc

SEQ ID NO: 27388 - DNA, 3000 bp, Oryza sativa
  ref <308>: DATABASE ACCESSION NUMBER: AK102830
  ref <309>: DATABASE ENTRY DATE: 2002-08-28
gacgtcaggttatttttttttctcctcgtctcctgacgatttcgcttttgctcgaaatctcccaggtttgttgttgttgtgttgaaggcggagaagaggggaggctttggtggtggtggaggaggaggatggcggcggcggtggcgatgcggagcggcagcggcagcgacggcggcggcggcgggtacgacaaggccgggatggactccggcaagtacgtgcggtacacgccggagcaggtggaggcgctggagagggtgtacgccgagtgccccaagcccagctcctcccgccgccagcagctgctccgcgactgtcccatcctcgccaacatcgagcccaagcagatcaaggtctggttccagaacagaaggtgccgagataagcagcggaaggaggcatcaaggcttcaggccgtgaaccgaaaattgacggcgatgaataagcttctcatggaggagaatgagcgtcttcagaagcaggtctcccagctggtccatgagaacgcgtacatgaagcagcaacttcagaatccgtcattgggcaatgatacaagctgtgaatcaaatgtgaccactcctcagaaccctctgagagatgcaagtaacccgtctggactccttacaattgcggaggagaccctgacagagttcctctccaaggctacagggactgctgttgattgggtgccaatgcctgggatgaagcctggtccggattcgtttggtattgtggccgtttcacatggttgccgtggtgttgctgcccgtgcctgtggtttggtgaatctagaaccaacaaagatcgtggagatcttaaaagaccgcccatcttggttccgtgattgtcgaagtcttgaagtcttcacaatgtttccagctggaaatggtggcacgatcgaacttgtttacatgcagatgtatgctcctactactttggttcctgcacgagatttttggacacttagatacacaactacaatggaggatggcagccttgtggtctgtgagagatcattgagtggttctggaggtggtccaagtacagcctccgcacagcaatttgtaagagctgagatgcttcctagcggctatctagtgcgcccatgcgagggtggtggctccatcgtgcatattgtggaccatctggatcttgaggcttggagtgttccagaagtgcttcggccactctacgagtcatctagggtagttgctcagaaaatgactactgcagcactacggcacatcagacaaattgctcaagagacaagcggggaggttgtatacgctttggggaggcaacctgctgttttgcggacatttagtcagaggttgagtagaggcttcaatgatgctataagtggtttcagtgatgatggttggtctgtcatgggtggggatggcattgaagatgtgatcattgcttgcaatgcaaagaaggttaggaatactagcacttcggccaatgcttttgtaactccaggaggtgttatatgtgctaaggcatccatgctactgcagagtgtcccacctgcagttttggttcgatttttgagggaacatcgttctgaatgggcggattataacttcgatgcatattcagcttcatctctgaagacaagctcatgttcacttcctgggttgcggcctatgagattttctgggagccagatcattatgccacttgctcacacggtggagaatgaggagattttagaagttgtccgtcttgaaggacaagcacttacacatgatgatggtcttatgtctagagatattcacctgcttcagctttgcactggaatagatgagaaatcaatgggatcctgcttccagcttgtctctgcaccaatcgatgagcttttccctgatgatgctccgttaatatcttcaggctttcgtgttataccgctggacatgaaaacagatggtacacctgctggtagaacattagatttggcatctagccttgaagttggttcaactgcacagcccacaggggatgcatctatggatgactgtaatctacgatcagtgctgacaattgcctttcagttcccttatgaaatgcatctccaagacagcgttgcaactatggcccggcaatatgtccgcagtattgtttcctctgttcagagagtatcaatggctatttctccttctcggtctggcttgaatgctgggcagaagataatttcaggcttccctgaagccccaacgctagctcgttggatttgccaaagctaccagttccatttgggggtggagttacttaggcaggcagatgatgctggggaagcactattgaaaatgctatgggattacgaagacgctattttgtgctgttctttcaaggaaaagcctgtgtttacttttgccaacgagatgggactaaacatgctagaaacatctctcgtcgctctccaagatctctcactggacaagatatttgatgaagccggtaggaaggccctatacaacgagatcccgaaattgatggaacagggttacgtgtacctgcctggtggagtgtgcttgtccgggatggggcgccatgtttctttcgagcaagctgtagcatggaaggtgctcggagaagacaacaatgtgcactgcctcgccttctgcttcgtcaactggtccttcgtgtgacccaaaatccaatccaccatgctcgcagtcatcgtcgttgtcgtcagatctccattttttgcaatctctgtagaagagaggacaccaaaccaaccacaaacctgtcagctgttagctaatgattctactagcttttctagatctttgaaggcaaaatgctgccggtgcctgtaaagagtgtgtgcgtgcgtgtgtaaatttgggcgcgttttgcactaatttgatctggggtaaggaggcgctggctgctgctgtgctgtagtttggtaaaagttgagtacgctaaccttggatggtctcgaactgtatgatgaaattcctagcagtaaaatttcaacttggatccgcg

SEQ ID NO: 27389 - DNA, 1312 bp, Oryza sativa
  ref <308>: DATABASE ACCESSION NUMBER: AK102831
  ref <309>: DATABASE ENTRY DATE: 2002-08-28
gagggttccgacgaatcccgagctcggaggccgatggcgtcgtcgtcgtcggcggcgtcggggaagtcgcggccggagtgcatcaactcgtcgaacccgttccacgagtgctccgactactgcctccgcaagatcgccgaggccaaggagcgcatcgaggacgagcagcggccgccggtggaccgcaccgtccaccccgactgcatcaacgcctccaacccctaccacgtctgctccgagtactgcttcaagaggatcgccgacgccaaatcagggttggagcgtgcggagcaagaaccgccttctgcagacgctggcaaatccgacgctgcccaagctgagggtggtggtggtgatgatgatgcggagcaggaggacgccggctcagacgacggttacccgcagatgacagagaagcagaagaagctatttgagttgcggctgaagatgaatgaagctaggaaggcaaatcagcaagcgatggtggcagagaagaagaggatggagcctcgcgctgagagtagaggtgtttctaaacaaaagtggctggaagacagaaaaaagaagatcggaaagcttcttgactcaaatggcctggacatgacaaagtcttacatgctcgatacacaggagtcggccgaagcaaaatacaagaagtgggaaaaggaacctgcaccatatggttgggatgttttcaaccagaagaccttatatgatgcatacaaaaagaggaccaagaacattgaggttgacatggaggcatacaacaaagcaaaggaagccgatcctgaattttatcgggacgcttcaagtctccaatatgggaaggtgtctaaggtcccggaagaaaacatagacaggatggttaatgagcttaaggaacgggatgagaaacggaaagcattcagcaggaggcgcaagttccatgaagacaaggacattgactcgatcaatgaccggaacgaacacttcaacaagaaggttgagagggcatttggcaagtatactcttgagatcaagaacaatcttgaaagggggactgccttgccagattagaaactctgcacactctgctggtagagagtggacatgttgtctgtttccccagctgtcttttgcttgtaagttgtaacctatcaacaatttgcttggaaactgtaactgtaagaaagccaactcggatgtaatgtcgtgagaatatagcatattcgagaagttgtgtatccaaaatgagcggaatcattaactatagtgattttgcaatgtatccaaatgagcataatcattaactgtagtggtgtgctggtgcccc

SEQ ID NO: 27390 - DNA, 2371 bp, Oryza sativa
  ref <308>: DATABASE ACCESSION NUMBER: AK102832
  ref <309>: DATABASE ENTRY DATE: 2002-08-28
ggttgaatcataccgagagcctaacgttgcacctgcgccgcgtgccaccatgtcatctcaggcgccgtcggcgccggtcacgccggcggctccaccgccgcagacgccacccgtgacgcctcctccggtgactgctcccccgccggtctcaccccctccggtgacgccaccaccggtgactcccccgccggtgtcacctcctccggtgagtcccccacctgtgacacctcccccggtgagccccccacctgttacacctcccccggtgactcctcctacaccggtggctcctccaccagtgccaccgtcaccgcctccaccgacgccgaccccaacgccggtgacgccgtccccacctccgccggtgacgccatcccctcctccgcctgtcgcaagcccgccgccgcccgatgtcccaaccgccccgccaccgagtaacaaccccccgtctccgccaccgtcccccagcaacgtcccagcctcaccaccgccaccgcgaatttctttatccccaccgccaccgccctcgacgccgacgcagtcgggtgcctcctccggctccaagtcctccaacaacgggaccgtggtggccgtcggcgtggccgtcgcggcggtggtcgtgctcggcctcgccgccggtctgatctacttcttcgttagcaagaggcgccggcgccgccaacacccgccgccgccgcaccacccgggctacccacccttcccagccgaattctacgacccgcaccggccgccgtcgcagcagcagtcacacgcgctgtcgccgagcccctcgtcgacgccgccgctgctgctgcagccgcactcgttcgtgagcagcggcggggcgtccgaggcggcgtcggcggtgccggggatcgcgatgatgggcggcgcgttcgggtacgacgagctggcggcggcagcggacgggttctcggaatcgaacctgctcgggcagggcgggttcgggcaggtgtacaaggggacggtgcgcgggcaagaggtggccatcaagaagctgcggtccggcagcgggcagggcgagcgcgagttccaggccgaggtggagatcatcagccgcgtgcaccacaagaacctcgtctccctcgtcggctactgcatctacggcgagcagcgccttctcgtctacgagtacgtccccaacaagacgctcgagttccacctgcacggtagcggccggccggcgctggactggccgcggcggtggaagatcgcggtcggctcggccaagggcctcgcgtatctgcacgaggactgtcatcctaagattattcatagagacatcaaggcagccaacatcctgctggactacaccttcgaaccaaaggttgcagattttgggttggccaagtaccaagccactgagcagaccgctgtttcgacgcgcgtaatgggaacttttggatatttagctccagagtatgctgccacgggcaaagtgaacgaccgttccgacgtcttctcattcggcgtgatgctcctggagctgatcaccgggaagaagcctatcatggtgtctcacggtgaccagcctgacacattggtttcttgggcgagacccctgctggtgagagctgtggaggaggagaacttcgaggagctggttgacccgaggctggagaacaactacgacgcgtacgacatggggcggctgatcgcctgcgcggccgccgccgtgcgccacaccgcgcggtctcgcccgcggatgagccagatcgtgcgttacctggagggcgagctggcggcggaggacctgaacgctggcgtgacgcccgggcagagcgcgatgcagcggacgagcggcggcacgacggaccagatgaagcggctcaggaagatggcgttcggctcggccaccggtacgggcaccgtcagcgagtacacgagcagcgagttcagcgagccaactagcgagtacgggctgaacccgtccaccgagtacaccaccagcgcagccggcggcgacaccggggaggtgacggtggacgtgcagatgacggccggcgccagcggcgaggcggccggcacggagaggctgagcaggcggaccaccgctagacgtggcgggcgggtgtgacagtgcgacaccggaatttcggtgccccgcccggcgagcccggcgacttttagccgtacgtgatcgtcaaggttgcgatcgaatgaattaaatcattttgttcgtgtatatatacacgtaatgctgtcactgtaaattaaactacattccaaatcccgcggttgtttctttggttttcgaattcatgcaatttttgttggagtggaagtttgtaaattgtacctaccttcactaaccacccaggttaataaacatcaaagatgagatttgttt

SEQ ID NO: 27391 - DNA, 3023 bp, Oryza sativa
  ref <308>: DATABASE ACCESSION NUMBER: AK102833
  ref <309>: DATABASE ENTRY DATE: 2002-08-28
gaaaggagccccccatcaccggcgccggcgctggcgcggcggcttctccgcctgctccgagcaccctccggcggaaccctccacgcagcgcgaggcctccccccacccctctccccaattccaaaccctcccagatctctcgcttgctcgaggaggcggcggagcggctcaaggtgttcctccgcatccgccccctcccgctcccggagcgcaagggcaaggccaagtccccaactaatcccaagcaagtgtgcctcgtcgccaactcccccaactccgtcgcgctcaccgtcccgcattccaagctcctcgaccccaagcgcggcgcgcaccgaggtcttcgacgacttctcctccgtcttctcacccgattcctcacagaatgatgtatttagtcaagtgatgaatccgctggtggatgacttgttgttgggaggaaagagtggccttctggttgcaatgggtcccactggctctggaaagacccatactgtctttggctccccaaggaatcctggacttgtaccactcacgctacgccgcatcttctctccaacaacacatgaacccttcagcaaactacgatcattttgcttctcaatgttcgagatactttctgagggaaaaggagagcggattcttgacctactgtctgatgcgaccgaccttgttctccagcagtcaacaattaaaggtcttaaagaggtatccgttgaaaattttgcggatgctgaggccttacttttttctgggatgctgaagcgtaccacagctgcaacaaatgctaacagcaagtcaagtcgatcgcagtgcattatcactatacgtgctgttcataaaagctctgatgcagaaagtgagaattcgcttaataatgctgtcctgaccatagcagaccttgcgggggcagagcgggaaaggagaactggaaatcaaggtacacgattgctagagagtaatttcatcaacaatacatccatggtttttggtctctgtttgaggtctttgttagagcatcagaaaaacaagaagaaacccttggagaagcacttcaagaactcaatgttgacaaggtacttgagagactacctggaaggaaggaagaaaatgactctgattttgaatgtgaaaccaggagatgatgattatttggatacatcttttttgctaagacaagcatctccgtacatgaaaataaagtataccaaccttgaggactcttctggattggtttcccaaaagagaagcagtgcttccctgatttgccaagagaacacgaaaaagaggaagattcataaggtcgcaggaaaggatgacattgataaggatgatggtgttacaatttctgaaaaagatgagtcacagtacaagcttcttaattcagaattgcgaagagtttcgagaaatgaagaaataatgacaaactttgccagggctttatggactgttttaaagcagtataaacaaaaacttttggagtctgagaatgctgttgagagcacaagagaattgcttagatctaaagacatcgaaattatggagctggagaagaagttgaaggttctaagtggttcatgcaagaaatttccagctgttgaagatacctttgttgagcaaaacaatgatgtgtcttctggtcaagtggctcaaagtttggtttctctatcaagtcaaactgatttggtatctatggactctgctctaaacaaatctttaccagtagaagaggtctcagaagaatctacaggtcatggccctgaaaggtcttcagattatgatgacaagacagggacagggggatctgatgttggtgatacttctattattaagctgatagcggaagaagaattgtgctccggagattgtaagccagagaaagcaagtagttccgatgcttttattcctgagcatgatgtggaaaaagaaaacattgggatagtggtacaggtgcttgataagaagttggataggtctgaaagttgctctgatggtggtggtgtcacacattcatccagtagtttggatcatccatctgatcaaagctttacagatacatgcctacagaatgaaagcgcaaacctgtctccaccatttattggtgctagcaagaaatctcccatagagcaaagtgaagaagaaagggaagagatacgcaatataacaacggaggggattcaacagaatgttcacacaagaggggtgaaacatcatagtactccaagttgttcccaagaagtgaactctggctcattacatgttagctccagctcagttgcaagggatgggtgctcttcagcaggatcctcagtcagaaagatgcaagccaacagtagaaataaccattgtggaatatggctgtgctcaacctccacatgtagtggatgatcatggaggcatgtatccatgtacgctgaatggaaaatcttccccaaggaaagctccaatatctccaaccaaggacaatcaggctgaaaaactgacagataaaatagaggatctctctgcttctaagccttgcaatagaaagaacactagaaggagattgcagcctgtgtcagctatgatgctcaaagaattcacaggtcctgatatatttgtggataccagaaaggaagaaaaagtgaaatcgtcaagagatgcaatggggagatccgacaagcttattcgactgttgacagaccacccaccccgtgcccgtggacgagcccagtagtagcttctttcttctcttttggtcgtggaggtgtcctgagctgcctctctactttctttctttcttgtttacaaggtcgatcggaagatgttatttcgtaggatgttcactcattttgcggtaccaatcacgtactactacttccacggttgtcttttgcagtacctgcttgttcatcttttatcgaccttttgacgtgtgggtacatgcgcctgtgctcatgcgaatatacatttctatgtaaatatgcactcgttgcgtatgcgcaatgcagttcaaatgtaaatagggaggcaattctcgtcattgt

SEQ ID NO: 27392 - DNA, 3540 bp, Oryza sativa
  ref <308>: DATABASE ACCESSION NUMBER: AK102834
  ref <309>: DATABASE ENTRY DATE: 2002-08-28
ggctgttcgcgctagcgtccattcggtgcagagacaccgaaaaagggccagagcatcgtgtgatgattgagctgtaaatgagatcaagctggatcgtattcagacagcagattggcgactctgatctgatcacgcttgctatagctagcttgtgatgattgatgattgatgattgattgattgattgcccggtcccagagcctgcatttgcatcagccagctttctttgctcgtcatggacagtggcagcagcagctgcagcagacagcccacgcctgggtgctcatgtgggaggtcgctgcatatctagcagaatcgcaatccacatttcctcctgcggatatctctccctgtctccctccctccccctcccaaatccaatcagtcagctcctgcatcacattgctgaatttattattaatgcttgcttgcttgcagcactagcattctactggtatttgttcttcagttcttcatgtctctctgaacttctgaagctgaagtgagactgtgcagccatttcttgtgccaaactgtcactcttcagtttcttcttcgctggtctcctcttgtatttatgggtttggaggtttcttggttttggctcggctgctgcgcgtgaatcgattgttcggatttctacacatcaaggagaaacaaatctttggtgattcagctagggtttaatagtcctcccaagaattgcggcgctggaggttatcgaggattgcccaagatgaagatggagtctttcgcttggttgctgtttgattcttgttctattctcgattttggaggatgtgcgaggatcaaaatccaagccgatcttgatcaactgcggctcagattccaccaccgatgttgatggcaggagatggattggggattcttctcccaagaacttcacactcagcttaccaggaacagttgccacagctccagattctgatgggaaagagacatatggagatttgtacaagaatgcccggatcttcaatgcatcctcaagctacaagttcatcgtcgccgctgccgggagctactttctccggctccatttcagtcagctacccactaatttcagcaccaaagaatcactctttgatgtttcagcaaatggcctgaagctggtctccaagttcaatgtccctgcagagatctacctgaggaactccaagatcaactccaccagccgcgccatcgtgaaggagtatcttctcaatgtcacctccagtaacttggagattgagttctcccccgatgccgaatcgttcgccttcatcaatgccatggagattgtgcctgtgtctggcaactcggtttttgattcggttaacaaggttggtggttatggcttgaagggtcctttcagtcttggggatagcgcggtcgagacgatgtataggatttgtgtggggtgtggcaagatagagagtaaggaggatcctggcttgtggaggaagtgggattcagatgaaaatttcatattctctatgagtgctgcgcgcgccatctccaattcttccaatataagctatgtgtcaagtgatgattctacctcggcgcctttgaggctctatgaaactgccagggtgacgacggagagttcagtcatggacaagaaattcaatgtgtcttggagctttaatgttgaccctgattttgattacttggtccggttgcatttctgtgagctggagtatgacaaggcggagcagcgcaagttcaagatttacataaacaacaagactgctgctgagaactatgacgtgtttgcgaaagccggggggaagaacaaggcttttcatgaggacttccttgatgccgcctcaccgcagatggacactctttgggttcagttgggatctgaatcctcagcaggtcctgcagctactgatgcacttctgaatggcatggagatctttaaggtcagtcggaatgggaatcttgctcatccaactgtgaggattggaggtttcaacagtgccatggggaaaccgaaacgtagccccaagtgggtactaattggtgcagctgctggtttggtgatttttgtgtcaattgttggtgttattttcgtatgtttctatctgcgatggaagaagaagacttcagctaacaaaaccaaggataatccaccaggttggaggccacttgtgctccatggtgctacaacacctgtagcaaattcccgctccccaactcttcgtgcagcaggtacgtttgggagcaacaggatgggaaggcagttcactgttgcagaaatcagagaagccaccatgaactttgatgattccttggtgatcggtgttggtggtttcggcaaggtctacaagggagagatggaagatggcaagctggtggcaatcaagagggggcatccagagtctcagcagggtgtgaaggagtttgaaactgagatcgagatcctctcaagactgcgacaccgacaccttgtgtccttgattggctactgtgatgagcaaaatgagatgatcttagtttatgagcacatggcaaatggtaccttgaggagccacctttatggaactgatcttcctgctcttacatggaagcagaggcttgaaatatgtatcggcgcagcccgggggcttcactaccttcacactggacttgacaggggtataatccacagggatgtcaagactactaatatcttgttggatgacaactttgttgcaaagatggcagattttggtatctcgaaagatggtccacctttagatcatactcatgttagtactgctgttaaggggagttttggttaccttgatccagaatattatcggaggcagcagttaacccaaagttcagatgtgtactcttttggcgttgtgctgtttgaagttctatgtgctcggccagtcataaacccggccttgccaagagatcagataaaccttgctgagtgggctctcaagtggcaaaagcagaagttacttgagaccataatcgaccctcggttagagggaaattacacactggagtccatcaggaaattcagtgagatagctgaaaaatgccttgcagatgaagggagaagccggccttcgattggtgaagtcctgtggcacctagagagtgctttgcagttgcatcaaggtcttctgcaaagtgcgaatactgatgatttatcacagcctgaactgaagctctctgatgcatcctgcaatttagggtgcatcgaagaagttgaggaatcctgccgtgcagggtcccaggatgtgaatgaggaatatgtggatgtcaaaattgaagttccatgataatggaatgctggtcaaactagtggcttcaagcaactgaatagggtgagtgtcaaattaacaaaaatgtttagatgcactgctatctagtattgtaacaccatatatgagtgtccctacaatgtactgagattattttggtacagttaggagaaaactctcttcatttcttttgtacttgtgctgatgtacaagtctttatgatgcaaatttcattgattcttttgtaaaattctagagccgtatgcaatgc

SEQ ID NO: 27393 - DNA, 2984 bp, Oryza sativa
  ref <308>: DATABASE ACCESSION NUMBER: AK102835
  ref <309>: DATABASE ENTRY DATE: 2002-08-28
gacctccactccactccactctcccaccactctcgcttcccgaggcgcgcaaaccctagcctcgtcgcgccgcgccgcatcctcctcctccccccgcctgagtagcgccgccgcatgcggctgcgcgaggcgcggcgaagcgactgacggggggtgatccgccgctttcgggggctgatcgaggcgggaggaggagcggcggcgccggggaatgcccgacctctcaggcgatctccttcgtggtttttggtaataataaacagttccattctttggaagattctgtggtgtggcaattcggatattgctgaagatgaaggcgcttgagctcgcgtgtttgcttcttatcattgtaccacaagtggttcttggaacacatgatgtgtacattgttacaatggaaggcgaacctgttgtcagctacagaggtggagttgaaggattccctgcaaccgccatagatttggatgaagatatggaaattaccagtgaggctgtgacttcatactcactccacctacgaaggtaccatgacaagcttctagactcacttttggtagaaggaacttatgagaagctttatagctaccatcatcttattaatggttttgcagtacacatgtcacccttacaggctgaattcctaaggaaagccccaggagtaaagcatgtggagagagatatgaagatacagaaattgacgacacacactccacaatttcttggattgccaacaggggtatggccaacgggtggtggcttcgatagagctggtgaagatgttgtgattggctttgtggattcaggaatttacccccaacatccaagcttctctgcccacaaaactgatccttatgggcctgttcctcattacaaggggaaatgtgagatggatccagtaacaagaagaagcttttgtaatgggaagatagttggtgcccagcattttgcaaaagctgcaattgctgctggagcgtttaatcctgatgtcgattttgcatctccattagatggcgatggccatggaagtcatacagcagcaattgctgctggaaataatgggattccagtacgaatgcatggtcacgaatttggcaaagcaagtggtatggctccacgtgctaggatagccgtgtacaaagtcctttacaggctttttggtggttatgtatctgatgttgttgcagccattgatcaggctgtgcaggatggtgttgacattctcaacctttctgttggcccaaatagcccgccaactgctacgcggactacatttttgaatccttttgatgctgcacttctttccgctgtgaaagctggggtgtttgttgcccaagcagcaggaaatggaggaccatttccgaaaacactggtatcattcagcccatggataaccactgttgctgctggagttgatgaccgcagatacaaaaatcatttggtgctaggaaatgggaaacttcttcctggacttggtgtatcacctgcaacccatgagaataaatcattcagcctgatttctgcggctgatgctctgctgggttcatctgccaccaagtacagtgcattagattgccaaaggccagaactcttgaataagaggaaaattcagggcaaaattcttttgtgtggatattctttcaactatatttctgggacagcttctatcaagaaagtgtcagagactgctaggagtcttggtgcagctggttttatggttgctgtggagaatagttacccaggaacaaaatttgatcctgtacctgtcagcatgcctggtattctcatcacagatgtcagcagaacaaaggatcttatagactactacaactcttctacaataagagattgggcaggaagggccacgaccttccaagcaacagcagctattgcagatggtttggcaccaactctatacaactctgccccccaggttgccttgttctcttctcgaggaccggatgtaaaagattttagctttcaagatgctgatgttctaaagcctgatatactcgctcctggccatcttatatgggcagcatgggcgcctaatggaactgatgaagccaattatgctggggaaggatttgcaagggtttctggaactagtatggctgcaccacatattgctggtatcgcggcactaataaaacagaagaaccccaagtggagtccctcagcaataaaatctgccttgatgactacatctaatacattggacaaggggagccatcctttaagagcacaacagtactctacatcagaaattatgacacttacacgggctacgccgtttgattatggcagtggtgcggttaacccaaaagccgccctggatcctggccttgttctggatgcaactcatcaagattacatcacattttggtgttcgatccccgacgtggaacacagtgaagtatcaaacataactggttcaacttgcagctccagctccaaggtgcagcagcgcccctatgatctcaacatcccctcaatcaccatctcccagcttagaggcacgcagacggtgaagcggacagttacaagcgtggccgccgaggccgaaacctacaccatcatgacaagaatgtcgccggagatcgcgctggaggtctcacctccagcgctgacagtgctccccggcgcatcgagagagataacggcgaccctcacggccaggtcagtgactggcacctacagttttggagagatcaccatgaaaggggaccgaggtcaccttgtgagaatcccagtggtagctatgggatttaagtagactaatgtaagtggctccaggtgagctagagctatgtctgcctctgaaagcttcaagctgaggaatgctgtaattttttgtagcttagtagaaagaaaataatagtcagtacgatgctgtatttccatgttgttatacttgtgctcctggctgtaaaatatatgtgggctttgaagcctctatgaaatgatctggagttaatgtgtcc

SEQ ID NO: 27394 - DNA, 1083 bp, Oryza sativa
  ref <308>: DATABASE ACCESSION NUMBER: AK102836
  ref <309>: DATABASE ENTRY DATE: 2002-08-28
ggccgccgctgctacagccgtcgtctcccaccgcacgccccgccccgccccccacccatcgccggcgacgcggatccctcctcgacggtgcgcccgcctgagcagccgtgctatacctctgtcgggggcatattccccgccggcgcagcaagctgagcggagaggaggatgccgaagcggacgacgcacacgtactccagcgaggacgccctgccggaggggcccgagtccgacctcttcgtctactactgcaagcactgcgcctcccacgtcctcatcaccgatacccaattgcagaaaatgccaaagaggaagactgacagagcacatgtactagacaagaaaaaacatctctcaaggctaaatgtgaaggaggcaggaaaggtcctgttgaaacggggagaagggaagcttgaaaagcagttccgtatgagttgtttgggatgcggccttttcgtttgttaccgatcagaagaggagttggagctagctccattcatatatgttgttgatggagcactaagctcagtggcggctgaaacaaatccacatgatgcacctgtaccaccttgcatcacacaattggaaggtggccttgtccaagtagccattgaggttgaagaccgggcacaacggtcagcaataacaagagtgaatgctggtgatgttcgagtaacagttgctgctcctgctgctcgaggggaagcaaacaacgaactactagagttcatgggcaaggttcttggcttaagactcagtcagatgacccttcaaagaggatggaataataagtcgaagcttctgattgttgaagatttgtcagcacggcaagtgtatgagaagctcctagaagctgtccagccttaaatttgtggcagctcctaacggagcagaagcagaggagggtttgaaacattgctggattcattagcttatcggagttgcattgtttcggttgtaaacgtgagtgaacatagtctaagatgaccgtgatgtaacgctgtctctgtgtacccttcttagttgtgatacaaactgtacatctttataacaatcctgcaacgtttttttttttgggtgacc

SEQ ID NO: 27395 - DNA, 1207 bp, Oryza sativa
  ref <308>: DATABASE ACCESSION NUMBER: AK102837
  ref <309>: DATABASE ENTRY DATE: 2002-08-28
gcttgttccttcatggacctgcagttccccaatggacaactaacatatgttgctggcgaggggattacagcaagtggttttcttccattatttggtgggttgcttcaagctcatgggaaataccctggagaaactagagtcagcttctcttgcaagaataagcaaggcaccaggttcactcctatgtttcaatggcctgacaagtctctgtcatttggagttactcaagccttagcatggaaaagatctggtctcatggtgaggcccagtgtgcaagtcagtttatgccctacatttggaggaaatgatcctggggtacgtgcagaggttatccattcattgaaagaggaattgaatgtaatgtgcggtttgtcttgctcaagacatccatcagcctttactgctctgtctattgggagatccaagtggaatggtcaaatgggcagttccggagtggtcgttaccttggaaacaccccttaataacattggaaggccatctttatgcgttcaattgaatggaggttttgaaatttagcattctgcgcagtaagttgtatataccactgtacatagccctactaatgtccatgtcctatctctgtggagatggctgtgcaacgcctatgaatggtatctggaagtggtttctgctcgtttttgttgtcagactcataggtgataagtctcagctcaacaaatcaactggtttattccccatgccaacaaaggcatccatatatataccttaaagagatggtgatcaagtgtgtaggcagttcaaggtttcttttgaagaaattggagagaaaagctgcaagatcagcacttaatactttttggaagttgggagaaggaaaaggctatgaggtgttttgcggctgtgcaagaagccaagacgaatgtggctttgcaagaagccgaagatgttcacccagaagctatgttcctttggagcaggactgaccatactggatgtttgctgatagtgaattgcttactggcttttgctaattgtgatggataattattatccatcacaattgatcgttagacgatctcattgctgagacaagctttgatggatgaattggtgtgcttttttcccctgcactcttgtattcctcatgtaagactcatgatcagtgaagctaagaaatgtctactgggatgggatggaggacctgtctggtggcattgtcaaaccc

SEQ ID NO: 27396 - DNA, 2519 bp, Oryza sativa
  ref <308>: DATABASE ACCESSION NUMBER: AK102838
  ref <309>: DATABASE ENTRY DATE: 2002-08-28
gaatttttctcacggttatgcccttttttccggaccgcaggtcagcgacgggcggtcgagcggcgatcgcaggtcggcggcgcgcggccgccggcttgggcttcctggcacgtcgggcggcagccggcggggtccctccagcttcctccgacggcgggcgacagtgacggcctgttttagtggcgtgcgacgggctcggtggggccatccactgcccggatccggcggcggcggccgtccctcgcccggccccgcacagatccactagcggctgcgggaggagagcccaagggcagactcggcgatggctggtggacgactgtcgtgcaccgggtggagtccggcggcgggcggcgcatccgctcacttctttctgcccgctgccgtcatcgtggttgtgctccaccagctcgccgtgtggccgccaccttctccccacaccgccgccgacggacgtcgactccgactcggccgccgggggcaagcccacccagatggacctcgaggactaggtattccccaatctgattatcctttcttcctcctccctattcatttcttttccctttttgatttgtgcccaggaaccctagttcatcccaatctcaatttatagtgtcgatgccgaagtggaggagcttcgtttttttttttttgattttcaatttcgtgctccaagggctcatccccatctatcaattaaaattttcatgaacgccagaccttattagagacgcggattttatagtttctgaaaatgcactgcctttcttatcttataaacatgtattgttgctgatgtaccaatattgcttgccaagacacaaaaactttaatgaatacaactatgcaagcagcgaggccgtaagtacaaaagctataatcagttttatatcactgtacttgctattcatttggtctttactaaacatctctgaacttcaatttgcaggtttgacagctggtttcatatttaaagataccactcagtcaaagtcttgtggtaaatattttgcatttgtattttcttcatcattgagttctcccaggagctttttctacttgagatttagctcttgttctgaaactttgggatcaacagagcaatttaagtggaattgttctcgtgattgttgccagcctatctaaaatacattttgttttctgaacagtacagatgcatgtgcagtacatacttctgcggcagtaaacgcagatatgtccatgatgaattttcgggctctgattcattgatagcgctagttatatcagaacttatttgatggactagctgttcacatctgatgcatttgttgcatttctgggccttttgtattatcaatgaacaaatatgtttgaatggattcctcttatacatgtgtcctcaatgattttatctagagattttaaggaaaaaattgttgttaggctagtagttttctgaatttttctgcttcaacggaggaggtcgaatgatgcctgaaatgctgaacttctgttttttttagtactgccacatgagcactgaaattgtctagttcattagagcattgttgattggttagtatttttctgaaattccctagttcttgtagagcagcacaaatgaattttctttgatccttcactcaatcagttagccatatccttcactgaatctgtagagctgttttttgtcatctcatttgtgtggttctgttagtactttaattaaatcgaagtcagggcatattctctaataattgtggctagatgttcctttgcgctgaacgtattgttgttgcttaaacatcaaggtattccttagtctcctttgctctctgactatgtattccagataaatttagagctgctatggcacttgtgaagagtgacattggtggtaatatcacgataagcatccttttttcacgacacttaatagtacattgtgtttcattcctcattttcattagtacatttctggtgttatctatgtgatagatgcatgaatcatatttactttagtcagatttgcttacttagaagtttgtgatagaagcggctcgggtgaaattcaaggaggcgacaggcttgacgcgacgggcagcattgcactaagggctaccacgccgagcatgtcgtctggaggccttgtcgctgacccgagtccggaaggtcctattgctggcctctttggtgattccagctctgcatatcgcctgacggtcaggtcggcggaggcaggtgccttccacctggtgcacgttcgtgggaaccacctgagaacatcgtcaacagtcttccttttgcatgtcgacattgttctatcgccagagtcaattgtttaaactagtagttttgcttctgagtatttttttttacttctagattaactgtgtaatattttactggtggacatatgatccactgtaaaggttccttgtagttttcagactcacaaagtcaaatgatccggtgaaattttttattatagaatgtaaaaatatgcatggcaaataaatgtattgtgatggttg

SEQ ID NO: 27397 - DNA, 1552 bp, Oryza sativa
  ref <308>: DATABASE ACCESSION NUMBER: AK102839
  ref <309>: DATABASE ENTRY DATE: 2002-08-28
gttcagaaggctcactccgtctccccctccggccgccgcaaggagaagcagcagcagcgatgcaggccgccgccgggcgcgcgcgccgcctcctcacgtcgccggcggcctccggtatcctctccgcgccgcgccccgggtgcgcggcgctcgccgggagcggcgcccttcttccccgtctcgatggtgtcccgtcctcgccgtcgccgtcaccggcccctccgctcctggctaggagcttctccgccacgtcctcgtctcgcctaccccgtaacttgctatcgccaagtatatcttctcaatggcggaatgagaaatcggtgtgctatcacatggctgcaactcactactcaacagaagcaagtgacattgatcaacctacagaggctgtagtggagctgtatcagaaaatgttgaaatctgttgaagccgagaccatgcctccgaatgcctggttgtggtcaatggtaagtagctgttccaataaggaggacatcaaactacttattcagattttgcagaagctaagagtatttagactatcaaatcttcgcatcgacgcaaacttcaacgatcatctttgcatgaaagttgcagaggcttgtgctcgtgttggtgcccttgactatggtttgaaggttttatggaagcataatgtttatggaattacgcctaccattggttctgctcattatctactgaaacatgctaaagagaaaaatgacactaaactaatgggaagtataatgcaagtccttcagagaaattcgatgccattgcaaccaggcactgctgatatagtcttcagcatctgctataatgctgatagatgggatttactctcaaaatatgcgagaagattcgtgaagtctgaagtcaagctgcatggtgcttcatttgacatttggatggacttcgctgccaaagttggagactcccaatctatatggaacatcaatagcctgagaggcaagtcagtcaaacgctataatcttgcaacaggttttgcatgtgtaaaggggtttctgcttgagcgcaaaccagaaagcgccgctgccatgattaaattacttcacaagcattcacctgatgagaagaaacaattggtgacggatgagctccagaagcttgttgctgaatggccagcagaggtgataaaaaggcagaagaaagatgataggaaggcgctggaggaagctttgattacagatatccctcaaatgatcagttccatgtcaaagctgcgccttgatatttctgtgaatttggagaagcttacctctcaacctgaaacagcatgagaagtaacacaggtgcccagatggcctagcagctgaaattacatgagtacaggcaggcggacaatatcacagtccagccatttgtattcgactacattctatttgatgggtagcacactagcactagcctgcccgacaataacatgtatacaacacattccgttgtttaccttgccatgtgcttttccatgacagttttgtagaaaaccttggtgaaattgcacgcatgaaattcaggtatgcattctcgg

SEQ ID NO: 27398 - DNA, 1028 bp, Oryza sativa
  ref <308>: DATABASE ACCESSION NUMBER: AK102840
  ref <309>: DATABASE ENTRY DATE: 2002-08-28
gggacgcttccttcgtacgcttcaccggagtgggtggagacgagacgcgagcaaacccaaaaccctcgcggcgacgccatggccgccgcgctccgcgccgccctccgccgccgccacgccgcctcttcgccggtggcccgcctcctgccgtactcgtcccctggaccctgcgccaagggcggtggcgccgcctccaccctccacgccgccacgcgcggcgcgcccgctccgtcgatccaggcgccctccgttgtccgccgctactgctccgccgggggaggatacgccgccgtgcgccctgctcgcggcgcctccccgctccaggtaccctctctggtacgccgctacggctccaccacgggagccactgctaccgccacccctgccgctggcgtccctgcccttcaccgtgcatctccacttcccctctttgtgccccgccgccgccgtgtgtattcttctgaggagtattcttctgatgagtattcttctgatgggtattcttctggtcaggaatacaagtatgtggaggattgccaagtggctaaggttatggatcatcaactcagaaggattgagaaagttgaggctggactaaagcagctcgggtggttccaaattatcacggtttcattgctgggattagttacatatcagtgccattcagaggtttcccgtctcgacaaggaagtcgctgctccaaagagcgagagcacgtagactcaagagcaaggtccctgctgattgttccattgatgattaagaagaagacgatctcgcttgatgctcatgaaacctagtcttgccaagtgttttgcactgtagtttcggccacttcatctactgattgatagccgtagtttctgatcgttgtcagtgtagtttgctggtgctgcgctgcatgtttccattttgattcgtaacctgattaaaccctcaatgcccaaacttggtgttctgtgtccctttgcttgatgcgtgggcgcgttaactttggtatccagctctgctgtactttcttatgcatg

SEQ ID NO: 27399 - DNA, 2306 bp, Oryza sativa
  ref <308>: DATABASE ACCESSION NUMBER: AK102841
  ref <309>: DATABASE ENTRY DATE: 2002-08-28
gcatcctgcagactcgccccactctcttgctcagctcctcttcatccagtcctcaaaactctctctgatctctctctcttgctgaaaattctccgcacactccggtgggcttaagcggtggcggcgtctcgcctgggtgggcgagatccctctcttgctcgtccgcaaggtcgctccccctgcgagtccaatctactgacgagctgggaggagcaaaggagggggcaattggagctccgctcggttccaattcagccccaattttgagccccccggctgcggggttcggccagttgagacgccatgtatcgggtgaagagcgagagcgactgcgatatgatccatcaggagcagatggactcgccggtggccgacgacggcagcagcggggggtcgccgcaccgcggcggcgggcccccgctgaagaaggggccatggacgtcggcggaggacgccatcctggtggactacgtgaagaagcacggcgaggggaactggaacgcggtgcagaagaacaccgggctgttccggtgcggcaagagctgccgcctccggtgggcgaaccacctgaggcccaacctcaagaagggggccttcaccgccgaggaggagaggctcatcatccagctccactccaagatggggaacaagtgggctcggatggccgctcatttgccagggcgcactgataatgaaataaagaattactggaatactcgaataaagagatgccagcgagctggcctacccatctatcctaccagcgtatgcaatcaatcctcaaatgaagatcagcagtgctccagtgattttgactgtggcgagaatttgtcaaacgatcttctgaatgcaaatggtctttacctaccagattttacctgtgacaatttcattgctaattcagaggctttaccttatgcaccacatctttcagccgtttctataagcaatctccttggccagagctttgcatcaaaaagctgtagcttcatggatcaggtaaaccagacagggatgctaaaacagtctgatggtgtgcttcctggattgagcgataccatcaacggtgtgatttcctcggtggatcaattctcaaatgactctgagaagctcaagcaggctgtgggttttgactatctccatgaagccaactctaccagcaagattattgcgcctttcgggggtgcacttaatggcagccatgcctttttaaatggcaatttctctgcttctaggcccacaagtggtcctttgaagatggagctcccttcactccaagatactgaatctgatccaaacagctggctcaagtacactgtagctcctgcgttgcagcctactgagttagttgatccctacctgcagtctccagcagcaaccccttcagtgaaatcagagtgcgcgtcgccaaggaatagtggccttttggaagagttgattcatgaagctcagaccctaagatccgggaagaaccaacagacatctgtgataagttctagttcttctgtcggtacgccatgtaatactacggttcttagcccagagtttgatatgtgtcaggaatactgggaagaacaacatcctggtccattcctcaatgactgtgctcctttcagtggcaattcattcactgaatccacccctcctgttagcgctgcatcgcctgacatctttcagctctccaaagtttccccagcacaaagcacttcaatgggatctggagagcaagtaatggggcctaaatatgaacctggggacacttcacctcatcctgaaaacttcaggccagatgcattgttttctgggaatacagctgatccatcagttttcaacaatgccatagcaatgcttctgggcaatgacttgagtatcgattgcagacctgttcttggcgacggtatcatgttcaattcttcctcgtggagcaacatgccacacgcctgtgaaatgtcagaattcaaatgaattctgtatttggtatttgccagacgctacagcagattcttggtatcgttcttgctcattgtttggatcataacttgaggaagatctcgtcggttgtaattctgcattgctgacagagtccttgatggcatgcaggcactatcagatgttctcttatgcgactagcccttttgtccaataaagtagtgcatggagataagccggttaattattgttttcttttttgtattagagaaccctttttgtcatctctattgcccgaattctgttggaaattcgtcatgtttgtttgaacaatgtaagaccaattattgcatttgtggtgtactatcttgttgagc

SEQ ID NO: 27400 - DNA, 1875 bp, Oryza sativa
  ref <308>: DATABASE ACCESSION NUMBER: AK102842
  ref <309>: DATABASE ENTRY DATE: 2002-08-28
gcgctttcctcatcgtcggctccacttccacttcctcttcctcctcctcgaggacgaggaggaaattggcagctggaggcttggagcgcgctgcatcatcccgcccgccctgctgctgcggcgatcgccggagcagggctgcaggggatccccacggccgcagcagctgttgttatctgattctgtgtggggatggaggtggttctgcatgagggggatgccaaagattgggtttacaaaggagaaggtgcagcgaatctaatcctcagctacactggctcgtcaccttctatgcttggcaaggttctgcgagtcaaaaagattctaaaagacaagggacaaccggcaccaaactgtatagtcttctcaagtcatgaggaacatctgtggggcaagatcccaggattgttggaatctgttaaaaatgattgcttgccacaagcctatgctacaattgttatgagccaacatttgggtgccaatcatgttgatggcggggtccgtgtacgtgtgtctaagaactttttcgagcttgctggaaagaatgtgcttgacaaccgtcctgcatggagagtgaatgctagtgcaattgatgctggagctgattctgctcttctaatttctgaccacacattattttccggtaatcctagaggaagcagttgcatagcagtggagataaaggcaaaatgtggatttcttccgtcatctgaatacatatcgaaggagaattctatcaagaaacaagtaacacggtataagatgcatcagcacctaaaatttcatctgggagagatatcgaagacaagtgaatacgatcccctagatttattttctggatcaaaagaaagaatacatatggctatcaagtcatttttttcaactcctcagaacaactttagaatttttgtggatggttctttactttttggtggcatgggaggtggcgcagatagtgttcatcctaatgaaacagagaaatgtcttgaagatctgagcaaggttactggcttacaactatctgactttattgagctcctgtcagaggcaatctttaagtctggagtgttgggtaaacttttagccactcaaaaactggatgatcatgacatcgaaggggcgattcatctgtactataacatcatttctcagccttgtttggtatgcaaaagtataactgatacagaacttctgcgcaagtactccaccttgcattctcttccattggacaagagtgagaagattgtcagggactttcttatctctgctactgcaaaagattgtagcctaatgatcagctttcgaccaagacagagtggaacaacagattctgagtacgattctgtatttcttgattcagtgaaccaaagctatgattacaaggcatattttattgatctggatgtgaaacccttggataagatggtacattactttaaattggatcaaaagatagtcaatttctacactagaaatggagaagttgggggagatccacgtgatcctccaaagggatgtggccctaggtgacacaaaggttcagctccaaaggttcagctccaacattgacgaccttgaaatataaagggcataggacaagtgtctgttgtatcttggtgattgttgtgtttctacaagtgtgcatgtccaatgtgcaggttctcctcccttctagggaaaacgtgtaagagagtggtagttgttgtagtacatcctgtataccgtgtggtttgcctcagcagtaggccgaattttcagtagacaaacattaagaagagttaataaactgtatactgaggcatccacgtttaccttggaaatctatgataaattcccgtatactcagcttgctgtgaatctgtgatctgagttctg

SEQ ID NO: 27401 - DNA, 1101 bp, Oryza sativa
  ref <308>: DATABASE ACCESSION NUMBER: AK102843
  ref <309>: DATABASE ENTRY DATE: 2002-08-28
gggtggtggtgactgtcacccagctcagtcaaagccagccagccagccaccgctgcatcatcccgcctgtctgcctgcgcgcgccggccagccggccgccgcctcgtctgctccgccggtccaggttgggtccccctcttgacgaggggcgggagggagggagcgaatctgaggtggtggctatggggtcgccgggggcggggagcagcggcggcggtggaggtgggcatgagtgcagcttcaagatcctgctcatcggggactccggcgtcggcaagagcagcctcctcgtcagcttcgtcgtcgccgccgccgccgcccacctcgacgacgacatcgctcccaccatcggagtggattttaagatcaagttccttacgattggtggaaagaaattgaagctgacaatatgggatactgctggccaggagaggtttaggacaattactagttcttactacagaggtgctcaaggcattattctagtatatgacgtcacgaagagagaaagcttcacaaatctggctgaagtatggagtaaggaaatagagtcacactcatcaaacaaagactgcataaaaatgcttgttggaaacaaaattgacaaggaggatgaaagaactgtcacaagagaagaagggcttgcctttgcagaagaatctggatgcctatttcttgagagtagcgcgaaaacacgagataatgttgagaagtgttttgaagaactcgcactaaagattatggatgtccctagcctcttggaggaaggctcctcttcggttgtcaaaaggaacattctgaagcagaagcaagaaagtcaagcaaagcatggtggcggatgctgtcaataggtcatatggcgtcccaaagcagattgtgacattccaacccgagctgctgtgttgtgttctgtttgtaaatgagttgtatttaaattgtctgcgagtaaataggggcgcaaaaagggatcagcttgtgaggtttttggagagtgattaacattgatttgtacaaagtacaacatgcttccttttttttttctttctattcattttttttatatcttcgccgtaggaatgtgctgctgtcatttgcttttct

SEQ ID NO: 27402 - DNA, 2899 bp, Oryza sativa
  ref <308>: DATABASE ACCESSION NUMBER: AK102844
  ref <309>: DATABASE ENTRY DATE: 2002-08-28
tcttggcaggcgtgctgaatctatggtcttgcccttagaattcctacagcagttcaaggcatcagatatccctgatcctcaagagtacgaggcatggcagagtaggaacttgaagcttcttgaggctggtttgcttgttcacccacttgttccattgaacaaatcagatgtttctgcacaacgactgcggcaaattatacgtggagcatacgatagaccacttgaaactgggaaaaactctgagtcaatgcaggtcctacgtagtgctgtcatgtcccttgctggtaggtctgatgatgggacttctgacggatgccactgggctgatggtttccccttgaatctccatctataccagatgttggtagaagcttgctttgataatgatgatggcactgttgttgatgagattgatgaggtgatggagctcttaaagaagacctggggtattctgggaattaaccagatgcttcacaacctttgctttgcttgggcattgttcaaccattttgttatgtccgggcaagtagatattgagttgctctctgctgcggagaatcagttggccgaagttgcaaaggatgccaaaaccacaaaagatccaaattacagcaaagtgttgagttcaactttaagctcaataatgggttggacagagaaaagacttctggcttaccatgagaccttcaatacaagtaacattgagtccatgcaaggtattgtgtcaattggagtgtcagctgcaagggttcttgttgaagatatatcccatgaataccgtcggaggaggaaagaagagactgacgtagctcgcagcaggatagagacctacataaggtcttcactccgtacagcttttgctcaaagaatggaagaagcagattccaagcggtcatcaagaaaccctacccctgttctgtctatccttgcaaaggacattggtgacctagcaattaaggagaaaaatttgtacagcccaattttaaagacatggcatccccttgcttcaggcgttgctgttgccacccttcattcttgctttggaaatgagctgaaacagttcatagctggacttacagagctgaccccagatacggttcaagtgcttaaggctgctgataaattagagaaggatcttgttaatattgcagttgaagattctgtggatagtgatgatggaggcaagtcattaatcagagagatgccaccatatgaagctgaaaatgcaattgctaacctggtgaaagtttggattaaagaaaggatagacaggctcaagggatgggttgatcggactttgaaacaagagacttggaatccagctgccaacagagagaatattgctccctcttgtgtggagatgcttcggatggttggtgaaacattagatgcatttttccaattgcccattccaatgcatccagttcttcttcctgacctgatgtttggacttgatagaagcctacagctttttgtgtctaaagcaaaatctggctgtggaacaaggaattcttttatgccccaactacctccgttgacacgatgcgaggtaggatcgaatatattgttcaagaaaaaggaaaagccacagaatccacagtaccgaggatcacaaaatggaacaaccaatggcgctgatcccttagcccttcctcaactctgtgtacgcttgaatacgcttcaattcgtgcgaggtgaactcgagaacttagagaagaagagaaaaacaggcttgcggaatgtcgagtcagctcaggcagatgttaccgatggattggacatcaaatttgagctttgtcagacagcctgtcaagagggcattcagcagttatgtgagacaactgcatataaggtgacattctatgatttggggcacgttctctgggatatcctttatattggtgacattgcatcaagtaggatcgagatattgttgagagaactcgaccctatactagagaccatatctggtatggtgcataacaaagtgcggaaccgtgctataaccgcattgatgaaagccacttttgatgggttcttgctggtgcttcttgctggtgggcctttgcgtgctttcacccgtcaagactcccagataatagaggatgacttcaaggcccttaaagacctgtttttagcagatggtgatggtttgccagaggaattggtcgataaggcatcctcccaggtcaagaatgtcctacccctcctacgaacagactccgagagccttattgaccgattcaaacgcatgatggctgagtctaatcgatctggagccaagaataggttaccattgccaccaacaacagggcactggagcccgaacgaacccaacacagtcctgcgagttctgtgctaccgttatgatgagacggctaccaagttcctaaagaaaacctataatcttcccaagaagatctgatgaactcgatgtacattttctggaaacaaaatcatgaaacccactgaggaagtcaggatttggaatgattttgtcacatcctcctttgaggaacactaccattgtaaagctaccactgcggagtttgccttatctgaggcgattgatttgaacgggggagttcaattcagcaacttggcccttctatcacatgctgttcagtggcgccaagaaatatgctggtactcttttctttttcttttttccttttttttttgggggggggggattacttacaggtcgatttgtttattattatgattatatgttttaccctaatccagttcttttgctgacctttgccgctgcatgtgtgtatttttccagtagctgtagtttgcaacagatatacccatcttgtgaataagttttgtactggtgtgacttgctgcgttggacttgagtatatcattatgcaaggcatctggttcctgc

SEQ ID NO: 27403 - DNA, 1821 bp, Oryza sativa
  ref <308>: DATABASE ACCESSION NUMBER: AK102845
  ref <309>: DATABASE ENTRY DATE: 2002-08-28
gagccaaagtagtagtagcggccaagtccacaccgagacatcacacaaacatccccgtcgcgtggactcgcgaaccccaattcccctctcccctcccacccaacctcgccgtcgccgtcgccgtcgccgccgtctccgccgctcgatttctccccgccccccacgcagtccagagcggatcgaatgcgtggccctcgccgcccgtagcctaccccggcccggaacggcgagcgcagccagtccctcctcgccgcatccggatctccgcatgcgccacgtccgcggcgggatctagcggcgtcgcaccccccggaggttgtagaagggtttccgggatttgggggcgccggggggtatggcgactgaggcgtccacttcggcggccgccggtgccgggggcgggagctgggtggaggggatgtcggccgacaacatcaaggggctggtgctagcgctctcctccagcttcttcatcggcgccagcttcatcgtcaagaagaaggggctcaagaaggccggcgcctccggcgtccgcgcaggcgttggaggttactcctacttgtatgaaccattgtggtgggctggaatgattacaatgattgttggagaagtagctaactttgcagcatatgcctttgctcctgctatcttagtaaccccacttggtgcgctaagcatcatcatcagtgctgttcttgcagatattatgttgaaggagaagcttcacatatttggtatacttggttgtgtcctctgtgttgtgggttcaacaaccattgtgcttcatgcgccgcaggagcgtgaaattgattctgtagctgaagtgtgggctcttgctactgaaccagcctttctattttatgcagtcactgtgcttgctgcgacttttgtgctcatattccgctttatcccccaatatggtcagacacacattatggtgtatattggtgtttgttctcttgtagggtctctctcggtcatgagtgtgaaagcacttggaatagccttgaaactgacttttcaggaatgaaccagctaatctatccacagacatggatgttcaccattgttgttgttgcatgtatactaactcagatgaactatctaaacaaggctcttgacacattcaatactgcagttgtttcgcctatatattatacaatgtttacatcactaaccattttggctagtgtgataatgttcaaggactgggatcgtcaaaatccaactcaaattgtgacagagatgtgtggttttgttaccatcctttctgggacgtttcttcttcacaagacgaaagatatggtcgatggactcccaccaactctacctatccgaataccgaaacatgatgaagatggctatgcggctgaaggcatccccctcaggtctgctgctgaaggcctccctcttaggtcaccaagagcagcagaatgattttgaccagcgaactgcaagcaatcccagccattctttcattccatacaaattgtagatgtactttaggtcttataaggtaaaagctcggctcccctgtaatttttgagacatcggtacagattggggatagataccccttatacatctcaagatacccagaatgggttagaatcaaaaaggttttttggatgtaaatcccgggtgatggtctgatagatgcatatgccgttctttggaactgttgtattctttgaaatgaacaattagaagtaggaagagcaactccaagaagataccattgctgacttccgtcaagaaccttttttttttacctccccttcattcaggctgctggatctattttcattatctgttgctgtg

SEQ ID NO: 27404 - DNA, 1794 bp, Oryza sativa
  ref <308>: DATABASE ACCESSION NUMBER: AK102846
  ref <309>: DATABASE ENTRY DATE: 2002-08-28
ggtgcttactcatgggctcatggcgttcgtgtctgaattaaccaacgcaaaataaacacgagtctgctgagacactgctcactgcttactttactcatggctcagcggcggctgctactcgccatcatggctctcgccgccgtcgccgccgccaccggcttcgagttccacgaggccaccgtcgacgccatccagctcggcttcagcaacggcagcctcacctccacggcgctcgtccgcttctacctcgaccagatcacccgcctcaacccgctcctccacgccgtcatcgaggtcaaccccgacgcgctcgcccaggcggcgcgcgccgacgacgagcgcgccaccggtcgccgctgcgggccgctccacggcgtccccgtcctgctcaaggacaacatcgcgacacgcgaccggctcaacacgacggccgggtcgttcgcgctgctcggctccgtcgtcccccgcgacgccggcgtggcggctcgcctccgcgccgccggcgccgttatcctcggtaaggccagcctcaccgagtggtccgcttaccgccccgccccgaacggctggagcgcccgcggcggccagacactgaatccgtacgtgcgctcgttcaccccgtgcggatcgagcagcggttcggcggtggcggcggcggcgaacatggcggcggtgacgctggggacggagaccgacgggtctatactgtgcccagcgtcgctgaattcggtggtcgggattaagccgacggttgggctcaccagccgcgccggcgtcgtccccatctcccctcgacaggacagtgttgggccaatatgtcggacagtgtcggatgctgtccatgtgttggatgccattgttgggtatgatgcacttgacgctgaagccactggagcagcatccaagtacattcctaatggtggatatggacaattcttaaggatggatggattcaaaggcaagaggattggtattcccaacggcttcttcactcaagaaatatttgagaagaaacagctgagggcataccaaaaacatattcaattaatgaggaaacatggagccatggtgattgagaacatcgacatcgcaaaaaatctgactgaagtacagaatgttcttttttccaacgagcatatcgcaatgatagcagagttcaagttaagcttgaatgcttatttgtccgacttgttgtattccccagttcgttcccttgcagatgtcatagcattcaacaaggcacatccggtggaggagaggcttaaagattttggacaaccctattttattgaagccgaaaagaccaacggcattggaccggtggagaaagcttcaatccaacatctcaataagctgtctgctgatgggctggagaagttgatgaggatgcaccagttggatgcgattgtcacgcccaatgacaacgggagagtcttcttcgccgtcagtggcatgccagcgatcaccgtgccggctgggtacgacagtcaaggagtgccatttggtacttgcttcggtggattgaagggctatgagccaaggctgattgaaatggcctatgcttatgagcaagctaccaaagttcgaatgatgcctggcttcaagatgtagtgtatataaaatttgtgttatataattcacggagctttttgatccttgcccaaataaattgatggaactaaatagccatctagttttgttgtccaattcagggatgccaaaaatttggtagtccagagtattatatgttcaatgtattataataatttataattcaaaaattaaatatctggt

SEQ ID NO: 27405 - DNA, 1924 bp, Oryza sativa
  ref <308>: DATABASE ACCESSION NUMBER: AK102847
  ref <309>: DATABASE ENTRY DATE: 2002-08-28
gtccctccccaacatcccgcccccggatctgagccgctgcggcgggcacaacacagcgcgtgcgtgggtggcaagacgggttctttgcctttgcaactttgcaagatttgggcttttggtttcttggtggttgtggattttttttttttgagagggatgggtgtttgattggagtgggttgggagccatgtggaagcagtttctcggcaagatctcgtggaaggcgccgaaatccggcggcggcggcggcggctcgccgacggccaagtcgccgctgtcgaagggcgccgggaatggggagcctcccgcgccgcccgcggccgccgcaggaggaggaggaggagcggagggggagaccagggaggacgtgttcctccggaagctgaacgtctgctgcgtcgtgttcgacttctcctccgccgccgccgctgccgccgcagagcgcgggagggactcgccggagagggagaggaagcggcaggtgctcgtgtccctcgtcgactgcgtcggcgccgccgaggagcccctcaccgaggcgatgatctccggctgcgtccgcatgttcgccatcaacctcttcagggtgttcccgcccaaggtccggtccggcgccgccggggcggcggaggccgacgaagacgagcccttcttcgatccctcatggtaccacctgcaggccgtttatgagctgctcctccgcttcgtcatgtccccggtcgtcgacgtcaagattgctcgcaagtacatggacaattcttttgtgtctaggttgctcgacttgttcgattccgatgatccgagagaaagggaatgcttgaagacagtcttgcataggatatacggcaaattcatgggcaaccggcctttcatccgcaaggcggtgagcaatatcttctataggttcgtgttcgagaccgatcgccacaatgggattgctgagctgttggaggtgtttgggagtgtgattagtgggttcgcgaagccattgaaggaggagcataagttgttcctgtggaaggcgttagttcctcttcacaaaccgaaaacggtgggcgtgtatctcccgcaattgacgtattgtattatacaattcatcgagaaggaaccaaagctcgcggggactgtaatcagaggcctactgaagtactggccagtgacgaacagtcagaaggagatgatgttccttggggagttggaggaggtgctggaattgacagaaatggctgagttccagaagtgcatggttccgctgtttcgaaggattgcacactgtctaaatagctcacactttcaggttgctgagagggcactattcctgtggaacaatgagcacttgtttgatttgatctcccaaaatcgccaaactattatgccgatcatatatccagcgctggaaaggaacactcgttggcactggaaccaatcagttctaaatgtaacaatgaacgtccggaaaatgttccttgaaatggatgagggactgttgttaacttgtcagaggaatttccaagaggaggaagaaaagcgagctgcatctgaggagcggagaaagcttatatgggagaacctagagagaaacgcgtcattccgtccagtcaccggagacattggtttctctgttcttcctgcatctgctcccttggtagcacccaccatgacataatatgacatgcgttcggaatttcgaatgtacttcggttcatttcattgttagcttgtatgggttatgtgcagggcattttgttatatttgtaagccccttgtgctcaagtctgtaattaatagttattggtttgaggatgaacttgtgattctttaatggtgtactctctagtgatggacatttctctgtttgagaagataatgtccaattaaacccgactgctctgtgaacaactgaggatactgagattgattttcttgg

SEQ ID NO: 27406 - DNA, 3341 bp, Oryza sativa
  ref <308>: DATABASE ACCESSION NUMBER: AK102848
  ref <309>: DATABASE ENTRY DATE: 2002-08-28
gagtgcaaaatctacaagaccacgatacaagtaggtatggtggactaccacattttcacttctctttcactttcccctctctctcccccctctcttcctttcccccaccgcagagagcctggcgcgcggagacggcgacggcgccggaccaagcagtggtggagcgacggcggggcgacagcgccgagcggcgggatgcgctcgccggcgcaccaccccctcctctcccccccgagcggcggggctgctcggagcagcagggcggcggcggcatgtcggcggcgggcagacgacttggagcgggagacggcgacgggcggatgcgaggcggcggtcggcgccctcctcccctggagttcggctgcttcgccccctctcctctctcctctagcggtggtgtgggtcccactgagctgaggagggcgcgcggttggacgacgaggcaaaggaatactagtcttcgcttttttgggttgaggctgaatgccacgtcggcccattgtgaatgccctttaacaaaacaagggtttatggctatgggatctggctgaggcattgacctaccttgatccttggcagagagagagagagactccccctcactccttccccgacgacctgctcgatccgatccaatccgctcctctccagtccagatcggaaggaagccaggaatggggcacccccacccccacccttacgcgccggcggagcttcacctcccgggcttcgtgcctctccaactgtcccaggcccaaatcctcgtgccctacctcgccacctccctcttcctcctcctcgccgtctggctcatctccgggagatgcagtcgtaggctttccgacaccgaccgctggctcatgtgctggtgggccttcaccggcctcacccacattatcatcgagggaacctttgtctttgctcctaatttcttctccaaccaaaacccttcttacttcgatgaagtttggaaagagtacagcaaaggtgactccagatatgtcgccagagaccctgctactgttacagttgaaggaattacagctgtcttggaaggccctgcttcactccttgctgtgtactcatcttttcttccatttcacctcaccatgcgcaccttacctctctctctctctctctctctctctctctctctctctctctctctctctctctctctctcttttccatttcttacatatttaacgatcttctcattacaaatgcatttttcacatgtttttctacctttcgttatactattgtttttctttcctctttcgagttaaccttttgctagccaatctagttattccggagcatcaccttctgaattaacatgtactagccaattaagtcgcctgtttgtgcgaccatgagtaattcacctatgatcacattttccctatctcatattgtaatattattatcttttttgtacgacaaaccgtagccctttgattataacactgaatctagcttgcccaaagttgtactctctggcttccaagttaccgaaaatggaactgaaaattatactctctggcttccaaatggatataagtgaaaacgactgaaaatttgttcgcatacagagctgactttaaattcatatcataagcggaaatggaataataggcaatggaaaagtattttggtgccaaacagattaaattctgtgttttggacttgtaattagtaaaggaaggcaacagccatgattagaagggaattgtggaaatagtatttacagcccaaatactcctatctaaatgcaactcaatctggaattagaaaaaaaatatgttggcaagctaggctcatattagaacttcatgagctgacgtgcttgtccaggaaagtgttttcaagattactaaagctggtattagcatatccaaccgcagcatactgttttactgccctaagtacatcttgtttcagtgtctttctttgttgaaggtttccagaaatcatacaaagccacatgtgcatatagttctgcatatagttctcctgtcgtgtactaattgaaaatgagttactttcataggaaaaaaaactggggaatcgataataaagaactaaaactcctttcagcaaatatatgcaaaattgaattccaccaaaccaagtattaactgaagcatttgctggatctgcatatatgcaaacaaaacattaaggcttaaataggaactttgtttgctggaaacagaaagagatggtaaatcgaaaggaaagttagaatcattaacagagcataaaaaatatagtcaagccaaaacgaatcatgcctcctatctaagcccccatggactcaaccttaatttatgaacttctataattcagtcatagttttgcagtaaattcagtcatcttgctgtacttctttccaattcatccctataggtcaacatctcaattgacagttgcatattcattccaaattgttcagtcacagtgagtcaccatatccctataggtcaacatcttacttggacagttgcatattcattccaaattgttcagtcaccgtgagtcaattgagcaactttttactgtaacacattgaaggaggcagcactaaccttgcaatgaagtcatgtgcttatgacctcacagggtctctatctcatgagctgatggtaccgtaacgggcatgccattttgctatttgctcatttcaatctaaactggaaagaagcaattttttattggcatccacgattccaggggtgtctccctgccgctgccaccttctccactcccatacctgatgcgtgggagcaggcaaaagtgcagggatagggaggaagaagtggaagatggcggcgtcgcatcatcccactctgttgctcccagaggaaaattgttgagctgctcagccagtgaaagaggatgcatgtggtacctcagcctcgccgccacccatcttcaccgtcggtatggtttggatccagcgattcctgagcttgcggtggcttgcccccgagctcagtgcggggtgcttgaatctgatgaggaacgcggtgcggcctggatggagcggcggcctcgatttggccacggtggggatgaggagccaacttcggaggcggtgggggataggaggaagatgcggcagctgggatgacgagggggtttggagtggaggcggtggtgtggcgcagcacgcaaaggagaggaggggtcgtgctttggtagatggggagggaggagggggtaaatataaaagaatcgattctaagggtatggaaggatctagttttggtataagtttcatgaaggatgtttatgttctttatccatttggggaatctgatggttcttattggccc

SEQ ID NO: 27407 - DNA, 2221 bp, Oryza sativa
  ref <308>: DATABASE ACCESSION NUMBER: AK102849
  ref <309>: DATABASE ENTRY DATE: 2002-08-28
gagccgccagttcacaactgcggcaaaaaccaaaaacaaaattctcccccgggttatcgactgcctcatctagagtttcttctttcttcgcgtgttcttggaggaggagcgaggactaggtgagtaagaaaggaagtttcacgtcttatgggggtgaattcttttgcgggatttcttggcctttgtgtctgggattcgtggtagatgctgatgaggagatcgccatctctcgtggtttggatcccatgtagttttcttggatgctgtatgaatctttgagctttactctgcatttcgggaggagctgttttgtttgtgtggctggctgtgcgcgaaagctactgcgatccttagcgatggagttgttttcttctttttcctccctttcttgaagatatttagaccaggtcactatcagtcttgaacggatgttatctgcgttggagattgactccgttatcattcgctcattcatctcgcctccaaatgatttgagctttttcttggtgaattttcctggattagcttctcgtggcccggaatcatctgaaagcctagctttgttgcctacttgcctcttgttgattgggatttgcggtgccggccacgccctctggtgttttagcgacagaagggattgaatttttcggccaaatcaaaggctgggcagcttgcgcctcgcctcctccttgcttgccgtctcatctgcatttgggtttaatgcggttctgacctttacaaggagctcccttttttatacaaaagggaaaaaaaaaaagttcggtttctgctcaaattgccacttgcagagaatacgtgcttttttaggagctcctttgaggttagctgtattcggagcttcagattatccaaaaaaaaaaaaaagaatggacggtgagcagctgatgagtggtgaattggacaattcgttcaacgcactcatggtttctggagagggtgagagtggacaggcacatcatgagggcacagggactaccttgttaggttggaaggaccttcccatggagctgctcctgcggatattatcgatggctggagacgacaggatggtaatcgtgggctctggtgtttgcaccggttggcgtgatacattagaatggggagtcacgaatctttctctttcgtggtgccaggctcacatgaatgacttagtgatgtcacttgctcagaaatttacgaagctgcaagttctttctttacggcaaatcaaacctcagctcgaggacagtgcagtggaggctgtagcaaataactgtcatgatttacgcgagttggatcttagcagaagctttaggcttagcgaccgatcgttgtatgctctggcacatggatgcccccatcttacaaggctcaacatcagtggatgttccaatttcagcgatgctgctttggcctatctcagtagccagtgcaagaacctgaaatgcctgaatctgtgcgggtgtgtgagggcagtttccgacagagcattgcaggccatcgcctgtaactgtggtcagcttcagtctttgaacctaggctggtgtgatagtgtaactgacaagggagtgaccagcttggcatcagggtgccctgaacttcgggctctggacttgtgtggctgtgttctgataacagatgagagcgtggtcgctcttgccaatggctgccctcacctgcggtcgctggggctctactactgccagaacatcaccgaccgggcaatgtactcgctggcggcgaacagccggcgggtgaggagcaaaggccggagctgggacgcggcggcgaggaagaacgccggcgccggcgccgacgggctggccagcctgaacatcagccagtgcacggcgctgacgccgccggcggtccaggcggtgtgcgactccttcccggcgctccacacgtgcccggagcgggcactccctcatcatcagcggatgcctcagcctcacctccgtccactgcgcctgcgctcaccacccgcaccgccatgggagggccatcctctccaaccatgcctactagcaagctccctcttgtagaaactagaacagctcggatttgaggaagatgtaaattaaaaccccaggattgcttacgatggactggggaaaactgcttctgtgtttgtggatggatggtgtcatggatcatatgtttcttttggatcaaaatctctgaagagtatatgcatgaggaataagtttactttgtgacc

SEQ ID NO: 27408 - DNA, 1889 bp, Oryza sativa
  ref <308>: DATABASE ACCESSION NUMBER: AK102850
  ref <309>: DATABASE ENTRY DATE: 2002-08-28
gaggggaaagcaaacaagccctagttccgccgatggagaggagcgccggcgaggaggttggccgtggcgtcgcttgcgattagggtggaggcgccggacagcaggagggtggaggcgccggacagcaggagggtggcgttccgatgggtacaatctgttgtctccgatgccggccaggagggcggcgttccgatgggtgggaggaggggcggtggtgaactggtgacgccggcgtcggccagaagggtggcgttccaacagaagatatcctagctgttccaggaagctcgcgagcactgcttctctcgcttctctctgatttcgagaacgaaagacaatctttactaccatctctggtgccactgggcgacgttccgatgggtatgaggaggggcagtggtggcgctggcgctgaccaggagggcggcgttccgatgggtgggagtaggggcagtggcgatgccggcactaacaaggagcacggcgttccgatgggtgggaggaggggcagtggtggtgccggcgctgaccaggagggcggcattccgatgggtgggaggagtggcggtagtggtgccggcttcggcttggattgggtgtgggactggcgtaatcccaacaggtctgtgccgccaccaccaacagaagatatcccagctgtcccaggaagctcaggagtactacctctctctaatctccagaggtatatatgtcactcatttctacttctagttatctctatcgacatatgtacatcttctagttaccactatctacgcagattcatctaatcaacaattttactctaacaatatatagagtaagaatggggcgatgttgtacctatctctatttgcacaggttcatctaatgaactaggttatatagaataagaatggggcgatgatgtttttacccaacataatttggtgctcaatcatgattatgtcctcctttttcttactttgtgattttgtccctgttttttttcaaatcgaagctaccttttgcccctagttcagacttatgttaattacgaagtactatatgaaatgtttattatcggtaccaacgacctgacctgaaatgattgattgcagcaaaagacaatatttagtatcatctctgatgctgctatcatctctgcctctctctgatctccagaggcattctgagaaattacctgatacacatggatcagataaggaagatgaagtggtggattcttcagacgatgattgtgatccatattttaactatttggttgatagctttatgactgcaactaaagctcaaccaaaacagttgtatggcaatattgatcttgttgcagctgcacaacgtcagtctaatgagtatgcaagtagtgctttggattactataacaaggatgaaaacaataagtacaattagagagaagggtgagaaatatggacatgtcaacttcatagcatctttagattcaaaggaagagctatttttcgccgaagtttgttgggatcccaagaactatgatatggtgccgacctgcattgtatctcttgaggagaaaaggagaattgggggacgctcctttattaatgacgagtatgtggtgtgtctggatctccaaaatccgcctatagatggcaagcactgctatggatgtagcgaagagattaagcacccagaagatggatctacgtttaaggccgggcatgtagccgccaccggtttttatgattctttcatgtagctgccatcagttactattctttcttccgagtttgtataaaagctcaactaatctacccttaacagctgtttttactgttctatttattttgcatcttgtctacactagcagacttattttgtggctatgaatggatgaatatgctgcgttatgt

SEQ ID NO: 27409 - DNA, 2190 bp, Oryza sativa
  ref <308>: DATABASE ACCESSION NUMBER: AK102851
  ref <309>: DATABASE ENTRY DATE: 2002-08-28
gcccgaactgttcgttccctgcctcactggtagcggcgcttgtcaagcgccgccattgcaggacgagcgaagccctaaagatcgacaccgtcacggcggcggaagggggaggagcgtcgtggcgacccgctgctccccgtgcccgtccgctccaactctccagaaaccctagatgttcgacaattgcgaggtcactataatcgtctctggagcgatgcatcgtgctaaaaaggcaaaggtggaaccatcatctgcgttgaggtcagacaaattcagcagcctacctcaagagataaaggtcaccatcctctccaagctgaattccttagatgctattagagccagcatcctatccagtgcttggaggaatgtgtggactactttgccagaaatatatctttgtgatttgtatctcagctggggttcctctgaaacgacacaacgctccaactttattacgctcgtcgatctggcccttttgctccacaatggacctcttgcttccttttcaattctagggttcaaaagataccatgatgtatttgatagtggatgtacatgctgtcaaggaaaaaaccaaggtccattacaatcaagttttactctgggcataactataagatcccgtcaaacctcttctctctcagtgatttggaatatctgcagataaaaagatgcatcatcggtttgcctcaggagtttgaaggtttcaagcggctaactgtcctgaatctgaaatatttctcctcaacagacagtgacataaataatctgatctcctcatgccccttgctgagtacattatgtttgaaatatttcgagggtatcacttgtctcagtattcaagctccagcactgcaggatttagaggttaaagggaactttcaagattttcatctgcatgcacctaatctgtccaatttagatgtttcacttgacaaaacagaagcccaacaatctgttgtagttgaaggcaacaggaaaaattatctgaagcaagctatggtcagcctaactagcatagtaagacttgttatgaaaagatgcatcattgccttgcctcaggagtttgaaggtttcaagcagctatttgtcttgaatctgaaatatttctcctcaacagaccatgatataaatactctggtctcctcatgcccttggttgaatacattgcgtttgaaacatttcgatggtatcagttgtctccgtattgaaggccaggtactgcagattgtagaggttgaagggaaatttgaggactttcatctgaatgcacctaatctgtcccatgtgtatattacactcgacaaaacagaagcccaacagtctgtggcagttgtaggtgacatgaaaaactacatgaagcaagcttttgtcagcctaactagtatagaagaacttactataagtggctcattcttgacgtatctatccaaagggtgcttgtcgatgcaactcccaggtgtgtttgatcatctgaagaagatttgtattgagaagtgcttttggaactggacagaggtcttgggtgcttgttcaatatttcagaatgcccctactttcagagaacttgagatatggagcttcccacgtccagaagcttataggcgtaagacaatatgggatcaagatcagacggagattgaagagcctaccttgcatcacctcgtgacagtggccataaacgatttcgtggggctcaactgcgaggttgctcttgttggactgctactgagctggtcacctgctttagaggatctgaagatattcagggccaagaacgttaacgatgaatacatgtgcatttgcaagggtcttaccaagttactggctctcccgagggcgtctagcaaagccaagatcactgtcatctgattcatgtacatccaggtcattcggctgcgtttttgcttcatatcgacgtttgcttgtggcagaactactgctgttagtctgtgtccttggattttgggggttatgcgttaaatctaaatcttagtagtctgttaattcgctccatcttccctttgaactagacatgctttgctcagaatgaatgttcttggttggagaattgccatgtctcttctgttcgttcaacaaactagaagtcggtcagcaagctccatttacttcaaatgtttgcgacttgatatttcaagatgaaaaatataatactagtggttgatc

SEQ ID NO: 27410 - DNA, 2992 bp, Oryza sativa
  ref <308>: DATABASE ACCESSION NUMBER: AK102852
  ref <309>: DATABASE ENTRY DATE: 2002-08-28
gcccactctctctctctctctactctccctcctcgccgcgccgcgccgccgccgccgccatgagcgcgggctggaggacgctgctgctgcggatcggcgacaggtgcccggagtacgggggctccgccgaccacaaggagcacatcgaaacttgttatggtgtgctttgtcgagaatacgaacactccaaagatgcaatgtttgagtttctcctccaatgtgcagatcaattgcctcacaagattcctttctttggagtattgataggtttgataaacttggaaaatgaagatttttccaagggtattgtcgatacaacacatgccaatttacaggatgccttgcataatgaaaatcgtgacagaatcaggatattgctgcgatttctctgtggcctgatgtgcagcaaagttgtcctgccaaattctattattgaaacatttgaggcactattatcatctgctgcaacaatattagatgaggaaaccggaaatccttcgtggcaaccacgtgctgatttctatgtttattgtatcttggcttcccttccatggggtggctcagaattgtttgagcaagttccagatgaatttgagagagttctggttggtatacagtcttatataagcattagaaggcattttgatgatattgctttctcagtctttgaaacagatgaaggcaactctcccaacaaaaaggatttcatcgaagatttatgggagcgtattcaagttctttctcgcaatgggtggaaggttaagagtgttccaaaacctcacctgtcgtttgaagctcagctggtagctggagtttctcaccgtttctccccaattagttgccccccacctactatctcgcaatcatcttctgaaatagtaaaaggtcaagaaaagcatgaagctgatctgaagtatcctcaaaggcttcgtaggcttcacatatttccaacaaataaagctgagaacatgcaacctgtagatcgttttgttgttgaagaatgcatattggatgtgctacttttcttcaatggatgtcgcaaagaatgtgcattttatctggtcagcttacctgtgcctttccgttatgaatacctgatggctgagaccatattttcacagctactgttattgccgaatccccctttcaggccaatttactataccttggttattatcgacctttgcaaggcattgccaggtgcatttccttcagttgtggtaggagcagtacatgctctttttgacagaattagcaacatggatatggagtgccgcacccgacttatcctatggttttcacatcacttgtcaaattttcagttcatttggccttggcaggagtgggcttacgtcaaggaccttccaaaatgggctccacagcgtgtttttgtccaagaagtattagaaagggaaattcgcttgtcctactttgacaaaattaagcagagcatagaggatgctgttgaattggaagaactgttacccccaaaagctgggcctaacttcagatatcatagtgatgaaggcaaagaaagcactgatggccacagactctccaaggaacttgttgccatggttagaggaaggaagacacaaggtgatattatttcatgggtagacgaaaaaataattcctgtaaatggtgccaaatttgcacttgatgtagttagccagacacttctggacattggctcaaaaagtttcacccatcttatcactgttttggagagatatggtcaaataatatcaaagctgtgcccgaatgaagaaatgcagttattgttgatggatgaagtcagtgcttattggaagaacagtacccagatgattgccatagctattgataggatgatgggttatcgcctactttccaatctggctatagtcaaatgggttttttctcctgctaatgttgatcaatttcatgtttcagatcgtccatgggagattcttagaaatgctgttagtaaaacatacaatcggatttttgacctccggaaagaaattcagacactcaggaaaggtcttcaagctgctaaagaggccagtgaaaaggccgccagagagttggaggaggctaaatctattattgagattgtagatggccaacctgtgccatctgaaaatccaggaaggctaagacgacttcaagcgcgtgctgacaaagcgaaagaaggagaagtaaccactgaagaatctttagaagcaaaggaggccctccttgctcgagggcttgaagaaagcaaggaattgcttaggttactattcaagagctttgttgaaggctaactgaacgtttgccacctatttctgctgatggagatgttcctaatttacgtgctggagacccgaatgtaaattcttcagcccgtgaccctgaagcaacaaccatggaaatagacaatgaaaatggaggagataacgatagtcagctgaatggtcaaaacaagaaaatcagtcacaatgttggagagcttgagcaatggtgtctctgcacattgggctatctcaagtcgttttctcgtcaatatgctactgagatctggtcccatattgccatgttggatcaggagattttcgttgggaatattcaccctcttatccggaaagctgctttctccggtttgtgcagacctaccagtgaagggtctcacctttgattttgacccttccagtgagttggagtttacctgtattatacgcgacaaatttttcatcatgcttcactaactggacatgcccaaaagtactctgatgtgtactcaggaactccatcgattctcctgtaatcctggccccgaggaacacccttggtggaaagcactgtaacgactttaggtgattaaattatcagttaggtttatttgaattgtagtggactaattttcttgggtgagtaattgctatggtctagctttcttaattccctctgcctgtgttaggacaacgccgtgtttattgataagctgatctgaagccgtcattacttt

SEQ ID NO: 27411 - DNA, 2257 bp, Oryza sativa
  ref <308>: DATABASE ACCESSION NUMBER: AK102853
  ref <309>: DATABASE ENTRY DATE: 2002-08-28
gaccgacgacgagtgcgcggcgaggggaggaccgctccggcgagcggcgacgaggggaggacacgcgcatgcgcgcgctcgacgccagcaagcggcaagcggcgggcgtgtctgtccatcttccccatcgtccatcgtcgtcccggtcgcccgcccgcctcgcccccgcgaccaccgctggcgaccacagccgccagtcagttcatcaacatcttcaaatagtagtttttttttaagataacagtgagatttttattgttggcaaacaatggaacttctacaagagaagaacatacatgtcagccaaagggatgacaaggcaaagtggataattgataactatagtaatattaggagtttcacagaacatgacattgagaaaatcactagcaactatagcactctaattggaaagggtggatttggagaagtatttagaggggttcttgatgatgaagatgacgtagttgccgtgaagagatatatccgtggagatttaagagaagagttcatggaagagataagaatccatgctcaaatgagccataagaatatagtgaaacttataggctgctgtataggaaaaaatagactgatgatggtaactgagtttatctcaaatgggaatcttgaagatgcacttcacaacagtgatattttcatccctttgagtacacgcttgggcattgcaatgggatgtgcaaaagcattgagctacatgcattcgatgcatttatcaagtagcagccttatatgtcatggcgatattaagcctgcaaacattcttcttgatgccaatcttacagcaaaagtttcagattttggaatctcaaagtctctctcaggaggcatcacccgatggacttctaatgttaaaggaagtatagcttacatggatcctatatattatagagaaggccgtgttacctcgaagagtgatgtctatagctttggagctgttctgttagaacttatagctcgaaaaagcatgaaagaagggggcataagttgcgaagctttccgtcaagcttgtgcaaagggaaaaggactgagggaactgttggatatagaaatagcagaagaatgcaatatgaatattcttgaagaaattgcaaaattggcaactaagtgcatgatagtcgacaatattaaaaaacgtcctcaaatgaatgatgtggctgaacaccttcggacttggatttttcaagtccggaatggtggacatgaaaaaccagcttgggaatccactttggataaagtacatgatgcattgaagaaaggtacatcatcaaacttttgggtcattgttccgatgctgatcatcttcctattctcatatatgagtatgctgctaaagggagcctcaatgacattctgtactctaaagaagatttcccactagagttacgtctgaagattgcagtaaaaactgcagaagcattagaattccttcactcctcagcattttgtgtcatccgacatggtaatatcaagccaagcaatatacttcttgacagtaacttaatgccaaaggttgcaggttttacttcatcaaggaggattgctgaaaacaacaatgatcaggtcgcgtctatggaattcacgcatatacactacatggacccgattcatattcagtctgggcatttcacggtaaaaaacgatgtgtacagcttcggtgtcgttctctttgaactcatcagcaggaagaaacctgtatatcattgtcatgacaacaatcgtcgactcatccctgaattcatcagagcttacgagacagccaagagtgggaaggcaatgtttgatgaagggatcatggctgaagaagatatcgctgtccttgaagagattgggaggctggcaatggagtgcgtcagcttggaaatcgacggaaggccgacgatgaaggaagtggctgaacgccttaagatgatcaggagaatgaaggagagctcagccatgggagcagcgagatgctaactgaagcagaagctatagaaggctgttggcatcgctgaaaccgaagatgaagccaactgatgggccacaactgattgttccctttcagtctttcacctgagagatcgtttacagagtatcatcagaaacatagtgtgtactgtttggttgttaactgtgttatataacatactgtattctctattggcagtttgtcaccatatatataagactatatggactatttttggttgttggttttgtaagccgttgtcgtattgttttgtctgttgtcatc

SEQ ID NO: 27412 - DNA, 2749 bp, Oryza sativa
  ref <308>: DATABASE ACCESSION NUMBER: AK102854
  ref <309>: DATABASE ENTRY DATE: 2002-08-28
gggtggccacttctctcttccctcagcactactacgccaaaccgacggccgccgcctcctcctcctcctccccctcatgccgcgccgccatcgccgccgatggtcccggcgccgagccgtccccagcagcctctccacctcgtcgttgcgccgctgtgctggtcaaagctggcggtgtacgatgagggcgtggcccatgagcactgggccacgcccgagccgccggtggtcgccctcctcctctccattgtcccactgtgcccagtggcatgagatgcgggtgtagattatgagcagtacaaccgctgccgatgtttaccgtgctcacacaggtcacagcctcctgagtcctgacctacttattccttctgccggctgcaattcgtgtttgatttatgtgagttttttttttatctgtgcgatttctattcgtctcccttttctcttttccgttttggtttctatctctcagtccgtctgtgtagttctaaacctctcatatttgtaatatctgattttgtgttttctccgttttacgtgatgagtcggtcgctcaatcggatttacgtaccaaattgggatttacgtaccaaattatgttgcgtctaatataccaaactggagtagtattaggtgtgggttttttcgtggatgcggtgaaaaagaaagagcgacggacaaaaaaaaaacacatgaaaagatgtgacgattgggaaaatatgaatctttttaattagttattattattattattattaatattattattattattaagaaatatcgtcataacgttggtacgggcatatcagtagctagtaaacttaaccgaaatttgttgaaacttggcggatcagtcagaaaggtgaattgcggagttgggactcctcgggcccaacgaggtccatccggttcgtgaacaatcttcctgccaataatccatataaatctctccatcaaaagccctaattcaattgccagcgagggactcaaatcggtggtgggattatcgacatcgaaaagctagctaggcagctaattatgggatctgtgatgggctccctcgccctcgcctaccacgatgcgagggagtttcggatggagacgaagcggaaggcggagcacgaggttaacctgctccggccgccggcgttgctgcactgggacggcggcgacggcgagcagcctccgcccctcgacgagcggcgacggatcgtgcaacgctggatcgaatacgaaaagcgcaaaggccctcgccgtttcgaatatctcccagggttggtacaacctaaatctctttctcctttgattcgctactgcacatcactttgcagtttttcactgttcgtcctaattaaccatgttaaaagatcagtagaaatttatcatgtttgtgagagaaaaaaaataggcaactgtaaaatagtactatatgttaatgatctaaaaaagagtagtaagatctcgaatgctcaactttcttgtactattctgataatctaatgctgggaggattagatttactacatctgcatgatttggtttccatctcgtgagatctgtttgttaagtgaaatctgcaaggttacgagcggaacagcatatatatatataccccagactatctattggggtgtgtttgacccgaatttgtcatttctttgcagctaatcattgtctgttggtgtgctgtaatagatcattgcttagtgatttttaaaaacaaggcatatagaatttttttataccaaattttacattcctaataaaacataaaaaattaattataatagtatatatatttttttttctaataaattttatttaagcatggctgtgtgaatatgcatgggttaacacaaacaagtagttgtatctatgtacatggtttctattgcatgctgctcgatctgacatacatagattacatgcagagaggatggtgcaaatgatgctcggccaaatgtccgcatcgccctctattattacaactgcaatcatccgggtgctgagttcgattgtgtcaggtccctgagtgctcattttgcttctttcagaggtgaaatttggtcccacgtcaacttcctggctcgcaggaggggttgtattgatgcccccgtacttcgcttcttcgctgagctattctactatggccctctcgttgaaacacccgttgtcgtgtcatgcatcgtattacgggaggaaccactgttcgtcgtcaggagaatagaaggtcttcaagagccagtacaccacaccactaaaagggaactgtcgataacagaagagccagggagaacagaaacggttcaagaggcgccgctggtccagtacagaagcagttgtgcgttttgcagcgaccggcattacgaggttttgcaccccagcgaggaggaattcgtgtgtggaaaggagggccaggaagtggagccatccgggtggttctactggatgatggacatcggcggaaggttacccgatcgcatccttgtcagaccaagatgttttttggatgatgtgagcgatttttgctctttcgtattttatgtatttttcatatggctcgccagactagcgagtgcaatcaaagtaagtagcataggttagttgatgtaccaagttatttacccggcccgctcaatctacggatgaaaacggattgaaattggatggaaattagctctagctgtattatattcattttcatatttttggaaacagaattgaattaaaaattcccagttgaatc

SEQ ID NO: 27413 - DNA, 2268 bp, Oryza sativa
  ref <308>: DATABASE ACCESSION NUMBER: AK102855
  ref <309>: DATABASE ENTRY DATE: 2002-08-28
gctatgtccgaagactatcgtcgcaattgtcagtgtccacacgtggttcaacaaatggttttaataaatatcaaggatatgttgcggtccatgggcaaagatatacggtcgtttcctcttcctggggtcgatatgctacacgacacgacaaatggtgtccctaaggagatcattgaggaatccatgatcaaggtggaccctgaggacacagctttgtgcaactccctcaacaccgagcaaagggccgcctacgatgagattctagctacagttgatcacaacgaaggaggcctattcttcatagatggcccaggaggcacaggaaaaacttttctatacagggcattgctcgcaacagttcgtgaacaaggaaagattgctatcgcgacagctacctctggtgttgccgcttccataatgcccggaggaaggactgcacactctcgattcaagataccactaaggatagatgatggggctatttgtactttcacaaaacaaagtggaacagccaagttgctacaaatggcatcgttgatcatttgggacgaagcctctatgactaagaggcaagcggtggaggcactggataatagtatgcgagacataatggacaagccaaaccttccattcggtgggaaaacagttgtttggaggtgattttagacaagttctccccattgtacgacatgggtcaaggggtcagatattagatgcatcattgcggaggtccaacttatggggttgcatgcgtcacttgcaattggtacgcaacatgagggcacaaaacgatccttggtttgtagaatatctactacggatcggtaatggcactgaagagatcaacgataatggtgatatacatcttcctgacaatatatgtgtgccatacacaggggatgacagtgacctagataaattgatggagagtgtttatccaacgctcaatgattgcctagctgatccaaattacatcacatcaagagctattttatccacacggaacgactgtgtggacaacataaatctgaaaatgattgaccgctttcaaggggaggagatggtgtatcacagctttgatagtgcggaagatgatcctcataactactatcccccaaaattccttaacactcttaccccatatggactgcctccacacatgctaaagctcaaaattaattgtcctatcatattgctcaggaatatcgacccagctaatggactttgtaatggcacaaggttggtggtgcgaggatttcagaaaaatgccattgatgtagaaattgtgctaggacaacattctaggacacgagttctcttgccttgaatcccactatgcccttctgatcatgagatgttcccgttccgatttaaaaggaaacaatttccggtcaggctcagctttgccatgacgataaacaaggcacaagggcagagcataccaaatgtcggcgtgtacttacctgaaccagtattctctcacggtcagctatatgtcgcactttcgagagccaccgcaagaaagaatataaagatcctcgttgtacatgacgacaatccaaagaaaaggaatagacattctgagcagaatttgaatgagaacaatccgaagaagcattctgacaaccttaagagtgggacatatacaagaaatattgtgtatacagaggtcctcacaacatagctggtgtatttgggaaataagaattgtcactgttctagagatagctggtgtatttatattatatgagattattatgaggagttcatactctcatgcataaatatcgatgtgtcacataacttcaaaacttttgatacataagcacttcatgataaatttacctcctctttcatttttcctagatagaaaccatgaatatcgaggtcatattaacattaacagattggaaaggtactgacaaaaatggaattgcaacagcacgacaattcaattttcgtttgtcccgttaataacaaattttaacagttcaattttcgtttgtcctgtttattattataacagttgatgttgagggacatgggagtgaataagactgctaggaagaaacggagaaaaggaacatgcagaagattcagtttctagctagcctaggattgactacaatgtctcaaaatgcaaactggtaagttagcttctcttttcccgttgataccattgtttttgctaccctactaactcttagatttttgcagattttcacccctgtagaatactgcagtacatgtccactaccgtaaccttgc

SEQ ID NO: 27414 - DNA, 2166 bp, Oryza sativa
  ref <308>: DATABASE ACCESSION NUMBER: AK102856
  ref <309>: DATABASE ENTRY DATE: 2002-08-28
ggcgaccgaaatggccgccaccgccgccgccgccgccggagttgccgttgccggcgaccgcgcgcgccggcggcagtggaggtacacgtgggagagcctagcgcacctcccgctcctacgcctctacctcttccgcccggagctctccgccgccgcggccgccgaccacctccgcgccgacctccgcctcgacgactcgctcctcctcctctccttctcgctcgccggggaaccagtcgccctcagggtccccgtcccgagggtgctcgtcgacccctccgcccctcccgagtgccgcgacgcgggggaccatgtcgaggtccgcctcgcgctcgtcctccccgtcgaccaccccgtcgtcgccgccgccttcctaccgccccccggcgaggagccgcccgcgcctctctccctccgcgatgatataaagaatctgtcttctggagatgttcacttgtactgcaaagcatgctcagcaagattgacaaaacagccactaaggaacatcgaggaaatgccatcgttaaactgggaagatgtggctgacaattggtttggtggatgttgcacctcatttggaggtgcaagcgaaaagctagtatcacagtatatcaatgcatatgggcgtctagagggaacaagtctactaaatgctacctccattagcatagaaaaggattatcttgagaaggatttagcatctgggttagttagttcagtgcccagtaacgattgtgatgctctgcaggaagatatatgtgatgttcacataggagaagatcataccacggggaacatggaatttaatagttcagaagagaaagcatatcatgaaaagcagattggttgtaatcatgtgcaatgttctgttgttcctgaagagggtccttgtgtcagtaatagtgaaaaagatggagacactctttggactgatcaatctggcatcattaaagtgaaccccgaggagtctaaaaatgactcttgtgttgatgacatagagaaacctaccaaagagaccgatttgttgtctgtagatccatgcaattgctgttgtgacggtggaaacagcagaaaatctgaagacaatccttcgaacgtgccctctgggaacctggaaatgcaggctaaattggacacccaaagagattacaaattaacaaaaagtatatctcttggttgtagcttcattgtgaaagcatctaaccttgtaaatgatgttgaatggcttgaacttctatgtgctcattgctcatcacctattgggtcatacccttcacaacattcacatgctccagcagatggccgtgtacgactatttaaatgctatgcatcgtcagaccttcatgttgggggacctcatgatgtgttcagggggcatacattagaaagactttttgttaatttgttgcttgaagttgcagaagatgaaatatcttttcgtacattagtcagagatctgaaaaccaaaaggcccatccttcaaatagtcctccttagttcaaaagcgtggctgttttctggctactgctatgaaaatgatatggatggttcacatggggcagcacatctgcagccctctgttaagatcttgtattctaattgcagtaatgctttggaagaagacttaaggacagtagaggagtggtcatccaaatatagggctgaagagttgtacatgatgaggcgtcaaatagatgagcttattctaagcctcaactcagctagggataattttccactttcttgctcttccctccagggaatgtacctctcatccctagagcgttgacttgaaaatgagataagctcggatcatgtcctcatgccctaatacctgtgcatacacagttttaatattctttcagtgaactcattgaccatctcataagtaaactgcaatacattgggcttgtcttttgccgtcaaaagacagagtggcatcgaaatggagtaatggaacagagcaatggtggatccagctaccagtgaattctggctcattatgctttcggtagtaggttgttttattcaaccatctggttatctacttcatacagtatttgacatctcgctgtatctctgaagaattaggtgatcctgcttgcagtctgtatcctggtatacgtttagattttctcccttaatggagctaattttgattcttcc

SEQ ID NO: 27415 - DNA, 1985 bp, Oryza sativa
  ref <308>: DATABASE ACCESSION NUMBER: AK102857
  ref <309>: DATABASE ENTRY DATE: 2002-08-28
ggtcttcttcccccccttcctctccaccacccccgattcgtcgtccaccaccgttcgacgagtttctcgcagatcgggcgggggcgcgccgggatggcgtacatgtgcgcggacagcggcaacctcatggccatcgcgcagcaggtgatccagcagcagcagcagcagcaacagcagcagcagaggcaccaccaccaccaccatctgccgccgccgccgccgccgcagtcgatggcgccgcaccaccaccagcagaagcaccaccaccaccaccagcagatgccggcgatgccgcaggcgccgccctcgtcgcacggccagatcccgggccagctcgcgtacggtggcggcgcggcgtggcccgccggggagcacttcttcgcggacgcgttcggggcgtccgccggcgacgcggtgttctccgacctcgcggcggccgcggacttcgactctgatgggtggatggagagccttattggggacgcccccttccaggactccgacctggaacgcctcatcttcaccaccccgccgccgcccgtgccgtccccaccccccacgcatgccgccgccaccgccaccgccaccgccgccaccgccgctcctcgacctgaggctgcaccggctttgctcccccagcctgctgctgcgaccccggtggcgtgttcgtctccgagtccgagttccgcggacgcctcctgctccgctcccatcctccagtccctcctgtcctgctcccgcgcggcggcgaccgaccctggcctcgccgccgcggagctcgccagcgtccgcgccgccgcgactgacgccggggacccatctgagcgcttggccttctacttcgctgacgcgcttagtcgccgccttgcgtgcggcaccggagctccgccctccgcggagccggacgcgcggttcgcctccgacgagctcacgctctgctacaagacgctcaacgacgcctgcccctactccaagttcgcgcacctcaccgccaaccaggccatcctggaggccacaggcgcggcgaccaagatccacatagttgacttcgggatcgtgcagggcatccagtgggcggcgctgcttcaggcgctcgccacccggcccgaggggaagccaacgcggatacggatcaccggcgtcccctcgccgctcctggggccgcagcccgcggcgtccctcgccgccaccaatacccgtctccgtgacttcgccaagctcctcggggtggacttcgagttcgtcccattgctccggcctgtgcacgagctcaacaagtcggatttcttggttgaacctgacgaggccgtggccgtcaatttcatgctgcagctgtaccaccttcttggcgactcggacgagctagtgagaagagtgcttcgtcttgccaaatcgctcagtccagcagtggtcacacttggagagtacgaggtcagcctgaaccgagctgggttcgtcgaccggttcgccaatgcgttgagctattaccggtcattgttcgagtcgctggatgtggcaatgacccgggactcaccggagagggtgagggtggagcgttggatgttcggggagcgaattcagagggccgtcgggccggaggaaggcgcagaccggacggagaggatggccggcagcagcgagtggcagaccctgatggagtggtgcggcttcgagcccgtgccgctcagcaactatgccaggagccaggctgatcttttgctctggaactatgattccaagtacaagtattcacttgttgagttgccaccggcgttcttgtccttggcatgggagaaacggccattgcttactgtgtctgcttggaggtgagggtagtttttttgggagtatttgggggaatgtgtggcgttgtgatagaacctgggaggaaatagttaggagaaatcattttgcagcttttgttgtagtttcctccaaaactgtgtttaggatgattggtataattgggaaattttagctgaatt

SEQ ID NO: 27416 - DNA, 783 bp, Oryza sativa
  ref <308>: DATABASE ACCESSION NUMBER: AK102858
  ref <309>: DATABASE ENTRY DATE: 2002-08-28
ggtgtaggccgaagctcccagaagatgccactcctcccctccccgctcggatctctctccgccgccgccaccgccgccccacgccgcgccgccgcggctgccgggctctcgccgctcctactccggcgccgcgcccctatcgccggcgctctcctcttcctcagcctcggcgccttcgcaggggtgagaagtctcagctcttcagcttctgctcgaatggagtctacttccaccactgtgccttccattgttgtgtatgtgacagttcctaataaagaagcaggaaagaggctagctgggagcattataagtgagaagcttgctgcttgtgtgaacatagtgcctggtattgaatctgtttactggtgggaaggaaaggtgcaaactgatgctgaagaactgctcatcataaagacaagggagtctcttcttgatgcgttgaccgaacacgtgaaagccaaccatgagtatgacgttcctgaagtcatcgcgctgcccataaaaggaggcaacctcaagtacctggagtggctaaagaacagcactagggaaagctaactctgtgccgtggcatgctttttcactacatttcgaagcgtctggtgatacgtatactctgcatctccatggcttcggtgtgaagtgtgatggattttcctatcttttacagcttatgtcaaataaactgtagtagcgtgcgtgcatggcagatgttgtacatgaaaccctctcgtgtttgtggagttagacgacatttcgtttctatttgatttttttttgggt

SEQ ID NO: 27417 - DNA, 2516 bp, Oryza sativa
  ref <308>: DATABASE ACCESSION NUMBER: AK102859
  ref <309>: DATABASE ENTRY DATE: 2002-08-28
gtgcctagccgacggcggcctcgcactcgccggcgccggcgccggcgccgccatgctccgcctccagaaccacctcctcccacttctccgcgcttcctcctcctcctcccctgtacacctccgccgcctaatcccatccaccgccgccgcatcctcttcctcctctgtgcaccccaaccgccgcctccactccaccgccgccgccaggtccaccaccaccgcgacacccttctccatggaggactacctcgtcgacacctgcggcctcaccgccgcccaggcgctcaaagcctccaagaacgtctcccacctcaagtccgccaccaagccggacgcggtgctcgccatcctctccggggtcggcctctccggcgcggacctcgccgcggtcttcgccgccgagccacggctcctctgcaccaaggcgcccagcgtcgccctccgcgtcgcctccctccgccaccgcgtcggcttgtccgacccccagatcgccagcctcctcctcctgcccggcggcgccaagggcttccacacatgcgacatggccccgaggctcgagttctggatccccttcttgggatccttcgagatgctcgatcttgaagaggaacaacgcgattgtcagctcgagcctcgagaaggttatcaagcccaacatcgcgctgctccgggagtgcgggctaaagtgtttgtgatattgtccagatgtcccagacgtccgcgcgggtcctcacgttcagcccagagagattgaaggttatcgtgcagcaagctgagaaactccgcatgccgggttgctcatgggcattcaagaacgctgtgggcgccgttgcccgtagcaatgaaggcattgtcaatgcgaggatggagttcttgagcagttctcttggttgctccatggaaaagctccgctctgcggtctgcaagtgtccacaaattctgggattatctgagagcaaacttcacagtaaaatagagttcttggttggcaaagtcggattggagcctgactacattttgcagaggcctgtactgcttacgtacagcctggagaagcggttgctgccgaggcattatgttgtagaagtccttctggtgaagggattgataaaaaaaactgttgatttttacggttgtgtatgtgtgagcaacgaagattttgtagcaaggtacattgatcaccatgagaatgctgttccagggctcgcagatgcctatgctgcagtttgttctgggaaattgcctgcgttggtctaactctacatcttcagacagagatattggaggttcatcagtggaagtgccttcaaagtataactattagcctattttgatgggcatattggagatcaattatctttcaagcctagagctattgcaccaatttgttctctgaggctcattagttgatgttaattcctggcaagtttcaatcatcgatattatgcagcaactggactgttttaatgttgcggcccttacttctcatttcatggatcggtacttcaacagctatttccctgttcagacaattgatcaggaacaggtgtggaagatggaacaaggtgatattgccttggttgctgcaacagatggctgccactccttgtgttgaagcctgaaggcaagccaaaaaataggccaggccttctgcggagatgcctgaagcatcgaactgcagtgtctcacactggttttgcagtactagcaggttaaaacaaatcttccatcctgcagccggtaggattgaaaaggtctcataagtaatgatgagaagttttgaaatagcgtaaacatattaaggggtggcgattatgtgatgttgtcagactctaggaaatcagtagaacatcaaggctttatggttgatttgaagtcgatgtggttcaacttctatccagatcaagtgaagggctttctgcagcattctgagaaacaaccacagattctactctctcttttttttttcctgatgagaaactccacagaaagataaagagttcttggttaccgaagttgggctgcatggtgaggcctgcaatgctcttgttcagcctggagatgatgctcttgttcagcctagagaagtggttggtgccaaggcataatgttgtggagttgttgatggaaaagatgttgacttgaactataatctcttctggtgagaacgatttcttagcaagatacattgaccatcgcaagggtagtactgttcatggactagcagatggtcatgctgcagtttgtgctgggaaagtgcctacaaaagccctagcttagcatatctggacctagatactggaggttcattccatctttctggctcataggctcatagctaagacctcgctgtaaacctggttgagttaatgtaattccttgtaatgtcttccaaatcttgatttagtattatagtaacaactaactatcttatccttcttagtgctatgcaagttcaattcgtggagtatgcagcaactttattatcttaattttgatgctctgctgctcctgtg

SEQ ID NO: 27418 - DNA, 3284 bp, Oryza sativa
  ref <308>: DATABASE ACCESSION NUMBER: AK102860
  ref <309>: DATABASE ENTRY DATE: 2002-08-28
gggattctccaggttcaggttcgtctcccacccttcgtctccacagccacatcctctctcgcaccggaggaccggacgtgcgctaggtgttccgtttccggacgcgtgaacggtgaattgggcgcgcgatcgcggtgcttacgcgtgtggggttagttggatttgtgggtttaaccggttgatctgtcaaggcgcggggagagcgcaccacgtgagcacgcgatcgaaccctacgcgtgtgcgcttgtcgagtgcctgattggtacgcattccagtccagtattcagatgaggtgatcggaacctttactgagggttacgagggcgcttcaatcaattgatgaatagcgagcgctcgtggggaattggtctcacgggataggtagaatcaattttttaggcaaaatgcacatagaaactgcggagggtgtttagatatgtcttccaggtatctccattgcccggaggcccagacattacctgtgcgttttgctgcatgtacgttcggcttcagttgtcagtttgagcaatggtgaacgttctcgttagcatggtttttatggcagagtaggttggttcctgtgtaatgcacaagcgaatagtctagaaatgcctagtgcttactacatgtcatcctgttgctagttgcaacgtgcaacctgtcagctctgaattcttctgatcaccatagtccatgtgtggctctatatatgggctctgcacatgtacgctccatgctgatactgtcaaccattgccatgcagactgagcatgctctcagctttcaaggaacgtggaaagcagactgttgagcagggagtatatatcatgtgttaccttttttctttggggtgtgtgtgtgagtacagttcagcgagcttgcttcaccttcgtctggttgcgtgtgcgcgcgcacacgctatgtccactatgtttgcaggtaacaaacacctttggcaatgtggtgttcgcaggtaacatatattttcccctcgcaagcaaaatttttaaaagaagctaatggctagttttcagcactagtatcaggtttttctttctgcatgcggattgctttttggcaatttttttaagaactgagccttttagcaattctcgccctgctttcggcaaccattgtcaaagtaacaattttgtaacttgtacccctgtttatcttaatgaaatttggtcggccttgctggccgacctggcaaaaaaatatatttccccctccagttgttaaaaatcttaagatactagcagcatgttcttttgaattgtatttataggtttttattttatttttcgttgcatacaaggctagttctctatacatattagaaatggtcagttcgtttcctgcaatgtttttgttttatggtggaatatttgatggacaggattggcctatctcacttcctatctcaaagcgaagaagcacaattcctgcatattctctaaaaacagtaagaagataggataggtggggggtgaccacacaaaaacaacccagtaattagctagagctaagctgctcccaaaaaaaaaagttgtgccatcctcttattattccgtatgtgcattagaatttattatttgacacatactaattccttttgtcattgtcatattgtcaatgaaacatttaaacaccacattaatgtctccccatcctaagattttgttttcagttgcattgtcatttagatataatcactcctatgggtttttgcagtcctgttagaagctcttcttgctagtttattctgcttgactgcttgtaagttgatttgttgaatgcttcattgaagattctttctgaaaatgtaatcataacttaattgttccatcttcgccgcaaaaaagaagaagaagaaaacattggattgttccatctattttgattgcgttatgactttctaggcaactacaatatatatattcttcagtaattttgcaatatagtacaaaagatttagctatatataagtttactttacaaggcaaaatttgtgtacactttcaatttgaatgcagttttgtgtcctcaatgtaaatttccaatctattataataaaaatgtgcttgatgcttttaaaaagaaagtttctgtttcatgggaattcatgtacccaatatcgaatgccctgtgttgcaatgatttgaaaattgctactaaaatcattaccgtagtatacaaagttctacaaacctgcaattcaatatcaagtttgatctagaagtaaaggaaaaaagaagacaagaaccaatgtgaatggttcatcatgtcccaagtacaacttgccttgtttggatcttgacgtgtgggatgaatctggcattcattttcctttttgcatgtctgtacaactttatgtatacttcactcatgattattgaatactgcaaatgttggatttcactatttctgcaacggggttgtagccacatgtgcagggcacagaaatgtttagttttggttgttattgcgacctatgttctccaatacatgttgtttcctattatgccaagttgactgggttaattagtgtcaactctgaatacagaaaggttgttttgttgcttcataattttgtgaagctcatgtacatacttcggtaattcaacaatcctatgtaactgagcctagcttggtggaaggtcagcatctccaccctccacaacacctgggtttgacctcgctttgagcttaggttccttttttcttcttagtggagaaaatcctaatttctcttatgtattctttcttgcattgagattcctgaatacctgttgatagttttatttatagttggcaaatttgactgaatcatccagttgatcccagattattcacatgtttcatatacagcacaagttcgttccatattgagaaaggtttgcaagactgtgaactagatatatgagccatctttcagttattattattaaattggatgccaacattgcgtcaaaaaaaaaaaaaatggatgccaacagaatatgaggaactggaaggcaccagccctcagttttccttcaacaggcatgcaaggtacagaacctgaggtggagaatgaaatttcaggattcaaactccaggaatttaatgatgaattttaggtggatggaatcttatatggtcaactttgtaaaagaaaggttcctttgttttgaggcatctgcttaagatgtttaaattcatgctttatgcctttgttttcttttcctttttctggagagacacaatggctattgttttcaatataaccttctttcagagcc

SEQ ID NO: 27419 - DNA, 3066 bp, Oryza sativa
  ref <308>: DATABASE ACCESSION NUMBER: AK102861
  ref <309>: DATABASE ENTRY DATE: 2002-08-28
gggtgggtgtgggcagtacaccaaacgggaacaggaggcggcgacgagggttttgctgctcctcccctccgcaaaccttgtgcgcggcggcgacgccacagggggagctcgccgccttcggatcgagagggaggaggggcggcggagcgggtggtggggaggcgacatgagaggcgggggcggccggggcgggggcgggggcggcggtgggagggtgcccttctacgccgcggcggcggcggcggagccggcgtcgaggaagctggtgcaggggcttaaggggatcctgaccgaccgctccgaggccgagatctacgccacgctcctggattgcggcatggaccccgacgtcgccgtcgagcgcctcatctcgcaagatccttttcatgaagtgagaagaaagcgtgacaagaaaaaggagatcaaagcacctcaggaaaccaggcctcggccattttataaacctgcatttcgaggatctaagactggaggagattcaactggcagtggtaaaggccctaccaagaaagaaacggagttacattctcttcctaaatcatcagtctctgattctgtgaaggaaagcaatccaactgagaagatttcagcagccgaccatgctactatcaatgacagtcttattttatcaagtggccaagctgatgcaaagtccactcctctccagcccccttctcaagtgaagcatggttggggtgggatgccagggcgcccttccatggctgatattgtcaagatgggcaaaccccaagctaaacctgtgagatctgttgcatgtaataccgggatgccaaccattggtggttcagtcatttccaatgcaacaaatcatacttcaaaagattcacaagacctagttttgccttcacaagtgaactctgttgcaactgatagaataccaaatggtaccaatgaggtctcccctgcatctaatgactcctctattgatgtattacctcccagagaggggttggaggtgccagaatctgtcgccacagttaaacctggatcgtcaactgcagatgtttacaaagatgaagttgaagaagacatggattctgataaaaataaggatatgagtgcaagcaatgcagacgatcgaacatcttcaggaccatatcctgcatctagcaaagaagtacactcagaacatactcaaattgccacccatcacaatgacttgatagtggaaacagaggactctcagtctgatggcaatgcatttgagaataaccgtgttgcagattcagagggaaatatgtctgctactgacaaacagtttgaacagttgattctacatgaggaaaaaaaatcaaaatcatctgaagataacccggctgtaataattcctgatcatcttcaggtttcaaatgctgattgtgcacacttgacatttggtagttttgtgtctggaacacttgatgcgccagtctccttgaaaactgccaatggtgatgaggaggttgcagcagtttctgataaccattcgattgatcagtcagatgtcagaatccatgagtacgaaaataaggatacagtagcacctgcagctgacgaacatgttgcctcttcaacaaaaagtgacacggagaatgttgatgttgcacctgtacaacagcctgaattgagaacagccgatttaatagatgttccaaacaacaccatgtacaataatttatcaacctccgattatgcaactccaagtgcagtgcgaccagattcttccgcacacatttatctgcaagaacatcgacaattgcaaaacatttcccctctctctagctttatgcaaggaaatatcccgaatggactattgccaccagcacttccacctttgcgtgactttgatcctgctttctcattattacttactaacccaccattggctacgatggttcatggcacaacatcatcgtccatgggcaatgcaactactgtttctacacaaccacaagagattgtgaatccaggtgcttcatccaaccctcaattgaatcaatctcagccaagcaccagcaccagcattgcttctggtcctccactccctcagcatctcacgcttcacccttatgctcaagcaactcttcctcttgggtatgcaagcatgattggctacccatctctagccccaagttatacatatctcccgcctcctgcctttcagcaaccatacatgaacagtggcctattccaccaagcagcagctgcagttcccaattccagtgtaaaatatcctttgccacagtacaaaggcaatgtttcccttgcgagcttaccccagcaagcctcactgctctcaagctatgttgggggctttggagctgcaagcagcatgccaggaaattttgccctgaaccaaagcacaccatcagcaaccgctgctcctgggtttgatggaacagtgcccgcgcaatacaaagaagggaatcaatttgtatctcttcagcagagcgagaacgctgcgatgtggatgcatggtgccagttcgcgaacaatgccacctcttgcagcaaatgccttgtattatcaagggcagcagggtcaccagggcggccttcggcaggggcagctgccttcacagtttggtgctccacttgcaccgacacagcccggcctgggccatgagcaccggaaccctagtgacggcaacttaagctctgctgccgctgccgctcaggctaaccaaatgtggccaaatagttactgacccagcctttgaaacccttttgagtgtgtggtcctgttgtggtgcgtgctacgtcagagatgccatgcaatgcttttggcctgattcaggcgcctgaatagcaactgtgtatatgagttgctatgtcgacattttggagaggcagaggagatgtatgtttgatcatcatgttctactacccttagcattttctaggatggcctaaaactgtagctctatttatttatattctgatagaaaggaccgttctttctcagtttgttttgttcttccgtttacatatcatgtaaacaataaaactgagatatctaacaaagcagcaccatgaatgaatttcaagg

SEQ ID NO: 27420 - DNA, 1176 bp, Oryza sativa
  ref <308>: DATABASE ACCESSION NUMBER: AK102862
  ref <309>: DATABASE ENTRY DATE: 2002-08-28
gaccaaaaatcatccccaatcttacatcaactacctacttcctacgtagcccagtaactatacattattaaggctaaccagtaactaactaaggcacacgtacgcaatggtggcgctcggacgccgttcatggctggtcccgctggccatggtgctcgccgtctccagctgcctcgccggcccggcgatggccgccggaaagaccgggcagatgaccgtgttctggggccgtaacaagaacgagggaaccctcaaggagacctgcgacaccggcctctacaccaccgtcgtcatctccttctacagcgtgttcggccacggccgctactggggcgacctctccggccacgacctccgcgtcatcggcgccgacatcaagcactgccagtccaagaacatcttcgtcttcctctccatcggcggcgccggcaaggactactccctcccgacctccaagtccgccgccgacgtcgccgacaacatctggaacgcccacatggacggccgccgccccggcgtgttccgccccttcggcgacgccgccgtcgacggcatcgacttcttcatcgaccagggcgcgcccgaccactacgacgacctcgcccgcaacctctacgcctacaacaagatgtaccgcgcccggacgccggtgaggttgacggcgacggtgcgctgcgcgttcccggacccgaggatgaagaaggcgctggacaccaagctgttcgagcgcatccacgtccgcttctacgacgacgccacctgctcctacaaccacgcggggctcgccggcgtcatggcgcagtggaacaagtggacggcgaggtaccccggcagccacgtctacctgggcctcgcggcggcgaacgtgccggggaagaacgacaacgtgttcatcaagcagctctactacgatctgcttcccaatgtgcagaaggcgaagaactatggcggaatcatgctctgggacaggttctacgacaagcagaccggttacggcaaaaccgtcaagtactgggcttaattaattaacctactactactatttactgctactatgcgttaatttgtgcgtgtgtgtttgagaataaaatatgttggtgtgtgttggtttttttatgtaggtatatgaataaaacgagatccatatgtaacgatggagatctcgagttgtttgtt

SEQ ID NO: 27421 - DNA, 2551 bp, Oryza sativa
  ref <308>: DATABASE ACCESSION NUMBER: AK102863
  ref <309>: DATABASE ENTRY DATE: 2002-08-28
ggcatgcgagcgtgatcacgaatgccaccggactggtcgcgcctcggactggaggaggcgctcgccgcggcggcgctgctgctccgatcgtgctcccctcgccgcgctgtcctccgccgcgcgcgcgcggtccacgcgctcctcgtggtctcctccacgccctcgtcgcccgcgctgaccaccttcctcgccaaccagctgctctccctctacgcccgcctctccgccgtccccgacgccctcgcgctcctccgctccacgccgcgcccctccgtcgtctcctacaacaccgtcctctccgcgctctcccgcgccccgcgccacgcgcccgagggtctccgcctcttccgccgcctgcacgcgtcgggcctccgccccaccgcacctagcctctgcgccctcctgcgcaccgccggcgaactgcgcgaccgtcgcgcgggggccgccgcgcactcgcaggccgcgacgctcggccttcctcgcgagcgacatcgtgcccactgcgctgctgcagatgtactcccagtgcggcgcgccgagggacgccaaccaggtgttcgacgaaatggcgacgcgggatggggtggcgtggaactgcgtgatgcactgcaatgtgcggtatggctaccttgaccgcgctctaggtcagttttgccggatggtgaggggtggattgccacccaccgagagcacgctctcgtcagtgctgagtggttgtggacgagctggggattgcctccgagggcgtgtgctccatggatgggtggtgaagttggaggagcttgatcctgacatgccactacagaacgcgctgctcgacatgtactcaagctgtggtgatctggatactgcactgcgcgtgtttgagagaattgagacgccggacttggtgtcatggaatactctgattgctgggttttctggagttggggatgggtgcagcgctgtgcatgcctttgtgcagctgaaggctgtacagttcgatgaacgagttgtccctgatgagtacacgcttgcagctgtggtgtctgcttctgctactttgcctgcaatgtttggtgggaagccgcttcatgccaagtgatcaaagctggactggagaacagcgtgtttgtagggaacacactgctcaacatgtattttacaaacgatgatccccattctgcacggattttgtttgattccattacccaggaggatgtaatcatgtggactgagatggttgcaggccactcctcattgggtgagggagaattggccttaaggtactttgttagcatgcttcaggaaggttacaaggtcgacagcttctctttgagcagtgctttaaactccacgaccgagcttgcaggccttaaacaaggagagatgctccatgctcaagtggtaaaaagtggttatgaaggcaatatttgtgcctccggaagcctagttgacatgtatgcaaaaaatggtgctctcccaggggcttatttggtgtttcgtaacatacaaagaccagatttgaagtgctggaattctataattggaggatacggtaaccatgggaattctgaaatggcatttaagttatttggtgagatgattcgggatgggctgcaacctgaccatgtaacttacatctccatcctctctgcatgtagccactgcggactagttgagaaaggaaaattctattggttctgtatgatgactgatggtattgtgcctgggttcaagcactacactagcatggtcagtttgttgggtagggcaggtttgttggatgaagcagttgatttaatgatgaaatcccctttcgccaagaaatgccctgaactatggagaattctgctaagctcctgtataacatttagaaatttatccattggtgttcatgctgctgaacaggcgctagagcaggacccagatgatatttcaacacacatattgctttcaaacctttacgcctctttaggtaaatgggactttgttgctgaaattaggaaaagaatgagagggctaatggctgataaggagcctgggctgagctgggtcgagatgaaaaatgtggttcatgtcttctctgcagacgatgaatgccactctcatatagatgattgccacagcgaattgcttagacttaaaggaaacatggaattattggatacttgtgaaaatgagttcatgtcaagtggctaagttgcatgaacagattagaggatttcatttgcttcctttggtcctatgacttatggcaacaaaatagacttatacaagattttgagcataagaaaggtattatctgtgaagggacaacctatcgatttaatggttccaactttcaaattagcgctcccggcagcattggaggcaggaaagagacactaaaggtatcaagctccatcaaacaagatatagatgtgcaaataacccaaaaaagggacagaattctgggtcagtgctctagtgtctttctccgttacatcaatgcaactgcttgctccttttttgtgtatatatgtgatcagcagcagcatttcttgctatggatatgttttgagtaaatttc

SEQ ID NO: 27422 - DNA, 1281 bp, Oryza sativa
  ref <308>: DATABASE ACCESSION NUMBER: AK102864
  ref <309>: DATABASE ENTRY DATE: 2002-08-28
gagttgcgaagaaagcagtctagaaaggtgaagatagctaaacggtgtgacaagcaaggtaatagaaaggcgcgatcatggcgagtgccaaggcgatggcgcaggatgagcatcactttgttctgaagagtggtcatgccatccctgcagttgggttaggcacttggagggccggctcagatactgctcactccgttcagacagccatcactgaggctggatacaggcatgtagatacggctgctcaatatggaatagaacaggaggtcggcaaagggcttaaagctgcgatggaagctggaatcaacaggaaagatttgtttgtgacgtcaaaaatatggtgcacaaacttggctcctgagagagttcgaccagcattaaagaacacgctgaaggatctccagttggattatatcgacctttaccttattcattggcccttccgtctaaaagatggagcacaccagcctcctgaggctggggaagtcttggagtttgacatggaggcagtatggagggaaatggagagacttgtgacagatggactggttaaggacattggtgtctgcaatttctcagttaccaagctcaacagactgttgcaatcagctaatattccacctgcagtatgccagatggaaatgcaccctggttggaagaacaataagattttcgaggcctgcaaaaaacatggaattcatgttactgcctactccccactgggttcttctgaaaagaaccttgcgcatgatccagttgtcgagaagatagccaacaagctgaacaagactccaggtcaagtgctcatcaagtgggctctccaaaggggaacaagcgttattccaaaatcaactaaagatgaaaggattaaggagaatatgcaggtgtttggatgggagatccctgaagaggacttccaggtcttgtgcggcatcaaagatgagaagcgagtcctgacaggagaggagctcttcgtgaacaagacccatgggccatacaagagtgcatctgaggtctgggataacgaggactaagctgccatgtttcacccaaagatatggcaaataatggttatgatgttggtcatgcacgaaggagttatgtgatgttctccaagcactgtgacgaaaccagctaactcagcacaagatgtactactatgtgtaaaactagtattgttctatgtgtgctcttcttcaagctttgtgtaaccagcttctcagcacaagatgtacagccagtgctgtaagataaataaaagtatcatggctttgccgttgc

SEQ ID NO: 27423 - DNA, 2113 bp, Oryza sativa
  ref <308>: DATABASE ACCESSION NUMBER: AK102865
  ref <309>: DATABASE ENTRY DATE: 2002-08-28
gaggtggcctcctccccgcgattcccgtgtgaatttgctctttcttcccggatttttcgactttcttcttcttcttggtttgctcttcttctttcttggcggtctgcacccattcggagtccgagctcatctccgagtccatggcgcctctcgccttcgatggctggaactgaaatactaggcattagcgccacttatcttgcttcgatttggtaaattttgctcgattccttcatcgtggagttgtgctgttcttcgtactggaggtgtgtcctttttaatgattgctaatattcttggaaagcaggcacgcctgccattgctgaactcgatgttttctcatcgattggtcgggatattgccgttgatagattcccctgcagtgctccttttcgtctcttccattctcctctcaaattcgccttgacattttggtcggcactgtacttttgtggtggtggccactggccaacaatgttcaggcctggaacgatcgcctgtgtggctaattcggcgcgcattttgctgaaaagtttgcgggcttttatcctgtttgctgctctaccgggtcactgctctgccagttttgtctcaatttctgtgatgctttctgtgccatagctttcaaatgttggctttggtaaggaggggattgagataggttgggttatctgagtgcacacttcactaaaaagtttggatccttttgtccattctgctgtgattccgtcggaatttggcaattttcgcatcgggtggattctccccagctaagctacgagcaatgcttctcggactagagaaaaatcagcacaacggggaggacacatcgcctgaggccaacgattccggcgagctggacgaccagaggagcatggagtgctccacctccaccgaaatgtcgagcaacagtggccacagatcaagaaaccgagctcaggacgacgacagcttcgactccgagagcagctcgtcgggcccgccgacggtgaagaggccggcggcggtgaccgccttgctgccaccgttctctaggccgacgccgtcgaagtgggatgatgcagagaagtggatttctagccccacggcgaaccgcggtggccgtgtggggagtgcagctggggctgcgccgaagaaatcggcgctggcatttcctgaacatgtaagccggcctccagccgttgctaaggtggttgctgaggtccccatcaacactggaaccttggtgaagaattcagttgctctcgcacagcctatttcatttaatcctgcacaaagtgcttcgatagttgatgaaccagctcctgcagttaggtctgtttcgatgagagacatgggcacagaaatgactcctattgccagccaggagccctctcggactgggactcctattatagcttctagtccaacctcctctcggacaccaacaccacaacgtaatgcagaaatcagtattggtgaatttggtccaaataagatggaaatgtctgaggaggaactacaaatgaatacaagaaaggaaatcatggatcttggccaacggctgggaaagacaactatagctgcatgggctagcaaggaagagaaatctacaacaagtttcgcaaatgtcataaccgacaaggctgtagaaatcgacagagaggctcgtgctgcagattgggaggaggcagagaaagcaaaatatcttgcaaggtttcagagggaagaggtaaagattcaagcttgggaaaaccaccagaaagcaaaaattgaagctgaaatgaagaggatggaggcaaagatagagatcaagagagctcgcgagcaggacaggctttcgagcaagttggcagctgcaaggcaaggcagaggcgaggagggaggccgctgagtccaggaagaaccaagaagcagcaagaactgaagagcaggcggctcagatccggaaaaccgggcacataccttcctcaatctcctgctggtgctggtgcctgtgattcttcactctgccatgatcatctgttatttgggtagaagaaaaatacttgctccttgcacgaccatgtaaaatattcgctactggttggttcatcgttcagtgatcaatgccaatgagtcgccatttttgtcc

SEQ ID NO: 27424 - DNA, 2274 bp, Oryza sativa
  ref <308>: DATABASE ACCESSION NUMBER: AK102866
  ref <309>: DATABASE ENTRY DATE: 2002-08-28
ggtcggcgtcccggcgcgccctttccccttccccttcccgcgccggcgtgctccctcccttccccgcaaaaccctccaaaaccctctcgaattccggcccattcccccctccctctccaacccttccaccccatgccccacccctccgccgccgcgatgctcccctcgccttcctccctcctccgcctcctccgccgcccacaccctcgcctcctccccccgccgcccccgctcctcacccgcttcctctcctcttcctcccccggcgacgccgccggatgggcctcctacgacccgctgaccgacagcctcgccccaccggcggcagccgccgccgcgtccgactcggaggcccccgcggagggcgaggcttggggcgtgttcgacgccgtgaccggccgcatcgtcatgaaggagcacccgccctactcccagccgccgccgcccggccccgacgaggagaggtccaaggtggggaggaggaggagcgctggggtgaaggacgaggcgaggtggtcgtcggtggccgccgtggggaaggcccgcggcaaggcggggaaggagagggcctcgtacgtgtgcggcaactgcggggagggcttctcgcagtggtggggcacgtgccgccactgcgaggcgatggggaccctgaccaagtacgtcccgggctctgatcctggtgcctccgtggggtcacaccatgccttccggtcgtggattccgcagaagagcaaggagatggtgccccagagccttcagcaagtgaccaagggagttgatcagtccgagtggcgaataccgctgtccgggaacttcggaatggagattgctcgagtgcttgggggtggggttgttcctgggtccttgattctagtaggtggggatccaggtgtaggaaaaagttcattgatattacagcttgcttctatcatgtccgagaatattggtgctggggagtcttctgctatcgtatatgtgtctggcgaggagagcattgagcaaattggaaacagggctgatcggatgagtatcaagtctagaaatttgtacttgtattctagtacagatatcgaggatatcttggacaaaatccaaccattatctcctagggcactcattattgattcaattcagacagtttatctaagaggatttgctggaagtgctgggaatatgactcaggtgaaggaatgcacctctgcgctgttaagatttgcaaaattgacaaatattcctgttatcttgattggacatgttacaaaaactggtgatattgctggtccccgtttgttagagcacattgtagatgttgttttatatatggagggagagagatgtttatctcatcggttgttgcgatcagtgaaaaatcgtttcggttcaacagacgagcttggtgtatttgaaatgtcaggatatggtctacaacctgttctgaatccaaccgagatgttcttaactgaacatgatttggattctgaaatactagctggacttgctgtggctgttgttttggatggatccaggacatttgctattgaagttcaggcattgtgtgtttcaggttctcctcgcaatggagaagttgttggtataccgagaaatagggctgatattataatctcagttcttatgaagcaagcaggtctaaaacttcaggataatgctgtttttctaaatgttgtcagtggtttcatgttgacagaaactgcaggagatctggcaatagcagcttcaatttgcagcagtttcttagaatatcctataccaaatgatattgcgtttatcggagaggttggccttggtggtgaacttagaactgtgccaagaatggacaagcgggtgctagctattgcgaagttgggatacaagaaatgcgtcgttcccaaaacctcagagaagctgctcagaccgctgaaccttgaacttgagattttgccctgcagcaacctgaaagaggtcataaacaccgtatttaggccacaaggatgatgctacactctgcttactacttgcagttgctgaccgtaggtatttagatctagtgtgcctgggtcattggccagatgctatgacgattgagagagatgatgtaactatttatactcattaacgggtttcaatgttccagccatttttgcgccagaatacggtccctttcataggaatcgtattggctatccgtgctggaatcctgaaccctttacctctaccttaagtatgtaagatgtcttctatacactagtctgaaaatgaaatttgcttgcaagcttc

SEQ ID NO: 27425 - DNA, 1537 bp, Oryza sativa
  ref <308>: DATABASE ACCESSION NUMBER: AK102867
  ref <309>: DATABASE ENTRY DATE: 2002-08-28
ggccgcgcaacctccatggaatggccgctctccacctccacgccctcatcgccggcggcggcggcgccaccaccgtcccccatctccggcagatccacgcccatctcctcacctccggccgcttcccctccctcggccccgtcctcctccgccgcctcatttcgctgcccaatccccacctccacctcgcccaccgtctcctcctctccctcccctccccatccctcgacctcttcaacctcctccttcccccgctcgcctcctcgccggacccctccaccgccgccgccctcttccttcgcctccgccgcgggggtctccgccccgacgcgcacacgctcccgcacgtcctcaaggcgctcgcgcgcctcgccccgggatccctccccgttgtcggatccgtgcactcggaggccgtcaaggacggcctcgcctccgcggtggtgtacgtcccgaacgcgctcatggccgcgtactcggcctgtgggcaactggagcgcgccgtgcaggtgttcgacgaaatgccgcgccggaccgtcgtgtcctggaacaccgcgctcaccgcctgcgcgggcaacggccgccacgagctgtgcgtcgagctgttcgcggagatgctagaggctggttccgtgccggacccgaccacgttcgtggtcatgctgtccgccgcggccgagctgggcaacctggcgctcggcaagtgggcgcatggacaggttgtttcccggaggctggacatgacgcttcagcttgggacggcggcagtgaacatgtactccaagtgtgccacggtgagttatgccctgcgcttgttcgagaggatgcccgcgaggaatgtctggacatggactgccatgatcgtagggtttgcgcagaatggtttggctcaggaagcgctggagctgtttgacaggatgaaactctcaaagatcatacccaattatgtcacatttcttggtctgctttgtgcatgtagccatgctggcctggttgatgaggggcgccggttcttccacgaaatgcagcatgtttatggtattgtgccgatgatgacgcactacagcgccatggttgatgtcctaggccgcaacggtcttctccaggaagcttatgactttgttgtaggaatgccagtcgaggctgacccagttgtgtggaggacattattggcagcctgccagctgcatagctccaaggactgtattgagatcattgacaaggtgcagggcaaactgctggagctagagccccggagaagcgggaactacgtcatggtttcaaacatctactgcgaaattggatcatgggacgaggcagcgaaggcaaggagggtgatgagggaaggagggatgaagaaggttgcgggagagagttgtgttgaggtgggaggacgggtgcatcggttcatcttcggggatgattcttgccctgaatttcatggggcttgtaggattctccatgaattgaatctcaacatgagaaaatgtgaacctattgacccaatcttatttactgatgatgctgactagctttc

SEQ ID NO: 27426 - DNA, 2127 bp, Oryza sativa
  ref <308>: DATABASE ACCESSION NUMBER: AK102868
  ref <309>: DATABASE ENTRY DATE: 2002-08-28
gacatcgtgtacgcgttgttggtgccggaggcgttcttccgcgaccccgacggccgcgacggcgtcgcctctcgctctctccgccgccctctcgctatctccgcggccacgctgctttctctgcccggcgaggggcggcgctatgaagcacacgacgaacgcgcggtgggcgcacatcgtgtgcgcgctgctggtgccagaggtgttcttccgcgaccccgacgaccacgacggcgtcgactgcttgagctatctcgctctcttcgctgccctctggctctctccgccagcgtcaccgccacgtcatcttcaccgttgtcgccacctccctctattccgccggctctccctatttcacctccgttgctgtctcctctggtgtcaccgtcgccgccgccgccgcttgcctcatgtaggtaggtgccgtcgcctcacgatccttcaccagtcgtcgccacgacgagatcgttcctccctcctattcagccgccacatctcccagcgaggagctcgggaccaccaggtccggcgaccccgtcctccttacaggcggatccagaaacccggatgaggatgacagccgttaccacccttttctcctctttcatcttcacatgttagaggatccctctccatcttcctcagctcgctggcatgggagtcgcacatgataaggggtttcacgggagccggcagcgaccactgcttctgtgagaggaccgaagaaaaatatccgttgttgagaagatttaacacagggtcttattccaagagatcgttgccaatgagcgtgctattaaattggagtactcaaagtaagtttaataagcctccagttttattttttcctatctatgcgtatgatgtggcaatgtttcatttggcctaaataaagagaaggtagacagtgatccagttggacatggataatggaaaatcaagcttaattagttacaatcacataagcttagccaaaaagttgtggttatttgattgaatcaattaattgaccaaactaaggcttataaggagcacaccaaccacatatactataacttaattttagtacagcaggacccacaactcacctgtaccataccatttagatatgtcggttatcctaaatataaaatgtatcctaaatataaaatgaggtcttaattcctttattatgtgcaacagctatttgattcaacaatgcttccatttgatcacaaccaattgaagtagcttatgtggatatttcctatggcacagaatcctaatgttagtgtttgaagaggaaaaaaccaatttaactctttacctaccgaaattagtaaaggcaactggtatggtcactctacaaaaagtcagtccgttttattgcatttcacaattcaactacacctaaaatagctgagccaaccatttacatagttacccatccatattatcgattaatgttagatttagttgatttcaacttacaaaggatgaatttatcatttggtaataattagttcttgggcgaagttcccaaacaaccggtgtaatcgggttctattctttcctgttcacgttctcataaggtggttacaccattatgccatgttatgcctccatgctatgcatcttcctggtacgtggatcaactaaaacaactattggttcctacatttgatttaatctttgtataaatagcttgatttgcatatccaatgggttttttgttggatgttaacttgcacaaaagaaaaattatatttattcactgactgactggttgctctgttgagttccctatcttttgttgactatattgctaactggtgcctttttagtaggtctatattttctttgcttacacagtaaaccctgcaccgcacttatctatcccttcttcctattgacaatatccttgatctaattggggttgtcgatgatatatttgtgtactgaatggtatggcagatcatgctttgataaatgatgctggcacaatgaaaaggataatagagctaaaccttttggttcttacggtgccctggtcatggctaaataagggagttggacacacatgttcattctgcctattctaacaccaatgtaattggaaatcgactttgatttaatacatctatgtgc

SEQ ID NO: 27427 - DNA, 1993 bp, Oryza sativa
  ref <308>: DATABASE ACCESSION NUMBER: AK102869
  ref <309>: DATABASE ENTRY DATE: 2002-08-28
gggccaccgaggacgagctagagcgcgcgcgccgccgcgaaacattagctatagctagctagatatagccggccggcgatcgaggagatcgatcgatcgaacgccgccgcgcgcgcgcggtcatgacgccggcgagggtggtgttcatctgctgcgttgttctgctcgccgccgccgccgcggcggcgtcgtcgtcgacggcggcggggatcaccagggccgacttcccgccggagttcatcttcggcgccggctcctccgcttatcaggttgaaggtgcatttgcagaggatggaagaaagcctagtatctgggacacgttttcgcactcaggctattctgttgatggagcaaccggtgatgtaactgcagatcagtatcataagtacaaggaagatgtaaagcttttgcaagacatgggcgttgacgcgtacaggatgtccatttcttggtctcggcttattcctgatgggcgaggagctgtcaatccgaagggactggaatactataacaacctgattgatgaacttctgagccatggaatccaacctcacgtaacgatatatcatttcgattttcctcaggctctccaagatgaatacaatgggatacttagtcctagatttgtagaggacttcacagcatacgcggatgtctgcttcaagaactttggtgatagagtgaagcactggagcactgtcaatgagcctaacatcgatccgattggcggatacgatcaaggaatccttccgccacggcgatgctcattcccctttggtgtcctcagttgtgacaatggcaactctaccacagagccatacatagtagcacatcatcttcttcttgcacattcctcagcagtgtccctctacagagagaagtaccaggccactcaaggaggacaaattgggctcacattgctcggttggtggtacgagcccgggacgcaagatcctgaagatgtagcagcagctgcaaggatgaatgatttccacattggatggtacatgcatcctttggtgtacggtgactaccctccggtaatgaggaagaatgttgggtccaggctaccatctttcacagctgaagaatcaaagagagtacttgaatcctatgattttgtcggatttaaccactatgtcgccatttttgtgagagccgaccttagcaaacttgatcagagcctcagagattacatgagcgatgcagctgtcaaatatgacctcccattcctgaaatcaaataatgagttcccactcgggttgacgagtgacttcatgacgtcgaccccatgggctctgaagaagatgctcaatcatctccaagagaagtacaagaaccctattgtcatgatccatgagaatggagccgctgggcagcctgacccttcaggcggaaacacctacgacgacgatttcaggtcgcaatatctgcaggattacatcgaggccacacttcaatccatcaggaacgggtcgaacgtgcagggctacttcgtgtggtcgttcctggacgtgttcgagtacctgttcggctaccgcctccgcttcggcctctacggcgtcgacttcgcctcgccggagaggaccaggtaccagaggcactcggcgcggtggtacgccggcttcctccgcggcggcgagctccggccggcggcggcggcgctggccggcggcggagcctactcccagtgatcaaggttcttcttcctcgcacgctttcatctcgcgaagaacaggacaggacgggacaataaaatttacctggatagatacagaagaattatacagttcatatggaagttgatcttttgaatagggtcttagaatgaatggtctctcttcttcccctggtttttggttcttctgtttacagaccaatgatgggtcaatgtcagtcaaattgtgtgatttagatcaatgggtcaaagtgtatgatgtgattgtgtaattgtgtcgattatatataaaattttgaagtctctcgtagtttg

SEQ ID NO: 27428 - DNA, 1450 bp, Oryza sativa
  ref <308>: DATABASE ACCESSION NUMBER: AK102870
  ref <309>: DATABASE ENTRY DATE: 2002-08-28
gatttccccttcggttgtgttcacaccgggggtctgcacttctgctccctctccgcctccggcgtctcccgctcgccgccgccgctgtcagagatgggccgtgctccggcgaaacggaagccctcgtcgccgccgcctcctccgcctccgggccgttgccacttctggctccctaacaagcgccgccactgcgccaacactccgctcccaacctctcagtactgtgggaaccacctcccggattccgcctccgatgccggtgcgcccttccgccgccttgtcccctgccccgtcgacccctcgcacaccgtgctcgaggagaacctggaggcgcacgtcggcaagtgccccctcaagaagcaggccgcggcgctcgcagcgcagccgttctactccaagggcatcaactccggtgggggagaaggcggtgggggtgtcacctcggccgctaagcgtgcattggtgcacaagctcaccaaggatgaattgcgcgccttgattgagaagatcaagttggcgcatgcgtcggcggccatggcaatgcgtgattcatttcttgttacagatgcttgcgacaattggatgaggaaccaggttgataggaaggtgccataccaggaaaagcatgtcacgcagcaggcatccatcattggcaatatggaggcatttggtttgctgcagaagggaggtgaggtggcggaggagaatggtgtgaaaaatgctccggcagtggtggaattcggagcagggagagggtacttgactcagatgctggcagactgctacgggattaggaatgttttcttggttgagagaagatcatacaagctcaagttgaagatttgaaccttcaaggaatagaggcattgagtggacttcattatctagcaattggaaagcatctatgtggacctgcaacagatatgaccatgatgtgctgccttcatgaacggtataaccaggcacatgaaaaagaatatggcaaaagcaatctatgtggccttgctttggccacctgctgccaccatctgtgccaatggaatcactatgcaaataagacattcctctcagggttagggattacagaggaagatttccataccatgacttggtttagcagctgggctgtggatggtgatcacagctccccggattcctctttagaggttgaagactcatctgtagaagacaggtgcggaaaagcagagaagtctgatgtggaggtcagcggaatcgatagactcatccgaagtataccagcaggggagagagctgccttggggtttatgtgtaaagatattattgatactggtaggctattatggcttagagagaagggtttagatgcagatcttgtaagctacgtcccatcaaatatttctccagagaatcacttactcattgcaaaatgtacgtctttatcaggatgaaaaagaagcttacatgttcc

SEQ ID NO: 27429 - DNA, 1135 bp, Oryza sativa
  ref <308>: DATABASE ACCESSION NUMBER: AK102871
  ref <309>: DATABASE ENTRY DATE: 2002-08-28
gggatttccgatcgctatataaaagacctaggatttcgaaatttttccctccccctcccccttcgcgcgcgcgctctcttcccgccctttttttttccttcttcttcaccggtgggattgattcgtggggtgcggatctggtttttgggggtgtgtatggcggcggcggaggcggcggcggaggcggcggcggcgctggaggggagcgagcccgtggacctggtcaagcacccctccggcatcatccccacgctccaaaacatcgtgtcgacggtcaatttggattgcaaattagacctcaaagctatagctttgcaagcacgcaatgcagaatataatccaaagcgttttgctgcagttatcatgagaataagagaaccgaaaactacagctctgatatttgcatcgggtaaaatggtatgtactggggcaaagagcgaacaacaatcaaagcttgcagcaagaaagtatgctcgtattatccaaaagcttggctttgctgctaagtttaaggacttcaagattcagaacattgttggttcttgtgatgttaaatttccaatcaggctggagggacttgcatattctcatggtgctttctcaagttatgagcctgaactctttcctggtctgatatatcggatgaagcaaccgaagattgttcttctgatttttgtttcaggcaagattgttttgaccggagcaaaggtgagggatgagacgtataccgcctttgagaacatataccctgtgctaacagagttcagaaaagtccagcaatgataacctatggaggtcacaactacaacgcttccttgaggattttgctgccttgtaactgctaattttaatctgtacatatatgtagtctggaggggcgtacagcatcttgtaatttatgtgagcccctggatgaatgagcactgtagacttgtagctgggtgagtatgttgttagtagtctcttgtggcatggagttcagtccaaccgatctgatggagttttcgtacgtttgtagcccttgccgatctttttcccttttcttcccaatagacatgttgctaaacttttactaacttgttaacagacagacagaatgataacatggactgtggatgcttagcgtttgtggccg

SEQ ID NO: 27430 - DNA, 1151 bp, Oryza sativa
  ref <308>: DATABASE ACCESSION NUMBER: AK102872
  ref <309>: DATABASE ENTRY DATE: 2002-08-28
gctagcaaatccccgcctcgatcggaaggagaccatggcgacggcgaggctccgatccgcctcctccctccgcggggtcctcctccgccactgctccgtgggaaccacctcgccgccgcaagttttctcccgcgtctcagatcttcaggctcctggatgtattgcatggaagcatttctcaacattcaagcctaatcctcttccaaaacttgatggccttggttcagtcacttgtttgtacagtcaggcaagatgggcttctcaagctgctgctgttaaagaaactgaaaatagtggcagcaagataagcattgggccaaaatccaagcagatcaaggaagatgacaaagatgacaggctagtttaccagggacctatatcatcgaccataagaaaagtgaagcttctttctctgtccacctgctgtctctctgtgtcgcttggccctgtgataacattcatgacatccccagatatgaatgtaatcctcaagggcgctgttgcatccactgtcattttcctcagtgctaccacaacggcagccttacactggtttgtgagcccgtacattcacaagctcaggtggcgaccaggttcagatagctttgaagcagagattatgtcatggctggctacacccctcacaaggacaatcaagtttgctgatgtcaggcctccagagaccaacagaccttttgtcacttttagggctgaagggaacttctattttgttgatgccgagcacttcccgaacaaggctttgttggcgaggcttactcccaagcaccctaatgagtctgcattcaagaacttgtgattgaaggttgcccaatgacctcatggctgcactcgcgttcatgatcatttgttggcagtttacatttttattgtgatacctccctgctaatacttccagaagaagtagtatactatgttattagcgttcctttaaatccatgtggaaatcagtaaatgctggtgtcatactacgattttagttaagacactgagatggcgtgctgactgttcttaataagtagcggtgacttttgcttaggacacctcccaacattctgttgtttatgatgttgcaatgctacacgcccgtgtgtgcttggcagtttaattacgtgatgctcttgttttggctt

SEQ ID NO: 27431 - DNA, 1084 bp, Oryza sativa
  ref <308>: DATABASE ACCESSION NUMBER: AK102873
  ref <309>: DATABASE ENTRY DATE: 2002-08-28
gctctctctctcccctctcgatctcgtcttctctctctcgcaggactcgatcgcgatggcggcggaggtggcgaaggcggcggtggtgccggagtcggtgctgaagaagcggaagcgggaggagcagtgggcggcggacaggaaggagaaggcgctcgccgagaagaagaaggccgtcgagagccgcaagctcatcttcgcccgcgccaagcagtacgcccaggagtacgacgcgcaggagaaggagcttgtgcagctcaagcgtgaggctcggatgaagggtgggttctacgtcagccctgaggccaaacttctgtttgtggtccgcatccgtggtatcaatgccatgcaccccaagaccaggaagatcttgcagcttctgcggttgaggcagatcttcaatggtgtcttcctcaaggttaacaaggcaaccattaacatgctgcgcagggttgagccatatgttgcatatgggtacccaaacctgaaaagtgtcagggaattgatctacaagaggggttacggaaagctcaacaagcagaggattcctcttcagaacaacaaagtcattgaggagggcttggggaagcatgacatcatctgcattgaggatcttgtccacgagatcatgactgtcggtccacacttcaaggaggccaacaacttcctgtggcccttcaagttgaaggcaccactcggtggcctcaagaagaagaggaaccactatgtcgagggtggtgatgccggcaaccgtgaggactacatcaacgagctcatccggaggatgaactaggcttttcttctgttactggggagaatgtctccttatctatgtatgcaacatggttatttttatctttaggctgtcttgagctggatactggatatgcaattttggcgttccaacaggaggtagacttggcctgtgtttacagtgagacttccggtgggaaatctgtacccgttggccctggggtttgttcctgtctggatgcttttgtttcttgatatgttcgctagttgtgcttgctttattgccttatttgttctgttgatcaactctctgcattgatcaacaatcttc

SEQ ID NO: 27432 - DNA, 1245 bp, Oryza sativa
  ref <308>: DATABASE ACCESSION NUMBER: AK102874
  ref <309>: DATABASE ENTRY DATE: 2002-08-28
gcctaacccctgaccacccccccgcctccgcacccgcctccggttgcctcctcccctctcggcgggcggcggcagcagcggcggcagagtcagcagacctcgccgggaagctaaagccctaaagctcgcggaagggtttatcgcaacgggcgatggcggcggcggagcagaaggggaagaagccgaggaccgacggcgcggaggccgagcccgtcgacgcctaacccctgctgcagtccatcgagaagctccaggagatccaggacgagatcgagaaggttaatgaggaagcatgtgataaagttctggagttggaacagaaatacaacgaggttcgcagaccagtttatgttcgacggaataaaattatcaagcaaattcctgacttctggctgacagcgtttcttagccatcctatgcttggtgaactattaactgaagatgatcaaaagattttcaaacacttggagtctatcgatgtggatgactcagaagatatcaaatcaggctactccattactctcacattctcccccaatccatattttgaagatacaaagcttacaaaaacatattcctttagtgacgatgaagcagtcaaagtaaaggctacctccatcaggtggaagaaaggaatggatattgccaatgatcgtgcgtacacgaagaaaggggacaagcgaatcttaattgatgaaagtttctttacttggttcaatagtgaaaagaacagaagttttgctcatggagctatggatgaggtggcagatgtcatcaaggaagatctgtggcctaatcttttgaagtacttcaacaatgaatttgaagaagaattagagctactggatgacgatgacgaggtatctgatgatgacgatgaggaggaggatgatgaagaccaaggtgaaggagaggaggatggagaggagaactgagctctctgtcatgtcagattcttttggcctggacaacttatgtctgcagaaagcggagaccgggcctcctggagggctgaaacagcagggcgtccccttttgcggcgttgtggtgctcgacttagctggcagtgtagggacttgctccgaaaaactttgttctatggagaaataactcgagttcaatagatgattttgttgcatgcgcgatcgaaatgttgcgtgttgtttggaagtgttatttaccttgccgttggattagtgtttataacgctattatatatagagaatgatcaaattaaattttgct

SEQ ID NO: 27433 - DNA, 3035 bp, Oryza sativa
  ref <308>: DATABASE ACCESSION NUMBER: AK102875
  ref <309>: DATABASE ENTRY DATE: 2002-08-28
gatgtctttctgcctcaccgctgcctctgcctccttccaaatgcttcgccccccgagctctcctcggcgtgcgcggcgcagcgccatccaccccgacaactcctcccaacccccaacctatccaaacacattttcttgcccgcccctgcagctccctccaccgcgccacccatccatcgccagccatgcacaccctcgctctgacgaccctgtcacgttgagctacgctcggaggaggacgccacgacggcgaccgggaagaagatgaacccgctccctcccccggccagccggctgtgggaggcgagcatccgcaagctcaagtactccaccatcctccgcggctccgtcgtcccctccggcgccgccttcgatggtgcggcggcggcggccaccggaggtgaccccgtcacgctcaccccaagcctctccgtcagctcctccacctccaacaccatctaccagtacgaagacggcgacgacgacatcgactccgtcctcgacgacgtcgacaccgacgacgacgacgtcgacgaggcgtccctcggcgagcccagccactccgaccagctgctgcccagcggagacttctaccagggcgacctgcgcggcgacctcccccacggcgccggcaagtatctctggacggacggcagcatgtacgaggggtcgtggcgcggcggccgcgcggccgggcgcggcaagttctcgtggtcgtcgggcgccatctacgagggcgacctcgccggcgggtacatgcacggccaaggaacctacatcggcgagctcggggacacgttcgccgggctgtgggcgaacaacctccggcacggccgcggcacgcaggcgtacgtcaacggcgacgtgtacgacggccactggcgcgacgggctgcaggatgggcacggccggtacatctggcgcggcggccacgagtacatcgggacgtggaaggccggcgagatgcacggccgcgggacggtgatatgggcggacggcgaccggtacgacggcgcgtgggaggacgccaagcccaaggggcagggcacgttccggtggtccgacggcgggatgtacatcggcctgtggtgccaggagtccggcgagacgcagggcaagggcgtgtactacccgccgtccggtggcccggcggtgccgttgccccgggaacccaaggaggtgatcacgaagctgctcgaggagctggagatgtccgaggggaagacggtgtcgctgctgccgtcgcagaaggtgctgacatggcccggggtggagcccgtgacgaagaagccggtgtggcggccgccggaggtcgccgctgaccaagggatgtggcggccgccggaggtcggagctgaccaagggaggaggtcgagcaggaggaacagcatgtcgtccgacattgacagcctggttgagggggaggacggcggcgaggagactcgcaacgacaggtcatgggtgcggacaccgtcgtgtatgcgcgcgcccacgctgccgaagccggggaagaagcagggggagaccatctccaagggccacaagaactacgaactgatgctcaacttgcagctgggtatcagacatgctgtaggaaggcagtcagctcctgcttcattggatcttaaatcatcagcatttgatccgaaagagaaggtgtggacaagatttcctcctgaaggatcaaagcatactcctcctcaccagtcatgtgatttccggtggaaggactactgtccattggttttcaggactttgcgcaagctctttgatgttgacccaggagactacatgctctccatttgcggggatgatgcactgctggagctttcatctcccggtaaaagtggaagtttcttttatttcaccaatgatgacaagtacatgatcaaaacaatgaagaaagcagaagttaaagtacttctgaggatgcttccagcctattataaacatgttcgatcttttgataatactctagtaacaaaattttttggcctgcattgtgttaaaattacaggagctattcagaaaaaggttcggtttgttataatggggaatcttttctgctccaactattcaatccacagacgctttgatttgaaaggatcatcacatggtcgcacaacggacaaacccctcgatcaaattgatgagactaccactttgaaggaccttgatctaaatttcattttccggttagagggatcatggtatgaagatttctgcaggcaagtggacaaagattgtgagtttctggagcaagagagaattatggattacagtcttctggttggcgttcacttcaaagaccgatgcaaagacagcagcagtcctgacaacgagacaactcaaactgctcttgaagatgaggaaaaaagaaaagcaccagtcaagctagggattggcatgccctcaagggtggagaatgttgtgaagaatcctgaaagcgaatcccagctcattggcgaaccaacaggggaattccaggacgttatcctgttctttggaatcattgatatcctacaagactatgatatcagcaagaagcttgagcatgcctacaaatccatgcaatatgatcccaactccatatcggctgttgatccaaagcaatactgcaaaaggttcagggacttcatttacagggcttttagtgaagacgtacagtaaatacgtcattaacaaaagggaacactcttaactcttaactcaagaaagcataacgaccagccgatggatgttttttttggccattccaggactattttgtaggtaagatcattcattcattatgttgtagatggcaatacgtaattagtctgacggtttctgcccctggtgggtgtatagattttgtacatttcccaaatcttttcatgtgtaattactaattagaagtagtgtacttgtactcatgtcaattgacatgaaaaggatgtaggacagaaattgttgaccatgtaacagttctttcatttttgttttacttatttcctcttgtagcaaaatagttgttatatgagcaatacttaatc

SEQ ID NO: 27434 - DNA, 2122 bp, Oryza sativa
  ref <308>: DATABASE ACCESSION NUMBER: AK102876
  ref <309>: DATABASE ENTRY DATE: 2002-08-28
gggttgggcttaaacaacaagcgagccttcgcacgccttcgttggccgatcgatctccccgtggacggacggagggacccacccatccacgtcgccgctattttcgcggcgcgcgcgccgccgatctccgatcaccggcggctgggtgcgagccccgcaaccgcaaggcgtccctgctgctactcccgcccgcatcctccctgcgcccaactccaatctcttctccgcctccaactccaggaggtcgctctcctcctcgctaatttcgcccgcctccgccgatttcctcggggggaggggagcagcggtaggtgccgtacgtctccgtaacttttgtgtggtagtaatttatgaccatggcgacctcgcgagaggttttcaagtatcaccctttgcctacaccgggagtggaaaacagttttaaggatgagatccaatccaaggttttgggcacgataggggatgtgatgaactcatttgatccaaagtcattcccacagcatgtagaaggagcactgggaacagctggaaacatcatcaattcctttgagtcaaaattggctgagcacaagcaatttgattttggtggcaaaaccaatttttatggctatgattgtgcggacgatggttggggatctgcacccttgaaggcagataagccggtaaaccttagaaatctgctgggtggtttaattgcaatcatcagtcgtggcggcaaaaattctgaaattcaaccgccaaaggacactaagtctagtgtcgcattcttagggtcaggtagcgatggagaaacattcttgcacgcctcagtctatgtgccaagtgctccaccattgcttgacgaagaagctctgaattacaatgtgtatagggttgtgattgaagcagaaccaccagaatggttacctgatagttatgctaactcatgcatgcaatgcgctgcttcttttactgttgttactcgtggaaggcatcattgtcgattttgtggagggatattttgtaggacatgctcaaaaggcagatgtctgttgccagccaagttccgtgagcggaatccgcaaagggtttgtgatgcttgttatgataggcttgatccgttgcagaacttattcattaattctattagcaatgccacacagactgcaaagcatgatgttatggattggactagtaccagggggtggttgaatttgcctattggattaacaatggaacatgagatttacaaggccgcaaattctgtgaggagctatagccagattgcaaggctaaaccccgaaaggtctattcctcatgcagtccttagtggagcaagtgggcttgctatcctgacagttgtaaaagctggtgcacttcttacatacaaacttggaactggcctagtagttgctcgaagatcagatggatcttggtcaccaccatcagcaatcgtttcagttgggttaggatggggagcacaggttggtgctgagctaatggatttcatcatagtgcttcgtggtctggaagctgtcaggacttttagcagccagatgcatttttctgttggggcaggtttaagtgctgcagcagggcctgttggtagagtgctagaggctgacttgagagctggtgataaaggctcaggtgtttgttatacatatagctgcagcaaaggtgcattcattggtgtttcgttggaagggaacttcgttgcaacccgaagggacgcaaatctgcggttttacggcgacccgtatctgacaaccagcgatattctcatgggggatatgcagagaccaaatgctgccaagtttctgtacacagcgttggatggcctgtactctgggctgagtcgttaggacgatgtaaatctcaactgtacatatttgctctgattcttctggctgtaggcgtttttagctaggcttattgattcttctaagtgcttgccattgtagctaggtccactgctatcagtcaagttccagatggcaagtcaaaacctctatagtttacatgtaaatatatcttcctatgatacatacaccgcattgttcgaagtttatcatcggatatttgtggtggtatgcaactatagaagctgttacatgttactgtatcatggatcatcgaattt

SEQ ID NO: 27435 - DNA, 1942 bp, Oryza sativa
  ref <308>: DATABASE ACCESSION NUMBER: AK102877
  ref <309>: DATABASE ENTRY DATE: 2002-08-28
ggccgcgagcagcgccgccgtcgcgtcgcgccgatctccacatcaccggcggcgacttgcgagcaccgtgccgggcgcctactgcttccggcgcgtactcgactccttgcgccaaagtcaatctcccctcgcaccgtcttctcggcctcagactcccttctccgactcgctagttcgccccgccccgccgcgcctcgccctcgcctcgccgcctgcgccggtttccatccatcccgcgacggacgggagcatccgtcgggtgccgtcgtcctgctgcctccgcctccggttcggaagatgatgagaaacaaccaaaacacacaagtagaaggagcaagcgcaactaagaagcggaagacctcatactctaactccaacagagaagattcgtcaccagttgtggatggcctcacacgcatattgcgcagaaatcttctcccccgtggttatcctatgccatctgagttcactgatggtatgcacatggtgaataactttgaagaatcttttggagacttggatgactgcaatgaagaatacagcaaagttaatttagttgctctaagaatatctcagtccgttgtctcacttgcttcgtttaaggggcgaacgagactgtttgcatgcacgggtacaattatggagtatggaccatctaaaatgagcattctgacttccgctagtttggttagatgcactaaagatgaaaacaagacagatgaaaaattaaagattaaggtgcgcctacccaatggcaagcttaccgaaggaaaactgtggaactatgatttatattataatattgctgttgtcaaaatcaagtatttcccagaacttagtacagcacagatacataatcaagggcaatctaatgttaaattatctcaaagtaaactggtcgctgttggacgtggctatgaatctggagaactaatggctacaggtgggacactgctgtacaaacctagcaaacttgactgcaaggaactcatgacctccacttgtaagatcacaaaggctgggattggtggtccccttgttgggtttgatggaaactttgttggcatgaacttttgtgataagaaggaaactcctttcttaccaatcaatataattcggaaatgtttaaagcactttgatatgtttgggagagttgttcagccatggcttggcctgaggattggatcactgaaacatgaaaaactggatatccgtgaacaaatacatggaagcttctccaacacaggtggcatttatgtaaaagaggtttttgatggatccccagcagcagattctggaatcaacgttggtgatgttattaccaagcttgatggagtcgatctattccatgcacaagagttctatgagcttattttggggaaatcagaagatattttgcgacgtgatgaagagatgcttttcaaggtgtctattctaaggccaagtaacggttaaccttccgtgcaattgtcaatgctgaagtggttgacatgagtaggaagaacagatggcctgtacctaaggcggagtggctatatccatgtacggacgatagatgtgatgaaattgtcgcgcctgatccgatagttattcgaacctgtgaagatagctattatttacccgcccttgatgagtctgaactaagactatattacggtgaagaatgaggtggagaaatcttgcattaatcgagaagaaatcttgcattaatcgagaagatatgctgagatacttaatggaacatgcaccgcaagtttttgttgacattcatatttggcaactgaatagggctacaggagtgaaaaaaaattgcatgtctactaatattagcaaattgcatcctttgccagctgagtaatatgaattgtgttaatgcggagttgttccagcaagatgttttgtttggcttttctgtttttaacaagtttatgaaagcttgggt

SEQ ID NO: 27436 - DNA, 2285 bp, Oryza sativa
  ref <308>: DATABASE ACCESSION NUMBER: AK102878
  ref <309>: DATABASE ENTRY DATE: 2002-08-28
gatcgttgattactcgattggttaagaaagcgaagagctttgccccaatgctcagggaagcagggacaaactgagctgtgagaagtagacagagacagaggagaggaggatggggttcttcttcttcgcgtcccgtgctgctgctcggttcttgggcgaggctaggatcatccaccccggcgtctccaccgctgcgcttcttgttgcagcagccagtggtggaggccttgtggcgtatgctgattctgctggagagaatgcatcatcagagacatctcaggaggctcccaggaagaagaaggttgtggttcttgggactggctgggctgggacgtccttcctcaaagatcttgactgctccaagtatgaagtgaaagtcatatcgccccggaattactttgcatttacacctttgcttccgagtgtgacttgtgggactgtagaggcacgcagcatcgttgaaccgatacgaaagatgcttgagaagaaaaggaaagatgttgcattctatgaagctgagtgtttcaagattgatgcatcaaagaaagctgtccattgccggtctgccgttggaacaaattttgatggcaatggtgattttatggttgattatgattatttagttgttgctcttggggctacagtaaatacattcaacactcctggtgtgatggagaactgctactttctgaaggaagtagaggatgctcaaaagatcaggagggatgtgatagactgctttgaaaaagcttcacttcctaacattagtgaagaggagaaaaggaagattcttcactttgtaattattggtggtgggcctactggggttgaatttgctgcagagatgcatgattttcttgttgaggatctggtgaagctatatcctgcaattcaagattttgtgaagataacaattattcagtccggtgaacatatattgaacatgtttgaccaacggatagctacatttgctgaaatgaagttccagagagacggcattgaggtgaacacagggttcagagtggtaaaggtctctgatgatttaattacaatgaagagcaaatcccttggtgaggtatcagtaccatatggaatggctgtttggtctgctggcattggtactcgtcccgtcattatggacttcatgcaacagatcggtcagactaatcggcgtgtcttggcaactaatgaatggttaagagttcatgagtgtgataatatatatgcaattggtgactgtgcttcaataactcaaaggaaaataatggatgacatttcaacagtatttaaaatggctgataaagacaactccggcactctaacactcaaagagataaatgatgttcttgaagacatttgtataagatacccacaagtagaactgtatatgaaaagtatgcacatgcttgacattagggatttgataaaagatgccataggtgattctcacaaggagtcgatggtggttaacatagaggagttcaaaaaagctctgtctcatgtggattcccaagttaaaagtattccagcaacagctcaggttgcagcacaacaaggacactatcttgctgaatgttttaacaagatggaccaatgcaaagaacatccagaaggtccgttgcgcatgacaggaacaggatcaggacgacacaatttccgcccattccggtacaagcatcttgggcaatttgcacccttgggtggagagcaagctgctgcagagctcccaggcgactgggtttccatgggccatagcactcagtggctctggtactctgtatatgcaagcaaacaagtgagttggcgcacacggatgctggtggtatccgactggactcggaggttcatatttgggagggattcaagccgaatttagcactgccaaatgctgcatcatttcttgtagagataacattgctgaataattttgttgtctttggctgtgtttagttcatgtgccaaaaaaaaatttttgaagtatacggacacatttgaagtattaaatgtagactaataacaaaacagattacagatttcgcttataaactgcgagacgaatctattaagcctaattaattcgtcattagcaaatgtttacttgagcaccacattgtcaaatcaagacgtaattagactcaaaagattcgtctcgcaatttacatgcaaactgtgcaattggtttttttcgtccatatttaatgctccatatatgtattcaaacatttgatgtgacggaaaagttgaaagtttgaagaaaaaagtttgaatataaaccatgcctttgg

SEQ ID NO: 27437 - DNA, 1193 bp, Oryza sativa
  ref <308>: DATABASE ACCESSION NUMBER: AK102879
  ref <309>: DATABASE ENTRY DATE: 2002-08-28
gttaatggtcttctattccaactttctttgcctctgaacttccttggaagtgtctatcgagaatctaggcaaagcctgattgacatgaagtctatgtttcaattgcttgaggaaaaacctggaataaaggatgaaccacatgcacagcctttgcagttcaagggaggacgcattgaatttgagaacgtgcattttgggtacgtaccagaaaggaagattcttaagggtgccacgttcactgtacctgcaggaaagagtgttgcaatcgttggaactagtggcagcggaaagtcaaccatacttaggcttctcttcagattttttgactcctcttcaggatctattcgaatagatgggcaagatatccgagaggtgacactggatagtctccggaagtgtattggtgttgtaccgcaagatacggtactttttaatgacacaattaagcataatatacaatatgggcggttatcagcaacagatgaggaggtttatgacgttgcccgccgggctgctattcatgatacaattatgaactttcctgacaagtacaacacagttgtgggagagcgaggattaaagttaagcggtggggagaaacaacgagtatcaattgctcgtgtattcttgagggaaccttccattctattgtgtgatgaagctacaagcgctcttgatagcaccaccgaagcgtcaattttaaattctctgaagactttgtccgttgaccgtacctctatctttattgcacatcgactgacaactgcaatgcaatgtgatgagattattgttttggagaatggggaggtagtggaacaaggaccacatgattttctgctgtcaaagggtggccgatatgctgaattgtggtcacagcagaataacagtgatgccatcgatgctgccgcggttagcttagaggtttcatagactatatacataattcccttttgcaagggaaaatgcaaaccatatttgaatgaaagaaggcttccccatatctgcattgtaaattgaatggttaggtttttagatatcggggaacagaaatttatagcttaggagcaaataactccgtttgaaagaaagccaggaggcaaaattttcctctttgaggaaacacccaacagttcgacatgtttccatgatgtaagcattttttttactaatccaagtaaatattttttcccact

SEQ ID NO: 27438 - DNA, 1337 bp, Oryza sativa
  ref <308>: DATABASE ACCESSION NUMBER: AK102880
  ref <309>: DATABASE ENTRY DATE: 2002-08-28
gagcttttcttctctaccagcggcagcggcggctggtagggaggaggagatcgccaccagatcgccatggagacgctggcgagcgccatgcggcgggagaaccgccgcttcaagcccccctcctcctcctccgcctccgcctccgccgccctctcctcggggagggtccccctcgtcatggccttcctctcctgcctcgcgtggctctacgtcgccggccggctgtggcaggacgcgcagacgcggatgatcctgtctggtctcctcgagaagagctccggcaatcttccgaaggtgctgtcggtggaggacaagctgaggaatctaggatgcattggaattgggaggaagattgcggaggcagaaatggaccttacaaaggcgaagagcgaggggtatctgtgggggaatggaactgctactggtagttctgacaagaagaagctccttgctgttattggagtttacactggttttggttcccggctcaagaggaacaccttccgtggctcatggatgccgagaggtgatgctctgaagaagcttgaggagaagggtgtggtcattcgttttgtcattggtcggagtgcaaatcgaggtgatagcttggaccgcaacatcgatgatgaaaatcgtcggacgaaagatttcttgattcttgaaagtcatgaggaagctgcagaggagttaccaagcaaagttaagtttttcttcagtgcagcaattgaagcttgggacgcagagttctatgtgaaagtcgatgacaacattaaccttgacctggctggattaattgagatgcttgaagcccgtcgaggtagccaaggactgtacatgggttgcatgaaatcaggaggtgttgtaagtgaagagggtcaacaatggtatgaacctgaatggtggaagtttggagattcaaaaacgtattttcgccatgcttccggtgctttgtttatcctctctaacaatttggcacgctacattaacataaacagtgcatcgctacagagctatgcccatgatgacatatcagtaggttcatggatgatggggctgaatactacttatgttgatgacgaccgtttgtgctgcggcagttctagacaagagaaagtatgttcccacgcatgagttagcagcacgcatggttatgacggtggtgtcctgatgaagaggtgacgctgtatattttgccattttgtatacaccaagcggcttctggaatgaaaaatagatacatcatttcaaacgctgctttatccgatcagtatacttaaatacaagtgtaggggaactagttgacaaaaactataaaagcgctgagcttatttttggcg

SEQ ID NO: 27439 - DNA, 1342 bp, Oryza sativa
  ref <308>: DATABASE ACCESSION NUMBER: AK102881
  ref <309>: DATABASE ENTRY DATE: 2002-08-28
gggtcttttccggccgctcccggcgcccgccggccatgtcaacaacaagctcgtcaaaaaccgccacgtgccctctctgccacgccgacgtgctgctgccacggcggcggtcagccggctcctcgacgcacagaagccacgacctcgacgacggccccgctccgccgtcgccggagtccagctgccgcagcaacgccgcggtgtgcgggtgcgcccgctgccggcgccctgatctgatcagtcccggaaccggcatgcggatgaggaacagattcggcgatggccccaacaggatatcagcccagagtggagcatggctgtgccgagagcgcacggcggagacttgccggagcacaagtagccggtccggccgctaccggcgcctgcagcctgcagcggtcgccggaacacgacgcgccgaactcataaagcggctgcaagagctctgccacccagcaaataaccttccaaattgttctgcttcttggcaaccacagcgacagcggcagaaaacaattgatcgaattccagatagcctagattgtggggtgacaatggaaaggggcaagaacaagcgtgatggaagtgacaatgggctcatcttctctaacctaatgcacggtgttgctgccggcatctatgggtatcctcctcaccagggatacactcaggctcagagctacctactgctgccggaagcatatccacctcctccgtggacataccctctttctagtgcttaccctcctcaacctgttggttacccttcaggtggctaccctcctgcagtctactctgactcgtatctgcaccaaggtagcagagttgcgcgggagcaatgccctctatcatattccaataatgctgtcacttgcagggaggatgggcaaatgaactgtgaaaatggaacagtaaatatggagaaaagtgcaatgtcctcaaataagatggctactagtctactaaagagttgcggcaatgtgatgccatgcagaaatatggagagaagtggcccagccatgtataaggtggacatgcgcggcagtacgaagcaattctctatgggcagcaagatgatgatgtgtctgattgtgtttggatgtctgatagctgccttggatatgtttagaaatgttgcacaaaaacagatgttttctgtcgttagtttactttcttttgtagtcgcgacctatgtctgctaggagtctctacatgtaccgtaaaattgctctttgtgtaatgtgtacttcttcatcctgtaaaaatagaatcccaatcaaactatatatggtttgtctgtcgggctttcaatacaatctgagtgtcctctctttacctttgt

SEQ ID NO: 27440 - DNA, 2841 bp, Oryza sativa
  ref <308>: DATABASE ACCESSION NUMBER: AK102882
  ref <309>: DATABASE ENTRY DATE: 2002-08-28
ggggttcccccctccggactgctgcttaccgtgtgctctcccccattcccccactccccccttccgcgagcaggttcgaggtttcggtggccgaaattggcggaatcgccggctgatcggagcccaatctgagcctggacgcgcagataccgcgccttcctggcccgatctctcgaaaccccttgaaaaatccgagccgaaatggcggccaccgccccgatcgggcttgcgaagcgcgattcggtggtgctctggcctgggggtctcgcgagctgcacttattgtgactgaaagtgtggtcggctctttgctggttggtgtgggcttgggtcgcggagagagtaaagggtttgtggcatgatcagcgctagcgctgtggcgatgcgtggggagatgggtggcggtggcggcggcggcgatgagggagagctggaggacgagcttgatgccctcctcggaaccggtggcgctggcgcgcgtcggcgaggtgaggacgcgggagagagggaacgggagctcaacatgttcaggagcgggtcggcgccgccgactatagagggttcgctgaacgccatcagcgggctgctccgcggcggtggagaggcagccgttaccgttgcagcgattcccgacgctgagacgttgaacgggcatggtggtctcctctcggaggatgagctccgggctgacccggcctatctatcctactactactcgcatggcaatctgaacccaaggttgccaccgccggtgctatccaaggaggactggcggtccacacagagactgaaggcgggggtggttggaggaattggtgacggaaggaaggtatcgccggaggagactggacatgagccgacggtggggaggcctgtgttctcgcagaatgttggttttgatcaggaggaggctgcaaggaatgatgtaggtggtgctgcagagtgggtggatggtggaggtgatgggctgattggtttgtcgcttgggcggcagcgcagctttgctgatatccttcaggacaatattggccgcagaactcctgcttcagagcatccctctcgtgcagttagtcgcaattcttttcttgacaatcaggaactactaaattctgctgatagccagtactccatgcataatgatattctggaagcacaacgtgctgtcggaaatgtgcaaaatgtcagtggccttcccagtattaatgcatccgcatctcaaacttttgcatctgttctgggttcatctatttcaaggaatgccacaccagattctcattatgtccctagggtccctagtcctggccttccacctgtcggtgttaggattaattctaatgagaagaagctgaattgctcatcatcattcaacactgcatcttcaaaagcagttgagcctgatgatattttagctgcaatatcaaacatgaacatgtcaaaagatggtactttgggtgacagtaacagcattagtcaatcaaagttccaaagtgagataagtgaccaccagaatatttctcttgatccaaaagctctccaagttaataagaatcagcattcgctgatgttggaagctgatactgattatttgggtataccaccaatttcacaaccttcaaatccttccttttctgatattaacaagaatgtctcaggtttagcgaacataagaaattctactaacacacgtatagatggacacgcggagatgcaaaggtcttctactttgtctactcggtcatatcagaagtccccaacatcttccaatgcgagcccaggtggttctcctgctcaacaccagaatattgacaatataaattcagcctttttgaactatggactcggtgggtatccactcagcccgggtttgccttctatgatgatgaactgtatgggctctggcaatatgcctcctttgttcgaaagtgcagctgctgcatctgctatagcttcattcggggcagattcgagaaaccttggtaacaatattttgtcgtcacctaccttaagtctatctgatgtgcataaccttggcagaactggtaaccaaacagccacaggtcttttgtcgcctctttctgatccattttatgtccagtacttgaaggcaactcaatatgcagcacaaggaactgccaactgcagtgatccttccttggaaagaggtttcatgggtagtcaatatggtgatttaactgctgttcagaaagcttatattgaagctttgcttcagcagcagaaacaatatggaatgccacttggtaagtcaaccacgtcaaaccatggctattatggcaatttggcttttggcatgggcatggcataccctggaagccctttgggaagtcctgttgcttctccatctggtcctggcagtccacttagactcagtgagcggaatatgagatttccttctaacttgagaaacttgggtggctggaattctgatccaagtggctatatgaatgataacttcccatcttcactattggatgaattcaaaagtaataaggccagaagttttgaacttgctgagattgccagtcatgtggttgagttcagcgctgaccaatacggaagccgtttcatacagcaaaaacttgaaaccgcaacagttgaggaaaaagacatggtttttaaggagatcatgcctcaggctctctcgttgatgaccgatgtatttgggaactacgtggtgcagaagttctttgagcacgggagtgcagcacagcgtagggagctggctgatcaactatttggacatgtgttagctctcagccttcagatgtatggatgccgagttatccaaaaggcaatagaagtggttgacctggaccagaagacc

SEQ ID NO: 27441 - DNA, 1876 bp, Oryza sativa
  ref <308>: DATABASE ACCESSION NUMBER: AK102883
  ref <309>: DATABASE ENTRY DATE: 2002-08-28
gatcaggaggtcaataggagagaagaggagcgtcgtcgagtttgaaatctcaactcgcaaacccccacactactttttcttcgtctattatatcccaacacaacacaaggtgaagctactcctaggcgagagaatctgagagagatgagatgagaaaccttcacccaccaatgatgaagatgctcctcgccgccctcgtcgtcgtcgccgccgcctccttcagggcggccgaggcggcgctcccgtcgatggcggtgggcgtcaactacggcgccaacgccgacaacctccctccgcccaaggacgtggcggccttcctcgccgcgcacaccaccatcgaccgcgtgaagctgttcgacgccaacccggccttcatctccgccttcgccaacacacccatctccctcgccgtctccctccccaactccgacctcccttccctcgccgacaagcagaccggcctcgacaccgcccgcgcctgggtccgcgccaacctctccccctacgtccccgccaccaacgtcaccctcctcctcgccggcaacgagatcctcctctcccctgaccccaacctcgtcctctccctcctccccgccatgcgccgcctcgcccaggccctccgcctcgagggcctcaccggagtccgcgtcaccaccccgcactacctcggcatcctcgccccctccgacggcatcccatccaacgcccgcttccgcccgggctacgacaccaagctcttccctcccatgctccagttccaccgcgacacgggctcccccttcatggtcaacccctacccctacttcagctacaacaatcagacgctggactacgccctcttccgccccaaccgcggcgtttacgaccccaacaccaagctcaactacacctccatgttcgacgcccagatggacgccatctacaccgccatgaagcgcctcggctacggcgacgtcgacatcgccgtcggggaggccgggtggcccacgcaggcggacccagggcaggtgggcgtcggcgtggaggaggccagggacttcaacgaggggatgctccgcgtcgtcagcagcggcaagggcaccccgctcatgcccaaccgcaagttcgagacctacatcttctccctcttcgacgagaaccagaagcccggacccatcgccgagaagcacttcggcatcctcaacccggatttcacccccatctacgacctcggcctcctccgccaatcctccgattctggagctccaaacccttcgccgaatccatcacctaaccctagtccgaaacccgctccttctggtggagggaagtggtgtgtccctaaggctggtgcgagtgatactgacttgcagaacaacattaactatgcctgtggctatgtggactgtaagccgatacaaagtggtggcgcatgccttgatccgaacaacgtgcagtcccatgctgcatttgtgatgaatgccttctaccaggccaacgggcggcacgactacgattgcgacttcaagggcaccggcgcggtcacctccaatgaccctagctacgggagctgcaaatacgtctcctgacgggacgcagcaagccatggcagtgcaggtgcagcggcaccaacctcgagtctacctccaggcttaagtcacggaagcgctggagggttgctaatactgcctggcttgcgcctaatttttctctgctcttgtctgacagcagccatgcttctttcttagaagagctatactattcattactctcgtagcaccggggaatgaacctattaaaattgtgtatccgttatcagtcaattcttgctcatgtttggctataccgcagttttctcattgtgtagtgaaatcatttgtgcttaacttatcattcc

SEQ ID NO: 27442 - DNA, 3046 bp, Oryza sativa
  ref <308>: DATABASE ACCESSION NUMBER: AK102884
  ref <309>: DATABASE ENTRY DATE: 2002-08-28
gtagtgggagctccccgatccagacaaactgcagcatatacacacacgtacgcacccgcatctcctctcaaattaaactcccaaattaattaaagagaagcagcaggagaagaaaaagctaaggaaaaaacaagaaaagaaaaggcatcgatcgagtggagatccaaatcaccgcgaaagaaggccccccgcgagcgcgaggaatccttccttcttcctccactcgactcgaaatttcttttggagcaaaccagctggggcttagagaaggctttggaggaatggaattaacttgttcctctgaagaaagtaactcaaaagagaattctgtaaattcatcttcatctccaatagaaagttcaggaccttttgtgtactacccaactccacctgccaccaaggatgatgcaggtaacagtagtgatcatgaaaaaccaaatgcgcacagcgaaaaatcatcccaaccagtcattttgaaatactctaatggactgacagatcatgttggttgcatggattcaccttcatcgatcgtagaaaggtccctccttgattcaacaaagccccacatggaatctaactctgcaacagatgcaattcctgaaattctctctaattcaggactaagtgaggcattcaaccactcggtaaaggatgaggcagatggttcttcagaagatgcccttgaggtgaaccatttgtctgacaatgtctcagctggtgctgaaactatgttgacagatgaaatgaattctaaagaagacaggatagatcagaaaaatgttgctgtaaagccaaaaatggtagaagaacaaggagcggcacctggaagtccatataaaggccttattgacaccgctgcaccttttgagtctgttagagaagctgtcaccaagtttggaggaattgttgattggaaagcccacaaagctcaaatgatggagaggcgcaagttcatacaacttgaacttgagaaggttcaaaaggaaattccactctataaagaggaactagaagctgctgagatggttaaatcacaagtagtcaatgaactagaggacacccggagaattattgaggaactgaagcataatcttgagaaagcacaggttgaagaagttcaggcaaaacaggattctgagcttgcactacttagagcgcaagaaatcgagcaaggagtagctgacgaagctagtgtgatagccaagactcaaattgaagttgccaaagaaaggcatgaaaaggctattgctgaactaaactcggtgaaagaggagctgaaaacagtacatgagcagtatgttaccttaatcaatgaaagggacacagctatcaaaaggtcagaggaagttatttctgttgggaaggacattgagaagcgagtggaggaactgacgctggaactgattgcatccaaaggttctcttgagttggcgcatgctgcacatcatgaagcagaagaacgtagaattggtgcagcattggagaaggaggaagattgcgttgcttgggatagagagttgcaacaggcacaagaggagcttcagcaactcaacaataagcttctgtccaaaagtgatgtgaagcagaatctagatacaaatttacgcaggctgcgtagcctcaagtcagagctggcaacttatgtacaaaatgtaattagtgaagaagctgaaggacttgtgaaagaacatgggcctgatgatgctcaacaaattagtggtccagttaaggaagctctagcttcagcacagaaggagcttgaagaggttagagcaaacatagaaaaggcaaaaaatgaggccaaattgttcaaacttgcagccacaaccctcagatcagaaatggccaatgagaaatcttcacttgttgaattgcagcagagggaaggtatggcatctattgcaatctgtgcactagaagctgagctcaataggacgaaacaagagatagaatatgtaaagtctaaagaagaagatgctcaagagaggatggtagaacttcctaggatcttgcaggaggcagctcaggaggctgaggacgcgaagatggtagctttctcagtacaagagcaggtgaggaaggcaagggaagaaaccgagaaaaccaaaacagctgcagccacagtaaataccaggttaagtgctgttctgaaagaaatagatgcatccaaagcatccaagaagctagcgtttgcggcggttcaagcattgcaagaaagtgaagaggcaggagatgatgagaattctcccagatgagtgacacttcctctgagcgagtattacacccttagcaagaaagtgcatgaagctgaacagctggcacatgagagtgtcacagaagcactggcacaggtggagtcggcaaaggcgtctgaatcaaatagcctagagagactatgtgaagcatccaagaggatgaatgagaagaaggaagctcttgaaagagcattagagagagctgagagagcaaaccaagggaaactaactgctgagcaggaactgaggaaatggagagctgatcatgagcagcgcaggaaagctcaagaagccgcgaaacgggcagttaaccctttgagtagctcacctaagagaattgttgaacagaaggattctttctacaaagagttctcaggtaatagttatgaggaccttgttccgaatcggaagctgcggaggaagaaatctttcttcccactaatgggctctcttttatccagaaagactcgggcataaacatagcagaagataacaaggtcccaggtcttgggcagttttatttctgtacattgctgtaataagttaatttaattggtcttgaaatttggtgtctaacttaagttttgatttaatttgttggtgtaaacaaccagagggcgtatagtggtgtgtttataacaattttttgggttactttggataaattctgcaaagaaatgtgcattccttgagtgtagctatgttctgtaatctcctcaaactggaaaggatctgactagtggcatatttctgttgggtataatattgttctgtgtaatcttcctccc

SEQ ID NO: 27443 - DNA, 3195 bp, Oryza sativa
  ref <308>: DATABASE ACCESSION NUMBER: AK102885
  ref <309>: DATABASE ENTRY DATE: 2002-08-28
gagtggagccccattcggccattcccccaaatcggcaaatccccaggagaggcgagaggcggagactccagccgctgccgccgccaccacccacgtcggcgccatggccgctgcctaggagctctgtcgccggcctctccagcgcccctgcgttatccctcttcccccgtcgacgtcccacaccgccgcctcccacgtcggcgtccaagtccgcccctctaggtcgacggcggaggggggcagggggcacggggggaggaggaggaggaggaggaggaggaggaggaggggtccgggtggtggttgggggccttgtcgtcccgccggcgacgagtgtccacgagctgctcgagtgccccgtctgcaccaactccatgtacccgcccatccaccaggtttttcacatttaagctaagtacttggaaataggagaaacatacgacatcaagaaggtatggcaggaccactccctctggcttgatggcaaggttgtgaaggccaaaatctaggacaaactgaccaagaacggaacagtacaagaccatgtcttcaaggagaggaggtggtggccgccgtggtcgtggccgtggccgtgggagaagtgctttggcagaaaatgatatggactttcatgaaacctctgcactttcttccccgagcactacttctgataaagaggacaatatcgagttcacttcgcagcaaccttgtcttgtaagcccagcagcagagcatgtatccaacacattactcaaccctaagatcaaccaccgatcggatgcaatcttcggtgatcaggctgtggagcagttgaagttgcgacatcacaaacctttaaaatttcatgagagataccgtccttatttgagggatgctggccttcttgggctctcacaaatttgccagaagatgcctcaattggacaaggcattgatcactgcccttgttgagcgttggagaccagaaactcatagtttccacttggcttctggggagatggcagttacactacaagatgtagcaatgttgttagctcttcctatcgatggccgtccagtttgttctaccactgatcatgattatgcgcagatggtcattgattgtctaggtcatgatccaagaggaccatcaatgcctggaaaatcttttctgcactacaaatggctgaagaagcatttctatgaattaccagaaggagcagatgatcagactgtggagaggcatgttcgagcatatatcctgagccttttatgtggggtgctatttccagatggaacaggacggatgagtctgatatatcttccattgattgctgatctttctcgtgttgggacatacagctggggatctgcagtgctggccttcctataccgttctctttgttctgttgcttcctcccacaatatcaagaatattggtggttcattgcttctcttgcagctttggagctgggagcgctcccatgttggcagaccattggtccggtctcccctgtgcccagagacagacattccacaggatgtgccacctgttggctttcgttgggtaggtgcgcgcacacaaagtgagaatgctacacgctgtcttaagcagtacagggatgaactgaacctgcagcgagctgatcaggtgaagtgggaaccctacttgcacattgagtcttcaagcttgccattgctttgtacaaaagatgcagatttgtggcttacacaagctccactaataaattttccgatagtcgagatgtatttgcctgagcgagtgatgcggcaatttgggcttcgccaatccattccaccaccttttcgacctaccctacaggcgctgcatcgtattagtcgacgtggcagagaacatgagaactgggaagagacacatcatgagtacattcaggaatgggaagcccgccggcagcgcatatttccagagtcagagcagtatgacccatcgtcttatgaggagtacctgcattggtactcaggagttacacggcggtatcttgtaccatcaatcagtgatgatgtggaagcaggaccttcattacagcctgatgattccattgatcttcagtatcaagccaaggctcctatgatccgcaaagcagttgataaactgcatggtatggtaaagaaggccaagatggccatgacatccacagctgatacaaccacacaagccttggtctttgagtttctgcatggctttcaggatgttctccatgaccttggcgagatcaaggaaaatggtggttccgctactagtccacatgttgaatcagctgccgctcaagacatgcctctacttttgctagaagctgaacagaacattgttgatgccgatcaagaagctcagcatcaggaagaggaagagcttcacatggtggatgatgcaacaatgaccctcgagcctatggatgaggaggataatggtttcaacaatgtcatctgcccatgtccttcactggagttggaggaacacagtcactcagctacaccagccatcgatgagtgtgatacagccactcctgctccaggctctgcaatcccacagcaaagcactagtgttgatcaagatggacatctggaaaatcctaactaaatgggccagattgaactaatggtggaacctatgtatgtggatcacaatgattccaacaatgtgctctcatccagcacgtcagctcaggcgctgttggagaattgtgaagtagcagaggcagtcaatgaaaatgtcgatccagccacccaagttactggctcatctaccccagaacagggcacggatgtcatagtagatgctgaacaagaaaacccagccacaacagaggacaactaacttcaatggcgtcccctcgtctgcaaaggtgacaggcgattctgatttctccccttttatggaccaattcgtgaatttaagtataaattcaaacgaaacagagccaacttttgctctgttggctgcccatgtccttttatggacccttttatgaaccatagaaccacccatatatactgccataggacctttagtgcacggttttgtatagtttagggtgaagatttctggttttgtatttaagggacctaaaaaaatctcgctgtatatactgccataggacctttagtgtatggttttgtatagtttaggggtgaagatttctggttttgtgtttaaggacctaaaaaaaaattaagt

SEQ ID NO: 27444 - DNA, 2197 bp, Oryza sativa
  ref <308>: DATABASE ACCESSION NUMBER: AK102886
  ref <309>: DATABASE ENTRY DATE: 2002-08-28
ggccgctcgcattcgcattcgcatctcccccgcttcctctcctccgccgccccaaaaccctagcggcgagcgagcgagcgagccatccatcacccatggcccgcaagcgccgcgcgccgacgcccccgcacccgccgccgccgcctcccgaggccgagtcctccgcggattcaagcggcgaggaggaggaggaggaggaggaggaggaggaggagagggagtctcccgtcgccccaccgccccagaagcccagcggccgcggcgccgcctcgtcggatgaggaggaggaggaggaggaggactccgacactgacacctacgcccaaggtttccagcttcggaaggttggcggcggcgacgaggaaggggaggaggtggaaggcgactcgtcggagtcggagccggagccggagcccgtcaagaaggagtcggcgaagaaggccaaagccgaggccaagaagaagagggccgcgcctgagcccgcgccgtcgggcaaggccaagaaggccaagccggagaagtcgtcgtcggcggcggcgcctgagcccgctccctcctcgggcaagtccaagaaggcagccaaggctgaggctgcgaaagcggctgccgctgagccggctccttctaccggcaaggtgagcaagtacaatttggcgccggagccctcgccgtcaagcaagtctgggaaggccctatcgcgatggacgacggatgacgaggtcaagattcttgaggtcctcgtggcccatttcaagagccacggcactcagcttaaagttgaggggatcatcgctgctgtcggcgatagcctcgagaggaagagcatcaagtattcggacatgtatgagaaggtgcggaggctcaagcagcggtacgaggccactgccaagaaagttgaacacggcggcgacctaccagctaaagaggatgacctgcggatgtatcagctatcgtcggaaatctggggaaagaacgcaaaggatgctggcaactcgtcaaagaacaagaaggggcaagctaagaaagataaggtgagtggagattcaaaggaagccgccaaggaagataaggtggatgaagccgccattgctgtgaatgaaaagggtggtactctggcagagaataagaaggggaaaaccaacaagcagaaaacaggtatggaaacaaaggttggatcatctaaggaggctgctcttgctgctagtccaaccaagggtaagaagaagggaagccacaaagacaaattggatgaagaagcaaagagtggcacggcaaaggtgacctccacaattgccactgatgatgatgatggaactttgggtgggagtaagagggagaaggctggcaaagaggaattggatggggacacacatatcgtcatgccaaaggaggccaccacaactgccgctagcgatgatggtactttggttgggagtaagaaggggaaggctgacaatgggaaattggatggcgacacacacagtgttatgccaaaggaggccaccgctggcacccaaaatggtggcatcctaacaggaggggaaaatcacaaagaaaaagtagataaagatgctaatgtaccaagcatacggagggagtatgctgaattgcagagtttgtatcccaaccttgcttcctttgtgaacggaattgaggcccagcatccatgtggatcaaccttcaagagagcttttgagttcattagtgatgataaggcttgcaccctggaatccaagatcaagaagcagaagatagcggaagtgagaatgcagctccgtctagcagacacgaagaaggaagtagccaatgctttgttaggattgctggactaaaacattgcggtgctgacatcctttttgtgcgatggttgtattgaagattcaagttgcagaagatttttggcttgtggagctaagggatatgacgtgacgagttgagctactgggttttctgtctctggttctcgagagctattctgtgaacggttgtttatgtgattagatggtagtatccctttaatctatgagttagcaatggagctgatgacagtttaattaactcctgtatctatgatggcatttggctttaattaggaggtgtgcctaattaagggggttctataactttgggatatgcgtgatgctgatattgacccgaaatcccgtaatcctgcttattttgttgcccggtttattcg

SEQ ID NO: 27445 - DNA, 928 bp, Oryza sativa
  ref <308>: DATABASE ACCESSION NUMBER: AK102887
  ref <309>: DATABASE ENTRY DATE: 2002-08-28
gaatcactcatccaagtatccaacaaagaacaaacccacccccgccgctgagatcgaatccgaccttaattttcacctgctcgctgatctcgccggccgtcgaccgccatggggatggtgctgggcaagatcacggtggagacgcccaagcacgaggtgctccacaccggcgccggctacgaggtccgcaagtacccgccgtgcgtcgtcgccgaggtcacctacgaccccgcggagatgaaaggcgaccgcgacggcgggttcaccgtcctcggcaactacatcggcgccctcggcaacccgcagaacaccaagccagagaagatcgacatgaccgcgccggtcatcacctccggcgagcccgagagtatcgccatgacggccccggtcatcacctccggtgagcctgagccggtggcgatgaccgcgccggtgatcacggccgaagagcgcagccaggggaagggtcagatgacaatgcagtttctgctgccgtccaagtacagcaaggtggaggaggcgccgcggccgacggacgagcgggtggtgctgcggcaggtgggggagaggaagtacggggtggtgaggttcagcggcctgaccggagacaaggtggtgaaggagaaggcggagtggctcaaggccgcgctggagaaggacgggttcaccgtcaagggccccttcgtgctggcgcggtacaacccgccgtttactctgcctccgctgcgcaccaacgaggtcatggtccccgtcgagtgatacggcgagactccattgttggtgtctagtgatgtactgatgcgcatgtacttttatcagggtgtccttgttactcctaggccctagctatttctctatttctttatccttttgactttgttctgtactgatgtatgtttggatcaacgaataatggacatatcttggg

SEQ ID NO: 27446 - DNA, 2308 bp, Oryza sativa
  ref <308>: DATABASE ACCESSION NUMBER: AK102888
  ref <309>: DATABASE ENTRY DATE: 2002-08-28
cctcttcccctcgtcggctcctctgacaaaccccagcaggagtacggcaccgccctcccgcccgtccgtcgccggcgaaactaggtcgtaacttcccagccgagcagcccatctcgggtaggaggagctcagcgccgtcgacgctccccggcgggcttcaatttcggtcgccggcgacaagtactacagttaagctccttgatattctgataacaaacaaggcagctgcaaaggctatattcatcaaaatggacccagatcaagtggagattccctttaaagtgcttcaggagagagtccctggtaaaaagaagtattccttaagggttatcaaaccttcgtcctcaaagaagatatgcagaagcgttaacagttatccccttgtctgtctgaagagggagatggcagataatgatcatgtgcattgcataatgcttacgctaaatcaccgaaacattctctcaatgaaagccctatccagggacaaggttgagagcaatggcccctcatccttagcagcatttgtagagccttacactggactgttatcatcactttgttttaaacatgattgctggggtgacagaataaaccacattccttcaccattactccagtccttattaaggcaagtcattgaggggcttgacttcttgaggaagaacaaactgtatcatggtaatctcaattgggattcgattttgtatcttcaaccgtctaccgttaagcttgctaacttcagaaaacaagagacaatgagcttggaggaagcccagtgggccgattggttgtgccttattaaaatgcttgaagaaattttagaaagagctgctgaaataagctcaaagcttgctcaatgtgatagatatttctgcggacatgttgaatctttgactgctctattgaaaaccctggataagactgcattgccggcaattaaagaaattgttcttgggcatcctcttttttgggatttgatgacgagggtaaacttctttgcaaaggatatatcacttaggttgaatgatgacacttttatgtcaagagtgagagcttcaaaaatccgtaagcttccttggaatgaaggaacaactcaagactttaaaggtctcctgtttgaaatggaaacctatcgtaaagatgaaggaattccagcatatgacttcagaagcttaaaagattatgtacgctgtgtctgtggtgcttatgctcactggaataaaataaagctaaatgttgacgacattgttcggcaaaaccatcctaccatatgcagtgatatctggcatcttcttggaagttcagacatgtcgcatgctgattctaagaagccagttgaagagattaaattaatatctgatgtcgttagagattcaccacacaagattttcatcgctggaattcctagagtgatttcatctaagatgctcagggatatagttagttcatttggtcaattggctgcttaccgctttctttttaatgaagaccttggtggagcatgcgcatttcttgagtacattgatcactccattacatcaaaggcatgtgctggccttaacggcatgaagcttggtggatgcgtaataactgctgttggcgtgttaactgatcatcctgggcaggctggcaatgaagcttgcccatttcatggaattcctgccaatcccaaacctcttcttgcagtaccaacacaagtcctgcagctaaaaaatgtgtttgaccaggaggaatactcgctgctttcaaaatatgaggtagatgcagtattggaagatgtacgtgtgaagtgtgcaaggtatggagctgtgaaatccataaatgtcgtagagtatcctgctggcagtgacaacaccaaggcacctgcagtagatgctagagacaacgctttggcttctaacaacactgcactcgaagctggctgtatacttgtagagttcttgtgcaaggaggcttcattcatggctgctcattcactccatggccggccttttggcagcaggattgtctctgcgggatatgctccatatgatctcttatctctaccggaggtatttccagtgttgagattctgatgtactccacttttttcaagggaaaaattctgatgtactgatggagctaaagcttgcgtattccccaacacgaagtaccttgtagctttggtctgttggatgcataagcgtgaaactagttttcaatcagaattgatacaagggaacaagggaacaagtacttgttccttgggatgaaatattggatacacgtgatcagtaaccattttatctgaagtcacagcatttttctc

SEQ ID NO: 27447 - DNA, 1300 bp, Oryza sativa
  ref <308>: DATABASE ACCESSION NUMBER: AK102889
  ref <309>: DATABASE ENTRY DATE: 2002-08-28
gggcaggaacacaccaccatctgcataatacttccttctcaaatcccaaccaacagttgcagtagagtcactagccgcccactgcaactgaaatggcgccggcgagcgtgaaggttttcgggtcacccacctcggcggaggttgcccgcgtgctcacgtgcctcttcgagaaggacgtcgagttccagctcgtccgtgtcgacgcgtaccgcggcacgcagcgcatgccccaatatctcaagcttcagccgctcggcgaggcgctcacgttcgaagatgacaacctcaccctgtccgagtcgagggggatccttcgccacatagcgcacaagtacgcgaggcagggaaacccggacctgatcggcacgggcgcgctggagcgcgcgtccatcgagcagtggctgcagacggaggcgcagagcttcgacgtgcccagcgccgagatggtctacagcctcgccttcctgccgcccaacatgcccaagcagaacgacaacgggaacgggaacggcaacggctacggcaacagcaatggcagggaggtccaggtggcgaacgcgtcgagcaagcgcgtggtggccggcgcgacggacgggaagacggcggcgagcggcgccaacggcaacaagcagcagcagaaggaggaggagatgcggaaggtgttcgagaagagcaagaaggacctggagaagctgctggacatctacgagcagcggctggaggaggcggcgtacctggccggcgacaagttcaccatcgccgacctgtcccacctccccaacgccgaccgcctcgcctccgacccgcgctcccgccgcatgttcgaggcgcgcaagaacgtgagcaggtggtggaacaacatctccagccgcgagtcgtgggagtacgtcaagagcctgcagcgcccgccgtccgccgcgcacgccggcaacgcccagcagcagcagcagcagcaatcgccgtccgccggcaacaactaccagcaccagcagggccagggccagggccagcagcactaccgcaacgagcaagtcgagaactacaacaactaaacatgggcatatcgacgatcgagctgcatgagttccaaggggttgtcacgtatgcttcctactgttactttacttgcgcctttgccatttgcgcgccgtgtcgattaatttgtcgcagattgtctggcccggcctccagtacgtcgtcactacgtgttttgttcggcatcgtggtttttctaccgttgtaacagtcgcagtttacctatcgtccttgtaataaaatgttggccagcccctttcatacg

SEQ ID NO: 27448 - DNA, 2086 bp, Oryza sativa
  ref <308>: DATABASE ACCESSION NUMBER: AK102890
  ref <309>: DATABASE ENTRY DATE: 2002-08-28
ggttggctcccactcccccccaaaaaaatccaaaccgagaaataataatcacaataaaactaaaaagaaatccgggcctaacgggccgcgcggcccaacccccaaccccaacgtaataacgtatcattccgcgtctcgaactttccacctctcccaaataattttcttctttcccctttttttctcctctccccttcgactcagtctcgcaccgaagaagaagaagagaggaagaagacgcgacgattgacgagtaatcgagctcgatttgagcacccccgcgcgcggatccgccgatctagttcagtggagatgagtcgcgcacacggtagtcccagatcgttcttccctgtggggaatccctttcgagttatgtttccagggggagctcacctatctcggaagctccaagagttgctcgcttcgtacgaggatgccctggcattgagcttgaggaagctcaagccggaggccgcctcggatgtcctcaccttgtcatggatgaggcttgcagtggattgcttgtcagagctgcacaccaacatagctaacctgataaccgatctcgagctgcctgtctcggactgggatgacaaatgggtggacatttatctcaacagcagcgtgaagctgctggatatttgcatcgcgctgagctcggagctctctcgtctggatcaagggcaattgctgttgcagtatgccctgcatgtgttgggctcggagagtggcgtgccgtcgcaggagcaactcaagagagctgagccatcacttagggagtggatggagctggtgggcgtaagatgtgcaaggcttgttagctgctcggcgaccttgcaggagcttgctgggaacctttctctgatgaaggtcaagaactccgcgaaagggaaagtgctcatgagagcgttatatggaatcgagtctgtgacggtgttcgtatgcagtatttttgtagctgtactgtctggcagccccaagccactggtggagttgcatgtccctgaaaaatttggttggtctcaggccttcaatgaccttcatactgcagtcagtgaggaactcacaagacaattatccggtggaagtgttgcagctgtaaaagagctggaagaagttgaagcatgtgctagaaggctgcatgttttggctagcacttctcagcttgaagaagaagctgccaacctggcaaatgctgttagccatacagaggaagaggtcatgtcagacagcattgcgcaggaaggagaccatcactgtggtcttaaacttgctgatgacactaccagggagggtggaatagtaatttcagagagtattgcagaagggggaacacaagaagctgaaatgaagaaggatatcagctatgaaaaggaagtggcaatggttgagagaatcagttacaaagagcaccaagatagtaacgtaaagcaggcgaatggcagcagcgatgagagcgccctggttgttcctgagagaaccagtgtccaggaaagcaaggaggaactattaaactgcatatccagcatgtcgaaaagcgcggaggggctccggcatgggttggactccctatcgaagcgcgtaggcgacttctttcagatcgtgcttacgggacgtgatgcattgctctgcaacctcaggatctcagatgcagcaagcaaggtcgccgaggtcagctcttgatattttatgtaaggtttcttgccgtataatgtttgtgtggctaagtgtgcgcccagcttggtagcacagctttgaacattgtgcttctgacctgtggcccctgctcagccccacagaaactaagctggggccacatctcagaagcattgtgcatagtcctgtgctgctagttgtgcttgtgccgtgcaaatcttctaagtccatcggcatcaggctctgtgactgtaaactcagccttgtcaagtcctatacagtcattttgtttactttttggtaagagttagtgctctactcgttgtagcgcaggtcatatgcgagtgtatagaggcgtgagtgtagtaactgtatgtaagctggagtgtgttagcaatatacgagtagattaatgtgttctgcaaagagc

SEQ ID NO: 27449 - DNA, 1392 bp, Oryza sativa
  ref <308>: DATABASE ACCESSION NUMBER: AK102891
  ref <309>: DATABASE ENTRY DATE: 2002-08-28
gatggtcggggtcgatccgtcgcgggggaccatctctcggcatcgatcgatcgccgccggtgtcggcggcgaggggcggcgcggggatggcgagcggcaacagcggcgagccgagcacggcgccgcagccgaatcggtggtacgagctccggctgggctcctcctgccgcgacccctcccccaccgccaagttctgcacgctccgctatgaatttaagccagcatcaattgataagactcaagctgggtctctgcagaagaccaaagataacagggttactgtggaattccacaacaatcagcctggcaagccaaaggtgacatttgaaggaagccaagaagagtacaaggataatgatggtgtcttgttttttgatggtgaaacctttcgtctggagcggttgcatcgggctgtcaagggattaaggcgtgtccgagttccaggagagtcttcggcagccacttcggctactactggaatgggcgaatcacattcccctccattaccgaaagttggaaagtcaccggccatgagtaaacctgctgtacactcagttcctgttgaggttgaacgcattgacattggtgaacctgaaaatccaggtctaagaaacaataacaggagcactacataccaacctgttaccacaaatccattttcattttcgcctgatccaaatgatcaagaggagaacctagacatacttggtgatgatgacaatggctcaccgaataacatgtcctctggacaaggagcttctgttcgtggttttgacatcaacataccaaaccagcttgacatagatgatgaaattgctgatgtagatgtcagtgatgaggctgatgagggactcaatgcagccgaggccctgcgagctcaagtcaatgcagaagggcagcaggatgagcaggaaacctctagctctagcgggagcagcagcagcagtagtagcagtggaagtgggagtggtagtggaagcagcagcagtgatagtgacggcagtgatggtgattcagccagctctgggggtgacgttgatatataagtttggtgtacagagttttcttgctgtgtatgccatggttcacaattttacaccagtatcaggaggtgtaagccttgaatgtttaactcatagttcacaggtaacaaaattaagtttcttctgttgtgatcttattctgctgtaatttgtttgttctcctcttggttagtctgctatgtttcttagatctagcctggagcatagcatttgtatgaaacctttgcatgatggattttcttcccaaatatgggatatattttctcttgttttgaagtacagaacggcatatattctgatatgtagacatacatagtgtgcaccatgttgtgggttagttgtttgatgg

SEQ ID NO: 27450 - DNA, 2712 bp, Oryza sativa
  ref <308>: DATABASE ACCESSION NUMBER: AK102892
  ref <309>: DATABASE ENTRY DATE: 2002-08-28
ggggtcccctgtacagtgacttttctcattttctctatttaattcaaatcccaaactttagaagcccatgtctcctaaaccgtagatccgattccagtcaaacttggacctaaagtcatctaaattcaaaatctatattttgataccaaatttgctattttaagattttatttagatttccttaagttatttaaatgtcatttgcttttcaaatatctccttttattttaaaataccctttagccactaaaaagccgccggttggaactttacaccttccatggggacgttcgcgtggtctacggaccccaacgtcgaaccgttggttgtaaagctcggcataaaccaaacccaagattgaagtgctgctcctggcaccctacgcctcactgcgtacaatggtcggagcttgactatttcctcgacctccacagcacgctacacagttcgctctcaagctctgtgtgattctagccgctccaccgccactcacggttgtcggagtaacacttccaccccactaaacctgcacccacctcctattcttctagccgatatgatgtctatcgacaccagctagaaatgataccaaatctagtcgctatactatccaactctagcgatgactagcaaacacccaaaaccctagccgatatttatcctacctcaatattggcctaaacaactaaactctagctaacaccttgttggttaaaacccaaccgtcatccaaataccccacctaccaatatcgcctatccattatactcagccacctactctcctagaacctatacagagcctaaccgatatgcttccctactccgtagtcggcttaaatataaccaaaccctaggtattatactacccgaacctaccaccaaccaatactagccatattccaactgaaccagttcaattatccaatatacatcctatccttttagcaaccaagcattcacatgaaatataagcaaccttagttgcctgatcccctctccaccttagccttcaaccctttagaaccctatacccctttaacggagatatttataccccaagcctagccattcttgctctttatcactttcttactatttcatgatttttattgaatttggttcttcgtctttcttagtagagtctattttattttggatggcaacctgtggtatttcgaggatcggataatcaggttgcctatctcggatttgtttgcgttggagcaagggaagttattattccctccctttgagcataatgatcctatattcttatatctctattctatgtattagtcatacatgatttcaaatgcataacttgaacatatagcaaactagatatatgctagcttttgcttagctctgcctagttagactgcataaaatataatgaacttagattgggacagtacggtagaaatagttgatttccgggtggctagtactgttccaaccgacataagactgccaagtacatgtgaagaacatatgagtacgaccgcaattctcgtatgggcatggacctagctgattaagttatctagcaaaggtggtacctctgtatagtggttcttcttaagtcctcgcacaggaggcaaatttatgccgcgaagggcaatattgtgatatttaccgaggcgcaggtaaatatttatttgagataaatcatgatcatgaattgtttgtgaaccctaattgcgaagacatggtgtcatacaatcagttctctctaaagatctcgggaatgccagaactcctctcgctgctgataacgctacgttcagagcgcatggggactagagttcatggaacaggtaccactgatgttagtaactgaaaagctttgccatgataaggctaatgtgtttggcacgtcatggattgcaggtaaagcgtacatctactgcagtatgaatattattaaaactattcgaatagctgtgctcgcggttatcgggcattgggactcactatggcatcttggatagaaacctaattcaaaattttattaaatactgctgcatttaaaacattacaggttttctacttctacattctctgctttctgcaaataaacctagctttacacagatattatcaattcatacattcattgttgattaaatataatagcttgctgagtacgttgtactcacccttgcttcaaccccctttttcagagtccatttggagtttgtgccgaagctgggagttcaattatataagttagtttcatgtcaacctaattctcaagtctagattagatagatggtttaagtctatagcaaaacagcaaagttagtctattccaaagcttttgctgcactagttagccacaatcttgtaaataccctattactttatgtaataatatctccttcaaagctatgtctaaatgtatgtaaagacgatccagattattgaaattgtatcaatctactgatctagggcttgatacaattttaatatgtcggttaccgaatcattagttttgggacccgacagtttcctatatgtaggtaattttcagggcaacatattggcttcgacagtgggttcaactacaaaagtatgaggaagatggagttttcctgaatgttgcatgtcgtaatcttgaaacaatggttatgcaacttttcgccaactatggatggagattcaccaatagactggaatattgttttccttgtcatgttaggtcttcttt

SEQ ID NO: 27451 - DNA, 2376 bp, Oryza sativa
  ref <308>: DATABASE ACCESSION NUMBER: AK102893
  ref <309>: DATABASE ENTRY DATE: 2002-08-28
atatatatatcaccacacactcccaagtcccaacaacacctacttctcacacatccatgcttctgcctctccaatccatcctctgctactttctccaacatttccatgtctccactccacacccatctcgggttcttcctcctcctcctcctcttctccttgcacaatccatcatgctccgccgcggcgaatgataccctcgcggtggggcaggtgctcgccgtcggggagaagctcgtctcgaggaacggcaagttcgcgctcggcttctacaagccggcactccctgaaggcattgcaagtaagtatggcaacatcacctctcctggatggtaccttgccatatggttcaacaagatcccggtttgtaccaccgtgtgggttgctaatagggagaggccaatcactgatctagagatcaagctaacacagctgaaattctcacaaaatggcagtagccttgccatcatcataaaccgtgctactgaatacacagtatggtccagacaaattgccaataggacagcacaagctaaaaccagcatgaacactagtgcaattctcttggacagtggaaatcttgtcatagaaagcatccctgatgtttatctgtggcagagctttgatgaaccgacggatcttgcgcttcctggcgcaaagtttgggtggaataaggtcaccaggttgcatcgtactggtatatcaaagaaaaaccttattgatccgggtctcggcccatattccgttcaactgaacgagaggggcattatcctgtggcgtcgagatccttacatggagtattggacctggtcatctgtccaattgacaaatatgctcataccattactcaattcgctactagaaatgaatgcacagaccaaaggtttccttaccccaaattatactaacaacaacgaagaggaatacttcatgtaccattcatcagatgaatcctcttcctcatttgtctcaatagacatgtctggccagctcaagttgagcatttggtcacaagctaatcagtcttggcaagaagtatatgcacagcctcctgatccatgcactccatttgcaacctgcggaccttttagcgtatgcaatggcaattcagatttattttgtgattgtatggagagcttctctcagaagtcacctcaagattgggagctcaaggatcgaaccgcaggttgcttcagaaatacgccattagattgccctagtaacaagagctcgacagacatgttccacacaataactcgggtcgcattgccagctaaccccgaaaaaatagaagatgctaccactcaaagcaaatgtgccgaatcttgtctcagtaactgctcctgcaatgcttatgcctacaaagatagcacatgctttgtctggcatagtgaactccttaatgtaaagctacatgacagcattgaaagtctttctgaagatactctttaccttcgcctagctgccaaagatatgccagctacgaccaaaaacaaacaaaaaccagttgttgtggctgttaccgctgcaagcattgccggttttgggttactaatgctcatgctattcttcttgatttggcggaacaaattcaagtgttgtggtgtaacattacaccacaaccaaggcaacagtggaataatagccttcagatacactgatttaagtcatgctaccaaaaatttctcagaaaagttggggtcaggtggttttggttctgtgttcaagggagtattaagagactcaactactattgcggtgaaaaggctcgatggttcacatcagggagaaaagcaattcagggctgagactttgggatggcggcatttgtgggaagggattttagtcgggttctaactactttcaggggaactaaagggtatcttgccccagagtggcttagcggagtcgctattactccaaaagttgatgtttacagttttggtatggtactgctagaaatcatatcaggaagaaggaatttatctgaagcatacacaagcaaccattatcattttgattattttcccgtgcaagccatcagcaaacttcatgagggaagtgtgcagaatttgcttgatccagaattacatggtgatttcaatttggaagaggctgaaagagtttgtaaagttgcatgttggtgcattcaagaagatgaaattgataggccaacaatgggtgaagtggttcgctttcttgagggtctacaggaggttgacatgccccccatgccaagactacttgcagccataaccgaaaggtctcatatatagtttcagtgttgtaatatttcataaatactttgtattcaatgtaatcagtcttttgtttgagcaaattgaaagttccaatgtaataatctggcaattgctt

SEQ ID NO: 27452 - DNA, 2886 bp, Oryza sativa
  ref <308>: DATABASE ACCESSION NUMBER: AK102894
  ref <309>: DATABASE ENTRY DATE: 2002-08-28
gaatcaaatccgctcctcccatttcccctctcccccaaactcctcctcgtctcctcctccgctcccccaaccaaatcccaaattccgcaccaccccgagcgcggcgacggaagcagatcgcggcgatggaagcagatccggccccatcctcgacgccgccgccctcctccccggcgcccgcggcttctccgtcccggcatcctccaggtgaggaaggaggaggggctgagcgcgtggaggtggaggagtacgtggatcccccgagcccagattgctgcggcggagccgacccggaccatgcgccgccgccgtcgccgaaaggtgaggagccggtggtgagcgctgaggaggagcaggcggcggttgcaggaggtgaaggggaggctcttcgcagcttcttggaggaatttggagaccaaggggatgattcccttgtcccgtcaccgaagctgaagcagataaacacccctgaccgcctcgctgctcttcgttttcttgggggaaagtataacagcttgttagagaggtacaagcagcaggtggctaagtgtgccgaggagtgtgcgccgaggtacgatggcttgaagaagaagtacgcagatgagtgtgcagaacggcgacgattatacaatgagctcattgaactgaggggtaacatcagggttttttgtcgatgccgccctctaagcactgctgagatctccaatgggtgttcatctatagttcagatcgatccatcccatgagactgagctgcagtttgttccatctgataaagacaggaaggcttttaagtttgatcatgtttttggaccatctgacaatcaagagactgtctttgctgaaagcttgcctgttgtgcggtctgtcatggacggtttcaacgtatgcatctttgcatatggacaaactggaactgggaaaaccttcaccatggaagggattccagaggataggggtgttaactacagagcattggaagaattattcaggttgtctgaagaaagaagctcttctgttgcctacacatttgctgtgagcattttggaagtctataatgaaaaaatcagggatcttctagatgaaagctctgagcaaacaggaagaaaattggacataaagcaaactgctgatggaacacaagaggtggctggtttgattgaagctccaatttatactatagatggtgtttgggagaaactgaaagttggagctaaaaatagatcggttggagcaactagtgccaatgaactaagcagccgctctcatagcttggttaaggttaccgtcaggagtgagcatctggtgacagggcaaaagtggaggagccatatctggttggtcgacctagctggaagtgagcgtgtgaataaaacagaagtagaaggggacaggctaaaggagtcacagttcataaacaagtcgctctctgctttgggcgatgttatttctgcccttgcctcaaaaaatgcacacattccttatagaaattccaagttgactcatctgctccaaagctctttaggtggggattgcaagacactcatgttcgtgcagataagtccaagttctgcagactcgggagagactctctgctcacttaactttgctagtagagttagagctatagatcatggccctgctcgtaaacaagcagatccagctgaaacttttaagctcaagcagatgacagagaaaattcgtcatgaggagaaggaaaatgcaaagttacttgaaagcttgcaactgacgcagcttaagtatgcttctcgagagaatgtcatcaagacacttcaagagaagataagggaggctgaacaaacgtccaaaacttatcagcagcgggttagagagctagaaaatgaattagccaatgagaagaaggctgccagggatacagctagatcaacaaagccaccacttgctcctatgaggcagagaccacctcttggaagaattggcaatcacattccacctaaggctcctcttagactgaggctcagtaaagcacccacaattcaaaataaagagaacattcctgtcatgttgaacaaaggatcctctggggctgataccagcaaggctgttgctggcaaggcacggcgagtttctctgactcctgtgattcgacacatacctctgcagcccaagaggcgatcctcactcgcggtactaccaacccagagagaacagctgtccatatttcctgataagagatcagtgtcccgtctgtcccatattcagatgccaaggagatcaattgcaacatttaattcaattccagcaacaccattagcagctgctgcacataaacaggttgatggcaccccagaagcacggcaattgaggagaatcgagttcagcagtagcaagttcagaagccctccagcgctggccaggttcaactcaaggaataacgccttgtcacctcagcagaagctgcggctagcatctggctcaggaaatgccagcaaaatatgcttcagtgttcagaagagagtgatcctaggttcacctgctccagtgaaaagcagtctgctctctggtactggcatcttcaatccagctctgcgcgagaaaatgatggcggcgaaaatagggaatgcgcagcgcgtgttcaacaccaacaggaggaagtctgtcctctgaagtaccttttccagaccagaactgaagaccaatgtttggatgttcaaacagtgatgcagagtaggaatgttgacgattactttgtttaacccgttgaaagccatccatctgtactcgtggctttgtgttgataaaatgtctgtgataagggttgtacccattcatcagttcttttcttaaaatgattgatgttagtgttccttgatatttttttattgtataaattcgttacagttgc

SEQ ID NO: 27453 - DNA, 2100 bp, Oryza sativa
  ref <308>: DATABASE ACCESSION NUMBER: AK102895
  ref <309>: DATABASE ENTRY DATE: 2002-08-28
ggaactcctcccccattccccaaccaaaccccttccccttctcccctcactctgctcccctcgaaacctagggttagggtttcggcccccctcctccccaccggcttccgaatccacccgcctccgcctccccctcccgccatggccgccggctccatcgtggtggacttcccctccatgggcgccgcctgctgcttctccagcctcgagtccctcctccgcgactccacctcccgcttcctcgccgccgtctccgccgcgcccgacccggacctcaccaacttccgctccctcttctcccgggtgctcaacacctacccggacccgccgctggaggccgtctggttcttctccgcgctctccttccacgacaaccccggcgacctccgcagcctcctccacctcctctccgccttcaccgcctcctcccgctccgccgccaagccgctcgccctcctcgcccccgtcgtctccgagctctaccactccgccaagccccggagggaggccgaggccctggtcgaggccgtcctcagctacatcagcatctgcagcagccgcgccgcccccgccgccggcgatggcgccggcgccggcgccgacgccgggagcctgctaccggccttcggcgagctggtgaaggtgtggagcgtgcgccactcgagggacaggtgcccgttccaggtgctcttccctcttgtcggggaggacgccaggcgggagctcatgagggaaggctgcagcgtcgccttcctcgccggggcggtggttgccgaggcgttcctgctcaggctctgcctcaaggtgcagggcgcggcaggcgcgtcacgcgccgagctgcagaaggagctcaggatctgggcagtgagctccatctcggtcttccagaaccagcaattcttcggggttctgctgaacatgctcgtgaatcctccgctacctgtttattcactactgagtgctgatgatgaaatcttggtgagagatgtcctttatgatgctctgattttggtggattattctttcattaacaaaggagcaggagttgatcaagctgatagctcccttttgcccctttatgtgtcaagattgcttatcactcatgatgccatcaatgacgccaggagcaaaggtgatcaaggaagggcgatgtctttcatgaatgccttcttcacttcaaacatccccacttattttgccaagtgcgctactagtcaagttggcttcaaccaactcagcaaaccagctgctatcacacctcaagctcttctcaagtggcttgtagatctggaagataagggcttcaaagtatttggagagaatgtttccaggattagggagaggctgatgtatgacgaggtcaagaatggttaccagagcaggatgactcactcagatgctgaccttttcttcattgacaagcagagcggtggggaggttatggacacaagagctggtgaggatgaagaagctgttgagatggaaacagcagacaatgcttttatggctgctgctcagtctatgaaggcgatggctaatggcatgaggaaaaggaaggattgcggggctgaagacgcaaatgtggtcaagtttgtgaagtacaaggttgaagacagctcagtgaaggattacttcttgtcggcaaataatggtatgagcagtggtagtgaggtagagaatccacagtctgatgatgagatggaagaaactgattgatggatagagaggaaaccatccgctaatgcttacttgggagagtcttttggcgagtctggagttgggacgattgctgttgcttcaggttccccttctgtaggatgtcatgcagcttctgtctggatgatgaatgaagcgggattctaggataataatctgcaacgcagagcccgaccccagccaggcttaccgatatagtagtaactgcttagctaacttagactcgatgcatgatgctacaaactatatatcatgttctcttctatatgcaatagagactttaaaatgtagatctactttaaagacttctgtaagagaagagtaccttttatgttatcccacggaacatcttttaagttagtgaaatcttagcatttgtgtagc

SEQ ID NO: 27454 - DNA, 983 bp, Oryza sativa
  ref <308>: DATABASE ACCESSION NUMBER: AK102896
  ref <309>: DATABASE ENTRY DATE: 2002-08-28
ggttgtcgcgagtctcgtgacctagcctaagcgccgccgccgcttcgccttccccacgcgggtcgccggcgcccccagcctcaccggtgttgctccccctccacgcgctcgccaccaccgccgctccccgagtcccgtgcgcgccgctgtcgacaccggagcttggccacctcggcaaggccggtgacctccaccacctccagagtttcgtctctagtccattcatggattcgaccctaacaagcggcttgacttcgccatcttcaaggagactgacctcatcgttcatcgacatctcttcaaggaggccccgctcccctagcccctagccgaagatcctgaggtacacagagaaggtgcccaggaggttctcttaccatcaatcactatgttttcgtcgttttcacggtcaatcactactccttgttgtgttacggagcttccttaaagtctaggcattatgcgtggaagaggcaagaacaaaaggatttgaaggtattgtttgagctttctttggatccaaggtcgaaatcaaaagggggtttcaaaaatggataccgtcaagttctagagagcgtacttggtaagaggttgccaaattcttgccttactgctgttctgcacattgagtcatgagtgatgcactttaggaccaagtttggtgcaattgagtcaagatggtgcagtgcgagaaacaacaatatgatgatcatggcagaatgaagcaatgaagaaaaattcatgtgatggctatatgtcatttaatctatcagatgctcattacgagattttgaattcgtaggtcatttgacttcgggattagaggcctgcctttatttttcatgagcatgttcattttcagtactttgaaattttataagcttgcactatgacagtttgtaatattgtgcagttggttaaaagacgataagactgctagctactatcataaacatgaatgtcacaaaatctggtactgttgt

SEQ ID NO: 27455 - DNA, 1530 bp, Oryza sativa
  ref <308>: DATABASE ACCESSION NUMBER: AK102897
  ref <309>: DATABASE ENTRY DATE: 2002-08-28
gactccccctcgcttcaattctaatcccccccaaaccccctccaaaccctaaccctactacgacctccccttcctccgccgccgccgccaccgccaccgccaccgccacgtccagcctccggtcgcctgttcggatcgaagcgatgtcgtcggacgatgaggtcagagaggagaaggagctcgacctctcctcctccgacgtcgtcaccaagtacaaggacgccgccgatatcatcaacaatgctcttaagttggtagtgtctttgtgcaagccgaaagccaagattgttgacatctgtgagaagggcgattcttacataagagagcaaactggcaacatctacaagaatgtgaagaggaagattgaaagaggtgttgcttttccaacatgtgtatctgtgaacaacacagtctgccatttctctccgctagccactgatgaggcagtcctggaggaaaatgatatggtcaaaattgatatgggatgtcatattgatggttttattgccgtggtggctcatacacatgttatccatgatggagcagtcactgggaaagcagcagatgttcttgctgctgccaacacagcggcagaagttgctctgaggcttgttagacctgggaagaagaacaaggatgtcaccgaagcgattcagaaagttgctgctgcttatgactgcaaaattgtggaaggagttctcagccatcagctgaaacagtttgtcattgacggtaacaaagttgtacttagtgtgtccaatgctgatacgaaggtggatgatgctgaatttgaggaaaatgaagtgtatgcaattgatattgtcaccagcactggagaagggaagcccaagttattggatgagaagcagaccaccatctacaagagagctgtagacaagaattatcacttgaagatgaaagcatctaggttcattttcagtgagataagccagaagtttcctatcatgcccttcactgctagggcattggaagagaagcgtgcacgcttaggtttggtggaatgcatgaatcatgaattattgcagccgtaccctgtccttcacgagaagccaggcgaccttgttgcacacatcaagtttactgtgcttctgctgccatctggttcacagagggtaacatcgcattcacttcaggagttgcagcccactaaatccattgaagacaacgctgagatcaaggcatggcttgctttggggacaaaaacaaagaagaaaagtggtgcaaaaaagaagaaaggtaagaaaggagatgcagcagaagcagtgcctatggaggagggttcaaatgatgcaaacaaagaataactgattgttcttttgaattgcttccgttagttttgtacttgctccactgcatctgatgctattatatcacattcagttgtggaaaatcgagtactttttcaaacttcctgggaaatgatccgtcctgctgcacactcattgtcacatgaaagcacaaaatgatgattacctatgatgtgtgtgattgttggccttctgtgctgcc

SEQ ID NO: 27456 - DNA, 2463 bp, Oryza sativa
  ref <308>: DATABASE ACCESSION NUMBER: AK102898
  ref <309>: DATABASE ENTRY DATE: 2002-08-28
ggggccgtacaccgtatgcctccctcgaccacaggcttcccgcgccgccgctcgccgccggtggacgccgacctgctgccgcgccttcgcctcgccgctggccagagttcgccatggcgcgtcctcctccagtccctggccctcgtcgtcacctccggcctctccgcctcggcctcccactcccaccgcggccgcgcgctctcatcccgcctcctcaactccctcctcccccacgccccgcgccgcctcctccccgcgctcctccgcctcctccccggagaccacctcacgcttctcctcctcgtctcctcgaagcaccactcgcactccctgcccgccgcctccgcgctccacgccctcgccgtctcctccggccacctcccgtccgacctccgcatcgccaactccctcctctcgctctacctctccctcggctccccggcgtccgctcgccgcctcctcgccgacatcccccgcccggacgctgtcacctggaacacgctcctccgtgcctgcctccggcttggcctcctccctgccgcccgccgcctgttcgacgaaatgccggagcgggatgtcgtctcgtacaactccatggtggctgggtatgtggctgagggcgacttggccggtgcgaggaatctgttcgatggaatggcgcggagagacgtggtcacgtggaactcgatgatctcggggtattctcggcacggggacatggagaacgccaggaagatgtttgatgcgatgccggagagggatgtcgtgtcatggaactcaatgctggatggatatgcccaggctggggacgtagatatggcgaggttggtgttcgatggcatgccaaagaggagcattgtgtcttggaatgtcattcttgcgttgtatgcaaagctgagggattggcgtgagtgcttggggctttttgatgtgatgatagcagaaggaaacacggtaccaaatgaaaaaacgtttgtgagtgttctgacagcttgtgcaaaccttggcgatcttgagaaagggaggtgggtgcatgatttggttcaggagaggtgggataggcttgtgccagatgttctattgcttacgacattgttgacaatgtatgccaagtgtggggtgatggagactgcaagggagatcttcaattcaatgggtgaaaggagtgtcccctcgtggaattcaatgatcatcgggtatgggttgcatgggcaaagcgaaaaggctcttgagttgttcttggagatggagagagatggacctaggccaaatgaaacgactttcatctgtgtcttgagctcatgtgctcatggtggtttggtgcttgaaggttggtggtgttttgacaggatggtcaggttctacagtattgagccaaagtctgagcattttggctgtatgatggaccttcttggtcgcgccggactgcttgaacaatcagagaatctcattgagaatttgcaaggtaaggtgtcagaagcattgtggggcatactaatgtcagcctctcaaactcagaacaacatcaaacttggagagtttgtcggaaagaaattgatcgagatgaggccaacagaagtcggtccatacatccttctatcaaacatttatgcggcagaaggaagatgggatgatgttgagaaagtaaggaaggtgatggaggagaagggggtggagaaggatgcagggttgagcctggtaggatcaagggaaggtggtcatttcattaatgaaagtggagcttcagctccaaggaatgatgtgatgctgtgcatgctgggtgagatgagtgtgcatatgaagcaaccatctgaagggtccaactgcaggaaaagaagcccctctgctccttgaaacttgaacatacagggcacattattttgctgtgtgactgtcaaaggagaacacaaagatgggatgtttatgcctcattatcatggtatcacctactatttcttggatgatttcagcgtcaactcaacctaggaattcacagatattcttgctagctaactgcatgagaagtttgcttggaccatggctatatcacctctgattgtctgtagccgggaggtgaaacaagcatcaaaagtcaaagaaggtgctccaggtaatggaggatcaaagaatgcacaagtattattgttacaataatggatcatttggcaatcgcaatattacatcagagccgtggtgttacatcacaaagtacaatgctgtcgtcaaggtagaaaagagaactggctggtgtccaatgacgctgtctgttgcgatctgcaagaggtatttggtctttgactcaattggtcacgacgcacgacagaggaagcgctaatttaatttgcttctgtgagacagtgagagtggaattctgacgtcgacctggaatttggatctgattagaaacaacaggacgagtgcgaaagcatattccaagggacatgcagctcttgtgtttattcg

SEQ ID NO: 27457 - DNA, 2483 bp, Oryza sativa
  ref <308>: DATABASE ACCESSION NUMBER: AK102899
  ref <309>: DATABASE ENTRY DATE: 2002-08-28
gggtctcctcttcctagtactagctgcgcccccccccccccccaaccccctcgggcgcccgcttcgctccggcgactccacccggccgcgccgccgggatccgcccccccgcaggccgcccctcgtcgtcgtcctcgctggttccccgccggccccggcgccttttccttctgatccagccagccgcgtcgcgcgcggcgccggggggcatcgaattcgaatccgcgccctcgccgtcgtcgtcgccgccgccgccgccggacaatccggcgcctgccccctccgtgctccccccggccagagggattgcgggactgatacggccgggatcttgctggaaatggggggttacgagtacgcgaccaatggttatcatcggggaatggaggatgactatgaagacgagtactacagtgaagatccatatgatgaggaaggggagggtgctggtcaagagtatgccgaggaggatgacgagccgccggagggacagcaagagttccttcaaattagagaacgattaaaggagcagattaggcgaaaggcgcaggctgctagtgctagcgctgctggccgctcatcttcctcacatgatagaaaacctcaatccacttttggatccttctttgggccatccaagccggtgatttcccagcgggtaattgaagaaagaaaatcactgaaagaactacagaacacagcgtcaatgtccagggatcgaaggccttctgcaaaggagataccatcatcatctaaagtgcaatctaaaacagatggacatcaccacaaacagaagattgtaaatgaggcaaaaagaaaggctgaggcacttaaggataatcgagactattcatttctactgtcagatgatgctgacatttcaccttctccaatggagaaacctgtggctaggtcctccttgagtcagaagtctgatcgcgagtcgacacattcagctgtgaagagcagagcaccgacaggccaaactgctagattgtctaatggatatggattgaagaacacattgtccagtcagaggcatactgaaggtagggtagattccaacagaaaggtggctggtgcaaacagagaaagggttgtcttgcctgacaatggaagaatgcatagtgtggttagaaatggatccacccaggctactacaagcaaagctgcaagtcaaaagcttcctagcaaggctcctattgccaacaggcctcctataaagagtgtaagtgatcaatctcttagggcaaatcattcagcttcaaagcaacttttgtcacagaatgggagaccacaatcctcacagagtcagaggatgcagtcgacctcgcatggtcagaggccacatcaacctgtgcaaagtcagtggccgctgcagtcattgcagggccgaaggccacagcagtcaccacaaaatacaaggccacaactgatgtcgaagagtcagagaccgcagcaatcattacagagacagagaccacagctatcctcacaaaatgagagattggaatcctcggagaggcaaaggccaccttcacaaagctacaggccacagtcgtcgcaagggcagaggcctagttcagtacaaggccgccagtactccgagcaaagaagaatccaggcaaatgatagagtaaagtcggcagaaaggcagataaggcctccctcgaaacccatgccatcacgacaaataccttccaacggaatgcgtgatgcccatgcaaagaaaaagcaaccgatgaaacgaagatttaatgatcttagcgaagatgaggaagatccgttggcaatgatcaggagcatgtttaggtatgatcctagtaaatatgcaggcagagatgacgatgatagcgacatggaagcagattttgctactatagaaatggaagagcaaagaagcgcgagaattgcaaaggaggaggatgacgagcaacttcgcctgattgaggaggaagaaagacgtgagcaggagaggaagaggcgaaagatggcgcgtggccgatagtagcagctaagttgtacaaatgcttgagttacagcttgagcaaggcttgaactgcaattccacggtcgtacgggccatggtgcttgcagatgatagcacgctttacccccatttatttgccgtgcgatttctcaagagatctatcaagaaaaaaacggcagggatcaagcaaaacggcaggagaacgatgctccaacgtaatgtgaagtggtgtagcttgtgctgaaactgttagctgtgccaactacagatctttttgatgctgacgctgatcgtgcagaaacttctcccgtgagggtgtggtgatgccaacgtccctacaccttgtcactttgttgggttgtacatgatattcttcctcatgtagctgattcgttctgttggtcgagtactaaagatgccagaaatcaactggcgcctgtccgtgtttggattcgatttggatataccggtgttctaataaacaatgttttag

SEQ ID NO: 27458 - DNA, 1130 bp, Oryza sativa
  ref <308>: DATABASE ACCESSION NUMBER: AK102900
  ref <309>: DATABASE ENTRY DATE: 2002-08-28
gaccaaaaagaaaaccccctttgtcgacaaagccagtcccaagctcctttcccacccacccgtgagatggcggcggaggcccaagccacggcggccggcggcctcgccggcgagatggaggtggaggcgtaccgccgcctcttccccctcgccttcctcgagcgccacctccgcgaatccgtccgccccgacgcgcgccgccccgccgaggcccgcccaaccaccgtcgccctcgccgccgtgtcctccgcccacggctccgccctcgtccgcctcggcgacaccgccatgctcgcgtcgatcaagctcgaggtgatgtcgccctccggtgaggcccccgacgaaggatctattgctgtggagttccacatgccgcctatctgttccccgcttgtcagaccaggacggccggcagaggtggcgccagtcatctccaagaacctagaggacattctcatgagctcagggatgctaaatttgaaggagctctgtttgatcagtgggaaggcatcttggttagcatacctggatgtctattgtttgaatgctgatgggtctctattcgacgctgcactaatctcagctgttgctgcatttacacatttggaaattcctttggtatctgtcggtgatgatggtagagtatttactgttgggggcaatgaaggcaaagccaaatatgaattggtaaacagagaaaagaggaagcttacgattactaatgttccattttcccttacatgtgcacttcacaaggataatgttctagcggatccaactgctgaagaagaatcaataatagagacttctgtgactattgttctcgattcttcagaccagatagtgtcaatacaaaaacctggaggtgcagtgacatctatgacaactattaaggaatgcattagcttggctaaggacaggagaagaaagttaagagaaattctcatggacaatgttgaagctatggaagtcgaccaaactgattaagtttgtcacagttctgattcagtgaatctaaccaaattatttttgtagtagctctttcctatctcttggttgtactcgtagcgtgataaattttagcacctttggctactatccgtttaattaaataagtaacagtccgtacc

SEQ ID NO: 27459 - DNA, 2242 bp, Oryza sativa
  ref <308>: DATABASE ACCESSION NUMBER: AK102901
  ref <309>: DATABASE ENTRY DATE: 2002-08-28
gatggaggagacgagaaggcagcggcggcgacgcaagcgcgagtgcgagtgtcaaccgcgtgacggcgcgacggcaacactgcgctctccccggcggcggcgctctcccctccgctggccaccttcccaccggattctgtcgccgcctccgtcgccgtcctcgccgtcttggaggtcgccgtcatatccgccgtcccctcgaactccgcggctgatgcctgttcttttttgttttttcgcaaaattccttttcatctttcgctgcttaattctgcttgttatgcgtatgaatcaggaatccacagattctctttaatgtcaactagtatagttggttccaatcttcaagaatcaccatttctacttgtatgtttctcagcatgctgatgttgttattagggaggtgattctgtgacggctcagtagaactctattgtgcatatgttcttctattttgatgaatcaccaatgattattttgtgtgccataaaactctattgacaaatcaccaataatacttccaatgctttttttctttggtaaaaaccacaaatgaaggtcccttggactaattaccatattacttcaatttataatataaatggaatatgcattatttgttttattatagtactttccttggttatttttctatagttcatcttcaggaatgctagatctattgttgctgcgtatggggtgaaataaaggaaatgcaatgcattgctgactttgtggggaatgggaggaagtcctgatgttttttttattaagataatatatgcaaaatgtgtgcactgatattatgttagacccttgcatttgatttctctagactcctacagaacttatattattgctagtgtcagaatttgaaaagccacgcaatataaaaaatgcacataaaaatttctttgtacatgtacaggtaatctaggagccaaccatatgctcatatagaccgtgtttagttccactcaaacttcctctcaactcccaactttccataacatcacatcacatccaaaactttcctacacacataaactcctaacttttttttccaaactaccaactttccccaaacttctccccaatttcaggaactaaacacagccctaattgacctgctagtaatttgctttaaaattggtacaactatatgaactggaaactttagtagtactatatactgctctaactattactggtttttagacctatatatgtgcacgctccatatccatatgtactctcattgtttcttgatatactagttaggaggacgattacaggcacatatggttctttcccccaattcagaagtacttgatattgtcctattcatatgcatgctcttgtattagaactttaggagcaggaaaagaaaaggcaagtcactgttttatttttgttagccatccaacttacagtcagcaaatatttcctatgtcatttttttgtcttaatgttattctatttcctacatgtgaacttttcaatagtatagtattgatttgatatatgcatcaatgttcttggccatcagcaattaagcaagtatatttttttctgattttttatcatcaatcacacacacctgttatattttgctgaaagatagattcttggttgagatgtgcaagcagcaagcaacaacctacagagggccgtccattattttaaatttcatttttggtagttaaaggccgtgtttagtttcaaagtttttcttcaaacttcaaacttttctatcacatcaaaacttttctacacacacaaactttcaacttttccgtcacatcgttccaatttcaaccaaatttctaattttggcgtgaactaaacacagccaaaattatgaaaaatgcacataaaaatttctcttttctacatcatagattgagatcacaaccaccaattcgaaacaattgctcattgcacagaagtgttccttaaattatgcagtttcagtcagaaactaaagggaacttttttctctgcaggctttgggaagaaggaagtctgcaaggatactgcttttttgcggcatcagcaaatgttgatccctgaacctttgaatatgtatattgttgatgcaacctttgaatagaacaaatgttcagacttgtttaatttatttaatttgtcaggtcgtctcctgctgctcgtcagctctccactcatcttggacttgtttaatttgtgatgtttccattttcattggttcatactttcagtc

SEQ ID NO: 27460 - DNA, 1639 bp, Oryza sativa
  ref <308>: DATABASE ACCESSION NUMBER: AK102902
  ref <309>: DATABASE ENTRY DATE: 2002-08-28
gtgcctgtcatccctttctctcttcttccagcgcctcgttctgcttcccaacttgaacgctactactactccctcacggcgagctggcggcctcctggaccaactagccctagcgacggacgcatataccgagggggagagcggctggaggcgaaggagaggctgctgccgaggtggtgatgaacaggcacgacaacgacggacctgctgcagccgctgcagcggctgctgtggcggaaggaggaggaggaggaggaaggaatcaggcggcggaggaggtagatcggcatgaggatgacctcgctgatgccccggttaaggctccatccaacggtcgaggagctgatcgcttactacctcggcgagactgtggtcggcaagcgcttcaacgtcgagctcatcaccttcctcgacctctaccgctacgaccccctgggagctccccgcaatggcggcgataggggagaaggagtggttcttctacgtgcctcgggacaggaagtacaggaacggggaccggccgaaccgggtgacggcgtcggggtactggaaggcgacgggggccgaccggatgatccgagccgagaacaaccgccccatcgggctcaagaagacgcttgtcttctactccggcaaggcccccaaggggcgtccgcagcagctggatcatgaacgagtatcgccttccccccgccgacaccgaccgctaccacaagactgaaatctcactatgccgcgtgtacaagcccaccggcatcgacgacgggccatggccaggtatccacggcgcggtcgtcggcgcactcccgcggcggcggcgcggcaccggtacaggacaacaagcaaggctcctcgtcgacgtccacgccgacgccgcctccaactccgtccaagctccacctcctcagcagcgagtgcacgtcgccgcccgccatcgtcacggaccacgccgccatggtggcgcacaaggcaccgtcgccgcggcaccatcagcagcagcagcagctccacgctgccaagccttgcggcggctacctgcagaattcctcgatggcttccgctgccggcggcgatcagcagcagcaatttcagcaagacttcgcggcggcattgtaccagcagtactccaaggacacgagcggtgccttcgcctccacgtactcgctgctcaacctcgtcaacgcggcatccatggcaagctccaccgatgccattgatgagctgagctcgctggtgggccacggcaccccgtcctacaattaaccccgcggccggcagccacaactatagtcaattccttcacctgcctaggacgccgtagtagcatcaaccaacaccggcgccgctgtggacgacgacgccgtcagcgccgtggacgctgccgatgtcgctcgccgccttctccgacaggatatgggactggaataatccgatccccgaggccccaggtagggattacagcaccagctctgcattcgagtgaatcaagctatagctacaagttcatgcacgggtgcaccgcattctgatcagataggtaccatccaggtcgccctcctctctctctctctctctctctctctctctctcagtgtgtcccactctccggttcacaattattaattctcatgtaaccatc

SEQ ID NO: 27461 - DNA, 2556 bp, Oryza sativa
  ref <308>: DATABASE ACCESSION NUMBER: AK102903
  ref <309>: DATABASE ENTRY DATE: 2002-08-28
gaggtatccccaaatttccttccgccgccgtgctgctggtcaccgccgtggcgaggcgaggcgatcaagagctgagctaccgtggaggcgtggattgagagtctgagagagagcaatgacgccgcagctgcagccgaagcagatgcactgggcgagggccgactcctccgacttcggaggccaaatccccgcccctcggagcgggcacacggcggtgagcatcggcaagtccaaggtggtcgtcttcggcggattcgccgacaagcgcttcctctccgacatcgccgtctacgacgttgagaataggatttggtacacacctgaatgcaatgggagtggctcggatggacaggcaggccccagtccaagggcctttcacgtagctatcgtcattgactgcaacatgttcatctttggcggccgatcaggcggcaagagattaggtgacttttggatgctcgatactgacatatggcaatggtcagagttaaccggctttggtgatctaccatcacctcgagagtttgctgctgcttcagccataggaaacagaaaaattgttatgtatggcggttgggatggcaaaaaatggttgtcggatgtatacatcatggacacaatgtcacttgagtggacagaattatcagttactggatcagtgccacctccaagatgcggacattctgccacaatgatcgagaagaggttgcttgtatttggtggcaggggtggagctgggcccataatgggtgatttatgggctttaaagggtgtcactgaagaagataacgagacaccaggttggacacaattgaagctcccaggacaatctccatctccacgatgtggtcactcagtaacatctggtggaccttatctcttgctgtttggaggacatggaactggtggttggctaagtaggtatgatgtgtactacaatgaatgtattattttagacagggtctctgttcaatggaagctcttagcaacaagtaatgagccaccccctcctcgagcatatcattctatgacttgcatagggtctcgatttcttttatttggtggctttgatgggaaaaatacattcggggatctatggtggcttgttcctgaaggtgatcctattgcgaaacgagacttggttcctaatgttgattcagacagcaaacctagtaatgtgactggtggtgctcaacattccgcatcacaggaatcacaagctggggaatctccaatgattgacttggcaaaacgattgggcatttcactttctttagaagcttcagcaagttttgttgacgagatcaatgataaagaactaattgaattatcatctatgctttttggtgaatcaccccctaccggtgaccagcatgcatgcattcaggcacttcgtgatcattggacaagtattccagccaactcaatacagctccaggagctaggccctttactgagggattatcaacgcctcattcttcgccgctatttgtacggttcccattcttgcgttttccctctactgtctttatttacactttcttaaccatctgcgtttatgtacatcatccctcttccagaaaatgaattattatgttttgtcatggtgataaatccgagatgctagcataatttgttttgttttgcacaagtaatagtcacaagctgtacatttgtaccctttattgccaatctgttatgctcagcggtaacacatgagcatgcatagtaacctgatggccattatcaggcttagagtttttacaactcacaaaatgacaacggttctctttctattcatcaaatcaagtcctgaatttaagtgaagagtatttgttagaaaaatttttaattgattatgattttactagtacttccttcttgcaacggttacagggaaaattcattcacgtctttctatgagaaggaagttcaccgcttcttccatttgaaaaatgcttccgagttacggatggatgacatccccatcttgttgatggagtatggaaagctgctttccacctgaggctgggatagcatcttagttctgactctttacttgagaacattagaaggcaaggaagcatagctgcatacatggcatgctttcacgatcttcagagcttggtggcatcagagctttgctccctgctcaaaaacgttttcagcatgggcacgaacaaagttaccgcactttcgggtacaacgtcgatagaatttgtgaatcatgggcgtgttaagaacctacatgctgcattatcttaaagaaatcgaaagcgacaacacctggcggcttggtgccgagaagctggcaggaaggctcttcacatttgttcaccttgattgatgtagtattctttctttgctcactaacaaaaataattatacattcattagtggagtcaattctcatattgattctttttctttgattgatatggagtcgtggccatctcggcgacggcacatttgacatgcatgatgcatgcgttgtactggtgctgtactcgctccatcaaaaaaaaaaaaaaagacaaaccctatgtttttgtggcc

SEQ ID NO: 27462 - DNA, 2113 bp, Oryza sativa
  ref <308>: DATABASE ACCESSION NUMBER: AK102904
  ref <309>: DATABASE ENTRY DATE: 2002-08-28
gggagaaaagaagagcgtgggcatggacaactgacctgagtggccttgtcagggagagccatagcagtggacgtgtctatctccgccattgcttcgtcgacactggacgtgcagacggcatggccatgagggctttgcacgatgggtggtgccgtgttggtgttatgggctgccaccatggtttgaggcttttgatgttgctagattttgtgtttaacgagggagggaagaatgtgttgttcttgacactgtgctgtgcttttaaggagcagagatttcagaagctcttcagatatcagagaacttctttgtagtagtaatcaaatgcgctttagacatctttttatcgtttcttgcaaggtcagtccctgctttggtacccgatctcgcttttgtgcaacatcaaagttacacttacacagtaaagcaggaatctttatgggaccgttcgtactggtcaattactccaggctttgattaatgggttttaagttttaaccgcagatttggtacaagtaacaacctttatttactttttatttctgcaactgtgtcttttaacatgaaagaatccagctccattcaaaagtttagtttttattttccattgtggtgcatggtcactcagcctgcagtactgaattatcaaaattttcttttgtcatttctctcatgttaagtgcatagtctattttacttcaacaggtagaaaaacttttgtgggtttgtttctagctcaaggaggaaattcatgggtttgcatctagcacatgagagaacaatattggtctaacacaaagctccttttgtaggatgagcttcacttccttgaaggagctcagcccgtttctcgttctggatgcattaaagagataaatgagtttgttggtacaaaacatgacccactaataccaacaaagagaaggaggcacagatcttgccgtctttttcggtggatcggatcaaaattgtgtatctgcatttcatgtctttgctactgttgcaagtgctcacccaagtgcaaaagaccaaggtgcctcaattgttcttgcagctcatgctgcgacgagccatgctgtaagccaaactgcagtgcgtgctgcgctgggtcatgctgtagtccagactgctgctcatgctgtaaacctaactgcagttgctgcaagaccccttcttgctgcaaaccgaactgctcgtgctcctgtccaagctgcagctcatgctgcgatacatcgtgctgcaaaccgagctgcacctgcttcaacatcttttcatgcttcaaatccctgtacagctgcttcaagatcccttcatgcttcaagtcccagtgcaactgctctagccccaattgctgcacttgcacccttccaagctgtagctgcaagggctgtgcctgtccaagctgtggatgcaacggctgtggctgtccaagctgcggatgcaacggttgtggctgtccaagctgcggttgcaacggctgtggccttccaagctgcggttgcaacggctgcggctcgtgctcttgcgcccaatgcaaacccgattgtggctcgtgctctaccaattgctgtagctgcaagccaagctgcaacggctgctgcggcgagcagtgctgccgctgcgcggactgcttctcctgctcgtgccctcgttgctccagctgcttcaacatcttcaaatgctcctgcgctggctgctgctcgagcctgtgcaagtgcccctgcacgacgcagtgcttcagctgccagtcgtcatgctgcaagcggcagccttcgtgctgcaagtgccagtcgtcttgctgcgaggggcagccttcctgctgcgagggacactgctgcagcctcccgaaaccgtcgtgccctgaatgttcctgtgggtgtgtctggtcttgcaagaattgtacagagggttgtcgatgcccacggtgtcgtaacccatgctgtctcagtggttgcttatgttgatctagatccttttttggttgttgtttttcttgtattttttagttgttaggcctttgattaagttcgaactttcataaatatatggtgtttatcctgtaaagaaatgatgatttcaaggatttttcatagctatgagacgaggttgaacc

SEQ ID NO: 27463 - DNA, 1608 bp, Oryza sativa
  ref <308>: DATABASE ACCESSION NUMBER: AK102905
  ref <309>: DATABASE ENTRY DATE: 2002-08-28
gaaggggacgctgggatgacaccaccacaaagccacaccggccttgagcttcgttctacccagtcagaaacccagtgttgttctagtctaagctcgtagctagtctgcaagaaccccgacagaaaaccggcaggaacgccggccgccgccgccgcacgcacgcacgtcgatcgggcggcgccggtgtgctcgtgatggggaactgcgccggcgtgcaggggaacgccgagatcaacccttcgttcagtgctcccaactcgtcagggacaggttccaagaacagcagcaagaacggggccgattccagcacgttcggcaccaaggcgtcggcgtcgtcgtcggtgccgccgactccccggagcgagacggagatcctgcagtcgtcgaacctccgcaagttcaccttcggcgagctcaagggctccacgaggaacttccggccggacagcctgcttggggagggcgggttcggctcggtgttcaaggggtggatcgatgagcgaacgctgacgcccgtcaagccgggcaccggcatgatcgtcgccgtgaagaagctcaagcttgacagcttccaggggcacagggaatggctggctgaggtgaattaccttgggcagctctcccacccaaatcttgtcaagctcatcggctactgcttcgaggacgaacagcggcttctggtgtacgagttcatgccgagaggcagcttggagcaccaccttttcaggaggggatcacacttccagcctctcccatggaatttgcggatgaaggtcgcgctcgaggctgccagggggcttgctttcctgcacagtgatcaggccaaagttatttaccgagatttcaagacatccaacattcttcttgattcggactacaatgcaaaactctctgattttggattggcaaaagatggtcctagtggtgacaaaagccatgtctcaaccagggtcatggggacacaaggatatgctgcccctgaatatctcgcgacaggccatttgaccgcgaagagcgatgtgtacagctacggagttgttcttctggagttgctgtccgggcagcgcgccctggacaagaaccggcctccggggcagcacaacctggtggagtgggctagaccttacatcaccaacaagaggagggtcatccatgtcctcgactcacgcctgggatcccagtattcgcttccagctgcgcagaagatcgcggggcttgcggtgcagtgcctgtcaatggatgcacgatgcaggccgggcatggatcaggttgtgaccgcgctggagcagcttcaaggtgcaaagaaagcagccaagtagaattatggctgtctggtgtcgtcaaatgtctccagtagaccagtctctacctctcctggagcatcctgatcgtgagacactttgataggagttaaaaacaggaactagagtgatgagggacttgatcagaggacaggctttctgaatccgtgagaacataatgtgtaatatatcttgctttttgtacagctagctgttgctcctttgctccaactgcgagcccgtggcttgtgttaaactgttgtgctaccttagcagtacacctcagaaacttcagttagtattgtcc

SEQ ID NO: 27464 - DNA, 1600 bp, Oryza sativa
  ref <308>: DATABASE ACCESSION NUMBER: AK102906
  ref <309>: DATABASE ENTRY DATE: 2002-08-28
gactctttttcagtttttccccaccaaactcgcctcgccctcctctcttccttcttcttcttcctcctccgagtaccagagcgcacgaaacccctctcgaattctccgctctcctcccgccggtgaccccatccgaccgatcgcaagccatggccgccgccgccgccgactccgccgatcccgtcatcaccaccgccacctgcgcgcactgaggagctatgtagcaatcccctaggacttggctttcttcttctatagggcatttttttttcaggctatggtttacagctacagctactatgggagaaggcagtgtttagggttcttggttaccaagctggtatttttactgtataagtgacatctctagtctgtacctgatatcatggttgctttgcattctcagtaaggcctttgtctaattctctaatgatccgggaaggaaaactggaaaaccccctgacagtcaatttcatgtacatcagcccggcgaaaaaaaaaaaaaacgattacatgtacattggcccgggtgaaaaaaaaaacaatttgatgtacattactaatttttgtatatgcgcacgcgtgtacataactgggccaattttttatccaacttgtgcttgttaacttgtagtagtgtgtttgacatggtgtttggaagcattttacctggatgattgacatggttctcctcaaattcttcagccatcgagaaattccatctccaaacatcgcgctgcattctgcacactgcgctcgcaaccttcaaaagtgtgaacattgtgggtatatggttccaaagaagctaatggatgaacactatgatgaaaaccatgctccaatgatttgctcactttgccaaaaaactgtacaacgtgagctatgggatcttcataaaggcttacaatgcccacaaaggatgcttgcatgccaatattgtgactttgaactacctgcagctgatatttatgagcatcaggacgtgtgtgggaatcgaacagaatattgtcagccttgcaggaagtatgtcagactgcgggaacagattggacacgacatccagttccattcccaacccattgttgcttcagaatcttcaagtgacagaagcacgctggaagaagaagagagttatccagcagaagaacaaccagtacgacccaagcacactcatggcttacaacgcaagcaatttcttgtcacaattgtgatagctggaatttcaattctggttggatcagttctgctaaaaaaggggtggttatcatgatatttccaacataaacatgaatttgccttcttaatgtgcaaattccttcgtagcctatgggcagggcagagatccttgaactacagtttgaagtcattgtaggaatgacctgactgatatgtttttttttaccagaaggtatttctacatgctggcagctggtaatctatgtaaaaatgttatttacaagtacgaggcttacttttacaagggatcaatgccatctgttttgttgttgtcttgttgatatgtttgttacagagatgctagttatttgattgtggattgtaacaacttacctttcaactgctataatatttgaacgtctcc

SEQ ID NO: 27465 - DNA, 1349 bp, Oryza sativa
  ref <308>: DATABASE ACCESSION NUMBER: AK102907
  ref <309>: DATABASE ENTRY DATE: 2002-08-28
gagtcttccaaaaaacaatcgaccacagccttacctggtgctggtgaggtgagcagagctatcccaattccaattccaattcacaattcccaaagtggaggagaagatggtggcgccatcgcccgacgccgggaagccgctggtgatcctgctgcggccgctctacccggagttcgctgccgcgctggacggccgcttccgcttcgtgcttgccgccgacgccgacgagggcaacgcagcagaggcgagggccgtgctcgtgccggctctgacgcctgtgtccgcagatctcgtggctaggctccccaagctggagatcgtggtggccacgtccaccggcgttgaccacatcgacctcgacgcgtgccgccgccgcgggatcagcgtcaccaacgccggcgaggtgtttgcccccgacgtggcggactacgcggtcgggctcgtcgtcgccgtgcttcgccgcgtggccgccgccgaggcctacctccggcgaggcaggtgggcggcggacggtgactaccctctcgcgaccaaggtgagcggcaagcgggtggggatcgtggggctgggaagcatcggcggcctggtggcgcggcggctggcggcgttcggctgcgtgatcgcctacaactcgaggtcaccgaaggcgtcggcgccgtacaagttttaccccagcgtgcgggagctcgccgcggagagcgacgtgctggtgctgagctgcgcgctgacggaggagacgcggcgcatggtgggcggggaggtgatggaggcgctggggaagggcggcgtgctggtgaacgtggggcgcggcgggctggtggacgaggccgagctggtgaggtgcctgcgggaaggggtgctcggcggcgccgggctggacgtgtacgagaacgagccggaggtgccgccggagctgtgggggatggacaacgtcgtgctgtcggaccaccgcgcggtgatcacgccggagtccatccaaggcgtcgtcgacgtcgtcaaggccaaccttgacgccttcttctccgggaagcctctcgtcagccaagtgcagctctgaacgtactacaaacaagtacactcagtttctgaacctcaacctgcattctcaacctgaaaaataacaagggacaagttgttgcttattcatgtttgtatgtatgcatatgctgcgatttcgatctgagccaatcatacataaattgggaggataatctgagatgattacacattgttgtgttcactgatttgcaagcagccctgtatcttgttgttgtaacacacatcagagtaaactcaatcaatactccattcttgtggagtattattcaatgtcttaattttctttaggc

SEQ ID NO: 27466 - DNA, 3522 bp, Oryza sativa
  ref <308>: DATABASE ACCESSION NUMBER: AK102908
  ref <309>: DATABASE ENTRY DATE: 2002-08-28
gatcttcccctttccacccaaatcccaaacctcccccctccccgcgccggcgcccaaaaccctagccggcaaggcccctccctctccgatctcgccggccgccgccatggacgacagcctctacgacgagttcggcaactacatcggcccggagctcgccgactccgacgccgatgactccgacgcggacgcctccccgtccccctccccgtcccgctccccttccccctccgcgcgctccccgtcgggctccccctcccgccccgccgctctcatggacgtcgacggcggcgacgacgacgacgacgccgacccgtcccagagcgccgtcgtcctcgccgaggacaagaagtactaccccaccgccgaggaggtgtacgggcccggcgtggaggcgctcgtcatggacgaggatgagcagccgctagagcagcccatcgtcgcgcccccacgcgtcgtgaggttcgaggtcggcacccgcgcggaggccacctccacctacgccaccaccgacttcctcctcggcctcgccgccaacccggcgctggtgcgcaacgtcgcgctcgtgggccacctgcagcacgggaagacggtgttcatggacatgctcgtggagcagacccacgaggtggacaccttcgactccgagggcgagcgccatgtgaggttcaccgacacccgggtggatgagcaggagcggcgggtgtccatcaaggccgtgcccatgtcccttgtgcttgagggagggaatggcaagtcatacctgtgcaatatcatggacacacctgggcatgtcaatttttccgatgagatgactgccgcgttgcggatcgctgatggggctgtgcttgttgtcgatgctgccgagggtgttatggtaaatacagagagggcgattcgtcacgcaacacaagaaagactccccattgttgtcgtgattaacaaggttgatagattgattacagagctaaagctgccacctaatgatgcatatttcaagctacggcatacactggaggcgatcaatgatctcatctcgtcttgttctaccacagtaggtggcactcaactggttgatcctgctgctggaaatgtttgttttgcaagtggttctgcaggctggtcttttaccttgcaatcttttgctcatctttatttaaagatccatgggattcaatttgatcatgagaaatttgcatcgcgtctatggggagacctatattatcaccctgacactagaaccttcaaaaagaagcctccaaaggaaggagctaatagatcatttgttgagtttgtccttgaacctttgtacaaaatatatagtcaggttgttggggagtcaaagggtaaggttgaagcaactctttctgagctgggtgtgacgctgagcaatgcagcttataagcttaatgttaggcctttgctgagattagcttgtcgctcaattttcgggacttctactggctttactgacatgctagtgaaacacataccctctgtcaaggatgctgctccaaggaagatagaacacatatacactggtccacaagattccactattgtggatgctatgaaaaaatgtgatccacatgcgccccttatggttaatgttacaaagttgtatcctaagtctgactgtagtgtctttgatgcctttggacgagtttatagtggcacaatacagactgggcaaactgtgcgtgttcttggagaaggctattctcctgatgatgaagaagatatgactgtgaaagaggttactaagttgtgggtgtatcaggcacggtaccgtgttccaattagtaaagcccctgctggttcttgggttcttattgaaggtgtagatgcatcaattatgaaaactgcaactatatgtcctatgaagatggatgaagatgtctacatatttagacctctacgtttcaatactctacctgtcgtgaaaatagcagctgagcctctaaacccaagtgagctccctaagatggtggaaggtcttcgtaaaatcagtaagagttatcctcttgctgttactaaggtggaagagtctggagaacacactatccttgggactggtgagctttatctagattctataatgaaggacctcagagagctttactctgaggtagaagtgaaggttgcagatccagtcgtgacattttgtgaaacagttgttgatacttcttcgatgaaatgctttgctgaaacacccaacaagaggaacaaaattaccatggttgctgaaccattggaaaagggcttggctgaagatattgagaacggccttgttagcctggactcaaggcaaaaggaaatcactgacttctttcgtcaacgctaccagtgggatgtgctagcagcaaggtcaatatgggcttttgggcctgaaaagcagggtcctaacattctcttagatgacaccctttcagtcgaggtggataaaaacttgctcaatgcagtcaaagattcaattgttcaagggtttcaatggggtgctagagaaggtccgctgtgtgatgaaccaattagaaatgtgaaattcaagatcttaaatgcaaacatagctcctgaaccgttgcaccgtggtggtggtcagataattccaacagctcgtcgtgtggtttactcagcgttcctaatggctaatccacgccttatggagcctgtatattatattgagatccaaacaccaattgactgtgtctctgccatatatacggtgctatcccgtcgtcgagggcatgtaacagcggatgtacccaaaccaggaactccaatctatgttgttaaggcatttttacctgttatagagtcatttggatttgagaccgacctgaggtaccatacacagggacaggccttttgcctatcagtgttcgatcactgggctattgttcctggtgaccctttagacaagaatattgtcctccggcctctggaaccagcaccaatacagcatcttgctcgtgagtttatggtgaagactaggcgaaggaagggcatgagtgaggatgtgagcatcaacaagttctttgatgaggccatgatgaacgagctggcgcagcaggctgctgatctccatcttcaaatgatgtagttcgaaatcgtgaagtggggattggtttcttcatattgatgatctttagaagatgcgatggcttatgtcttcttttacactgggaactggaatcaacctttggaatcagccaagtgctcacctgttcgcatgcccattgctgctgcgctttatctgccgcatgttgatggtcgggtgtttttgtgattgatggttttggtagacgggagtcccatctatttcatctttatgtatgatctcttcctgtaacattttcatcatctaaccttatcagttttagttagccattcggaactggagataagttttgaggggcgatgatatcatctaatctggattgcagcatggatggtgtaatgactgatgtgatccttttgtccttgtccattgttccatctaatgtactacaagtagcattctac

SEQ ID NO: 27467 - DNA, 1112 bp, Oryza sativa
  ref <308>: DATABASE ACCESSION NUMBER: AK102909
  ref <309>: DATABASE ENTRY DATE: 2002-08-28
gctcctcaccggcttcaacccacccgtttctccggcgatgcggcggctacccctacggctcctgcgctccgccgcctcctcaccccgacgccgccccgctccctcccctcccccctcgccgaaccccgcggcgccgcctgcactcctctcccggtgggggtgggggtgggcgccgccgcggaggggttactcgcggttcgcgaccgggttcaccccactgcagcccaagccgctcgcctccatcctcgacgtcgagcgcgccagcggactctcccccgaccacctcgtcgccgcctgggatgactaccacttggggagaggtcatataggtgcatctatgagtgcaaagctttaccatcttatggagcaaagatcagctacatgccgtcattttgttatccctttgtggaaaggaactggatatactaccatgttcatgcaagttcagatgccgcatatgatcttcaccggacttgaagactacaaagcaaggggcactcaagcaagcccttactatacgatcactcattatacagagtttgcagaaaccaaggatacagtgcttatccgaggagacgttgttttcaccagtaaactgactgattcagaggcgaaatgtcttttagagagtgctcactcattctacctgaatgatgtgaggtacaggcttgtagagcgcttcaacaaagaaccacatgagtttgagttcaaagatgtcctgcaagtgcttgaaatgccaaccatgtgacaagattgaagacctgcaatagcaaagcttcctggagcatgtcagtgcatttttacagtggcagggtctagattgcactaatacactgcgtatcactctgagattgctagctgaacatcaattctacggttgtgtggtagcaataataccataataccatgagaaaaatttgtgtaagtgctaagcagttacagccgtaagtcctaggaggaattccttaactatcttctgccgtttctcttgaacctcttgtctgcaataacatggtggaaccagaagtccagaacccttatccactctcaaaaaccattgtgtaaacttaacctgaagtcagccgttattgttgctgttctgactttttgtt

SEQ ID NO: 27468 - DNA, 3717 bp, Oryza sativa
  ref <308>: DATABASE ACCESSION NUMBER: AK102910
  ref <309>: DATABASE ENTRY DATE: 2002-08-28
gattctcgtctcttctccgcgacgcgttcgctttctctcccacccaaaacccccagagagggaagagaaacgcctccctcccctctcctcccccgacccaccctgcacctccttcctcgtcgacgccatggcagcaccggagtgaagcagccagccagccgcccggatttcaccatttggtcccgggtttcgcccggatctgggtctctcttcaaccgtcttctccaatctggcggtgctatagctcgccgcgcccggttggggacaaggcccagtaggcgctagccaaacagtgttgagcgcctcctcccctcctcgcgcctcggcgcacggccggcgagaaggttttgaggggcggcgagcttcttcaatctgcctccatctcggtttgaatcgagtggtgtagcaaataacatcattttcggaggcaatggcggcatataagttgggtgtggaggttgcaagtgctcatgacctgatgcccaaggatgggcaaggttcagcaagtgcctgtgtcgagcttacgtttgatggccagcggttccgcacggctatcaaggacaaggatctgaacccagtgtggaatgagcgcttctacttcaacgtttcggatccgtctaatcttcctgagcttgcgcttgaagcgtacgtctacaacatcaacagatccattgatggttcaaggtccttccttggcaaggtcagaattgctggaacctcattcgtgccattccctgatgcggttgtcatgcattatccactggagaagcgtgggatgttctcacgtgtgaaaggggaactgggtctgaaagtatacattaccaatgacccatccatcaaagcttcaaaccctctcccagcaatggatcctgtttcaaacaatcctcccccaacgccagcggagcaaatagcaactgatataaccggtacaaatctcagcacaactcatgagcacagggctgaggtgaaaacattgcacaccatagctaaggaggtgcagcatcagcaccatgggcatggccatctaccagcttcctttcccgaccaaccttccaagtatgctgttgaccagatgaaaccagaacctcaacaacccaagattgtaagaatgtattcagcagcctctcagcaacccatggactatgcactcaaagaaactagtccatttcttggtggcggacaggttgttggaggccgggttatacgtgccgagaagcatgccagtacatatgacctagtggagcgaatgcagtatctttttgtacgtgtggttaaggcacgggacttgcctgacatggatgtcactggaagcctagatccttatgttgaagtgagagttggcaactacaggggtataactaggcactttgagaagcagaagaatccagagtggaatgcggtctttgctttttccagagaccgtatgcaggcaactatccttgaagttgttgtcaaagacaaggatttgctaaaagatgactttgttggtctggtgcgatttgatctgaatgatgttccgatgcgtgtgccccctgacagtccattggccccagaatggtaccgcctcgttcataaaactggggataagtcaagaggcgagctgatgcttgcagtttggatcggcacccaagccgatgaggcatttcctgacgcatggcattcagatgctgcaacacttgaggatccatctgctgtaacacacatgaagtctaaagtttaccatgctccaagactctggtacctgcgagtcaatataattgaggcccaagatattgccataactgataagacacgctatccagatgtttttgtaagggcacaagtggggcatcagcacgggaggacaaaacctgttcaagctagaaatttcaacccattctggaatgaggatctaatgtttgtggctgctgaaccttttgaggatcaccttattctttcccttgaagatcgtgtagctcctaacaaagacgaggtgcttggccgtgtaattataccgttgacaatgattgatagaagagccgatgatcgtattgtccatgggaaatggttcaatcttgagaagccggtacttattgatgtggatcaattgaagaaggagaagttctctactcggcttcatcttcgtctctgccttgatggagggtaccatgttctagatgagtccactaactacagcagtgacctcagaccaacagccaagcaactctggaaaccgtccattggtttgcttgagcttggaatcctgggtgctcaagggattgttccaatgaaaacacgggatggaaaaggttcatcagacacttactgtgttgctaagtatggttcaaagtgggtacggacacgtaccatcgtgaacaacccgggccccaaattcaatgaacaatatacctgggaagtttatgatcctgcaacagtcctgactgtcggtgtttttgacaatggccagcttggagagaaaggtggtgagaagacgtccagttctaaagatgcgaaaatcggcaaggttcggattcgtctttccactcttgaaactggccgtgtctacactcactcatatcccctcctggttctacatccatcgggggtaaaaaagatgggtgaattgcacttagccatacgattttcctcaacttcattagtaaacatgatgtacctgtactctcgacctttgctaccaaagatgcactatgtacgcccaataccagtccttcaggttgacatgctgcgccatcaagctgtccagattgtgtctgcccgacttagccggatggaaccacctctgagaaaggaagttgttgagtacatgtcagatgttgattctcacttgtggagcatgagacgaagcaaagccaacttcttcaggctcatgtcagtcttctcaggcttgtttgcagttagcaagtggtttaatggtgtgtgttcatggaggaaccccattaccactgtgctggttcacatcctatttataatgttggtgtgctttccagagctcatactcccaacagtgttcttatacatgtttcttataggggtttggaactatcgttaccgaccttgctatcctccacacatgaacactaagatctctcatgcggaggctgtccacccagatgaacttgacgaagagttcgatacattcccaacaagcaggagtcctgatgttattaggatgaggtatgataggctgaggagtgttgctggaagaatacagactgtggtaggtgatatagcaactcaaggggagagggttcaagcactgcttagctggagggatcctcgggccacagcaatatttgtcctcttttgtctcatagcagcaatagtcctgtatgttacaccactccaagttcttgcagcattggcagggttctatgtcatgaggcacccgaggttcagatataggttgccttcaacgccagtgaatttcttcagacgactgccagcaaggaccgacagcatgctataaaatagctgccatctggtggccttatcattgtgataaattggatggagtactccatgccgattactgtagtctggcttcgttttgttgttattgtaactgtgtgttcttagtacttgagagcctgtatatcgtattagcttctgaatgcagggaataatgtgtttaaggcttcttgtgaactatcagattttggagttgtactggtcattttaaatatctagttgcccaatatatagtactttaaaatcttg

SEQ ID NO: 27469 - DNA, 2997 bp, Oryza sativa
  ref <308>: DATABASE ACCESSION NUMBER: AK102911
  ref <309>: DATABASE ENTRY DATE: 2002-08-28
ggtgtgcctcaccgctgctgctaattaaccgcaagcgctcgtcgtctttccccttcctcaaaaaagggggagggggggtggtggaggcggaggcggaggcagcagcagcagtgcggtagtgcaagcgctagtggaggagttgggaggaggccccctagggtttcccgagaccgcctccccccgcgcctgcgccgccgctcgccgagcgcgcgctccgtgcccatcatggtgaagaagaaaagaactgggtctggcagcaccggtgagagttctggagaggctccaggagctcctggccatggttcttcacagcgagctgagagaggtcctcaacagcatgggggaggacgtggttgggtgcctcaacatggtggccgtggtggtgggcaataccagggccgtggtggacattatcagggccgtggagggcaaggttcacaccatccaggtggagggcctcctgagtatcagggtcgtggagggccaggttcacatcatccaggtggtgggcctcctgactatcagggccgtggaggatcaggttcacatcacccaggtggtgggcctcccgagtatcaaccgcgtgactatcaaggacgtggtggtccacgccccagaggtggaatgccacagccatactatggcggacctagggggagtggcggacgtagtgttccttcaggttcatcaagaacagttcccgagctgcaccaagccccacatgtccaataccaagccccgatggtttcaccaaccccatcgggagctggctcatcctctcagcctgcggcggaggtgagcagtggacaagtccaacaacagtttcagcaacttgccacccgtgatcaaagttcgaccagccaagccattcaaatagcaccaccgtcaagcaaatcagttagattcccgttgcgccctggcaagggtacatatggggacaggtgcattgtgaaggcgaaccatttctttgctgaacttcctgataaagaccttcaccaatacgacgtatctattactcctgaggttacttcacgtggcgtgaatcgtgctgttatgtttgagttagtaacgctgtatagatattcccatttgggcgggcgtctacctgcctatgatggaaggaagagtctttacacagctggaccattgccatttgcttctaggacatttgaaattactcttcaagatgaggaagatagtcttggtggtggccaaggcacccaaaggcgtgagagactatttagggtggtgatcaagtttgctgcccgtgctgatcttcaccatttggctatgtttctagctggaaggcaagcagatgctcctcaagaagcccttcaagtccttgacattgtgttacgtgaattgcctaccacaaggtactcaccagttggtcggtcattttattctcccaatttagggagacgccagcaacttggtgagggtttggaaagttggcgtggtttttaccaaagcataaggcctacccagatgggtctctcactgaatattgatatgtcatcaactgcatttattgagcctctacctgtgattgactttgttgctcagcttctgaacagagacatctcagttagaccattatctgattctgatcgtgtgaagataaagaaagctctaagaggtgtgaaggttgaggtgacgcatagaggaaacatgcgtagaaaatatcgtatatctggactcacttcacaggcaacaaggagttatcattccctgtcgatgatcgtggtactgtgaagactgtggtgcaatattttctggagacatatggttttagtattcagcacaccactttgccttgccttcaagtgggcaatcagcaaaggcccaattatctgcctatggaggtttgtaagatcgttgagggacagcgttactcgaagcggcttaacgagaaacagattactgcgctattgaaagtgacttgccagcgacctcaagagcgtgaactggatattttgcggactgtatctcacaatgcataccatgaagatcagtatgcgcaggaatttggcataaaaattgatgagcgtcttgcatctgttgaagctcgtgttctgcctcccccaaggcttaaataccatgatagtgggagagaaaaggatgtattgccgagagttggccagtggaacatgatgaataagaaaatggtcaatggtgggagagtcaacaactgggcatgtattaacttctctagaaatgtgcaagatagtgctgcctggggcttctgtcatgagctggctatcatgtgccaaatatctggaatggattttgcactggaacctgtgctgcccccacttactgctagacctgaacatgtggaaagagcactgaaggcacgctatcaagatgcaatgaacatgctcagaccgcagggcagggaacttgatttactgattgtaatactgcctgacaataatggttctctttatggggatctcaaaagaatctgtgagactgatcttggattggtctcccaatgttgtttgacaaaacatgtttttaaaatgagcaagcagtatcttgcaaatgttgcccttaaaataaacgttaaggtggggggaaggaatactgtacttgtggatgctttgacaaggaggattccccttgtcagtgacagaccaactatcatatttggtgcggatgttactcatcctcatcctggagaagattccagtccttccattgcagctgtggttgcttctcaagactggcctgaagtcactaagtatgctggattggtgagtgcccaagcccatcgtcaagaattgatacaagatcttttcaaagtatggcaagacccgcatagaggaactgttactggtggcatgatcaaggagcttctcatttctttcaagagggctactggacagaaacctcagaggataatattttacagggatggtgtcagcgaggggcagttttatcaagttttgttgtatgagcttgatgccattagaaaggcttgtgcatccctgg

SEQ ID NO: 27470 - DNA, 3075 bp, Oryza sativa
  ref <308>: DATABASE ACCESSION NUMBER: AK102912
  ref <309>: DATABASE ENTRY DATE: 2002-08-28
ggctactaccgctctcgaaccccttcctgccacacccccgcgccgccgaatctccctgacctgccaccgtcgccgtgtcctcctcctccccacccaccgccactgcatcgcctcctccccatcgcctccgcgtcgtcctccttcacactcaccgctgctgcattgcctcctccacaccgcctccgcgttgtcctcctcctcacccaccgccgtcgcgtcctcctcctccccatcacccgccattgcccgccattgcctcgccgatctcctctctcagcgccaccatcaatcccgcggcggtcaccatccccgagtccccttcgcccggctcaacagtcgtcgtcagatccgccgacggggtgaactcggcaacggtggtccagctctcgatccctaacacatgtcgcgccgtcctgtccaccgccgccgcgtccgcctccccatcacccaccgcgtcgtccttcgcctcgccgatatcctctctccgcgctgccatcaatctcgcgacggccaccgtcgctgccatgcagccgtcgtcgtcagatcctcctccactgccccaacgccggttgtgtcgtcctgtccgccaacacctgcgcaccctccgtcgcttgatattcctgcgagttttattaagaaaattacttttttcctgctgttgttacacttgctgtgtggagagaaaactttgtcagaagctaaatattgttgttaatgttcttggtcaatcttttttcaggcattacagtttgcaaccaactgatgacgaaattgtgatggctccatgttatttgcaccaactgattaactgaactatgctatacacatgggagactttggttaaaggattagaaatcagagtaattagaaaaagatacatgtccaatgctaatgcaaaggcttgtagaaagattatgtagagtgtttacccgaaataatctctagacactacaacacgatcatgtattctgagagccttctagctacttcagacggtgacagtgcttacctctaagaaaagtgcaggagctgaaatatttcttcgccaggtcaagaagaataggaacctaaacggtcaggtataatcctaaggttctttattatgtttcacccgtgagtcatgtggtggtttgtgtgcatctaactactgtatcgactaacagttcaacatgccctattgatccggtgctaatccccaagagctacttgattaagctcactacacaaaacagcgtggatatgacttcatttggtgaatattcatgtatatacattatgtttcgtgatatgtacatatagacatatcaaggaatggttttgttatttatttgtagttttgttccatactccacaaaagtagaaaatcaatgattaagctcaattatgatttattcctagtagcttggtttatgtgacttgggactgctaaacagtacacagctagcatattttgtttatagtgctctagataatatggaggctctagacaatggtgtcttggagctccttttggttaaacaacatatccacacaaacaaggtacattatgcttgctctcaagaaaaaaaaagggttcgtttattcagtgagtatgcttttcctctagaaatcattagctgtagtgttagattcacaatttcattcatttgcaagatattcaatggaatttctatgtgagtaaattgttgtgcatatgaaggtgcatttgacaaaggtcaaggggaattggcgaactaatcagtacgacaactgttagtcaactaattagactgtctagtgtttagttttaacaattccattgtttcaggctacccaaacttcagacagaggcagaggagcaggaccacatgaactccttaatatagatgatcaacatgtctccatatctatccaggatgttggtcgaggagattttgttcttttatttagcattgattggtctctagttgatgtatctaatttcatatactccgtaagcacaacatgaaggtgatatccatacgtgccattatttctttacttttagtttttactattttataagataacggttcactggtcaagccagggccaagacctatatttgagtagtacctattagatgaactaaacttggcatggaaccattctaattctgactatgaaaattgatccatttctctggtccaggaatttgagtgtttatcttttcattacccaggcttagattgcctcaccatgaacctgccccaggacccatctcttaaaatttggtttgagtggatcccaagacagatatattaaaagaaatgatgcatctttctttagagacattttattgaagcacaaggtgtgttgtgttcccgacctccgtggtaggagcgtgcaaccgaattgcattccatgaatctaattaattttgccttcatattggcttgttattttcaaccttgattggcatggtccggcatagtagtaggttctttaaatttcacaaatacaaaaaggtaactactgtttttcttgatattgttgtctgattgctcttatgttgtcccccttgaatttttcttacatccctgatcaagcaaatcaatgatgtgttgaagaatattatcattgtgctgcaggttcgtggtacctaagtggtccttatgtgtacaaggatcaatctgctgatgatataaagattttgggctactattaaaaaaaagtgtagcagatattggcctagcgattcactgccagtaagcttgggattacattggctaagtatcattaagtgttcaaaggatcataatatatatctgcaactctactttatttaaaacttctaggagaagttgaggatcacacattcacatataagtgaccatttcttatacaaatgtaagcacaatttttttatgaccagtagcatcggatgatcaaagtgtcttttatctccgttttccacattctcttgaaccctgaggtttttttttctgtctaatccttaattcatacaaggaggaccttgtattattttatcttatgcttttgtatttcaatgaaacatggcttgaatataagtttatttattctttatttgatgtg

SEQ ID NO: 27471 - DNA, 2519 bp, Oryza sativa
  ref <308>: DATABASE ACCESSION NUMBER: AK102913
  ref <309>: DATABASE ENTRY DATE: 2002-08-28
gaccattacttcgtcggagaaaagaaaaaagagagaaaaattccaccgattcggaggaagtcgaagcggaggggcaatgtcggcggcggcggggaggaatgctctcctggacgagctgcgcgcgctcatggcggcccactccccgccgctccacgcgctcgtcgtcccatccgacgacgcccaccagagcgagtatgtggcggagcgggacaagcggctgcagttcatctccgggttcaccgggatcgcccgcagcgctggtttggctcttatcactatgaaggaggcgctactgtggacggatgggcgttactttttgcaggcagagaagcagctcagtgatcactgggaattgatgtgcatgggagaagatccaccagttgaagtttggattgctgataacctatcagatgaagccgtcattggaattaatccatggtgcatctctgttgacactgcccaaagatatgagcatgcattttcaaagaagcaccagacactgtttcaactttcttctgacttggtagatgaagtatggaaggatcgtcctctggctaatactcagcctgtagtgcaccctgtcgagtttgctgggtgtagtgttactggaaaacttaaggagttaagaaaaaaattactacatgaaaaggctaggggcattataattgctgcccttgatgaggttgcttggttgtacaatattagaggaaatgatgtgcactacagcccagtggtccattcgtattctattgtaaccctgcacagtgctttcttttatgtggataacagaaaagtatctgttgagagctacatgtctgagaatggtattgatatcagagactataatatggttcaatcagatgtaagcttgcttgcatctggacagctaaaaggctctgcagttaatggtagctcacatgagggaaatggtatgaatgataattcaaaaattttgattgataattcgtgctgccttgcactctactcaaaactggatgaagatcaagttcttatactgcaatcacctgttgctctttcaaaggctgtgaagaatcccgtagagctggatggtttgaggaaggcacatattcgagatggtgtggctgttgtgcaatacctggcttggcttgacaatcagatgcaagagaactatggagcgtctggttactttagtggggccaagggatcacagaaaaaggagcatgtggaagtaaaacttactgaggtttctgtgagtgataaacttgaaggtttccgtgccgctaaagagtactttaaaggtccgagttttcctatgatttcagccgtgggaccaaatgcaacaatacttcactattcacctgaagcaagttcatgtgctgaacttgatactgataaaatatatctgtttgacactggggctcagtatcttgatggtactacagacatcacaagaactgtacattttggcaaaccatctgagcatgaaaagtcatgctacacagctgtgttgaaaggccacattgcactagacactgctgtatttcctaatggaaccacagggcatgctcttgatattctcgcacggacaccactttggaaaagtggtcttgattatcggcacggcacaggccatggggttggatcttatttgactgttcatgaaggtcctcatcaaattagcttcagaccttctgctagaatgtaccactacaagcatcgatgactgtaacagatgaacctggttactatcaagatggaagctttggtataaggttggagaatgttctgatagttcaagatgccaatactaaatttaattttggagataagggttatttggcatttgaacatataacatgggctccgtaccagacaaagctgattgacgccactttgctggcccctgccgagattgaatgggtaaacacgtatcactcagattgccgaaggattttgcagccttacctgaatgagcaggagaaggaatggctgaggaaagctactgagcctattactgtgagctgttaagccatcgactacatgagcacatggcacagggtctcaaccagttgcagccattcgtgctagatgtgcagaagtgcagatggtttctgacatgccatgctttgccttgggttgaatgcgaagatatggaagtagaaataggactagaggactggccgcttacctagtccctaccatgaatatgggctgtgtttgaatccaaacttcagtccttttccatcacatcaacttgtcatacacatacaacttctcagtcacatcatcttcaattccaactaaaattcaaactttacgctgaactaaacactagttgtgtttgtacggttctccagacgttgcttgaatgccttgtgggcatttgtatcgtgatgtatcgagcggcgagtaattgcagtgtaataataagcggccatgtctggtgataagctgttgtttaaaattgtatctcacatcaaccctgcctcacggctttgaaactgagcgacgccggtaacaaaaggggaaagtctatt

SEQ ID NO: 27472 - DNA, 2676 bp, Oryza sativa
  ref <308>: DATABASE ACCESSION NUMBER: AK102914
  ref <309>: DATABASE ENTRY DATE: 2002-08-28
gaaacacatcactccggcgccccctgatttctccgttcgctcgcgccgccttccgccggagtaagctctccgccgccgtgaactcgccgttcttcccgccgccgtcctcctccgcttcctcctcccctacagtggactggcgtggggtggagatcccccctatccatcccgaccgactcctttcccccggaatccggcgccctcgctggcggcggcggcggcggagttggaggcgatggacatctacaatgtcgaggccgccgagatcctcgccaacgaggcccagctgctcccaatcggcgaggccgctcccatctacgagaagctgctgtcaactttccccactgccgcgaagtactggaagcagtatgtcgaagcttacatgtccgcgaaggatgatgaggccaccaagcagatattcagcagatgcttgctcagttgccttcagattaatctctggcgttgttacatcaactttatcaggagagtgaacgataaaaggggttctgatggtttggaagagaccaaaaaggcttttgatttcatgctgaactatgttggcaatgatgttgcttctggccctgtttggatggattatattgctttcttgaagtcaatgccggttgtgacaccgcaggaagaatcacatcgtatgactactgtacggaaagtatatcagaaggcaattttagttccaactaatcatgtggagcagctatggaaggattatgagaattttgagaattctgttagccgcaccttggcaaaaggtttgttatcggagtatcagccaaagtttaacagtgccaaagcagtatatagagagcgtaagaaatacattgatgatattgattggaacatgctggcagttccccccacaggctcctacaaggaagagcaacagtgtatggcatggaaaagacttttggcatttgaaaaggggaaccctcagaggattgatgctacaactgctaataggcgtgttacctttacatttgaacaatgtttgatgtatctataccatcatcctgatatatggtatgattatgccatgtggcatgccaagaatggttctgtggattctgcaattaaaatatttcaacgtgctgtaaaggcactccctgattcaggagtactaaagtatgcctttgctgaactggaagagtctagaggagcaattcagcctgctaaagcaatatatgagtctcttatagctgagaatgcgggaatgacttcacttgcacatattcagtttattcgatttctaaggagaactgaaggcattgaagcagctcgtaagtactttctggatgctcggaaattgccaggctgcacttatcatgtctatgttgcttacgctacaatggcattttgccttgacaaggatgcaaaggtagcccaaagtgtttttgaagctggtttaaagcgatttatgcatgagccaggatatatccttgaatatgcagacttcctgtgtcgcttaaatgacgacagaaatgtgcgtgctttgtttgagcgagctctgagcttacttcctcctgaagaatctatagaggtgtggaaacgatttgctcaatttgagcaaacatacggggatttgtcaagcatgttaaaggtggaacaaagaaggaaggaggctttatctaggacatccgaagacgccttatctgccttggaaaacacactttatgacgttgtttctcgatacagctatatggatctttggccatgctcaaccaaagaattggattatctatcaagacatgagtggcttgcaaaaaacattgctaataggggtgacaaatcagttgtgctaactggcggtgctactttaggtgatatccgagttggttccaataaaaagtcgttcccacaatcttcaaaggttgttcgtcctgagatttctcgaatggttatctatgatcctagacagatgaaaggcccagacttctcaaccacagccagtgggtatacaaaggagattgatgaaatattgaaaagactttctccacagatgatgtctttcatcacaaatttgcctgctattgaagggccatcaccagatatggatattgtgctaagcgtgctgatgcagagtacattgccagtgggagacaaaccaggttcgcaagttcctggtcctgccacgagtgacctctcaggtcctggcaaatcaggattgaaccagaatggatccatccatagacctccaagagacgggcaacccacgaagcggaagaactctgaaagggggcgagcacaagaggaggatgatacgtcgacaacagtgcagagccgagcaatgccgcgggacatattcaggcttaggcagatccagaggaaccgcgggttgggcccttcccagtcaggatcagcggcactgtccagtggaagtgtgttctctggagatcagtcagccagctcaggctagttcaaatttacaattctatgtagcgtcatatatcctgatagggttctactacaattctattatagagtataattcatatctaggtagggtctagtttagttaggtccccccctgatgaaagatgtatgcataattgcatgagtgatgttggcgcgtaaatgtgtttgtttgactgaaaaggaaacggtttgcgatgaccacacgcaagttggggatgagcagtcgatatcatttaacatcgtacc

SEQ ID NO: 27473 - DNA, 1235 bp, Oryza sativa
  ref <308>: DATABASE ACCESSION NUMBER: AK102915
  ref <309>: DATABASE ENTRY DATE: 2002-08-28
gaccgccctcacttccaccgccgccgccgccgccgccgtgtaccccctcccccgccgcttgacgcgcctcctcttcgtcgacccaatccctccgtcggctagggctctgacactgaccgtggtccgtgagcacttggccactagtccctgctctgccactgggttcagcatatggatttgccaggtccaagatggaagaagggcaaagatggcaaggactttgcgtccctagcagcagctaaccccatgtcagccattgtttctgagctcaaggcctcattcataagctcaaagcccgtggcaattttgtctggtccgggtggtagcgccgttcttggagttgggccagagcaagccgtgatcctaaaccgtgctgcctttggccatgccatcgaaaatgcaacagcacagaagcattggttccaactcagccccgaggaggtcttttacctatgccatgctctgaattgcatcagggttgactcactggacaataagcaaatgagtgaaattgaactgtgggattactttaggtctggatcggagtcatttccggagatgtacaaggcttacgcacatctgagattgaagaactgggtggtgagatcagggctgcagtatggtgcggattttgtagcttaccgtcaccatccagcgctcgtccactcggaatttgcagtggttgtagttccagaaggtgcagagtttggcaataggtgtggccgtctggaggtgtggtctgatctactatgtgcactccgggcttctggcagtgtagcaaagacattactggttctgacaattagcagcagcagtaaatgtgaactgagctccccagattgtttggaacagcttgttgttcacgagagaacgatcacaagatggatactgcagcaatgccgtgaacaacgatgtgaaccaagcagagatgaagtgaatagggaagaactgattattgaaaaggaaagtgtagtatttaatcactggggtgtgatactaggcttcactgttctatctggcttgcttgtgtacaggttgaaattcagacaatagagttaacatttctgtgcacctgtgttgttgaggtgttagcttggaatttgaaatcctgagttgtactcttttgtgagccttgcttctggtttctagtctagatatgacaaataattatagccacgcatctgacttggacagcagagaaacgtttgaattttgatctgtcttagatcttgaat

SEQ ID NO: 27474 - DNA, 3137 bp, Oryza sativa
  ref <308>: DATABASE ACCESSION NUMBER: AK102916
  ref <309>: DATABASE ENTRY DATE: 2002-08-28
gcccttcgtttttggctcgttccggcgggtgggaataatatagctcaggcgtggcgagtttggtcggcgcatgccaaccttttccgtctcctctctctctctttttgccctctgctcctgcctgcctggctgccgcgatcgcagatcgggatctcggctcagcgcgctgcggcgaccccgctgcagcttgcagaaattctggttcaacaccagccacctttcaccaatctaaagaacttgagtacagcaattgtgaagaattgagcatactgttcaaagatgggtacaaggatgccaaccttacggagattgtcagccacactgtcatcggtgttgctcgagtggatcttgatgctgctgctgttcatcgatgcggtttattgcttcttggtcaccagatttgcccgcctctgcagattaccggcaccgtgccctttctgctcaaggctagaccatgtcctgggtaatgagaaaccatgcttctacagggaattgatctgcaaaactcacaagtcagagatctcatctttggccttctgccgtctacatcagaaacttgcaggtgcccaaagtatgtgtgagagatgcagtgactcacttgtagaaaacaatgatgaccgcaccgatgagccaacaatggctgccactctacctgatagtaatcaaggattatattcccatgatacaagaatttgctcatgttgtgcacagcattatacacaacagagaccgacaatgttttctcgaatgatcacagaactagaacctgctgaggctgtttgctcaccaaagatttgcacagattattccatacttcatcaagtggataaatctttggataaagatatttgtcaccagagtgatcactccatccatgaacgatacagtgtgctgcagatgacatctggctccgaggatgaggctccctgtgctgatgatggcaaaatttcacaccatcataaaaccaattgtatggaggaagatttgaatgaagatgccactgccgagaaatttgctgcttcttccactgagttggtcaggccattagaaatgaatgttccgatggaaaccgatgttggtgactcatatgatatatccttgccatatgttcttgtagatgatcatcctgatagtataattggtgagggccaaatggaagcagaagatgcttcattagaaaaacagacatgccagcatgatcccctagctgtcaaagaagagtcaggtttgacagatgtcaatgtttcccaagttccagttgcatcaagtgtcgagtcacctcagaatcttgggtacaacgaggcatgtcatggagcgagtgaaagcaccattgatccatgttcatcacagtccacaacactagaacaaaacattgctgtttcagagcacaacagcacaatagatgatctggaaggtcacaggtcagaaattactgttacatcaagtagagagtttcaccagaaaagtgcattggttgatgatgatccagttaattttagagatgaccatgtttcacaagttaattctagttctgaagctgttgatgaagctgaagattatgctaaggaggctgaacagacttgtgatatggtaacacatgaagcggcactcaaagatccttccaatacaaattccaaagatcctacagcaaaaggttttgtggaagaagctcctatatcaccacaggctattagaccaaacagtgaggtatttcagggtctcaatgtcatcgaggaacatccgcaaacaagcgcgactattggtgaaaggagaccatctctaagcactcagattagcatgaatgaagcctacaagcttgccattggtgccaagagtagcttgccatcccccaccttgactgatgtgattcttggaaaggattcctcttctagtgtaaatgaagaattgaggttactgctgtcacagctctcggcttccagaggactcgaggctccatgggtcgacccaggccctagcccacgtgcgtatgggcgtggtgatgatttgatagtgcagaacatcgcgaacagaatttcaattgagagaaatgcatctggtttggagtcactggagggtagcactgtaagtgagatggaaggtgaaagtgccactgaacggttgagacgacagattgatcttgaccgaaaatctatacacctcctctgcaaggaactggaagaagaaaggaacgcttcagcgattgctgcaagtcaagctttggctatgattaccagattgcaggatgacaaggctgccatgcagatggaagctttacattaccagcggatgatggaagaacaagcagagtatgatagtgatgcgcttgctaaagctaacgagctacttgctcagagggaacaacaaatagaggaattggaagctgagctcgaaaactacaggatgcagtttgcaggtggaccaacagagaaacaatccaatcaggtctcctttaatgaagaaaacattgccgaaactttgcttgatgaaactggtcttgaagctcctgcaattaccacaccaagtggtataaattcattagtgagctttgaagaggagagggcatatatagttgattgcttgacgaagctggagcagaagcttcaatcctactccaacaacagtactaacattcacttgtcaaattcagatgtcatagaggattacctttccaacaaaatgcacgttgtagatgatggctcactgcaatgccaagaaagctcaagagaggcccaggagcccgttttcttagctaaagaagctcattcttcaacagtgagtcggaagactgatcttagcacgcttcaagaagaaatctcaaacttgaacaaaagattgaagacgctagaaggagaccgcaactttattgaacatagcataaactcactcaggaatggcaaagaaggtgtgatgtttattcaggaaatcgctagcaacctaagagaactgcgagcaattgctggtagtaaataacacgcacaacttctttttagttttttacacaacttatttgtatagcagatacccatccatcttgtaaattgtatacttggcaatctgttctagtttgagggaaattgcatagaaaaagcttgtattaaacacaaggcagacataattgtaagctgtgcatgtttttc

SEQ ID NO: 27475 - DNA, 1368 bp, Oryza sativa
  ref <308>: DATABASE ACCESSION NUMBER: AK102917
  ref <309>: DATABASE ENTRY DATE: 2002-08-28
ggcagcgagccgtcacgttcattccccgcgtgcgatcccaaaccctaaaccctctccccatggccgccgccgcctcgcccaagcgcttgagggtctactcgtccgtctcgggcgacggccgctccgcgaacggcgcggggagcggcaagcgcgtggggacccacaacggcagcttccactgcgacgaggcgctcgggtgctacctcatccgcctcacctcccagttcgccggcgccgacgtcgtccgcacccgcgacccccagatcctcgatactctggatgctgtgcttgatgttggtggtgtctatgatcccagccggcatcgctacgatcatcaccagaagggctttaatgaggtctttggacatggctttaacacaaaacttagcagtgccgggcttgtttacaagcactttggtaaggagataattgcaaaggagcttgaagttagtgaagaccatgaagatgttcatcggttgtatcttgcaatatataaaagctttgttgaggcgcttgatgcagtcgacaacggaatcaatcaatatgacacagaccaacccccaaagtatgtgaacaacacacacttgtcttcacgcgttgggcgtcttaatccagactggaccgatccagaccagtcacctgagaaggaaaatgctgcatttcaacaggcaatgatgcttgctggaagtgaatttatggagagtgttcgctttcatgttaagtcatggttacctgcgagatctattgtcttggagtgtttgttgtcaagaggaaaggttgatccaagtgaagaaattatggttttggatagattctgcccatggaaacttcatctgtttgagcttgaagaggagctgaagattgatcccctcacgaagtatgtgttgtaccaggatgagaggagcaaaagttggagagtacaagctgttggcgttgctccggatagatttgagagccgaaagcctctgccggaaaagtggaggggcttgagagatgatgaactgtcaaacgatattggcattccaggatgtgtctttgttcatatgagcggcttcattggcggcaataagacgtatgagggagcgttggaaatggcaagagctgctatcaagtgttgactcaacgttcgacggaggcttcaatcagtaacgcactgtcacccatgagctgcagtaacacagttaaccagttgaacttcatgttattattgactcgtaattgacatttgagtactcatgttccttgcgtaaaacatccttagctgacaggagaggccagttgcctttttaatctcgaacgacgagtttatgattacattttataaagattagaaaagatgatgggacatatccatttgtcgtggtaagc

SEQ ID NO: 27476 - DNA, 2381 bp, Oryza sativa
  ref <308>: DATABASE ACCESSION NUMBER: AK102918
  ref <309>: DATABASE ENTRY DATE: 2002-08-28
ggcgctcaatcctttgggaaatggagctgctcagtggctcagtggccgcagctccgggaagcggaggctaccgagagcaaccggaccacgccaagaagcactagctagtgtactgcctcctcgatcttgctctatctaccactagcatcgagcttgcttcgctagctcctgtatatttaaggccgtaataagtgtaaacacagcaccaatagtccaacacagatactagtagtagtgtggtaaaagggtgaactgaagaccaagaggcaaaggcgcctgtgaggctgtgactgagaaggtaggagtaggagaagagaagctttgggcgccgccatggatgcatacgaggcgaccaaggtggtgttctcccggatccaggcgctggaccctgaccacgccgccaagatcatgggcctcctgctcatccaggaccacggcgacaaggagatgatacgcctcgccttcggccccgaggcgctgctccacagcgtcatggcgcaggcgcgcaaggagctcgccctcctgccgccgcctcaggcggcgtcgtcgtcgcccaccgtgccggcagcccactcgccgttcctgctgtcgaggcagaactccggccgctgccccgcgccgtcgccgtcgtcgtgggcgcaggcgcagccgttctcgaggagtaacagcatgggcaatggcggcgccgcggatgagatggtcggcgctggggaggagctaatgagccccttgaacggcgggggaggcgccgcggcgaacgccccgcccttctttcctcggggtggggacgcgctcctggacgacttcgagctgcaggagcagctcgcgttcctgcacgacggagccggggcgtgaaccccgggcatgctctccaggcgttcgacggagcggagtgccggagccccggcaccggcgagagcggcgggatgctcccctacggcctcgcctgggccaacggcggccctgggcaccgccgcagcgcgtcggtgaacgagctctgcctcggcggcgacggcttcgggtggaaaccttgcctgtactacgcgcgcgggttctgcaagaacggcagcacctgcaggttcgtccatggcggcctctccgacgacgccgccatggacgcaaccaccgccgaacagcagcagtgccaggatttcctcctccgctccaagagccagcgcctcggccccgccgccttcccgttcacccccacaggctctctccctgcctcgccatccgccaccagcaagtgcctcagcctcctcctgcagcagcagcagcagcacaacgacaaccaaagagccgccgcggccgcgctgatgctcgccggcggcgacgaggcgcacaagttcatggggcggccgcgcctggaccgcgtcgatttcgccagcatgatgaaccccgggtcgcgccagatttacctcaccttcccggccgacagcacgttccgcgaggaggacgtctccaactacttcagcatctacgggccggtgcacgacgtgcgcatcccgtaccagcagaagcgcatgttcgggttcgtcaccttcgtttacccggagacggtgaagctgatcttggccaagggcaacccgcacttcatctgcgacgcccgcgtgctcgtcaagccctacaaggagaagggcaaggtccccgacaagtacaggaagcagcagcaaggcgatttctgctgcatgtcgcccacggggttagacgccagggacccctttgattttcaccagctcggtgcaaggatgctgcagcactccaacagcgcgaacgagctaatgctgcggcggaagctcgaggagcagcaacaggcggcggagctgcagcaggctattgatctccatagccgccgcctcattggcctccagctgctcgacctcaagtcttctgccgctgtccatgcggcggagacgacaacaatgtctctgcccactccgatcaccaatgccttcacctccggccaacccggtgccaccacaatcgtcgagtcaccgcctagctctactgggcaactgatggcgagctgcggctctccatcggaggggaaagttgtcaatggtggtaataaggcggattctgccggtgaggttacccgcaatgccgatagtgaccaaagtggtgagcacaacttgccagacagcccgtttgcttcctctaccaagtcgaccgcattctttaccgcaaccgctgccactgccattggtagcgagggagatttcaccaccggtagtagctgcaatattggtggcagtgcggtcggcagcgccaaccctctccggcctcccacattggacataccttcgccaaggacctgcttcttccccatgcccaggctgtccgagcacggggcgatcgggatgtaaagtagtccacaatgg

SEQ ID NO: 27477 - DNA, 1797 bp, Oryza sativa
  misc_feature (992)..(992): "n"=any one base of a, t, c, or g
  ref <308>: DATABASE ACCESSION NUMBER: AK102919
  ref <309>: DATABASE ENTRY DATE: 2002-08-28
gacacactgacctgcaagctcgctgggcagcttacacaggggagtgaagtagagtgagtgtgagagagagtgagtgagaatgggtggcaaggccgctctcctgatggccctggtggccatcagcgtcgtcctggaggccagggcggacgccggtggctacggcggcgggtacacgccgacgccgacgccggtgaaaccggcgccgaagccggagaagccgcccaaggagcacaagccgccgcaccaccacgagcccaagccggagaagccacccaaggagcacaagccaccggcctacacgccgcccaagccgacgcccaccccacccacgtacaccccgacacccaagcctacgccaccgccatacacgcccaagccgacgccgccggctcacacccctactcccccgacgtacacgccgacccccactccacccaagccgacgcctcccacctacaagccacagcccaagccgacgcctgcgccttacactcccactcccacaccgccaacatacaagccgcagcccaagccgaccccgccaccgacgtacaagccgcagccgaagccgactcccaccccctacactcccactccgacgccgccatcgtacaagccgcagccgaagccgactcccaccccctacactcccactccgacgccgccatcgtacaagccgcagccgaagccgactcccaccccgtacactcccactccgacgccgccatcctacaagccgcagcccaagccgaacccgccacccacgtacaagccgcagcccaagccaaacccgccacccacgtacaagccggcgccgccaacctacaagccgcagcctaagccgaacccgccacccacgtacaagccgcagcctaagccgactcccactccctacactccacccacgtacaagccacaaccgaagccgactcccactcccactccctacactcccacgcccaagccgaacccgccgccaacctacaagccanagcccaagccgactcccacgccgacgccgtacaagccgcagcccaagccgactccttctccctacacccccaagccaactccgacgccgccgacctacacaccgacgccaacgccgccgtaccacaagccgccgccgtcctacacccccggcccgccgccgccctactagttgtgttccgccactctccgtcacgttccgaccaaaggtatagtacgcccaacacttcagacgctcacggttcagtttgcacatttacttattttcggaaagatttttgagtccgaacaaatttaaatataactaatatttttacaataaaaatttcagcatagattcacttatcaacataaaattttatattgcttattaattaacctgcatgcatggacgaacggatatcttgaataagtctcttaaaagcgggtgcttaatggcgtactctgtttgttttctgtctttgcaggaggtgaccgaccgaccagagttgtgcgagaggccaaagaggctcttccttccgtgaagattgctgtgcatgccgagctgcgctgcctttaattacctatagctaattaattagctagggccaatgttgcgaggagaataatgcatgcttgagtgccaatgttgctagctcgctccctctctagatgtgatgtgtatcatgtgttgtgtgttgctcgaatttgtactgtctagcgtacgtcgatcccgtggtgatttgtggagtatggtattgttgtgttacggtataaccaaaaataacagcggaaatggaagtaaaagctgttttcgatcgtcccagc

SEQ ID NO: 27478 - DNA, 2483 bp, Oryza sativa
  ref <308>: DATABASE ACCESSION NUMBER: AK102920
  ref <309>: DATABASE ENTRY DATE: 2002-08-28
ggccccgccccgccgccttgcaccgagctcacacaacccgcggcgacgcggcgtcgccgccgctgcttccggcgcatcctcgccgccgttcgttcccccaaatctggggtttggctcgagccgccatgtcgcacgtgaggtccgcctccgataggcaccgggacaaggagaaggagaaggagaggagggagacgcaccggagggaggagaaggatcaccacggcagcgggaggagggacagggacagagacagggagagttatagagagaaggataaagatgacaggagggagaaggagaaggagaaggagaaggagagggattccgagcgtggccgtggccgtgaccgtgatcgaggcctcgctacgccgcctcctcctcctcctccaccgcccgccgcctccgcccccgccccctcggcctcctctcccgcccttccaaaccctagcccgaggcatcctgccgcgcatcgcggcgcggcctgtgccccgccgcttctccaccgcgtcctgctcctccacgctcttccgcgtgggggaatgcggcgcccccggcgccaccgccatacccgaggcggagcgaggcgaggaggaggagcgtgagggggaggatggaggcgaggccgacgcggcggtggaggtggcggcggggaggcatgacacggacgcgtacgcggcggtggagctggcgctggactcggtggtgaaggttttcacggtgtccagtagccccaactacttcctgccgtggcagaacaaggcgcagcgcgagagcatgggctcaggatttgtaattccggggaggagaatcatcacaaatgctcatgttatagcggatcatacctttgttctcgtgaggaagcatgggtcgcctactaagtacaaggcagaagtccaggctgttggccatgagtgcgacttggctcttctgaaagttgatagtgaggagttttgggatggaatgaacagtttggagcttggagacattcccttcttgcaggaagcagttgctgtggttggctacccgcaagggggggacaacatttctgtcaccaagggtgtggtctctagagttgagccaacacaatatgcacatggtgctactcagctcatggccatacaaatagatgcggctatcaacccaggaaacagcggagggcctgcaattatgggcgacaaagttgctggagttgcttttcaaaatttatcaggggcagaaaacattgggtatattataccggtgcctgtaattaaacgtttcatctctggagtggaagagagcggtaaatattctggtttttgtacccttggaatatcttgccaggccacagagaatattcaattaagagagtgctttgggatgaagcctgatttgactggagtgttagtgagtagaataaatcctctatctgatgctcacagagttcttaagaaagatgacattcttcttgagtttgacggtgtgcctatagcaaatgatggcacagtcccatttcgaaatagggagagaatcaccttcgatcatctggtgtccatgaagaagcctggggaaatggcggttctcaaagttctaagagatggcaaagagcatgaattgaatgtcactgttagacctttgcaacctttagtccctgtacatcaatttgataaactacccagctactacatctttgctggttttgttttcatcccactgacccagccttatctccatgaatttggagaagactggtacaacaattcgccacgccgactgtgtgaacgggcactgagagagcttccaaaaaaagctgctgaacaactagttatcctatctcaggttctcatggatgatattaatgttggttatgaaaggctcgctgaactacaggtaaaaaaggtgaacggtgtggaagtagaaaatctgaagcatctgtgcagccttgtggaaagctgcactgaagaaaacctgagatttgatctggacgatgagcgggtgatcgtcctgaaatatcagaacgcaaagctcgccacgtcccggatcttaaaacggcacaggataccgtcggccatatctgctgacctcgtcgacgaacaggcgactgacgacggtgaggaggcgactaatggtgagatcgaggcatcatgcactagctaacattgttttgcatacttagctaggcaattacctgcggaagaatagatagatattagcacggttcaatttccagagacagacgcagtgaggcgaggactgcccggagcactgcgctggttgcagcggctcctgttcggccgtctcagttttgacgtgaggggtgggtgctccggtttccctcagcaaataagaagtgaagaacccaagttcttcagcctcatgatatgttgtaacacaaattatcttccccatttcttcccaatatttctcattctttcaccaaaagtgccgtggcacagtcacctcatattgaactcagattatatatatcatcacgaaacagagcg

SEQ ID NO: 27479 - DNA, 931 bp, Oryza sativa
  ref <308>: DATABASE ACCESSION NUMBER: AK102921
  ref <309>: DATABASE ENTRY DATE: 2002-08-28
gagtcctcctccatccccaaactccgccgccgccgccgtcaccgccgctcgccaccgccgcggccgccatgagggcgctcgacgagaaggagacgaagatggtgttcgagaagctgttcaagttcacggggccgaacctgaagcacctcctggagcggccggcggtggaggggcccgacccgcaggccgggcgctactgcctccgcctccacaagaaccgcgtctactacgcctccgaggcgctcgtccgccgcgccaccgccgtcgcccgcccgcgcctcgccggggtcggcacgcccatcggcaagttcacccacggcggcgcgttccacctcaccgtccacgccctcgacctcctcgccgcccacgcccgccgccgcgtctggctcaagcccgacaccgagcgctccttcctcttcggcaactccgtgcccaagtcctccctcgcccgcatcgcagagaacaccaaggccaacgacggcgtcgtcgtcatgtccatggccgacgtcccgctcggcttcggcatcgccgccaggtcggcgcaggactgcaggaaggccgacaccaacgccgtcgttgtgctgcaccagtctgacgcaggcgagtacctccgccgggaggaggagctcatgtgaggtgttgaggtttgacacattggcgtgactgcaggactgaaggatgcgcttcctcttcatgcgataattcgaagtttttctaccaccagtaaatgtgcgatttttacctagttttaagatagtggaggtctgttgtatcatctatctagtagaaaaattttgttcccaggctgttctatgggcctaaaagtgttctgttaagccgtaacttatcggtaagctactgcatgactgaatgctgcaggcctgcagtaacatttgatcgtgatcaatgatatacttgtcttatggaccct

SEQ ID NO: 27480 - DNA, 1967 bp, Oryza sativa
  misc_feature (1064)..(1064): "n"=any one base of a, t, c, or g
  ref <308>: DATABASE ACCESSION NUMBER: AK102922
  ref <309>: DATABASE ENTRY DATE: 2002-08-28
ggctcgctcagctctagatccagcaatggcgcctcctccggctgcagctgcggcgttggcggcgtgcattctcgccgtcgccgccaccctcgccggcgccgacgacccctaccgcttcttcacctggaacgtcacctacggcagcatcaaccctctcggctccaccccgcagcagggcatcttgatcaatggccagtttcctgggccgcgaatcggctgcgtgacgaacgacaacatcatcgtgaacgtgttcaacaacctggacgagccgttcctcctgacatggaatggcatcaagcagcgcaagaactcgtggcaggacggcgtgctgggcaccaactgcccaatcccccctggcgccaactacacctacaagttccaggccaaggaccagatcggcaccttcgtctacttcccctccgtcgccatgcaccgcgccgccggcggcttcggcgcgctcaacgtctaccagcgcccggccatccccgtcccgtacccgccgcccgccggcgacttcacgctcctcgtcggcgactggtacaaggccgggcataagcagctgaggcaggcgctcgacgccggcggcggtggcgcgctcccgccgcccgacgcgctgctcatcaatggcatgccgtcggcggcggcgttcgtcggcgaccaggggaggacgtacctgttcagggtgtccaatgtcggggtgaagacgtccgtcaatgtcaggatccaggggcactcgctgaggttggtggaggtggaggggacgcacccggtgcagaacgtgtacgactcgctcgacgtccatgtcggccagtcggtggcgttcctcgtcacgctcgacaaggcggcgcaggactaccccgtcgtggcgtccgcgcggttcagccccggcgcctccccgctgatggcgacggggacgctgcactacagcagcgccgtgtccagggcgcccggcccgctcccggcgccgccgccggagcaggcggagtggtcgatgaaccaggcgaggtcgttccggtggaacctgacggcgagcgcggcgaggcccaacccgcaggggtcgttcnactacggcaccatcgcgacgtcgaggacgctggtgctcgccaactccgcgccggtgctcgccgggcagcgccggtacgccgtcaacggcgtgtcgttcttcgtccccgacacgccgctcaagctcgtggacaactacaacatcgccaatgtcatcggctgggacagcgtcccggcgaggcccgacggcgcggcgccgcggtcggggacgccggtggtgggctcaacctgcacgagttcatcgaggtggtgttccagaacacggagaacgagctgcagtcttggcatctcgatggatatgacttctgggttgttgggtatggcaatggtcagtggactgagaatcagcggacaacctacaacttggttgatgcgcaagcgaggcatacagttcaggtttacccgaatggatggtcggcaatcttggtgtcattggacaaccaggggatgtggaacctgaggtcggcgaactgggaccggcaatacctcggccagcagctgtacatgagagtgtggacgccgcagcagagcttctccaatgagtacagtatcccgaccaacgccatactctgcggtagagctgccggccttggacactgaggaagatgatgaagaagaaattcagagttgcatagttcgatccatccttcgtcgtttggtatatgtctagtagaataagtcatactactactactataggtgaaagtgaagatgagaattcagaattacgatttcggatatatgtttgttgtagctaaaactgatgtgctattctttgatcatatgtcagtgtttttctcttgagtttgtagcctgtggacaaggcctcaggcttaatggtgcagagtgctctgtttctgatgccgcatcaatctattattatgctattcagtgatgtttttacg

SEQ ID NO: 27481 - DNA, 1964 bp, Oryza sativa
  ref <308>: DATABASE ACCESSION NUMBER: AK102923
  ref <309>: DATABASE ENTRY DATE: 2002-08-28
gagttccacacttccacgagaggaggacgcgagatccgtattcgagtctcatctccatccttcacgcgacgtgctgctccgctccgctccgtcgtcaagcccccgcccccctcacacttcaggcggcgcccgcgcgagccagccacttcgagaagcgaaacgcggaagcggaggggagatcgagagagatcgcgagatggagcagcccaacgacgtcgggatcctcgccatggacatctacttccctcccgcctgcgtccaccaggaagcgctggaagcgcacgatggagccagcaagggtaagtacacaattggtcttgggcaggactgcatggcctattgcagcgaggtggaagatgttatctctatgagcttgacggttgttgcatcactgctgaaaaagtacaacattgatcctaagcaaattggccgcctggaggttggtagtgagacagtgatagacaaaagcaaatccatcaaaacatggctgatgcatattttcgaggagagtggcaatactgacattgagggggttgactcaagtaacgcatgctatggtggaacagctgccctgttgaattgtgttaattgggtggaaagtaaatcctgggatggacgctacggtcttgttgtttgcacagatagcgcggtttatgcagaagggccagctcgtccaacaggtggtgctgctgctattgctatgcttattggtccgaatgctcccatttcttttgaaagtaaatatagggcttcacacatggcccatgtttacgatttctacaagcctgatcttgcaagtgaatacccggttgttgatggaaaactttctcagacatgctatctgatggctcttgattcgtgctataggcaatattgtaccaagtatgaaaagatagtgggagaacaattctcgatttctgatgcagaatactgtgtcttccattctccatataataagcttgtacaaaagagtttcgcccgactttatttcaatgacttcatgcgtaattgcagcacggttgataatgatgctaaagagaagcttcagccttttgcaaatttgactagtgaagaaagctaccaaagtcgtgacttggaaaaggcctctcaacaagtagcaaagcatctgtatgatatcaaagttcaaccatcaactctgcttccaaaacagatcggtaatatgtacactgcatctctttatgctgcattggcatctgtgatctacaacaagcatgacagtctggatggccagcgaattctcatgttttcttatgggagtggattgacatccactatgttttcgttgagactacatgatggtcaacatccctttagcttaatgaacattgcttctgtgcttgatgtgacgacaaagcttgagtcaagacatgtgacctcacctgagaagtttattgagacattgaagctgatggagcaccgctatggagcaaaagattttgaaacaagcaaagataccagcttgttgccaccaggaacattctatcttacaaaagttgattcgatgtacaggaggttctatgacaagaaagccgccgagggaaaaatcaagggctgcaacggcattgcaaacggtcactgattgggtgccaagaatgctgtgagctcacgcgcattattagccatcttgttgctcagtttgatgtatttattcttagagtgctcagtctagatatcttccaataattcattgttcccctcgtgcccctcagcttgtttttactttaagctgaacaataaacctttgtgtagtactgtagtagtactaggtcctagtatccttgtttcctctagctctattgcttcattgttactagctaattccctccccatgctttattgttctcagtaatatcctgcaaaactgttggctgtgtgcatcttatgatgcagacgttgaagatgtaatttttatcttatctaaaaaattcagttaagtcttgagc

SEQ ID NO: 27482 - DNA, 4272 bp, Oryza sativa
  ref <308>: DATABASE ACCESSION NUMBER: AK102924
  ref <309>: DATABASE ENTRY DATE: 2002-08-28
gagagtactaattttgagcccaacctaaaaccctcaccttatcctctcctccgattcctcctcctcctgcttctcttctttgcttcgccttcgctttgcttgtggtggccggagcaacagccccggccatggcctccaccaccgacgccgacgccgctccggtcgcccccgtgctcgaggagaagccccccaccccgccgcctgacggcgacgaggtcccttctgctcctgcggcggcggcggcggcggagcaacccaaggtagtcgaggaggaggaggtgagattggaggggaaaggtggggggttcggtggccaggaggtggaggtggccggagacggggaagatggcggcgaggtggaggtggcggaggctaaggatgagggaggcggcggggagttcgccgggggagatgcgaaagctgcctcctcgttgttggcggcggcggcggaggaggaggaggaggaggaggaggcgagcaacggcgaattgggtgaggaggatgcttatccggcttcctccgatgacgcggtaggtgaggagaagggcgaattgggcgaggagccggaggagaaggctccggctctggctccggaggcgaatggcgccgccgaatcggatgtggaggagaagccggaggaggataacgagggggaggaggtggctactgggggtggggatgatggtgaattgggaatggagaaagaggttgatgtttctgctggggccgcggaggcgccgcagccggaggataaggtagctcctgaagctgaagctaatggagatttgggcgacaaggcataggaggaagcgagtgcttcggcggcggtggaggtggtggaggagagcaatgctccagaagaattgttggagaaggctgtggtttcggaggcaaatggcgtggctgccgccgtcgaattggctgtggaggagaagctagaggataacaagggagaggaggaagaaatggaggcgaagcctgagccagtaagcggggtgattccagtggttgttgacgacactagctccgagatgattgcgcctgtgagtgccgaaagtgcagttgaagagagtactgagaaggagcaaactgttgacgacactagctccgagatgattgcgcatgtgagtgccgaaagtgcagttgaagagagtactgagaaggagcaaactgttgaaagcgaggccattgaatctgtggagattgttggtgttgagaagcctactgaggatgagagtaatgttgatggcggtgctagttctgttgtgtctcgagaattggctccagaggaaaccaaggaaaataatgttggtcaggaggatgaaggtgttgctgaggttattgaccgtgaagaagacgctgatgatgatgaagagatagttttagctgcagctgatgatgaagatgatggtactaacgaggctgatgacgatgaagatggagtgagctctgacagggggcctgcacgagttgctattatagagagttcagaagctgcgaagcagatcatgaaggagcttggggaaggttctgctagtgttagtcctgtatctggcttgagcagctcgagagagtacactaatagcatggatgggcagattgtccttgatgattctgaggaggatggggatgatgacgataatgaagatgacgatgagaaggggtttgattctgctgccttggctgccctgctgaaagcagcaactggtgcatctgcagacgggaatgtcacagtttcttcccaagatggctctagaatcttctccatggatcggccagctggcctgggctcatcagccccatctctcaggccaacagtcccacgcccagttgcacggtcaaacctattcagcccctctgagctagcagtgactgctgagcctactgaggagatgacggaggaagagaagaagctgcatgacaaggttgagttgatccgagtaaagtttctgcgccttgtctatagattgggggctactcctgaagaaacagttgcagcacaggtgttgtaccgtctgagccttgctgagggtattcgacacggaaggcagacaaaccgagctttcagccttgacaatgcacggaagaaggccatgctgcttgaagcggagggaaaagaggagttgaacttctcatgcaacatacttgttttggggaagataggggtcggaaaaagtgcaactataaattcaatttttggtgaagagaagtccaaaactgatgctttcagttcagccaccaacagtgtacgggagattgttggtaatgtcgatggtgtccagatacggatcattgatactccaggccttcgacccaatgtgatggaccaaggatccaacagaaaaatcctcgcttctgtcaagaaatataccaagagatgccccccagatattgttctgtatgtggaccgcctggatagtctgagccgtgatctcaatgatttgcctcttctaaagaccattacttctgttctgggctcatctatatggttcaatgccattgttgctctcactcatgctgcttccgcccctcctgaaggtctaaatggtgcccctatgacatatgaggtgctaatggctcagaggtctcacattatccagcaatccatcaggcaagctgcaggagatatgcggttgatgaatccagtagctcttgttgagaaccatccttcttgcaggagaaaccgcgagggtcagaaagtacttccagatggccagagctggaggcatcagatgctgcttttgtgctactcttcaaagatattgtctgaagcaaactcacttctgaaacttcaggatccaaatcctggaaagctttttgggttccgtttccgctctccgcctctgcccttcctgctctcctccctgttgcagtcaagagctcacccgaagctttcaccagatcagggtggcaatgaaggagattctgacatcgatttggatgattactctgatatagagcaggatgaagatgaagaggaatatgaccagcttcctcccttcaagccattgaccaaatctcagcttgcgaggctgacaaaggagcagaagaatgcttattttgatgagtacgactacagggtcaagcttctccagaagaaacagtggaaggatgagatccgcaggttgaaggagatgaagaagagaggtaaaactgatatggatgcttatgggtatgctaacatcgcaggagaaaatgatctggatcctcctccagagaacgtatcagttcccttacctgatatggtgctgcccccttcatttgactgtgacaatcccacataccggtaccgctttctggagccaacttcgactgttcttgcaaggcctgtgttagatgcacacgggtgggatcatgactgtggttatgacggagtaagtgttggggagacgcttgctctccttaacaagtttccagctaatatggcggttcaggtcaccaaggacaagaaggaatttagcatccatttggactcttccatctcagcaaagcttggggaggatgcatcgtcgcttgctggttttgatatccagactgttgggcggcagcttgcgtacattctccgtggtgaaaccaagttcaagaatatcaagaagaacaagactactggaggattttcagtgactttcttgggcgacattgtggcgactgggctgaaggttgaggaccagctctctcttgggaagaggttggcactggtggcgagcacaggtgcaatgcgagctcaaggcgacaccgcttatggagctaacttggaggcacgcctgaaagacaaagattatccgattggccagtccctgtcaaccctgggtctttctttgatgaagtggcgccgagaccttgctctcggtgcgaatttgcagtcccagttctcgattggaaggggctcgaagatggtggttcgtcttggattgaataacaaactaagtggccagatcactgtcaggacaagcacctcggagcaggtccagatcgcgctgttgggtcttatcccagttgcagcctccatttacaggagcttcaggcccagcgaaccctccttcgcctattagcttcgcatcaagatgaacaatttactcatgtcggctgcgcctcctttcgtcttagcaattttcctatcttatatgaaccataattttctgtctgtttttgcttttaccagtgtactccgaagatcgttcctatcataattttggctgaagagggttgtgaaatttaatgtggaacttcaactgaataatgttgttagatctatataccatccgtttttct

SEQ ID NO: 27483 - DNA, 1474 bp, Oryza sativa
  ref <308>: DATABASE ACCESSION NUMBER: AK102925
  ref <309>: DATABASE ENTRY DATE: 2002-08-28
gagaaagtcgaagctgctgatcttggatgccacctagttcaaggatggcgccgccgccgctcgccggcgtggtggtggtcgccgccgcgctcctgctcctcctgccggaggccgccgagccccgcactctcctctcgctcgacgacttcggcgccgtcggcgacggcgtcgccaacgacacgcaggccttggtggacgcctggagcgccgcctgcgccaccggcgaccacaccttcctccacgtccccgccgccaagtcctacctcgtctggccggtcaccctcgccggaccttgcagggaggagatcaagctcttcatctccggcaacatcgtcgcgccggagagccccgacgagtggccggagggcggcggcggcggcggcgaatggctccacttcgtcggcgtcagcgacctgacgctgagcggcgggggcgtcatcgacggccgtggccaccggtggtgggcccggtcgtgcaaggcaaagcacaacgcgaccgagaattgcactacccaggctgctccaaaggcgctgcacttcgaggattgtcagggtatcagcgtgatggggatcacgctgcagaacagccaggagagccacctgacgttcacccggtgctcgcacgtcaaggccaactacctgaggataacctcgccggaggacagcccggacaccaccggagttcacgtcgtcagctcgcgcaatgttcacatcatggacgactcgatctccacaggtcatgattgtgtctcgattgtgggcaattctacggatgttcgtctaagagccatctcatgtggacctggccatggtatcagtattggaggattaggcgagaaccgaagttaccacagggtagaaaagatcaagatggacaccctgttcatttccaacactgaaaacggcgtacgcgtcaagaccttccagggcggctgcggcacggcccggaaaatgaagttcggtgacatccttatgaagaacgtcaagaacccgatcgtcatcgatcagcagaactcctcgagcaacgaaattccctgcggatcaaagaacggaagcgcggtgacggtgggggagatcagctacacggacatcaccggcacgtcggcgtcggagcgggcggtgacgttcgcgtgcagcgaggcggcgccgtgcagcaagctgtcgctggagaacgtgaacatcaccatggccggcgggcagaacgcgtccgcctactgccaccacgcgttcgggaagagcgtcggcgtcgtcgtcccggactcgtgcctcgggaaggaggactacctccgccggcaagtccccgcctccgccgccgccgccggcggcggaacgcaggagaagggaggagaagatgacgatcggtgaaaccgtggcaggttaagtcagcgtgtgtagtggacgtgttcacatcctttaccataataacgctattattacatgtactaacgtgtgaggataataaaagtttagaaccc

SEQ ID NO: 27484 - DNA, 2341 bp, Oryza sativa
  ref <308>: DATABASE ACCESSION NUMBER: AK102926
  ref <309>: DATABASE ENTRY DATE: 2002-08-28
ggaagacggggcaccactgctcctctcgccctcccctgctacacttcccgtttccctgggaggcggaggaggaggggagagacacacgccacgccgacgccgtcgcccaccaccccctgccgccgcgccgcgcggccatggggctccacgcgatcctcctcctcctcctcctccggatctccgcctccgcagccgcctccaggccgccgctcgacaccctcggcatcccgccgcaagacgaggcgtacttcaggggcggcgtgatcaggtgcagggacggatcggggaggttcgccagggacaagctcaacgacgacttctgcgactgccccgacggcaccgacgagccagggacatcggcgtgcccggaggggaagttctactgccagaatgctgggcattctcccatcacgatcttctcgtcgcgagtgaatgatggtatctgtgattgctgcgacgggagtgatgagtatgatagcaatgtcacttgcaagaatacgtgctgggaggctggtaaagcggcaagggataaattgaagaaaaaagtagctacatataaaagcggagttgttattcgaaatcaggaaattcaaaaggcaaaagtggcatttgctaaagacgaggcagagctagcgaaactgaagggtgaagagaaaatactacaaggccttgttgacaagctcacagaacaaaagaaattgatagagaaggcagaggaagaggaacgcttaagaaaagaaaaggaagaaaagaggatgaaggaagaagccgaaaagcaagctgctgatgaaaagaaagcgtcagatgcctctcaggaggtagattctcaggaaaatcatgaaactgtgcaagaagatgagagcaaggtagctgaacatcatgatggacatgccacgagccatgacaatcacacaccagaaagcgagtcatctgttgagcagcatgatcctgaaagccaagatgacattagcataaaagccgcacctgctgatgaatcaccaccagaggagacatctgcagcacctactaaagagcaggaatccactcctgctgactcagaaggtttatcaagagaggagttaggtcgtctggtagcttccagatggactggagaaaaggttgatgaggtcagtaaagatgataaaaatgagcatgaagctgagcatgatatgccagaacattcagaagaaacacatgaagatgaatcagatgtaccagaatctgctgaagacagctatgctggttaccattcagaagttgaggatgacagacataaatatgatgatgaagacttctcacatgaatcagatgatgaatatgtcgatgatcatgatgagcatgttgcgtcatacaagtctgatgatgatcagaaaggtgatgaccattcagatttcactgcctctgggcaagcatcatggctggataaaattcagcaaactgtacagaatgttttacgaacattcaactttttcaagacccctgtggatttatctgaggcttctcgtgttcggaaggagtatgatgatgcaagctcaaagctgtccaagattcagtctaggatatccactctgacagataagctaaaacacgactttggtaaggagaaggagttctattacttttatgatcagtgctttgagagcaaggagggcaagtatgtttacaaggtatgtccattcaagaaagcttcgcaggttgaaggacatagtaccaccagcctggggcgctgggacaaatttgaagaatcctacagagtaatgcaattttcaaatggagacagatgctggaatggccctgaccgaagtctaaaggttaggcttcgatgcgggctgaacaatgaacttaatggtgtcgatgagcctagtagatgcgagtatgtggctgtattatcgactccagcgctttgcgatgaacaaaaactgaaggaattggaacagaagctcaaggcatcttcgaaccagcgtgaccatgatgaactctaaattatggggtgagacaataatgaacttgctacaaggaaaacaactctcaccatacagccatactcacaagagaggtttaacaggtttattatatgaatagaatagcatatgaaactggaattcttggagttcagcactcggattgccaccgaagcagcattagtttggcaagaaaaatttttgaacaaaagctgtaggatatcgcgaaattcctcaccctgatttgtcggtagattttcttttaccactcttccctgtaaacgtatttgctcaatttttctatgccaccccaaagatgctagactgttgtttgtaacaatctgagtgtttctgagttatgaatagtatatttatgaact

SEQ ID NO: 27485 - DNA, 1104 bp, Oryza sativa
  ref <308>: DATABASE ACCESSION NUMBER: AK102927
  ref <309>: DATABASE ENTRY DATE: 2002-08-28
gtgctatacgcatcttccctagcttgctaagctagctagtcttctccttcctttctcctcttcctcctcctcctcttcttctcaatcttgctcagcaaatcttgtcggggagagagagagagagatcagcaaggagaagagggaattaagctagatcgaggtagtcgtcgatcgatcgattgaagatggggagagggaagattgccatcaagaggatcgacaacacgatgaaccggcaggtgaccttctcgaagcggcgcggcgggctgatgaagaaggcccgggagctggccatcctctgcgacgccgacgtcggcctcattgtcttctcctgcaccggccgcctctacgacttctccagctcaagcatgaaatcaataatagagcggtaccaggaggcaggagaggagcattgtcggttgctgaacccaatgtcagaggctaagttttggcagcgggaggttacaactttgaggcagcaagtgcaaaacttacaccacaacaacaggcaacttttgggagaggaaatctccaacttcacagttagagatctgcagcttctccagaaccaagttgagatgagcctacattccataagaaataaaaaggatcaacttttggcagaggagattctaaaactcaatgaaaaggggtctcttgttcaaaaggagaacagtgaacttcgcaagaagttcaacattgctcatcaacgcaacatagaattacacaagaagcttaactctggagaaagcacgtcaagtgagcaagttaccagaagctcaaaggatcccggagaatcgagtacaccccgtgattcacgtgtgtgtattgaccttgaattgagtcaaaaagaagttgaagatgaataacacatgatcaagtgttaaaaacaacatgatggccagtaacttttgcagcatcacgcctactacaagcgcaagaaaagctagctactactggaacaagggatcttaatcatgttttgaaacttaattagtaatattttaaaaaatcgtactatactaatcatgatgtgtagcgtattgcaccactgaatttattactgtaattaacatggtgagtgttaaaatattttgtgatatc

SEQ ID NO: 27486 - DNA, 1317 bp, Oryza sativa
  ref <308>: DATABASE ACCESSION NUMBER: AK102928
  ref <309>: DATABASE ENTRY DATE: 2002-08-28
tactgtgcagagggggaagctgtttagccatggcctccgtctccatctcctacctcgggccctgagcacatccccattcccctagcctcagctcctccatgcgagggcggtgatggcgcccgcctccgtcgccgtctccctctccttccgcgtcgtcccgcctcggccctgccgccggcgggcgaggtggccccggccaattagggcttcgagcgacggtagtggcgtcgcaaacggggaccggaaggtcggggctctggagaggagggtgggagatctgagggctgtcgtcgcctcggtgccccctgctgttgctgcgatcaagaaaaacattggactaaactttattgctggattctgtctcggcatcacacttttggctgctgttgcaagacaggtcatcattaggattcatgagcgtgacaataaaggctctgttgctgacctaataaggcgtggacaattaaaatcaggacaacgtgggatagcaaaaccccgagtgtacgatgatcctttcaataatccattagtcaagattgatgaggatacttctaccgctcaagtgtttggcaaggagtaccggcttgctcccattaggcttacaaaagaacaacaagcaatgcatcagaaaaggagatcacgtacgtatcagtggaaaaggcccactgtttttcttaaagaaggtgattccttgccaccagatgttgatccagatacagttagatggattcccgtaaaccacccatttgctgctgcttcaactgaagtggatgaggagactgctaaacaaaatgtttatcaaaaggatggggtcccatcccgtgtcaaagctgagcatgaagctttgcagacaaggctagaggcttcaaataatgttaacaagttctcttctagccaaaggaatatgcagcttagtgacaggcaactaagattatcatcaaacgagtcatctgggagtcggcaaaactcgttatctggcacagtgaagaaccaaaatggtcaaccaaccttggagtctgaaaagcgtagccctgacaacaactcacaatcaaaaagtctggaagaacaataaatttgtgatttgtgtcaactccttagcacctgcttcaacagcttgtcagcttcgttgtgtagtgtactgaggactcaggttttagctgttgatagaagaattttggacctgtaggcttacgtagtgacttgagcatagggcattgctacggaatgtatttcgtatgttgtaaagggatgggcatgagcatagggcattgctacggaatgtatttcgtatgttgtaaagggatattttctttctct

SEQ ID NO: 27487 - DNA, 1443 bp, Oryza sativa
  ref <308>: DATABASE ACCESSION NUMBER: AK102929
  ref <309>: DATABASE ENTRY DATE: 2002-08-28
gggttcagatactcccaacgtgttgaccccttcggccatttgcgactgccgctttgcagaagcatcacggccgcatcggcgaccccgaactccgccgccgcccgcagccgccgccgccttcgcagccgccgccgccgccgccttcttccagggcaaacgatgctccgccgcgtcgcgccatccctgcggcgagctatcctcacatcctccgcccatggccgcgcgggcgcgcaactcacggagcctggtctctcgcctcgccacgctctgctcccgcaatggcgcctttgctcctccgcggcctccacgaactctcccccgcccccgccgccgcctccttcttctccgcctcagggaacaccgcgtccagcaggcggatccaccgtctcgtcgctgaaccctgccgaggtcgccaagttcgccgccatcgctgagacctggtgggattctgaaggtccattcaagccgttgcatctgatgaatccaactcgactgtcttttatccggtccactctctgtagacatttcaggcgggatccaaattcttctaaaccacttgaaggccttaaagttattgatgttggatgtgggggtggcattctctcagagcctcttgctcggatgggagctacagttactggaattgatgctgttgacaaaaatataaagattgcacgtgtccatgctgcatccgatccatcaactgcttccatagaatatttctgcacaacagctgaggatttggtgaaagagaacaaacaatttgatgctgtgatttctcttgaggtgatcgagcatgtggctaatccctcggggttctgtgaatctttgtcagctttgacagttcctaatggggccactgtgatttctacaatcaaccgctcaatgagggcatatgcaactgcaatagtcgctgcggagtatattcttaattggcttcctaaaggcacacatcagtggtccaaactagttacccctgaggagaggagctggtccttatactggaaagagcttcaatctctgtacaagaaatggccgggtttgtgtataatccgctgcgtggagagtggtctctgtcagatgatcttactgtaaattatattgcttatggcatgaagaaagtcgaaacaccctctgagtcaaattgacctcacatcatcaaaatattttcgtcgggaactaaaacgtgcgccacttgaaaattttggcagggattacaatcaaatagcacactgaaaagttttgacttctctttttgttaatttcggaaaacagggagcatgtagtagtgtcatggggaagccccactgaggtgtgcaaactgctaagttgatagcagtggcaacagctaacaagtaaagtaggggtagctttgtctctttgattgtaactagtagtacttctttcaaactttccttcatataaataagtacatttcagacg

SEQ ID NO: 27488 - DNA, 2352 bp, Oryza sativa
  ref <308>: DATABASE ACCESSION NUMBER: AK102930
  ref <309>: DATABASE ENTRY DATE: 2002-08-28
ggcgcgcgaccgctggctggcggcggagccgacctcacctcgccggagtttaatcccccctccattcttcctcgtcctgattgccaacgacggcggagagctcgccggtgcccgacgtaccgacggctcgatcagtccttcccatcctctgttagcctcgcgtgacgcccgcctgcggtggggggaagaacctcgccgtcgcacgcgatggcggggacgccacccgatggcggaggagataggccgtgggagtcgtaccacaccgcctacaccaacgccaaagctggaatggagggagttgacaaagagaaggtgcagaaggtaatctacgaaatgagcaagggttcaaaatattttgaaaatgaacagaggaaagaggcaattaccaaacaaaaaatcgaccatctgcgtgcacaatgtgcaaagctgactgacaatgacatatcacattttcagaaggtcgccgaacataaaattttggagctggaagcttcacgggatctttcaaagatatggcttcacaccgacatggatgccttttatgctactgtcgagatattggaaaatccatccttgaagggaaaaccattggcagtgggtagcatgtctatgatagctactgccagttatgaggcacggaagtttggagttcgtgcagcaatgcctggttttattggctgtaaattatgtcctgagttggtttttgtccgtccaaattttgagagatacacttattatagtgaattgacaagaaaagttttccaaaggtacgatcccaactttgttgcaacaagcctagatgaagcatatctcaatattacgaaagtctgcttcgatagaggcattactggtgaggaggttgctacagaacttaggggtgccattcaccaggaaaccggtctaacttgtagtgctggggtagctccaaaccgcatgattgctaaggtttgctctgatatcaacaagcctaatggacagttcattttgccgaatgaccaagaagctgtgacaacatttgtatcaacactacctataagaaaggtactcctgtttttagtagtgaagaatggaccttgtttctagaagtattttgttgttctaatagttcttgtttccttcatatatatatattcattcgtacattgttaaaccactaaatattctaaccagtgcgcatattctttccacagtagtccttcaaaacaatagcatttgggcattccccatttatggacaccactttttacttctttaattgagatggagttttctttactactaagtgctttgcctctttggacattcatgaaaaaggtgaaggctgattttttatttgaagatctttgtatgcagataggtggtataggcaaagtaacagaacaaatgttacgtcaggttcttggtatcagtacatgccaggagatgctgcaaaaggcttctttcttatgtgctcttttttctgaatcctcagctggttcgtatgttagtaacacttgttagttccattgcaagttttcagaagctatattatacctatcccaagcagacaccacaattcaatttcttgaaccaaacaccattctgtgcctgcttaatttgatcctttggacgttctccagatttctttatttcggttggtcttggactaggcggtactgaaactcctgagcaaagactaaggaaaagtataagttgcgagcgaactttcagggcaacagatgattgttctatgcttttcgagaaattaggtaaacatccttactaagttattgttctagctatgaggcctgttgattgtagatttcaaaccttgaagctactttgaaatttcatatgctattgttactaagtaactaggttgtcttacagaagagacttgcaatcttattcgaacagaagcatttttcctattttaatggtatatttgtcaataggccaagagcatattattttgcgcaataatttgagacacgtcatgattattcgagagcttgagtagaaagtagttgtttgaaattagtcaattatgctgcaacaagctgtttacatttgatgaggaaatataatttctggtgagtggtagttttggttgggatagcaaactatgcaaggtggaacttgttaggcagctttgactgcatacctgagatctggtgttcaatcttgatagtgctggggaccactggtccgggattgaaggatcacaacgctctatgaatatgagctatttcatgtgtcaattattctacatttctacatatgagatactagaagccaagttgactggaaacaggcaactaaccagggtttggtatttcagaattctgaaatcttaaattttggataaggtac

SEQ ID NO: 27489 - DNA, 1222 bp, Oryza sativa
  ref <308>: DATABASE ACCESSION NUMBER: AK102931
  ref <309>: DATABASE ENTRY DATE: 2002-08-28
gccaaccatttctcctgggccttgctccgctccacctcccaccaaaccctaaccctaaccctaacgcgcctaccacgcgaggcgcggcggcggcggcgggcaccatgtccgcggcggtgtgcggcaaacgggcctcctccttcttcgaggacctcccccattcgccgtcctccccgccctccaagcgcgcctgcttccgtggaggttcctcgccctcccgcccgctcgccgacccggccctcgtcgcccagatccgcccgcggttcccctccgtcggcctcgaggttattgagaacgcgttggaggaatgtgaaaacgattttgattcagcaataaagttcttgttcaatttgcatgtaggacccacagaatgtaatgtggatcctatttatcaatctccatcaggaatgtctactgagcttcaagtggctgatgaaggtattttggctggtaatgaagctgctgtacctataggaaatgctccctgcgctgataactttccatcaagcagcacccagtgggttgagattcttgtgaacgagatgactaatgcctctaacatggatgatgcaaaggctcgtgcctctagagtattggaggtgtttgagaagtccatgaccgctcatgttggtgcaatggggagctttcagaaggaaagctctgtgtataaggaacagtttgaagcaataaccagggaaaatactattctaaagaaagccgttgcaattcagcacgagcgccaaaaggagcatgatgggagaaaccaggagattcagcaactcaagcagctggttgctcagtaccaagagcaaattagaagcctggaggtaaacaactatgcactgtccatgcatcttaggcaagctcagcaagccaactcgattccagggcacttccatcgggacatcttctgaataacttcatacctaaaccggaggtttccatagaatgagatatcgttcacccaacaattaagggcagagttcttgttcttggcttatatccaatatattgccaagttataaacatagtttaatgtatgttgtagacctgtgtgtacatgcttgtcttgcgttgtgctgttggccccctaagatgggattgtgtgcgagcaagcgcaaagaaagcctagttcattcgaacggcagacagaatatgatcaagttagaaaagaaaaaaagaaaagaaaagaaaagcgaaagagcctttaaaattattctcc

SEQ ID NO: 27490 - DNA, 1505 bp, Oryza sativa
  ref <308>: DATABASE ACCESSION NUMBER: AK102932
  ref <309>: DATABASE ENTRY DATE: 2002-08-28
agcttagagctgatcacaatatacaagatgtgaggtcaaaaatatttccattgaaaagaaagaaggttaatgctgaagaggttgaatctcctattgcgccgcctgctaaaaggaaagagagatctatctcttcattggtggtcaatacacctgaaataacaccaaagagtttgacagggcgccgaacaagggcatctaccaggaagtctgctgccgcattacgtgaccttggtcctatcattcctcctgtgaaaaaggatagtgataacaccaataagaatgctgataattcaagcttgctggacagcttgagcaaagtacctcaaacaagaagacaggtattgtcaaatgcggaaacatcgagtcatccctccagtaaagataaaggaggtgacgataaggacttggacaagtcagagctctggagacctttaaattgtcttgtagaggctgcaagcaaaacaaagtcctatagatcaagttcagctgctaggggaaatcagcccactgaatctcctagtagtgcaaatgctagcagaactaaggctagggagtatctgcttaagtccaaagttcaagatgagaagaaagaagttcctgtggcaacagttccgtttaaaaggaaaggacctggccgggggaggaaacctgcacaacccccagccgctgcagtgtctagtcattcagctagcaagcatgaaaaattattaacccctgtatggttttcattgattgcatcatttgaccagaaaggtgctccacccttgccgcagataccaacccattatttgagaataaaagatgacaatatgcccgcgtcatccatccaaaagtatatcatgcagaagctcagtcttccaagtgagactgaggttgaaataagctgctgcggtcagccagtgaacccaattcaacccctgcgcaatttaatagagcggtggctgaggttcggcccagctcgcaccttgcagactgtggtcggctcctccgggggagactatgtgatggtgatatcctacgggcggccaaaggccgcatagtcttgaaacgaaccatcttcagatgtcccacctgtcgacgatcaccggatttggcacaaggtcgtgaagttccgccacccgggaaaacatatcaccatatatgggaggaggattctcttctcccctgatgacatatactcaaaagaaagcggctgtgccatactcaaagctccccttccctccattgatgctgttgaatgctgctccattctggcagaatttgttagttttttttttcgttcttgatatacaggtaaatttaaagttgctgtaatttggtaggcgcagagaaaactggtgtttaggttggtcaaagagaggatacataatgtcagttttagctgctcttcccttggaagggattaaattggcttcagtttttagtggactgcagcttggttgtatcctggattaatgttaaactgatgtggtactagactgaaaattgcttccaaatcctaaacc

SEQ ID NO: 27491 - DNA, 3013 bp, Oryza sativa
  ref <308>: DATABASE ACCESSION NUMBER: AK102933
  ref <309>: DATABASE ENTRY DATE: 2002-08-28
gctgcacaggaggatcgagttccacctcgcgaggaggtcgcactcggtggtggcggtcgggggaggcgggttccggatggagacgctgaaccccgacgcgggtgacagagcggcggcgggggcggcgcagggggtgggggtggcggcggggggcgagggggaggcgaggagggcggagaagggggaggtggtcggcggtgggctggatccggagctcagcgtcgccaggatctacctcgggagaattggtgctggcctgcaaaatcttgggaacacttgctacctgaactcggtgctgcaatgcttgacgtacacagaaccatttgcggcctatttgcagagcgggaagcacaagtcttcatgtcgtactgctggattttgtgcactatgtgctcttcaaaaccatgttaagactgctctacagtcaactggaaaaatagtgacgccatcacagattgtcaagaacttgcgctgcatctcccgtagtttccgcaattcaaggcaggaggatgcacatgagttaatggttaatttacttgaatccatgcataaatgttgtctaccttctggagtaccaagtgagtctcctagtgcatatgagaagagcttagttcacaaaatatttggtggccgcctaagaagtcaggtgaaatgcacacagtgctcacattgctccaacaaatttgatcctttcttggatctcagccttgatattggtaaggccacgtctctggtgagggcacttcaaaatttcactgcggaagagctcttagatgggggagaaaagcaatatcagtgccaacgctgcaggaaaaaggttgtagcaaagaaaaagtttacaattgataaggcgccatatgttctgacaattcatctgaagcgctttagccctttcaacccccgtgaaaagattgacaaaaaagttgattttcagccaatgctagacttgaagccatttattagcgactctaaaggcgcagattttaaatacagcctttatggtgttttggttcatgctggttggaacactcagtcaggccattattattgcttcgttcgaacttccagtggaatgtggcacaaccttgatgataaccaggtacgccaagtccgtgaggcagatgtattgagacagaaagcatatatgttattttatgtacgtgacagagttgggaatccgactccacgcaaggataatatcactgctaatatgccagccaggagaacaatacctgaaaagatctcaggtctgagtgatatgatccagagcggcgtaattgaagcaaaattgaacggttcctcgtctccttatggcgataagaggttgcacggcataagcaatgggaactcaatcaagacttcaagagagcattatttgaagaaagatggcaaaactgaagctcctaaagcctctgaaaacaatggcctggcttccacacagaaagcttctgcacctcaaattgatggtgctaccttatctgctcaatctaagcaaattacttcaactggtcacagagaggtatcttcatcagatcgatctgcatctcttacacatgtgattgtgaaccaagcagtggccatggttccgtcgcaggaattgcaaccaaaggttgatggcttaaccgatacctcttccctgggcaatggcaatgcgatattgtctgagcgaaataaacaaacatcccagcatcaaaatccattttctatgccagcttcccatggaaaggacacaggggcagggcttgctgcacaaactttcccaactaaggatgctattgtttcaaatggtgttgtacctagtagcagggatccaatttccagtgagaaggtgtgtggcttgcaaaaatccatcaagcaagatgacaaaacggtgaaagaacttcctataagtgagaacaatatagtatcaggacttgaacgagtcaacgccagaaaacagactagctctgaagtttccatgaaggtagctgcagctgattcgtgcaatagcaacacacctaaaagggtggatttgaagtcaaagaaacttgtgagatatccagtcatgaacatgtggcttgggcccagacaagttatgctaggttcactaaaggtacaaaagaaaaagaaatgcaatagaactagaagacggtctgtagtttgtgaggacatggccaatgccacttgttcaggtaacaacacaagcgagcagcaggcatcaacatcaacaacaacgtcgtctgaaactgtgcaatgtactcccagagggcggaaacgtgcctatgatagtgacagtcctaaaaataataaccagaagcaaaacaagcaagacgttattggagccgatactggtagtggtgaacttaacatggataagagaaatgttattagtgaaaccgctgctagtgctgagcttccgaagctgggtccaggctcttctgcaaatcaggaacattcaaggaacaatgttcatgcaaaattgggagttccccggcattttactgttctgacaagggacttggctgaagttactgttccatgctgggatgatgttgctgtgtcaaatgctgaggcaagagagtcaaaacattcagaaagcaagagcattggatatgtgttagatgaatgggacgaggagtatgaccgtggaaagaccaagaaaatcagaaattcaaaggaagactacggtggaccaaaccccttccaggaggaggccaactacatctcacagagaaacatgaaacagaggacctatcaacccaaatcctggaagaaacatgcccatgttagaagatgacaatgacgattgacgatgcccatgttgtagtagcagtgtagcgcccatttttgaagaattcatttgttgttcgttttgccgtgttacatcttagcattccggacaaacagctgctgggactggacatgcattcaactgttgttttcgccatgtcgtatttaaacagctggaacctctgtattcaattgtattggattgttgtagcgagaacgagttggttaatactactgtcgttcc

SEQ ID NO: 27492 - DNA, 1488 bp, Oryza sativa
  ref <308>: DATABASE ACCESSION NUMBER: AK102934
  ref <309>: DATABASE ENTRY DATE: 2002-08-28
ggcaaccggcaaccaaaccccaagtcaggcttccaattccaactaccaccgcttcaccatggccgctcctctcttcctcctcctcctcctcctcctcgtctcctccgcctccgcgggttacgaggaggaggcgctgctgcggcgcgcggaggaggagcgggactggatggtgggcgtgcggcgccgcatccacgcccatccggagctcgcgttccgggagcaccacaccagcgccctcgtccgcgacgagctggagcggctcggcctcaccgcccgcgcggtcgccggcaccggcgtcgtcgccgacgtcggctccggcctcccccccgtcgtcgccctccgcgccgacatggacgccctccccgtccaggaattagtggagtgggaacacaagagcaaagtggatggtgtgatgcatgcctgcggtcatgatgtgcacaccgcgatgctcctgggagctgcaaagttgcttagtgagcgcaaggagcagatcaagggcacagtgagacttcttttccaacctgccgaggaaggtggtgcgggtgcatcttacatgataaaagatggtgttcttgatggcgttgaagctatattcgggatgcatgttgactatcggatgccaacaggtgtaatagcagctcatgcagggcctacacaagctgctgtatgtttttatgaagcaaaaatagaaggtaaaactggaaaggctgaaactccacacttaaatgtggatcctattgttgctgcatcatttgtcatcctatccctgcagcagctcatttcaagagaagatgatcctcttcacagccaggtgctctcagttacctatgtcaagggtgggaacactattgatgccacacctccagttattgaattcggaggtactttgaggagcctcactactgaaggtctatatcgtctacagaaaagggtcaaggaggtggtagaagggcaggcagctgtgcacagatgcaagggagttgtccagataaaaagggacgactacccaatgtatccagctgtctttaatgatgagaaactgcatcaccatgtggaaactgtgggcagacgattacttggtccagacaaggtgaagccgggagagaagattatggctggcgaagacttcgctttctaccaacagttagttcctggagttatgtttggcattggtattagaaacggggaagttggttcagttcacactgttcataaccctaagttcttcgttgatgaggatgttatcccaattggagctgcactgcatactgcccttgcagaaatgtaccttactgagcgctccacagaaggtgaagacggaagccagcattcgcattgacattcgtgcgttgaacagttcgagtgtacaagtatccaagagaataatcatgcttcaagaatccagatgatcattttagtagcgtgcaaggcgttcttgtactcaggtatgctcgagtaatgacaagaaatatatacactgtattaccc

SEQ ID NO: 27493 - DNA, 1157 bp, Oryza sativa
  ref <308>: DATABASE ACCESSION NUMBER: AK102935
  ref <309>: DATABASE ENTRY DATE: 2002-08-28
tgagggttttatcgccgccgccgccgcttctccactctcccctgcccccgtcgccgtcgccaccgccgccgccatgtccgggaggaagaagacacgggagcccaaggaggagaacgtcaccctcggcccgaccgtgcgcgagggcgagtacgtcttcggcgtcgcccacatcttcgcctccttcaacgacaccttcatccatgtcaccgatctgtccgggagggagacgctcgtccgcatcactggtggcatgaaggttaaagctgatcgcgacgaatcttccccttatgctgctatgcttgcttcacaggatgttgctcaaagatgcaaggagcttggaataactgctttgcatatcaagctccgtgctactggtggtaacaagacaaaaacccctggtcctggtgctcagtccgcacttagagcacttgctcgatctggcatgaagattggtcgccctcgcgctcgcgctccagtcccgcgtcgccgaggtgttcgccgtcgacatccaccccgccgccgcgatcggcaagggcgtcctcctcgaccacgccacgggcgtcgtcatcggagagaccgccgtcatcggcgacaacgtctccatcctccaccacgtcacgctgggcgggacaggcaaggccgtgggcgaccggcaccccaagatcggcgacggcgtcctcattggcgccggcgcgacgatcctcggcaatgtcaggatcggcgccggggccaagatcggggccgggtcgctggtgctcatcgacgtgccgccgaggaccacggcggtggggaatccggcgaggctgctcggcgggaagaagggcgacgacatgccgggtgaatccatggaccacacctccttcatccagcaatggtcggactacagcatctgagcaggacatggtgtatgcgctactaaattttctccttgtttcgagctgtgcttgaactggtactagtggtgttattacttaataacactacaagtaatagcacaatgtgtttcttttttgcttgtaatggctgtaagctttgctccggcgagctgaaggtgaaccgtactgcacattgtcgtgctcgtctccggacacttgtactggatgttcactttgtaattttgcgaaggtctcgtggaatgtaatactatccactacctt

SEQ ID NO: 27494 - DNA, 3574 bp, Oryza sativa
  ref <308>: DATABASE ACCESSION NUMBER: AK102936
  ref <309>: DATABASE ENTRY DATE: 2002-08-28
acacggggctcttgctgttccaaaccattctttgccgcaaactactttgcagtctacctctcatccaggttctctttctgttggttttcaaggagtaggtactagagctaatgcatcaattgaaggggcctcatcagcttacagtggatcaaaattttctcccggggttggtttgaacagttatttaccaagtaatttgagacatgtacaaagtacaaacgccttttcctcaagcactgtaacaaaatcatcttcaatcaagttgccaagttctaattctaatcatgaactgagctcattgagctctccaactgaacatgtgattgctgatggaagtaaatcacttcagctcgtccctgcaagcaagattaatggatcaatcaaccttatcactatgggctctgatggtgcatctagaaagcgttctatttcagatttatttctgaacctcccttcattgcaaggattgaaacccagtagcccaaggaagcgaagaagaatatcagaatcaatggagagttggtctcctttgcaagcatattcatcagactcacaatcaagaacaagcctcacctacggaaatattctggctgaaagaaataattgtgtcccagcaactacatatgcttcggtgctactacatgtcataagacactgttcattgtccattaaacatgctcaaataactgcccagatggattctcttgccattccatatgttgaagaagtgggcttacgatcaccatcctctaatctttggctaaggttaccttttgctcgggatgattcttggaaacacatatgcttacgcctcggcaaggctggaagtatgtcttgggatgttaggataaacgatccacattttagggaactctgggagctaagtacaggaagcaccacaacctcatggggtgttggtgttcgtgtcgcaaacacctctgagatggattcgcatatctcttttgatgcagaaggtgttattttaacttacagcaatgttgaaccagacagtgttcagaagcttgtgtcagatctacgaaagcttgcaaatgcccgttcatttgcccgtggaatgaggagattgattggtgtcaaacttaatgacaagctagatgatgatcagacatctacggatataaagtcgcagcctgttaataagggtaatagtgatgctgcagacaggctatctgaacaaatgagaaagactttcaggattgaagctgttggcttaatgagcttgtggttcagttatggcacaatgcctatggtacactttgttgttgagtgggaaagtgctaagggaggctgcacaatgcatgtttctcctgatcagctttggccacacacaaagtttttggaggatttcgtgaacggtggtgaggtagcatccttcctggactgcattcggctgacagcagggcctttgcttgcccttgggggtgcaattcgtccagcaagaatgcctgtaacggtttcttctggatacaactccatgccaaagcagatgaacaacatccccacccagggaccattagcaaatggttcatcatcaacaaccatgcatcacgcaccttcccccgcaaatgttgctgccacccatttgggaagtcataatctccacactgctgcgatgctttccgctgctggacggggtgggcctggacttgttcctagttctttgctgccctttgatgtttctgttgtgctccgtgggccatactggatacgcattatatatcggaagaaattttctgttgacatgcgctgtttcgctggggatcaggtttggctacaaccagcaactcctcctaaaggaggacctctggttggtggatcgttgccgtgcccacaatttcgaccattcataatggaacatgttgctcagggtctaaatgctcttgaacccagtttcatgaatgctacacaggccggtgcgcatttaaatagcagtgctggaactctgcaacctgcacccaatgcaaatcgtgtaaacgcgactcaaggtattggtatgtccaggcctgcttctggagttgctaaccatgtagcagccaatttgagtcgagcaggtaatgccatgttggcctcttcaggacttgcttcagggattggtggggcctctgtgcgactaacatctggagctaacctccctgttcatgtgaaaggagagctgaatacagctttcattgggcttggggatgatggtggctacggtggtggttgggttcctttggcagctctcaagaaggttttaagagggatcctcaagtaccttggagttctatggttgtttgcacaattgcctgaacttctgaaagagatactggggtcgattttgaaggaaaatgagggtgctctcttgaatttggatcaagagcaacctgcactccggttctatgtgggaggttatgtatttgcagttagtgttcatcgggttcaattgcttctacaagttttaagcgtcaagcgattccatcaccagcaacagcagcagcaagctcagaacagtgcacaggaagagctagctccacctgaaatcaacgagatatgtgattatttcagcaggcgtgttgcctctgaaccatatgatgcttccagagttgcttcatttatcactttgcttacactaccgatttcagtgctgcgagaatttttaaaactaattgcttggaagaaaggtttctcccaggctcatggggacatggccactgctcagagagcccggattgagatttgtctggaaaatcattcagagtcagtttcagatgatatcacagaaagcactttggctaagagcaatgttaagtatgatagagcccacagttctctagagtttgctctgacctttgtacttgatcatgctctcattcctcatatgaatgtagctggcggagctgcctggcttccgtattgtgtatccgtacgactaaagtattcttttggggaaagcaaccatatagcataccttgcaatggacggtagccatggtggcagagcttgctggttgcaatacgaggactgggaaagatgtaagcagaaggtcgccagggcagtggagactgtgaatggctctgttgcggttggagaatcgggccaaggaagattgcgaatggtcgccgagatgatccaaaagcaacttcagctctgtcttcagcagctgagagatggtcctctttctgctggctcaactgcatcatgagcagacaagtctgttgggggaatttagtggccaggttagagaattttgtcgcaacagtttgtctcattgagtgctggggatagtctcagcgccaaaggctcttattgttatgaatgttttgtacagtaaaggtgtgaagcccttgtgttgcttaacctagccccttcctgtaacatagaaaatgtgggtaataatgcacctaggtgtggttgctcatggacttcagcagtgcaaattcagcatagatctgtccatacagaatttgttattccttttatcagaagggagctggtgtttttgttgctgttaatttagacattttatcaggtttgagcagtgtagtgtacattatatataatatactggacttggact

SEQ ID NO: 27495 - DNA, 2977 bp, Oryza sativa
  ref <308>: DATABASE ACCESSION NUMBER: AK102937
  ref <309>: DATABASE ENTRY DATE: 2002-08-28
gtcttgttcccccaaccaaaaccctcgcgcccccgccgcaccacccgcgcagccgcacagcgcaaatcccccccaccccgcgcaaggtttcgagaggtctcgtcggagatggaggcgttcggcgggttcttcgtggacgagaaggcggcgcgggtggagaacatcttcctcgagttcctcaggcggttcaaggaggcggatgcggcggaggcgttctacgagacggagctggaggcgatgcggtcgcgggagtccaccaccatgtacgtcgacttcgcccacgtcatgcgattcaacgacgtcctccagaaggccatctccgaggagtatctcaggttcgagccgtacctccggaatgcgtgcaagaggtttgtgatggagcagaggactggcgagaaccgtgcaccaatcatctctgatgatagccctaacaaggacattaacattgccttctacaacataccaatgctgaagaggttgagggagcttggaacagcagagattggtaagctcacggctgtaatgggggtggttacacggacaagtgaggtccggcctgagttactgcaaggcaccttcaagtgccttgactgtggaaatgttgtaaagaatgttgagcagcagttcaagtatactgagccaataatatgtgtcaatgcaacatgccaaaatcgatcaaaatgggcccttctccgacaagagagcaagttcacagattggcagcgggtcaggatgcaggagacatcaaaagaaatacctgctggttcactaccacgctccctggatgtcattctgaggcatgagattgttgagaaggctagagctggagacacggtcatatttactggaactgttgttgctgttcctgatgttatggctctaacttcacctggtgagagagcagagtgtcgccgggaggctcctcagcgaaagaatgggtctggtgtccaagaaggtgtcaagggcttgaaatcactaggagtacgagatctgtcatatcgccttgcttttgtagcaaactcagtgcaggtggcggatggaaggagagaagtcgacatccgggacagggacatagatggagatgacagcgaaagacagaagttcactgaagaagaggaagatgaagttgttaggatgaggaacgttcctgattttttcaataagatagttgatagcatatgtcccactgtctttgggcatcaagaaattaagagagcaatccttctcatgcttttgggtggtgttcacaagataacacatgaagggataaaccttagaggtgacatcaatgtctgtattgttggtgatccaagttgtgcgaagtctcagttcttaaaatataccgctggtattgttccacgatctgtttacacatcagggaagtcctcatctgctgctggtttgacagcaactgttgctaaagaaccagagactggcgaattttgcattgaggcaggagcactcatgttagctgataatggcatctgctgcattgatgaatttgataaaatggacatcaaaggtcaggttgctatacatgaagcaatggaacagcaaaccattagcataacaaaagcaggaatacaagcaactttgaatgcaaggacttcaattttggcagcagcaaatcccacaggagggcgttatgacaagtcaaaaccactcaagtataacgtggcattgcctccagctattctttcaagatttgatctggtatacataatgatcgatgagcctgatgaaaacactgactaccacattgctcatcacattgtgagggtccatcagaaacgtgaagaagcacttgcccctgcatttagcacggcagaattgaaacgttacattgcttttgcgaagtccttgaaacctcagctgagttctgaagcaaagaaagttctggttgaatcatatgttacccttcgtagaggagatagtacccctggtactagggttgcttataggatgacagttaggcaactagaggcattaatcaggctttcagaagctattgcccgaagtcatttggaaagagttgttctcccagcccatgttcgcatggcagttaaattgctcaagacatccatcatcagcgtggaatcaagtgaagttgatctctctgatttccaagatgctgatgatggcacaaatgtaccagccgataatgatgctggtcagccaacagaaatggatgctgctcctcaacaagacggtccagaaaatgagcaagcggcagatactggtaagaagaagttggttataaccgaagaacatttccagagagtcacgcaagctttagttatgagactacggcagcatgaagagtctgtcacgaaagatggagatggtctggctggcatgaagcaaggggatctgataatttggtatgttgagcagcagaatgcccaaggagcctatagttctacagcagaggtgaaggaagaagtgaagtgcatcaaggccatcatagagaggttaatacagagggatggccatctcatagtgatagacgaaggagcagccccagcggctgacgacggtgctgcacgaagaacatcagagagcagaatcctggcagttaatccgaactatgtcatcgattaaccatctgaattatggtacgcagctaacacaatccaatcgatgtggttaaccgatagaaccaagagtagattctagtgagaacccctggtgggttatgctatgcactagacatgtaccatttccaactgtggtagtctttgcaattgagtatatgatctcttgacaaattgtacaattaattcttggaagcaaaggtgtagtcagagttatagttgatgataactataatcggtagtgtgcctgtgtacattttcttagagttggttgaactatgtgagggctttggagtttggagaagcttgaattttcaagtgcttgctgtgcttctaacgtgtatcattcagattcagatgattcgagaaacgtacctttggct

SEQ ID NO: 27496 - DNA, 1223 bp, Oryza sativa
  ref <308>: DATABASE ACCESSION NUMBER: AK102938
  ref <309>: DATABASE ENTRY DATE: 2002-08-28
gactcacattcattcccttctctctcctccctccctcccccgcccctctgctcccctcgccggcgagcccaatggcggcgtccgccctcgactccgcctgggagggcctcaccggcagcttcaccgagttccagctcgccaccgtcgtcaccttcctcctccacgagaccgtcttcttcctctccggcctcccctccctcctcttcgagcgcttcggcctcttcgccaagtacaagatccagaagaagagcaataccccttcttaccagaatagatgtgtgctgcgtctcattctgtaccatgtctgtgtgaacttgcctgtaatggttttatcctaccctgccttcaaattcatgggcctgaggagctctcttcctctgccacactggacggttattgtttctcaagttcttttttactttgtactcgaggattttatattttattggggacatagggcactgcacaccaaatggctatacaagcatgttcacagcgttcaccatgaatatgctacaccctttggcttgacttcagaatatgcccaccctgctgaaattttgttccttgggttcgccacaattgttggtccggccctcactggtccgcacttgttcactctatggctgtggatggtgttgagggtattggagacagttgaagctcacagtggataccatttcccatggagcccatcaaatttcttgccactgtatggaggctccgactttcatgactatcatcaccgtgtgctctacaccaaatcaggaaactacgcctctacttttgtttacatggactggctgtttggcacggacaaggattaccgcaatgccaaggctatcgaggagaaagacgggaagcatttgtaaattgtgggggctactctctttctctttgtccaaatcatcgaaacaagggtttgacatctcgcagtggtgatagcattgtgttcatgggaggaaataggtgtcctagccacaggtatctatctcctgagatgatcctacagtttagattttctttccccaaattcactatactatcatcatgagacctttgtgtttctggaggccaccatgatgtaatttgtcataagcttaatttgatgcgtgctattttgtggtttgcttggacgggggtacatgccatgacagaagtgaactattcgaatcagaaagttgtcagattagtgagttaacgttgagatgaggtttactggt

SEQ ID NO: 27497 - DNA, 1958 bp, Oryza sativa
  ref <308>: DATABASE ACCESSION NUMBER: AK102939
  ref <309>: DATABASE ENTRY DATE: 2002-08-28
aggcaatctctaatttcaaatctcccccattcgttgcttctcctctccgctacccccgaacaaatctagggtttcggatcggaatcctccaccgccgccggcgttactaccggcgataatgtcggccagcggcgagcccgagaaggtccccgccgccgccgagggagaggagaaggcggacggcgcgaaggatgccgcgggctccgggggagagctgctgtactgcggcgcgaccaacttcgagaccatggggcggaaggtggtgggcggggcgcagggtaacctagtgtcgccgacgcggatgcggtcgctcatgggcgtcgacatacgattcgttgcctccgggtgcacggcttgccattgtgttgccttggatgctgaaggacgttgctatacatggggtcgaaatgagaaggggcagttggggcatggggatactcttcagcgtaacctgccgactgttgtttctgaactatcaaagtacaaagtcattaaagcaagtgttggaagaaatcacacagtggttgtaaccgatgacgggaagtcattctcatttggtcacaataaacacggacagttgggtacaggctccctaaggaatgaaattgagacatcaccaatgccctgtcttgttactgaagcaactaatgctgtttgtggtgctgattttactgtctggctgtcatcagtggagggctctactatacttacagcaggtcttccccagtacggtcagcttggtcatggaaccgacaatgagtacaatattaaagactcatctgtaaagctggcatatgatccccagccccgtcccagggcaatagcttcattatctgggaaaactatcgtcaaagctgcatgtggaacaaatcatacagttgcagttgattcaagtggctatgtttacacatggggctttggtggatatggaaggttgggccatagagaacaaaaggatgagtggcagcctcgccttgttgaagtcttccagaagcataatgttctgccacccaatgctattatatcagctggtgcggcaagttctgcatgcactgccggtggaggacagttgtacatgtggggaaagttaaagaatacaggcgacgactggatgtatccaaagccattattggatttaagtggttggaacattcgttgcatggcttctggtaacatgcaccacgttgttggtgcagatgattcttgcataagctggggaacagcccaaaatggagagcttggctatggccctaatgggcaaaagtcatctgctaatcctaaaaaggttgacatccttgaaggaatgcatgttataagtgttggttgtggatatgggttgtctgcgattgttgtagacagatcaattgctagtgaccggcttaatcagctggatatttatgacggtgatacctccactgaagtagaagacagagtggaggtccaggttgccaagaaggcatctgctagcaccaatgcacgatctaacaagcgcaagaaaaccaaggatgtttcgaatcagaagaggatgatgatgaggaagatgatagcgacgacgatgaaaatggtgaaataaaaggtggtaagggtagacgtggccgcaaaccttcaaacagagggagaggcaggggagctaaaaaggcaactcctgagccaaagccatctgcaaggggcagaggccgcccgaagaaaaccgagtctcctgctcagaaaactgggagcttggggcgaggcgggaagagggggaagcgaggaagagctcggaagtgagtttaaaccaagtagggcattgttgaactcagatcgtgtgattgtctaactcctgatgcgatccaacccagccattcaagggcatttgttttcttagcaatggtttcttactcttgcccgccttacattgttgagcctgttttttgagtggaattacctctggtattgaagacttgtctgatttgaacctg

SEQ ID NO: 27498 - DNA, 1775 bp, Oryza sativa
  ref <308>: DATABASE ACCESSION NUMBER: AK102940
  ref <309>: DATABASE ENTRY DATE: 2002-08-28
gggggcagactgcgaaggacgccgcctcccattccgtggtactctggaaagtcgaggcgcgacgccggcgacgtgagcgccattggaggtcggcggcgagttcttcaccggcagattctgctcgcgactccttccttgcactgcgatctcaattcttgcttacttgcgctgttgattcatatggcttcttttggtcttctgctcttgtgcagtttccacgcgcaccacctgttcgacgaaacgccactgcgtgatcggccgccatggagggtcgtcctgggaggcgcaggcgcaggagggtcaaggccccgacgcgcgctgccggcatggactggatcagcggcctccccgacgaaatcctccaccacatcatgtccttcctgaacgcgcgccaggccgtgcagacgtgcgtgctgtcccggcggtggagcgatctctggcgcaccgtgccctgcatcaacgccgacttcaatgagtttgatttcattgattaccaaggggacgatgaggactacaacgacgaggtggcgttcaagaggttcgttaaccggatgttggagctccgcgatcctgccaccatgatggacaaattctggctcaagtacaaaatatcagacgggtacaatgaatacaaggattccaatgtagatgccaacaggtggattagccatgctttgcaaaagcaggccagggttatggaggttgtcgtgttctcctttccattggagctcgatcactcggtgttcacttcatgctacctgagaaaaattgggttctcctgtgtttctttacaccaaggtttcttcaagcaacttgacgccggctgtccagaattggaagaactcttcttacatgattgcactattgcggatgaggagatcttctcccagtcactgaaggttttgacaatcgacgacactgaattctccaaggcgaacaaggcatatatttctattccaagtgttacttctctcaccttgtctagtcctgagaattccacacctatgctaaaggacatggcattactaacgaccacatcagtatcagttaaattttatacattcagttatggttttgatgctaatgatctccgccagtgtctctggagcctttctggtgttacaaacttggagttgaattatgagggtacagagctgacgttcgaaaacaatttgcaatggtgcccagaattcatcaatgttgtcaacctgactcttggtcagtggtgcctggatgcaaacttctatgcactaattgtcttccttcagaactcagcgagactagagaagttaactctgaatcttgcgaaggatcgttagcgagcttatggaaagatcatttacatgcgagcaccttaagattgttgaagtcaaatgcttggaggatgatccccaggtcatcagtgtgcaagatttctttgctagtaatggcatggcctctgttcagtttcatatcaaacactggggccaatacgaggaagaggatgagttacctgcatttgttcggtatgaggagagatgaaatgccaaaggatcttttgcatttgtttgtcatcccattgaagaatcaactcgctttctgctacattcactggctacagtagagttccgaggtcttattttgcatttttgctggtctgtagtaatggcatccaataactttgctagttttcattccactcctaatctctgattacattagcagttgttcaaccaaggacctatttatcccttgtacaacagaatttctttccattcatcaactattttttgttc

SEQ ID NO: 27499 - DNA, 2152 bp, Oryza sativa
  ref <308>: DATABASE ACCESSION NUMBER: AK102941
  ref <309>: DATABASE ENTRY DATE: 2002-08-28
ggactgtgacagctgcgtccacgggcgccatgcggcggcgctccacgttcgccgttctcctcttcgcggccgccgcgctctctctcgccgccggccagccgtggcagctctgcggccgccgcggaggcggcggcggcggcacgtacacggcgaacagcacctacgacaccaacctccagagcctcatcgccgccctccagcagaacgcctccacgtcgcccactctcttcgccgccggcgcgctcggcgccgccccggacgccgtctacggcctcatcctctgccgcggcgacgtgagctcctccgactgctacgactgcggcaccagggccggccaggacgtcgccccggcgtgcaaccgcaccagggacgccatcctcgtctacaaccagtgctacacccgcttctcggcggccggcgacttcctcgcctccgccaacaactccggccaggcgccgctcatgaacagcgacaacgtcaccaccgccgacgtcgccggctacgaccgcgccgtcacggaactcctcagcgccaccctgatgtacgcggtagtgaacaccacgaggctgttcgccacggggcagcgggtgggcgccgacccggggttcccgaacatctactcggcggcgcagtgcacgccggacctgtcgccggcgctgtgccggagctgcctcgaggacctcgtcgccaggtggtggaagacgttcccgcggaccacggtgggggcgaggatcgtcggcacgaggtgcagcttgaggtcggaggtatcccaggacaagttctacaccggagccccgatgctgaagctgtgggccgacggcctctcgccggcggcggcggcggcgtcgccggatgctgcgccgggcactacgggagtcaagaataattcagcaaacaaaattctggaaatcgtcttgccgatagtggcagttgcaatcgtagctgcagtttccatcctcttgtggaatatacgcaagaagagaagacgagggaaagcagagcatttcaccggacctgatgcagctgaggacttcgaaagtgtcaagtcaaccctgctatctctggcatcactgcaagtagcgacggataatttcaatgaaagcatgaaactcggcgaagggggattcggtgctgtttataaggggcttcttttcagacaagacgtagcagtgaagaggctagcgaagggttcaaaccaagggttggaagaggtgaaaaacgagctagttttggtggccaaacttcatcacaagaatcttgtgcagcttgtggggttttgcctagaagagggagagaggatgctcgtctacgagtacatgcccaacaaaagtctcgacacctttctttttgatgaagagaaaaggagacagctagattggactacacgatttaggatcattgaaggcattgctcggggccttcaatatctccatcaggactcccagaaaaagatcgtacaccgagacatgaaggcgagcaacatcttgctagacgcagacatgaacccaaagattggggactttggacttgctaggctcttcggacaagaccagactcgagagattacaaaccgcatcgttgggacatttgggtacatgtctcctgagtacgtgacgcatgggcagtactccacgaaatcagatgtgttcagcttcggcattctcgtcatagagatcgtgacgggccggagaaggaacaacgggccctatttctttgagccaaacgaagatataataagcatagtatggaggcactgggcagagggaaacattaaggagatcatagatcactccttgggaagaaactaccctgaaggcgaggtgctaaaatgtgttaacattggtctcctgtgtgtccagcagaaccctatagatcgtccaacaatggccgatgtcatggttttacttaatagcgatgctactagcactctgccggcccctgtagttcatattccagtagcatctttctccgatggaagctctggttattctcaaaccgtgacacaattgtctcccaggtagcagggcctaaagcagagcttgccatcgctagtgtagttggcttgttgcttgtttttgtttcgagttggaacttgaaactgtatatattgtcattttgtgataagtggtcaagagcttggccacacgagccc

SEQ ID NO: 27500 - DNA, 1245 bp, Oryza sativa
  ref <308>: DATABASE ACCESSION NUMBER: AK102942
  ref <309>: DATABASE ENTRY DATE: 2002-08-28
gaccttacgcgaccccgaacctaaaccctctgcgaaacgctcctcctccggacctccgcccaccctcccccaaaacctgacctcgccgacaacacccggcggcggcggcggaggcggagatgatcaagcggcggtacttccgacaggaccacggcgacaagagcggttcctcatcgtcctcttcctcctcctcctcgggttcggactcggacagggaacctgcggaggaagcggcccccactgaggaagtagaggaacagcaggaagaacaagaagatgagcagcatgtgggggaggaggatccgggagaagagcaggaagaggagctagagccagtggtcgaacaagagagtgggttcctataatttgtgagtttacattttctcgtatttgcgcaactgggatttccgaagtgaccacgtgagttttgctttgtttcctcatgccaaccaggttcagggtaccaaagtgagtacagctccggtaacgatgttgatgaaccttctgcagatagtgatgagcatatcatcctaagacatgaagaagatcctgagataaattcgtctgttaagagagcctcaagtggtaaagctgattcaaccaaagatgcatctgacacggatgatgctcttgaggttgatttcaataactacattctgaagtgcaaatctgtgtacaagtgcaagctttgtcctagaatcatctgcttaaatgaggagatggtcagggtacatcttaaatcaaagagacatgctcgatcaaagaaattgttaggagaaggtaggcttaagttgatgcttaatagtgatggtgagttggaggaagagcaagagacacatgctgaacgacatgctcgaactgtagctcttgctcagcaagtacaaaaatcaaagaaggattctggcaggcagcgccaaaaccgaaggaggaagaagagatctcagaatcatgttgagaagaaacagaagccactaacatctgacaagaaaaaaacgcaaaattgaaaagtaaagtggatggtcagaaatgttacaagtttttccccctttctcaattcgcatatgctaacttttagaggtaaaatcatgtgatgtttctcgagcctttgctggctgttttttggtggtcgcatatgccatcttttagaggtgaaatcatgtgatgtttctcgagccatttctggctgtgtctgtgtaagatttgttagcgacaatttgctgatactatgagatcacgttgaatggg

SEQ ID NO: 27501 - DNA, 1099 bp, Oryza sativa
  ref <308>: DATABASE ACCESSION NUMBER: AK102943
  ref <309>: DATABASE ENTRY DATE: 2002-08-28
gctcgtctcgcccgcctccgttccgcctttggtccagatccacgcgtgttgcggacttgcggttgcttttgttcgtcttctcccggagattcggcgtgttcgtgctgcgaaatccgaactacttctgctgctaagatttctgccgcgtgctaatggcggaggaagggtacaaggttgttcttaacgtgtacgacctcagcaacggcctcgcgcggcagctctccacctccttcctcggcaagccaatcgaggccatctggcatacgggcgtggtggtgtacgggaacgagtacttcttcggcggcgggatccagtcgctggcggcggggaggacgccgtacgggcggccggtgcgggtggtggagatgggcgagacgcacatcccgcgggaggtgttcgaggactacctccgcgacatctcgccgcggtacacggcggagacgtaccggctgctcagccacaactgcaacaacttcagcaacgaggtggcgcaattcctcgtcggcgccggcatccccgactacatcctcaacctccccgccgaggtcatgtccagccccatgggccccctcatcatgcccatgattcagaacctcgagtccacgctccggaccaacgccgcgccgcaggccacgcagttcgtcccctcgtccgtgccgccgccgccgccgccgcagaacaagcccggcgagggctcgtcttcctcgaagcaagaagacaaggcggccaaagcgaagcagggctcggcggctgacccgctcggcggcgcgagggggaaggtgcaggaggaggtgatgcgggagttcgcggcgatcatggcgagcgggacgctgcgggcgagcgaggcggcggcgctggcgatgcggcgggtcatggagcggcacggcaacgccaccatgcagcagagctagacgagagagacacacacaccaccatacattcgacgcgatgatgcgtgtcgcaatcgcaattaccgagtttttacggagtagttaacttctttatgaatgagaaggtgatttctgtagcgtattgattgtttgttactgtgtgtgaacctggactgttctgcttaaattcgataatctttctcttgtct

SEQ ID NO: 27502 - DNA, 1131 bp, Oryza sativa
  ref <308>: DATABASE ACCESSION NUMBER: AK102944
  ref <309>: DATABASE ENTRY DATE: 2002-08-28
gattttcttttcccatttccacccccatcatttcccctcccactacccaaagcgaaaccgacctttcccccttcttctcccctctcctacctcgccgagatctagccctagggttcgccaacttcaccggcggcgaggagcacgtcaccggcggcgagcacaggcggagggcgaggggagagagagagggaggaggacatggggcagcagtcgctgatctacgcgttcgtggcccgcggcacggtcatcctggccgagtacacggagttcaccggcaacttcaccaccatcgcctcccagtgcctcatgaagctcccggcgagcaacaacaagttcacctacaattgcgacggccacacgttcaactacctcgtggaggacggcttcacatactgtgtcgtagctgttgaatcagtagggcggcagattcccattgcattcttggatagagttaaggatgatttcacaaaaagatatgctggtggaaaagctgctactgctgctgcgaacagcctcaaccgagattttggatcgaaacttaaagaacacatgcagtactgtgtggatcatcctgaagagattagcaagcttgcgaaagtgaaggcacaagtttcagaagtcaaaggagttatgatggaaaatattgagaaggttcttgatcgtggagagaaaattgaactgctcgttgacaagactgagaatctgcgttcacaggcccaagatttcaggcgggcaggaacacaggtaaggagaaagatgtggctgcaaaacatgaagatcaagctgattgttcttggcataataattgcgctcatccttatcataatcctgtccgtgtgccatggattcaaatgcaagtaggcataaattgactcattcaactgcacttacagtactgcttgcttggggcaaaaagggggggaaattggagaggtgtttggttctttctagtttgtgctctggctggttacggcgcctgagtgtttacgctgtcgtgtctgttgaatgctggttggtgactcggtcagtgggttgtgggttgaagtgtcgtgtatttttggatgctatgtgtgtatagcttggattttaacctccttgttctattattattattatatgatgattagatcc

SEQ ID NO: 27503 - DNA, 2937 bp, Oryza sativa
  ref <308>: DATABASE ACCESSION NUMBER: AK102945
  ref <309>: DATABASE ENTRY DATE: 2002-08-28
gtctcgaccacaccacgccactcctcccctcctcatcgcgagagagaagagaagagaggcgagacgcgaggcacgagagtgcgtgtgggtgcggagttactcgaggagtggtagtaccagcaggcagcagcagtaacactggttggcggtggccactggcggcgagcgaggcagtggagaagaaccaagaaccccgagttctccctagggatctcccccttccctgcattcgagggtggagtttgtcctacttcagagggagtctcagtcgctacgcttggtgcccaataattagcctggaagcaggtgaagtgctctccgcctctccgtgctgaaatctgattctctggtctccaggaatcctgttggtagggcagttcagtaggagataattgcttgcagatttgccttgtttggttgaactgggaagagggggtcaattagtggctgtgcacttgttatgctaaaattgaatggagatagtagataagatcgctgagcccaaagaacctttgatggtcactggtaggaaggtgcagagcttggaggcaccaataccgataaaggcgtcatggaaagggaagagctcccagcagcagcagcagcagcagcaggatgagaaggattttccagctgatggtgaggagagttttctgagcctggattcctcagacgaaggtggccggagttctttctcaggggccagtcaccccctggaaccaattgatatggatcttatgaagacggtctatgtcgcaattgatgaggagaaatccgagcaaccggtgtgtttagtgcgaggagtatcggcgaaagggccattcatagatgacctttcgatctgtgttacaggcatgaaggccaatgcagtggtaggtgcaggcagtgctgatggtttggctgaagagatgaaggtgccgggtgctgcggtgccatcattggcaacggcgcggtcatcgcaagctacagaagctgtgtccttgcctccagattcagaggagaaggactgtgtctgggatgcctcgcttcctcccagcggcaatgtgagccctcacagtagcattgacagcatgggtgtagtcacggcgatgaacactatgagcagctgtaccagcacatataaaagtgaagccgtatccagtgaaccagtgcctacgatggagaggaactgtgggagtgtgaagggcagcgttagaggtgactctctagaaagtgcaaaaaccagcatgagtcgagcaagtgatagcagtggtgttagtgatgacagcagctggagcaatatcactggaggtgctagtaagcctcacaagggtaatgatcctagatggaaggcaatacatgctgtacggactcgagatggtgtgcttggaatgagccatttcagactgctcaagcgtctaggctgtggtgacattggcagtgtttatctctcagagttgagtgggacaaggtgctactttgcaatgaaagtaatggacaaggcttccttggcaagtaggaagaaattgaacagggcacagactgagagggagattctgcagcttctggatcatccattccttccaactctgtacacacatttgagaccgacagattctcgtgtttggtcatggaattctgtccaggtggtgatttgcacacgctgcgacagagacaggcaggaaaacatttctccgagtatgctgcaaggttttatgctgcagaagtacttctagctctggagtatctacacatgttgggagttgtttacagggatctgaagccagagaacgttcttgttcgtgatgatggtcacataatgctttcagatttcgacctctccttgagatgtgcagtctcgcctacactgatcagagcatcagcttttgattctgatccaagaagagctggtggttcattctgtgtacaacctgtttgcatggaacccacttcagtctgcattcaacccgcatgcttcatgcccaaattgtttggtcagaagagcaagaagaaaactaaaaagacaaggtccgagctgggaccgagtgccacgaccatgcccgaactagttgctgagccaacatcagcccgatcaatgtcgttcgttggcacccacgagtatttggctccagaaatcatcaaaggcgaaggccatggaagcgccgttgattggtggaccttcggtatattcttgcacgagcttctatacggcaagacgccgttcaaggggtcaggcaaccgtgctaccctcttcaacgtggtcggtcagcagctaaggttcccagagtcgccgtcgacaagctacgcgagcagagacctcatcaaggggctcctggtgaaggaaccgcagcaccgcctgggcgtgaagaggggcgccacggagatcaagcagcacccgttcttcgagggcgtgaactgggctctcatccggtgcagcacgcctcccgacgttcccaggcccgtcgaggccgagctgcccgtgaagtacggcgtggcggaggcgattgggagcaacagcaagaggatggtaggcgcggacatgaagtccggtgggaaataccttgactttgagttcttctagggttgtgctgtacttgcctagtgacaagagaagctgttggttgcaaaactgctggggctggtcagtttggtgttgtgattcgatgtgcttgacctggtggtgtttgtcgcaccacggcagcaaaattatcggatctgaaattctgaattggccagaattaggttgatatatgtttgcatgtttgaattcttctccccctgtgctgtttctgtagtgtagtgctatctaacagtctggtttgaaacatgggctaacaattgcgttccaggaaggcctcaacgatggatatttctggaactagtagcgtataagctcagtctgtttaatagtcgcagatcaaagttcaatgtgcattctttcttgtgccatttaccgtg

SEQ ID NO: 27504 - DNA, 2217 bp, Oryza sativa
  ref <308>: DATABASE ACCESSION NUMBER: AK102946
  ref <309>: DATABASE ENTRY DATE: 2002-08-28
ggccgatcccttgcgctagccatcttccgcgaaaaatggccatcgtttggggttttcggttttgttgtgttggtgtggttcttgctgcttgatttgtccgcctgagttagctgacaggatcttgcatgctctagaccagattttctctattggttccacatcccgcaacctcttctttgctccttgctgtgctgcttctgtctttgaagctcacatttcttcgaagggatttcacgctgtcggctaggctgcgctacaagtgcaccgtgtgaagaatgcaaacaggagctacaagccagttgccaatgaactaatgatcactttcactaggtggacaactgttgaggggtgcattgaagttcctattgatttccctactgtggttttctccctgacacctttcgatgatgttgctaagtttgtggacaataatgattttttattgatgttatgggtgtcattactgacatatctacacccacaatgcttcgtcctagatcaagggatgctgacagcttgaaaagaactattcagatacgcgatgcaaagtattctttatgcctcttattttgttccttgcttatttatttatcctgaccactaacaactaataaaactagcacaaacacagccaatagccactctaataaaatttattgatattcttaacatgtacaccacatttttcctgtttttttacacaaatagcaattctaccttgaatgtgtctctctgggctgaacaagcatctgcgtttgaggctgacgctatacacaaggctggattggcactatctgaaggttctgcttgcaaatggtacattaacattgatgtacctgcgatagttgaattaaaggacaagactgggacaaacttccagccaatcaattggattgaggctccagccagagcagctgttgaggaagtcgctgagaacaagactgtgcgtgaacttctagagatcaatcctcacaagtgcaagaaggttcgatttcaagctcatgtaaccgttcgaaggatctgcaatgataagtgttggtggtatggttcatgtcaaagatgcttcaaggttgcaaaaccttatgggtccacctataaatgcactagctgttccaacatcgcagtggcagtaccaaggtacaggatagtagtcatagctggagatgactctgatgatgctatgtttgttctctttggatgaacagcccagcgcattgtgcgaaggccagttgaagctcttattgaggaagcaccagctgacagtgattttatccctgatgaaataacggctttagttgggaagtcgtttgtgtggaatgtcagcttcacagaaaatacgcttaagtttggggatatctcattccaggtcaacagcattgtctccattgatgctcctggtgaacctcttatgttgatgtccccaggtgcttcccagagttcttcagccatgatttcacctggaccaagtggctcattgatgtcaccatcaaggggaagtgaacttggcatagcttcacccggttcaactgcagccagctctccactgccaaggcgtgttattaccacggacaaaagccaagttgtgcacacaccaaccagcaagtgctctgtcagcatagatcaggatgacatttctgctgctttttctccaccaatgtcccagaaagtgcaagctccagctattcctgatgatgatacactactggctcatgcatctggctcaaagagcaagtctaggaagagaggtcctccttctcaagcaccaccagcagttaagaaactattcaaggaaggtgacagcgatgagaaagaaaccactgttagcctgtcagctgacgcttgatccagtatacatgcatgcccactcaagcattttggccaccaagttgtagcatcttcgtctgcctgaaccgaagcgcatggaagaatgctgtctttgccatatgtctgaaccttttgctataaactgttgatctccagctattacttcttagtgactttcgaaattattgttcccatctcttttggaaccatctttagcaatgtttgtaagcttattatggttacattagctatagtccaaccacgtgctcaaagtccattacagttgccaatatgtcagtacggcaatggactttgaacagttggcattggcttagctccatgataccttctcaggtttcgcttagtaatgttagaccaatcttaagactcatc

SEQ ID NO: 27505 - DNA, 1328 bp, Oryza sativa
  ref <308>: DATABASE ACCESSION NUMBER: AK102947
  ref <309>: DATABASE ENTRY DATE: 2002-08-28
gattaccaacagccaagcaaagggaggcaaagttgccagcgttggggatcaggcgtacggtttcttcaaggggccatggcggctgcggcgccgagttcggtggtagccggactcgtgtccgggctagggctggcgcgctcctcgttaacgcccagcgacggccgctctccttccctctcgcccctgcatccgccatggcccgcggccccgcggctcgtctgtaggagcagcggagcccggccccccagggagagagccgtggccgccgccgccgccgcccgcaaattctccgcggcagcagcagcagctaggagagcatgagcatgaggaggctgtggcagcggcggccatggagccggagaggagcagtccccatgaggtgagggaggagatagcgaggtgcttcgatctcgtgcgccgcctcggccgtggcgccgtctacctcggctcctccagggtgccgcccacccatccccattacctccatgccgccgagctctcaagggagatagctaggctgctggactgcaccacatggtccggagctggtccaggtttcatggatgctgccacccaaggcgctcttgacgcgggcaaaccggtcggtggcttcaagattggcaaggaggcgggtgaatggacaacctccaattttcatccttacctgccatcagagtcatatctcacctgcaggttcttctctgcaaggaagcatgggttagttgatgccgcggtgcggaactgccctaccgatagaactgccatcattgcattacctggtgggatagggacgctggatgagcttttcgagatgatggcgctaattcaactggagcggatcggttccacgcttccagtcccattcttgctcctcaattatgattcttactactccaaactattggactttctgaatgactgcgaggagtggggaaccgttgctccgggagaagtagcatctctttggaaggtttgcaatgggaatcatgaagctttggagtacctggcacagttctacaatgtacctcttgctgaaagaaattactgcatatcaccacagttgaagcagcaggcaacttcataggccacaagttgacgattcaggtttttctcaagaaatcttggagcaaacttattccgtttagttgatcattgtagtaccccctaccattttaaattgaattagcaaacgtcaaatacaaaaaacagagggagtacaaccttttcaccccagttcttgaaataaacttgtacagttgaatttcagtctgaatatctgatgaacatcaaggatgatgcaatcaaagtttcagttactcagtgaattc

SEQ ID NO: 27506 - DNA, 2464 bp, Oryza sativa
  ref <308>: DATABASE ACCESSION NUMBER: AK102948
  ref <309>: DATABASE ENTRY DATE: 2002-08-28
ttggggctctgaagtaatccttcgcttctgcttctttcttcttctgcatgtcctgtctgtccccctcgtctcgtctcgtctcgtctcgtctcttgctttcgcctctcctgacctgaccgcgacaatccgtggtggttatatcgcgcaggcgcttcgcttggtttggcgtgttgtttggctgccgcggcagttttctcctgtcacatatcgcagagggttctggaagtgggaacatggaggcgaagcagaggacgaggcatcgcgacggagaggagaggaggctcgtagcggcggcggatggcggcgccgaggagtacgacccatggacggcgtggctctacaagccgcacaccatctcggtgctcctcgtcggtgcttgccttctaatttgggcaagtggagcgcttgatccagagggtgcttcttatcacagtagtgcgacatctattaagaggggtgtctgggctatgattgcagtcttccttgcttactgcactctccaagcaccttcaacgatacttattaggccccatcctgctgtctggcgcctggtgcacggactggctgtcgtttaccttgtcgctctagcctttcttcttttccagaaccgcgatgatgctcgccagttcatgaaacacctttaccctgatcttggagttgaattgccggagagatcttatggagctgactgccgtctgtatgttccggaaaaccctaaaaacaagttcataaatatttatgtatgatttttcatttgaaccttcctatttcatgctctggtttttgttattattgtagttattatcattgttattaccccatcatatttgacggtttgatatacatataggagacattatttgacgaatttgtggttgcccatattttgggttggtggggtaaagccgtaatgatacgaaaccagcttcttctttgggtcctctcgattggtttcgagctaatggaggttagatatggttactcaaccttttgttatcttttacttgttatctctaacaaggtattgtgcttattatgaccttttgcagcttacattcagacctatgttgccaaactttaatgagtgctggtgggatagtattattttggatatcttgatctgcaactggtttggtaggacaatcggagacagctgactttcatgttgtatacattcagtgacattgatgatacattttttacatctaaagttattagtaaaacaaagttaggcagattaaaataatatagtgtttttgggtttgcatattttatacagtttgtttggatctaactcttatcaactgaacatgataatatagaaaatgaatagcgatgtgatgtatctgagagttttaagaagaaaacttagacctgatgcacatgcatactgctgacattaaacacttactgtttatgaagtaatataatttatcttcttctatcagttcatgggttgaaagcaatctttctatttcagtaaccagttattgaaagagtacctgcatatgcacgttagggtcaaaagtgacaagtaaatgtgaatggaggaagaacaaatctgccatataagcctcactcttagcagtaggctatggagtgttttatgtgttcagcttcatctaaatattttggctgaaatgctaatattcttattcaggtatatgggcggggatgcacacagtccgttactttgacggtaaaacatatgagtgggttggactgagccgacagccaagcatcatgggcaaggtgaaaagatcactgagcctgttcacccctgcacaatgggacaaggatcaatggtaccctttcatggggccgttgcggttcgttcaagtgttgttcctgtgcgttgttttcatgacagtggagctcaacacattttttcttaaattttgcctctggattcctccaaggaatcctttggttgtgtacagattaatcctatggtggttgattgctattccaaccatccgtgagtacaactcctacttgcaaaacagcaaaccggtgaagaaggttggggctttttgctggctctctctagctatatgcattgtagagcttcttatatgtatgaagtttggacatgggctgtttcatgatcccatgcctacttggttgatcatcttttggagttcggtgggggtagcactagtggttttcttgcttgcatggtcttggaggaatcacctgaaatatcagagaaagcggctataatggattaatttttcggaagattttcgactctggacccccttcaaacttgtttcttcttcttgataggatgtacatatgtgatgggtgatgatgtaacttaaatgtgatgggtaattatgtaactttaaatcctaggataaagcaattttcagctacatttcacattatgttttacaatagccaattgttgcctcgcaagagggatggctaatttcagattaataagtgaaatattaccatg

SEQ ID NO: 27507 - DNA, 975 bp, Oryza sativa
  ref <308>: DATABASE ACCESSION NUMBER: AK102949
  ref <309>: DATABASE ENTRY DATE: 2002-08-28
gaagtgcaacacaagtacgcagagccaagaaacagagcaagagtgagtgagagagagcttgcaatggaaagaagcggtgagcggcggcgagagagggtggtggcggcggctcttgcggtgctcctcctcgtcttcgcgtccgcgttcgtgcggtgcaggggcgacgccgacggcgagggggacggcgccggcgcggccgagccgggaaagacggggccgccgctgccgcccgggtggaagggcggctcggggtccggccaggggtccagccccgacggtgcttggaggtatggctggggctgggccgctagccctggcggcaagggctccgggttcgggtttgggtacggtggcagcagaggcgaaggtggcggcggcggtggcggcggcggcggaggaagcggtcgagcatatggtttcggtggaggatacggtggccaccccggaggctttggaggtggcggtggcggtggcggcggcggcggcggccgcaactatggtggcggcagcggcggcattggaggatatggcaactatggtggtggctataatggggaacctggagggggtggtggcggagccggagaaggtggtggatatggcggggattatggcggcggcgatgtcggtgcaaactggagcaagcgcgggagcttccgcggcggcggcggcaagacacagcagaaggacggtggcggtaacaactgaagccgcccgtcctcgtcttcctcctctggccatgagacgaaccatgagcttcataactagagcaatgtataggaatctcctaagatatatatagtgtcatgtcatccatgctacgttatcaactggggaacgctgatgtacgagcttcaatttgagcatagcggtaccgtacgtgctgtgttcttcaggctttgtaactggtagtaccttctactacgatggttcatgccccaaatgccaatatagtactcgacttgtgaattggcg

SEQ ID NO: 27508 - DNA, 1179 bp, Oryza sativa
  ref <308>: DATABASE ACCESSION NUMBER: AK102950
  ref <309>: DATABASE ENTRY DATE: 2002-08-28
gagactcaactagagcaaataactcatatccgtagagcaaataactcatattcctagagtttatcattggtgtaagcttcaataggttagtgcgcttggcgaattcacaggccctatcttgtggtatgaactgggtacgcgatgatttgcactgcgtattgggggcttaccataagataatgccatgaatttgtcaagcgttcaaacccactgaaatgttgtgtgaaggtaaatatttcaaagtgttcatgaagaaaaggcaggtaaatatttcgttacttccccgtgacatgctaagccagaaacaatctcgctgcatgtgatatgctcagccagaaacagaaacaaaagagaaaaagagagtttcttcccagcttttttcatgtgttgtctggttagagcctactcgttgagtgcctataaaaggaacgttacgaacgaaagaagcagactcaagaatagtatatcattggtgtaagcttcaataggttagtgtactttgcgaattcacaggccctatattgtggtatgaactgagtacgcgatgatttatggtgcatattgggggcttaccataagataatgccatgaattcgcaaagtgttcaaacccactaaagtgttatgtaaaggtaaatatttgtaagtattcgggatggaaaggcaggtaaatatttaaagtttattaatttagaaatgtagctgagacattagaaagttttaacacacaacattacatattagtttgaatgagcaaaatataaaagcgttctactcattagcctcatcatcgaaatttcgtgacgtgttagtgtcctttttctttccctttcttctagcaccggttggaggtctgcatcctgacaaagataatcttttaggtgaatgtcgctcgcggacagacctacggaccacctcaacaccgctgagatcaacgtggccgtagttttgggtcgctgagttactggtggcgattcatcaagctgtgacggtcctatctcgtgttgtgctgttgacgaccccccaccgtagctatatggttctccgtaggactatgtgctgccagcatatcccatcatttgttcagggttgtacattcctacaaaacattgaatgcaaagttgtagcgtacacacataatggaaataaaatattttgtagtaaattataatttgtacct

SEQ ID NO: 27509 - DNA, 1082 bp, Oryza sativa
  ref <308>: DATABASE ACCESSION NUMBER: AK102951
  ref <309>: DATABASE ENTRY DATE: 2002-08-28
ggaggcgaggcgaagctcctcgtcgtcagaatccgcgaaaacatcgccaccaccacgagaggaggaggaggagagcgcggcggcgatgtccggtaccccggcggacggcggcggcggaggcggcggaggcggcggagggagcggggacgactggttcctcgactgcggcatcctcgaggacctcccggcggccgcgtgcggggccttcccgtgggacgcatccccgtcctgctccaacccgagtgtggaagtaagcagctatgtgaacaccacctcttatgtcctcaaggaacctggcagtaataaacgtgtaaggtcagggtcttgtggtaggccaacatcaaaagcttccagggaaaagatcagaagagataagatgaatgataggtttcttgaattggggactactttggagcctgggaagccagtaaaatctgacaaagctgctatcctaagtgatgccactcgcatggtaattcaacttcgtgctgaagcgaagcagctaaaggatactaacgagagtcttgaagataagattaaagaactgaaggcagagaaggacgagcttcgtgatgagaagcagaagctgaaagtagagaaggagacattagagcagcaggtgaagattctgactgcaactccagcctacatgcctcaccccacattgatgccagcaccgtacccacaagcaccacttgcccccttccaccatgcccaggggcaagccgcggggcagaagctgatgatgccttttgttggatacccggggtacccgatgtggcagttcatgccgccttccgaagtcgacacctccaaggacagcgaagcgtgcccgcctgtcgcgtaatgcttcatcggttgcgttatgtgaattaatcgtaacctgaaaccgcttagttgctcaatccattggttgggcatcgtcgtccctgattcacattcactattgttcttgtgttagtagttcgtttttgtatggaagtaagctgacatttgtggcgctctatagaggctactgcccccttttaatgtacaatacaatttttccggagaaaggaagaatgctcattcttgttctctgc

SEQ ID NO: 27510 - DNA, 1707 bp, Oryza sativa
  ref <308>: DATABASE ACCESSION NUMBER: AK102952
  ref <309>: DATABASE ENTRY DATE: 2002-08-28
gcaggcacaggcagcatcccctccccgtccgctgcgcgagagcgactgcgccggcgccggcgccggcgccgcctccaagtcgatctccctcggcctcgactaccgtctcctcgcgagttcacccgccacctgcgccggtctccacctatcctgctgtttccggatttaatattaaggaaagggcgatcatgagcctccatcgatttgtgaatctactaatggagaacggtgagaagggtgtctactcactgcgtcgtctcaacctgtctcgacacccattgttctactcatcaacagaggtgtcagctgtccaagatctgccagcgctaggagaagaaggatgtatattacccgttcaagggttatggcgagagtagcaaacaggcttttgaggtggagagcattcggcttccatcaccaactgtcagcttgctaccgactccatcctcaactgataaaatgtgcaagtttgattgtttctctgtctcggagagcaagatcatatgcacagaccaggctgcacgcaccttcctctatgaccttgatgagcattgcgtcacaagcatgcccagcctccatgctccgaagtattcccccttctcagtctcggttgcaatccaaggcgaaaaaggagaaggggaaagcagcagcagcagcagcagccgccgcctctatgtcatggaggaagtcctcttgccagagaggggcacggggagtagctaccagttcgaggcctttgactatcgcaagccaggaccagaatatttggttaaggcttggcactgtgatccactgccgccaccgccttttgtccgtgaccctcgctacgttccctctccagtgagttcctatgcagtggtgggaaatttcatctgcatatccactaaggggattgggacgtactgctttgacacggtgagctgcagctggagtcatgccggtgactggatgctgccattctgcggcaagggtgagtatgtccctgagctcaagctttggtttggtgtgtccgccaagaacaactatgccccatgtgcttccgatctctcacctgttgtcagagctgagccaccaaaacctggctgcatttgggaggatctcaaccttcctgaggattggcgtccgtgcaggatgtctgacctcgtcaatcttggctcaggaaggttttgcatcattaggttcttccaaccatcgggtaacagggactacatgaaagaccaaattgatcagaccattgctgtctttagtggtgtggaagtgctgcctgatgacaacaaggctgcgggcaatggcaaagggaaaggcaaacagaatgccaaggggctccgtatgatcaaacacaagtccagaaaatgcacattcatcgaacaaatcaacaacgtcgagtcggtgctctaaagcttgggtgattagctcttgaaatctcctgccttctgctactgcttttagttggctgcaatggactagtggaacttggctaggtggtgttcctgctgactttaagggcctgtttgggggagctggagagagctggagattctgagaagctagctggagattctgagaagctgaggagggtctgtttgggggagcttctttaggtttgttggctggtgagctgagaggctgaattgtctgaaatacccctgaggtagatggtggtcctgatctcttgttaattatttggttgatagattacacccttcc

SEQ ID NO: 27511 - DNA, 1565 bp, Oryza sativa
  ref <308>: DATABASE ACCESSION NUMBER: AK102953
  ref <309>: DATABASE ENTRY DATE: 2002-08-28
gggcgatagttgcgctcctcctcattcacagtccacactgccatcagccatggggggcagccaccacctcttccgcttcctcgccgccgacgaccaccctttcttccccaccttcccaacctcctcctcctccttcctcctcgacgacacccacccatttttcttccctccctcctcctcatgcccactcggtttcacctctcctccttcatcgtcttgcccactcggcttcacctcctcctacgacctcgacgccgccttccaccaccatctcgacctcgacctcgaccttgacctcttcctcccaaccccgaccccacctgtaaccacctcctgccccgccctccgcgatcccttccttctccaccactccctcgcccaccgcgtctccgcgcttgagctcgccgccccacgcagcaagtacacctacgaggccgaatccgccggcaggaagatcaagtggaccacccacgacaagcccgacggcgaccggaccttcaagtgggaggcccagatcgacacccccaacgacgatggcttcgaccgcaagtggaagtgggagtccaaggcctccgccgccggcaccaccaagctcaagtgggccaaggaggtcaagggcaagggcttcctccacccatggtcgcacgcctactccgtcgaggaggtcttcggggacgacgaccaccaccacaaggcagacaagacagcagaaaacaaggtcaagcagcacaacaaggatacttctgccaaggaggagaagaagaagacgaacaagtctaatgttcagatcgttgagatcgacgacaacactgccggatgcgtcgccatcaacaaggcgtttgcaagcagctacgccaagggcaagagaaagcagctgtccccgcaggatgctgcattgttgatccagatgaactaccgggctcacctagcccaccgctcgcaagtgctgcgctgcctccgtcatctggcggtggccaaggccaagctcaaggacattaggtccttgttctacaacatctcttaccgccgccgcatttcgcatgactctgaagagcgtcagaggtttgccgacaaaatcattgccctgctcgccactgttgatgcccttgagggaccagactatatggttcgcaatgcaaagaggtctatgctggaggagctggaggggatgctagagatcgtaggtcctcagtcactagggaagccaaggactctgagccgcagaaagtttgagaaccatatctaatgatatgaggactggtgtcaagggcaagtgaaaggcaccatcggttctatttcgtagtgcggcgtatgaagatgcttgatgggggacctacctttctgaatgtgtttacggtttagacagaatgttgtgtctgtaactctagttgtatgatctatcttctgcttgaactagtacttatgtgttgctagactagttagagcttctttataacctcttgttgtttgaggaagcttcttgtagaaactgtttcataatttgtcatgaaatgatgtgcggcatgtgccccctaataaataagaccattaccatatggtatgct

SEQ ID NO: 27512 - DNA, 2263 bp, Oryza sativa
  ref <308>: DATABASE ACCESSION NUMBER: AK102954
  ref <309>: DATABASE ENTRY DATE: 2002-08-28
gacaaagcaagcatcgcatctctcttcttctccccccctcctcgccgcctctcccctctcgtcgatccgacgcgcttgggggagtcgacgctttctcttctcgcttgctaatcaaagctctcgcataattcccgtctctgtttcgttaatttccgcttgtttcatttaattacatagtcttcttagcgtgttgatttttctgtttgatcctgtgattgatctagtttacttctagtgatctttattgctgctggtattactgctgtttgtttccttgttatttgcgtgcttgtgctcttctgtttctgctaaccatggacgcaggctcccactcgatctcgtcggagaagagccacggactcgcgccgcggccgccgctccaggaggccggctcccgcccgtacatgccatcgctgagcactgcctcgcgcaacccgtcggccaagtgctacggggataggttcataccggacaggtcggcgatggacatggacatggcgcactacctgctcacggagcccaagaaggacaaggagaacgcggcggcgtccccgtccaaggaggtgtaccggaggctgctcgccgagaagctgctcaacaaccggacacggatcctcgccttccggaacaagccaccggagcccgagaacgtctctgccgcggatactgcttctacccaccaggccaagccggccaagcagcggcgctacattccccagtctgccgagaggactctggatgcaccggacctcgtcgacgattactatctcaacctgctggactggggaagcaagaacgtgctgtccattgcgctgggcgacacggtgtacctgtgggacgcctcgagcggatccacatctgagctcgtgaccgtggacgaggacagcggcccgatcacccagcgtcagctgggctcctgacggccagcatgtcgccgttggcctcaactcttccgacatccagctctgggacaccagctccaaccgactgcttagaactctgagaggtgtgcacgaatcaagagtcggttcactcgcatggaacaacaacatcctgaccactggcggtatggacggcaacatcgtgaacaatgacgtaagaatcaggaaccatgtcgtgcagacataccaggggcacagccaggaggtgtgcgggctcaagtggtctggttcagggcagcagctggccagtggtggcaacgacaaccttcttcacatttgggatgtgtccatggcatcgtccgtcccatctgcaggccgcaaccagtggctgcacaggctcgaggatcacacggccgctgtgaaagcgcttgcatggtgcccattccagagcaacctgcttgcaactggaggtggtggtagcgaccggtgcatcaagttctggaacacacacaccggtgcatgcttgaactctgtcgataccggatcgcaggtgtgcgctcttctatggaacaaaaatgagagagagcttctgagttcacacggattcacgcagaaccagctgacattgtggaagtacccgtcgatggttaagatggctgaactcactggccatacttcccgtgtccttttcatggctcagagtcctgatggttgcacagtagcatcggctgctgcagatgagaccctgcggttctggaatgtgtttggtagtcctgaagcccccaagcctgcagccaaggcttcccacactgggatgttcaacagcttcaaccatctcagataaggatgaaccaggtgaacaaattcgtctatttgatctggtcctttggacagcttaaaaatgatcgtgctgattgagatggccttggcacaataggctgtgcaagaagagcattgcagtgcttctcatgataatgatccaatcgtttcgctttcaaacggaagatcgcaagtgagatttggcttcatcgatatcttcatctttgattggtagatactatcttcgacttcaagttcacaaagagcaccaaaaagaacctggaaatgtgcaaaaccttatcacttatcggggaatgaaatgctgagttggtgacttgagataggaatatatacttctggcaatttagttagttattctgtacattatctaaaaaaaagttagttcttctgtagagcatatgtaaagcacacacatagtatctaaaaaaattgatcttgttttaattgcgccaaaagatcaatttttgaagaatcttttggtggaaacatcaaatgatcggtttgatgtaacaaaacaagaggtgtagttcaaatatttatgt

SEQ ID NO: 27513 - DNA, 2965 bp, Oryza sativa
  ref <308>: DATABASE ACCESSION NUMBER: AK102955
  ref <309>: DATABASE ENTRY DATE: 2002-08-28
gtagtgtaaccattcgtgcttggtgcagtagaaattgtataccactctataaaactgcatttataaaaatcgttatcattattttcaccatatattcatgcagcaacgcgtggggtattttctagtaattctattttacgttcctgatgttttgctcgtgatcgaattgcaatccccaaccacaaaatcgggtttaactcctccccccatctttgagaaccggtgtaaatcaactccttcagtgctttgagaagtggtttcgtcttccccctctctcctccatctatctcgacggcgctgtacccaagcacgaagacctgccaccaagagttggagctcatgggctccggcggcggcagccacggccaaccgcagcacggaccacacgtgacacatcaccacagcaggcgcaaggtagtagtcgatgcactcgggcacagaggaggttggcgagcgtgcttcgacgcttgggcggcgctgccccggaggctagagccctcctgagaggccacaacaggttacgccaccatcgcatccgcagtgcctttgtcacccatgacatcaaagagctggtacgggacagcctccccctcacatggatttgatgcgatccttccgctgaaattggaggattttgggtgctctgtggctgctctgtccgagcggttttggttgtatccggaatggagagattggtgattatgacccagtagtgggtgcttcattctcggaatttttcatatgttctactccctccctttcacaatgtaagtcattctagcatttcccacatttatattgatgttaatgaatctagacatatatatctatctagattcattaatatcaatatgaacatgggaaatgctaaaatgacttacattgtgaaacggaggaagtaatgtttagtactccgtgctccttacatggttgcataccaggatggttcttgtgtcaggagaagttacgtcatgaagatttccgccaactaaggatgaagatttacaaatagatttaaataattgtttactccttatgtgttggttttgcttgatattgtcggattgtttttggatttgcttgatgttgccatattgttttgctctcttgagagaattttgtaataagtggctctagcttcttttgaagtaaaggctaggatttattcccataatctaaaaaagtcaggagaagattacctattttgtaaagaacttttaagcgagaatctgtggctgtcaagcttggcggctaattgggatggaccttgcgggatcgctgttggtcaacatggctcacttggttgacacctcgatgctctagttcttcggttggctcatcaccactggttagtatttgctacgcacacagataaatccgcaagcgcacggataccgttgtagcactttcccttatagtattccaatggcatcgaacacaagaaacatgtgtgtattatctatgatcaagattctatctaaggacaacaattgatgaagattttggctagagaggactcctatgaacttagtgtcatggttatgaataccacatatataatagtagttgactaagctcggcatgacccaccacataccatgtcttatacggaatcatacctcgtgtatagaaggagttccggataaggaaggacgaataaaagttctatatggaaatgacaaggactacccggattgtatccatatttgtctccctagtcctacttgaacaaggggacatctatggatataaatacaaagcccctagggggagggacaacaacacagaccatagacgcacaacatataagccaacccacgctaagacaagctgccggatgtcgacatcagatataagcatagacaaacccaatatggtgtctacagaggccaacaagagagacctagcgctatctctgatctcgccgagtgcggattcaaggaggaagactaccctgtcgtcgactacgtgttggttatccatgccgccaagtcgacgatggctagatatgttatcccaattattgtaatggtgtgattacgatgaataaagagcaacaccggcttcgaccaacaggagtaggctattacatgtcaaataaggggcccgaaccggtataaaaattcttgtctccaaatcttttacctcaatctcgcatataccctagtacaacgatccccatactatgcaaaataccatagttgcgatcgcaaacattgacacttagctagttatcttggtgaaaggtgaagttctatcgaatgctttggacactagcctcccctggtctgtcaggctgagttgggccttgaactctatgatgtacccgaacatggagggatacaaaggacggacaagattgtcaccacctaccgagtacctcactttccgtggagcacacaacaaacgaagataatttctaacctagacaccacatctaagttattaattactactctagccttgcgcaggaactttcttctttatccagggtcctagtactagagcactcagttgcgcactaagcgatgaattagcaccgatgataatatttctcacttaagtaaactaagtaaagaatataaagaagggtctaatcttcctttataaaaggaagcatccgccgagatacaagcaagaaggattttttttatttttttaacctttttaatttttaatttttttagaaaactctatcaaaaattattttcaaaatctgaaccttttggccacgctagccagcctgacttggcaaaacaacactggcacgccacccacagcggacgtgatagttttgtcctatcacgccagtgaggccaacatggccaaatgatgttgtcacgctagtgggttcgacgtgacaatattgttttgtcatgccagtttggctgtctgattaaaaggttcagatcttaaaaataagttttgaattagtttatttttaaaattaaacattaaaaatttg

SEQ ID NO: 27514 - DNA, 1580 bp, Oryza sativa
  ref <308>: DATABASE ACCESSION NUMBER: AK102956
  ref <309>: DATABASE ENTRY DATE: 2002-08-28
gggtctcgtctcctcgtcttctcgccgccgccgcgagcggaatccccctctctccgtctaaacctcgccgccgcggcgaagcaaaagcacctccctcttcgccgccgcccgccggcaatggcggggctgtcgctgcggtgcggcgactgcggcgtgctgctgcggagcgtggaggaggcgcaggcgcacgccgaggccaccaaccacgccaacttctccgagtccaccgaggccgtcctcaacctcgtctgcgccgcctgcggcaagccctgccgctcccagaccgaggtggacctgcacaccaagcgcacgggccacacggagttcactgacaagaccatggaggcggccaagccaattgatctcgaggcggcgccgccgaagccggccggcgaggccatggatgtcgatgcctcggcaagcgccgagccacaagagatggtggcgccggaggttaacaaggagatgctggcggacctcgaggcgatggggttcacgacggcgcgtgccactagggcacttcatttttctggtaatagcactattgaaggtgccattaactggctttccgagcaccaagaagatccagatattgacgaaccgcttctggtaccggctaatacaataactgaggctaataaaccctctttgtctcctgaggaaatgaagattaaagctcaggaattaagggaacgtgctcgtaaaaagaaagaagaagaagagagaaggatggaaagagaaagggagaaggaaaggattcggatcggtaaagagcttcttgaagccaaaagaattgaggaggataatgaaaggaaacgcatgatagaactgcgaagacttgagaaagaagaggagaaaagagctagagaaaaaatccgtcagaaactggaagaggacaaggctgaaaggagaaggaaacttggattgcccccggaagatccagctgctcctaaaccaagcgcaccacctccggttgaagagaagaagagggcattacctgtcaggccagccacaaaggccgagcgcatgagggattgcttaagaaatcttaagcagcagaacaaggatgacgatgctaaagtgaagagggcttttcaaacactccttacctacattggcaatgtagctaaaaatcctgacgaggagaaattcaggaagatcagactgaccaacgctacatttcaggagagggttggcaatctgcatggaggcatagagtttctccagctctgtggatttgagaaacttgaaggcaacgagttcttgttcttggcaagggacaaggttgacaaggccgtcctgaacactgctggagccgagctgaattctgctatcactaatcctttctttggagtcctttaaatcgtatagaatttccatgtacacttgaacctctctgtttcacctttgcttgaagcacaaatgcacagaaatattgatattgagcgaatgatctttcactgcgctcacttctggtcgccagattgcacgagatggaaggatcttggaaagaatttcccaatatatttcttccaacgattaaagcaataaaacataaatacccacatgaactttaagct

SEQ ID NO: 27515 - DNA, 487 bp, Oryza sativa
  ref <308>: DATABASE ACCESSION NUMBER: AK102957
  ref <309>: DATABASE ENTRY DATE: 2002-08-28
ggaaactcaaatcgcagttcacacacgacgcgtacgggcacacatggcttcctcctcctcatcatccaagaagctgtcgctcaccttcgtcgtcctcctcctcgccgggctcgtggtgctcggcgagatggccggggccgcgacggcggcggcggcggactgctcgacggtgcgctgcatccagggaggctacatcacctgcaagaactacccggggaagaagctcgacgggtgcgtctgcctgtgcgcgcccaccgacggcgagcgctgcgtcctccacctccacgacggctcctcctacaagtgtcgcgcgcccaactaaactagtactacaattgctgctgccccagcctcgccggcgtcgccttcgccgccgccgctgccgcggcagctttgcttcttgttcagcgaatgtagcgccagcttacctcacaagctgttgttatacaacttcacaccgataataatactgcggttcatggttcag

SEQ ID NO: 27516 - DNA, 1580 bp, Oryza sativa
  ref <308>: DATABASE ACCESSION NUMBER: AK102958
  ref <309>: DATABASE ENTRY DATE: 2002-08-28
gacagctactactggtgcctggtagtaaccagacacagagggaaagcaaaacaagagtgggtgtctcctgttgtctgtcttcctcctcgtttgagctccaagcaagcttagccaagaaacaccataaagaagagagtgagagagagtgtgtgtgtgagaggaggtgagcttctctcacatgcacatggagggaggggagggcattgctgtagcaggtgcaggtggtggccatgaagccggcttcggtttgttcagagcggccgatgtggccatgacagaggcgcaagaagcagccaaggagtaccagtcttctccctcctcgccgtcgacgtctcctactccttccccgccgccggttgctgcctccggccatggaggggaggccgctgcaacgccgaccatgtggagtttgggcggcgagaagatgccgagtgaggctgcaggggacaacggcatgcagatgtcaggccacagtgagcatgctagcttgagctccggacggcgtaggggccggccaaaagggtccgggagacgccagatcctagccactctaggggaatggtatgcgctatcagctggagggagcttcacccctcatgtcatcatcgtaggcacaggggaggatgtggcggggcgcataatgtccttctctcagaagggtccacgctcgatttgcatcctctctgccaatgggaccatctccaatgtggcattgagccagcctggctcgtccggtagcaccttcacctacgagggtcggtttgagattctgcaactgactggctcctttacaatggcggaagaaggtggtcggaggagaactggtgggctcagtgtatcgcttgccggtcctgatggccgtgtcgttggtggtgtagtagctgggatgctgcgtgccgcaagccctattcaggtgattgtggggagcttcctgcccaacagcctaaagcagcatcagaggaggatgggcctacaacagcaaccatctgctgccccggcactaccaccgcctatggctccacctcctgtgctcacagctgcaatgcctatctctcaggcagctcctggaactaatggttgccatgcgccgcaggtctcatctatgcatccgcaagcccacaccggtgtaatggagcacattgcaacagccagtggcgccatgaaccttaacagctcaagctccacaggtttcaccatggttgggtggccagtcagctcacagtccatggggcacaggccttcacctgacatcaatgtctgcttaactcctcaggagtagcatcagctattgagctatcatcttttgtcacccccatccctgacacattttgtagggcatggctgttaatctttgccatgtgcgatgacaaattatgggctctattctaatccattaggtctgcggtttaattttggggggagaaactaggcaagactaaggacaatttagccagaatctgacagaatgtgatagtctattagttgcagttgccctcatctaattgttaggatatgtcattgtgttgggacatctggtttgtgattcagatttcattctcgctgttgctggctcttgtact

SEQ ID NO: 27517 - DNA, 3192 bp, Oryza sativa
  ref <308>: DATABASE ACCESSION NUMBER: AK102959
  ref <309>: DATABASE ENTRY DATE: 2002-08-28
catcagtccactcatccccatgcccccctcattctgatcctttataaatcagccacccagcaagacattcctttccaacctcactcaccttgctctagctcagctagctcttgctgctagtagcttcagctttgctactgctactaccactactactactactactttcacctccaagaaagtatagattgcaagaacaatttctgctgctgttgttctttcttgctgttctttctccttgtgtagttgtgtggtgtggttgagctgaggtgtagttaggacagtggctggctttgcttgcttgattggtcacctgggaaggtcgctgtctctgccttttgttttctttgccatctctttctttctgggctgctttcaccttttgctttccagcctcttcttgccatcaataatgatggaggagtaagatagggcttgttcttgaagtctctccaatctaatctcatttcatcttcatcatctccacccggtccaaatccacctactactgtttttcttttgtcccttctcttttttttcttcctctgatcttttcttttttcaggtgttttgtttttggcagtaggtgcttgctatcttttcattaggctttggattttcctctcgtgttctttagtctcagcctattagaggtttgaggaaagttttccatttcttagctctttttgcttccagcttcttgggattgctctgtttcttgctgagaattggctcgatttgggaggcctcatcttgtgttagctttcaggttttcttgcctgaaattgaaccgattgggtaggtttttaggtgcttcagtttcagttgctagctcgtcaggcttgttcttgggctcctgccttgaattggggtcaaattgggatgcttctgggtgctttgaggatggaggagaggaagggattgatggggagggagagggatcaattccccgtcggcatgcgggtcctcgccgtcgacgatgacccggtgtgcctcaaggttcttgagaccctcctccggcgctgccaataccatgtaacatcaaccaaccaggctattactgcgttgaagctgctcagggagaacagggacatgtttgatcttgtcatcagtgatgtccacatgcccgacatggacggatttaagctccttgagcttgtggggcttgaaatggatctcccagtcatcatgttatcagtaaatggagagacaaagactgtgatgaaggggataactcatggtgcctgtgactatcttctaaaaccggtccgaatcgaagaactaaggaacatatggcagcatgttgttaggaggaagttcggtaatcgtgagcgaaacaatcttgatttctccaaagaatgcaataagccgcaaagcgcggatactgatcatggaccataccaacctacctgtggttcttctgatcaaaatgggaggtccagcaggaaaaggaaagaactacacggcgaggacgacgatgaaggcgatgataatgattatcaagaaaatgatgagccctcagctgcaaagaagcccagagttgtatggtcagttgagctgcaccgaaaatttgttgccgctgtcaaccagcttggaattgacaaagctgtaccaaaaagaattcttgagcttatgaatgtggagaaactcaccagggaaaatgttgcaagtcatctacagaagtacaggctttacctcaagagactaggtgctgtagcatcacaacaagccagcattgttgctgcctttggaggcagagatccctccttcttgcatattggagcatttgaaggactccagagctatcaaccttttgcaccttctgctgctcttccatctttcaatccacatggcctgctaacccgaactagcgccgccgcggctttcggacttcaggagcttgctgccccctccagcacaattcagacttctacaggaaatgtcacagttggccattgcttggaagaaaaccagcaggcaaatctagcacaaggcttgaccgcggcgatcgggcaacctcagcttcaacagaactggattcatcaagaaggtaatggtctgtctgatgttttttctgggagttctctgaccaacactttgtccagcacactccaaagagttccaagcagttcattgccaccacaagaactcttggagtgcaaacaagccaaagttagcatgccgccatcgatacggataccgccttctagttcagcacttcttgagaggactcttggggtttccaccaatttgggagattctagtatatcccagcagggtgctcttccaatagatggtggattttctgctgacaggttaccattgcacagttcatttgatggcgctgttgcaacaaagctagatactagtttggcagcttcacagagagagattggccagcaggggaaattttcagttagcatgcttgtctccccttctgacaatcttgcattagccaaaaatgccaaaactggagctagttcttctggcagtactataattctccctcttgatactgcaagacattcagactacttgcagttcggaggtgcaagcaattctttgcagaaaatggatggacagaaacaagatcatatacagagctcaaacattatatggagttcaatgccaagcactcaactgccaagtgatacccaaattcataatactcaaaaccaaagattggacagcggaagttttaaccataatattggtgcccatttggctgaccaaacaaatgcaagtgcgtcaatacttccgcaaatgaagtttgacacaagaatatcagaagagaaaatgaagcagaagaatacatatgacttgggtagttcaaagctgcagggtggatttaattctagtggctgcaattttgatggccttctcaattccataatcaaagtggagaaggatgatctcccattcatggacaatgaattgggctgtgacctttttccacttggtgcctgcatatgaatccatcatttcggacaccaaagattttgcataatctaaaagagtcagctgtgctgcctgatctgtgctacttcatccaggctttgtgtatactaggatctagggacagtagtggcttgtaatcttgctttatctcttctctagggttggctatggaagtatggttagatcaagataagaagaaaatataatgctgtaatgtcagcgccttttctagtc

SEQ ID NO: 27518 - DNA, 1499 bp, Oryza sativa
  ref <308>: DATABASE ACCESSION NUMBER: AK102960
  ref <309>: DATABASE ENTRY DATE: 2002-08-28
gatgtttgccctccccctctaaaaccccagcacccagagccgccggcggcggcggcgacggcgactcggaaaggggatctccggcgacgtctcgcggatctccggttgcgcttcttggcgacatggcgaagggatccaagaagaagaagggatccagtgcgacgaggaatccggcggccgagctcaccgacgacctcatcgtggagatcctctcccgcctccccgccaagtcggtccgccgatgcaggcgcgtatgcaggcggtggcgccgcctcatctccgatccccatcaccgccgcaagaagctcccccaaaccctcgccggcttcttccacctcagcgtgaacgaatcacgctttcccgtggaagcacgccatttcgtcaatgtctccgggatagggggacgcctgcctcacgtctgcccatccttctccttcctgcctcgctttgagcgcatcagtatggtggacagctgcggcgacctcctcctctgccaatgcttcgagagctcagatgcattccgctacgtcgtattcaatccttgtactgaggaatggatcgtcttgccggagtccggcttccaccccaaggaccgggggttctgcgcccgcttgggatttgaccctgatgtctcctcgcaattccatgtctttgagtttgtgccatgtgatgatgtgactggggtgaagatctactcttctgaaaccagagaatggaattacagggaaagtgaatggtgcactgataccggcatatctgatatttgtagaagtgccttttgcaatggcatgctgcatttggtttcctatcagcgttcaatagtgtcggtagatgtggaagggaggacatggcgtacaacgaaagtgccgaaaatggaaggggtggaagaagtgcgtgattggttgccaggttccatctgtcaatccgaagggaaattgtactacctcagtcaatacaacactgtccccataagcctgtcaatatggcttcttgaggactactcgaaggatgagtggacattgaagcatagtgtgactaacgaactgctgtatgagaagataaactccaagtacaaatctagcgagttctgctatgtggtcatagttcacctggattgcaatttgatttactatattactagagactacacgctgatggcatatgacatggatcataaggagtcacgtgttattcaagctcttgggtcagattgtatactggagtgtcttccctatgttccactctatgcagaaacactgtccaataggagctaagtcagtttctttgtagtacaccagtgttgcttggcatttgttcccatgaaatgatatttagacctttttcaaaatctatgtatttgggccttttgtgaggatcagcatgaacacatttccaattgtcatttgtgaaatgttggtctgcaacttattgtatcgtatgattaatgctgatgtttgttagctatgatgtttgttagaatgtaaaaattcagtatgtcg

SEQ ID NO: 27519 - DNA, 1000 bp, Oryza sativa
  ref <308>: DATABASE ACCESSION NUMBER: AK102961
  ref <309>: DATABASE ENTRY DATE: 2002-08-28
gactccgatccaccgccgatcgcctccccaagcaagcaagcagccgctcggagcgaagactgaggcggcggcgaccatggcggggctcgcgcacctcgtcctcgccctcctcctccccctcgcgctgctcccgccggccgcgcgcggcacggaggagacgccgcagtacacgacggtgcacgccgagtccgacttcgaggtgcgccgctaccgcgacaccgtctggatgtccgccccctccgacgacatctccttccacgtcgccaccaagctcggcttccaccgattgttccagtacctgatgggcgcgaaccttaactcctccaggatcaggatgacaactcccatcctaactagcatcgtcccaggtgcagggccgctacactcgtctgcctactttgtgcggctctacttaccagcgaagttccaggcttcccctcctgtgcctctccccgaactgaacctccacccggataggtggccaagccactgcattgcagtgaggagcttctcgggttatgcacgggacaacaatgtcgtcgaggaagcggagaaacttgcgttgagtttgagccggtcaccatgggctaattccacaaactaccctagcaagagcgcctactcaattgcgcagtataacaacccctttcgcatcattggccgtctcaacgaggtatggttcgatgttgattgcaagtctactggtgttgaggcatactaaaacgaaggttttactgtgcaccatcaccccaaaaaaaaaaaaggcttattgtgtgttagtaccacataagccatgtacatctttgtatatatgtgttcatggtgatgaattctgatgataaagctggggggtgtttgtggtgtgtcaatccatcagtgatgaaatgacacagcagatgtcaattgtaatgatccactatgtactcacatcttgcaagctcgagtgctcgattcagactgatcttgcatgtcattgtgtggctaatgtgatgtttccact

SEQ ID NO: 27520 - DNA, 2315 bp, Oryza sativa
  ref <308>: DATABASE ACCESSION NUMBER: AK102962
  ref <309>: DATABASE ENTRY DATE: 2002-08-28
gagcgtgatccgacccaaatctaatctaaacccgtccccgtggattacgcatcattaccccgcatctgctcgtggattttattagcttctcctctcgctacgtttggggtttggtttttgatgggctaattattagcggtggtggaacctgaaaagtcgcgtgttttgtgctttgcgttttgctcgcttgccgtgtgtagcggtggactggtggcgtcgttcgtgtcgcgcaccttttctctttttttttcttcaccgggaccaactggggaagaaagatttggggggtttttggccgtttcggcgtctcatctttcttctcgccgcgcgcgctcgtgtccagtcgccgccgtagttgtacgagcgctatccttgagctttggctgcacgggattcattgcaagggatgcggtggccagcgtcgtaacttgctcgtttcagatcgtgacgctgtggggttctctttttcagttactgctgctactgccggtaccggctgccgaggaggggaatgaggatgaagacgctggcgtgctgccggcggcggccgcaggacttcagcatcgacatggaccaggagcctgacagggtgatgacgtacaatggccttgagagctgtattatcaacagttcctcttatgacgatgatagtggccttagtgcaacaacgggagcagatgggtgtgtaaccactgattccgttgatgatgaagtctcaagttgctcctcaagtaaagatgtttctagctcttcgttctcttcacaatgccatccactgagaaagcaagaggagcattcactttacgagttggatacactcagtgctgtccatctacttcctctcaaagggaagaagccaatcacgtataccttgagtgcttcagacattgaaaccatgaaggagaagtttgggaagctactgcttggtgatgatgcttcaggaggagctagaggtgtttgtgctgctctggctttgtccaatgccattattaatctctcagccactatatttggagaactctggaagctggaaccactctgtgaagagaaaaaagtcaggtggcggaaggaaatggactggttgctttctcctacaacctacatggttgagctggttcctacaaaacaaaatggagcagacgggtgcacgtttgagattatgaccccgaaagcacgttcagatgttaatgtgaaccttcctgcccttcagaagcttgattccatgctaattgaagtgctggactcgatggtagacacagagtattggtatgtggagagtggtagccgagctaatggccggggcaaaaagaatggtctgaggcagacgaagaagtggtggctcccatcacctcgtgtgccagatatagggttgtctcaatttcagagaaataggcttgtttttcaggctaagctggttcatcaaatcctcaaagctgcgatgtcaatcaatgaagaagtcctgcttcagatacctattcctccagctgtcacggatgctcttcctaagtctggcagagctggcttgggtgaagacttgtaccatgctataaccacagagtacattcccatagaggaaattttcctctctcttagtttaaaaacggagcataccgtgctcgagactatgaaccggttggagggtgcagtttttgcatggaatcaaaggatctcagaggaaaagagcaagaaatccccaggaaggcattcctggaatttcatgaaggatagttcatcagaactcgataagatgtccatgtgcatagaaagggttgaaacacttatgcagcttctgaaatccagattcccgagccttcctccaacttttatagaagttgtaaagatccaatacaatgtggacgtggggcatgccattgtggaggcctactcaagggttcttgttggggtggcattcagcatactgtccagggtagcagagattctgctggaagatgacctgatcaagaagcccaacacccctctggccacactcaagttcgacctctcctccgacgtgtacctcgccggcatcaccgagacgccgccgggccacatccggcggtcgctgatggaccagatcagcctggtcgacggcagcctcgacgcggtcgtcaggaagaagggggtgaagcagcttaggtggtgaaaaaggacatgaagctgtgaagtttttctttttggcagttgtacagggtttgtgatgatgatgcatgctgtgctgcgcgctggctggctacataaagttggttaagttcaccttgctaatacgtcctgtatggaacgggctaaatagtgtatgcatggtaaaagctactagc

SEQ ID NO: 27521 - DNA, 3046 bp, Oryza sativa
  ref <308>: DATABASE ACCESSION NUMBER: AK102963
  ref <309>: DATABASE ENTRY DATE: 2002-08-28
ctctctcgcttcttcgttgtgttcccaactcggcaactgcttcttcctcctcctctccctcccagatctcgatgctgcggaggcagcccggcgacgcgccggcgtctgcggcggcatcggaggccgacctcgcgcagctctccaccgccatcgccgccggggaggacctgggcccgttcgtgcggcgcgcgttcgcgtgcgggcgccccgagccgctgctcgcctcgctccgggcggcggcgcgggaccgggaggccgagatcgaggagctctgccgcgcccacttccacgacttcatccgcgccgtcgacgacctccgctccctcctcgccgacgccgacgcgctcaagggctccctctcggcctcccacgccgcgctcctctcctccgccgccccgcttctcgcctcgctcgagtccttcctcgccgcgcgcgggctcgccgggaacctctcctccgcgctcgcatcctcccgacgctgcgtccgcctcctggcgctcgccaaccgcgccaacgcgcacctgcagggcggcaaccacaacctgtacctcgccctgcgcgccgtcgatgccattgaccgcgacctcgcctccggccccgagccgctgccgctccccaccctccgccgcatgttgctcagcctcgtccccgcggtgcgcgcccacgccgagcgcgagatctccagggagttctccgattggatggttagcatccgcgccgcgtcgcggcaccttggccaggtagccattggccgctcagctgccgccaggcagcgccaggaggagctccgatccaagcaccgcccgctggaggagtgcataacgctggacgacgatggcgtcggcgaccttgatgacttcgcagctgccgccgcaacagcagacgttgcagatggtgccgctgcagcatcattcgacctcacgccactctaccgcgcgatgcatatacaccataccctggcacttggcgagcggttcaagaagtattacctggagaacaggaagcttcagctgacatcggatttcgatgtgattgcagcaacaccgttcctcgagtctcaccaggtgttcttctcgcagattgctggtttcttcattgtcgaggaccgcgtgtttcggacagggggtgggctcacgtcccggcctgatgtagatgcattgtgggattctgctgttgcaaagatggtctctgtaatggaggacaacttctctcgcatgcagacagcaaatcacctgcttctgataactgattatgctgctttactttctgccacgatgaggcggtatggttatccagttgggatgctgctcgatgtgctggctaggcaccgggacaagtaccatgacttgctacttgctgattgccgtaggcaggtggtagaggcactggctgcagataagtttgatcagatgctgatgaggaaagagtatgaatactcaatgaacgtgcttgcatttgggatccaaagctcggatatcaccccagcgttcccgtatgttgctccattctcatgcaccgtgccagatatttgccgcatagttcggtcattcatcgaggattctgtaagcttcatggcacatgggggtggtggggacacttatgcagccgtgaagaagtaccttggtcggattctctcggaggtggttgatgcatcgatacaaaagctcgtggattctggtggtggtctgagtgtgtcccaggcaatgcaagttgctgcaaatatgtctgttatggagcgtgcgtgtgagtttttcacaggccatgcagcgcaactgtgtggtgtgccacttcgtgcagtggagcgtgggcggcgtgacttcccacttcgcaagtcccgtgatgctgcagaggcacttttactacggcttctacgttccaaggttgatgagttcatggggcaatctgatggtgtcacttggatgactgatgatccaccagctggtggaaatgagtatgcaaacgaggtcattatctatctcgagacactcacttcaactgcacagcagatcctccctcttccggtgctccgccgtgtccttgtggcagtgcttgcccacatctctgagaggattgtcgggctcttcttgaatgattcagtcaagcggtttaatgctagtgcagtcaccggaattgataccgatctcaaaatgttcgaggcgtttggggagagcatgtccagtttgtttgtggactctgatcaagagtctgcagcaaatgaaatgaaggctgcacttgtggaggcgagacagctagtgaatcttcttatgagcaacagcccagagaatttccttaatccagtgatccgtgagaagagctataacaagcttgattacaaaaaggtggcagccatatcagagaagtttcgggattcctcagagagctatttctcaacatttggaactaggggtgctaggcaaaatccgaagaagaaatctcttgatactctcatcaaaaggctcagagaagccagctagagttgctagtcctctcctctgcaccagttgcccacagtgcagagcaaagaagggagaagagtagaacctggaggaagaacaagcagaggagtaagaagagcagagcaggggaagaggacaaagagttaaagagaggcagatcggcgcagggggcaaagaagagaagagcagaggtggaggagataaggagataactgggaggttcagtgcttttccctccagatctggagcagggagggtacggtggtcgacgaacgaggctgcaggggtcctgtggtgactggctggtttgaggaacttaggagactgcctggttgccatggtgaattggtgatgccttcataaaatagatggtatactatatattgcttaactacccatattctgtagtctaacaggggtaatctgtccatcgataactgcttatagttatagactcataggactggtgtagatgttctgaagcttatcatgtgaattgggtaattaacattgcatggtcatcaagtctctccttaatatttatttggactaaacaaatttagttagttaagacctgctagttattaacc

SEQ ID NO: 27522 - DNA, 1751 bp, Oryza sativa
  ref <308>: DATABASE ACCESSION NUMBER: AK102964
  ref <309>: DATABASE ENTRY DATE: 2002-08-28
gaccagtcttgcatctctgactatatatacacatacatgtagcatcctgctccatcttaactagctactactagtgatgagcagaatcaacctcatgcagtaatatgctgtgctgatcgaattaatttacacatatatagatagatagatagatagatcgttcgaccaatcgagctagcttgagcaaactgattgacctggtgaagtggtataattaacgagcagatcatggaggattgcagcagctggatccatggctacgccaacgctaacgccaccgccggcaacaacggcttcatgtgcggctacgctgccagctgcagcccagtagagtttcagcagcagcaacagctggtcggctcgcagattgagcaccacctcaaccagatcagcatgcagatggggatggatgacgagtcggcggtgtacgacggcgcctccatggtggacgtcctcctcatggcttcctcgtcgccgcaccaccacgccggcgccggcagcttccagtactcctcgccgacgtcctcctccgcctccttccgctccgcctccgtctcgtgcagccctgagagctcggcggcggcgacgacgcacttcctcggaccgccggcgccgtccgcggcggcggcggggttccattacccggaggtctcctcgcaggcgccgttgccactacccttgccgccctacgagccgcagcacggccaatacaccaccgtcctctcgccgccgccgccggcgccagagttgccggcgactactacgccggcgaccggcggcgcgttcaggcggtacgcgcggcacctccgcccgaggaggctgcccaagccgggagggtgcgggcagaggatgttcaagacggccatgtcggtgctcaccaagatgcacgtggcggcgacgtacaaccgccagtactactaccagcaggcggcagccgccgccgcgtcggcgtcggcggccgaggcgccgccgtccggcaaccagctgcagcacatgatctcggagcggaagcggcgggagaagctcaacgacagcttcctcgccctcaaggccgtcctccctcccggctctaagaaagacaagacatcgatactgatcagagcaagagagtacgtaaaatctctcgagtcaaagctgtcagagctggaggagaagaaccgggagctagaggcgaggctagccagccgccccgccgccgccgccaagaacgacaaaggcgagacggcggcggcgccagcgccggaagccggcgatgagacgaagcgaaaggacctagtagagatcgaggtgacgacgagcggcggcggcgccggagcggcggatgcggcggcggcggcgggaggagatcaagagacctgcacgctcaacgtagacttgcgcggcggcggaggcggcggaggcatgagcacgacggacgttgtgctccggacgctgcagtgcctgagagagcagatcggcgacggcgccagcctcgtggcgatgagcaccagcgccggctccggcggccgcccgcctcgtgcaaacctaacattacagctcaaggtgtaattaattaataaaaaagcattctactaaagaagttaaaggaaaaatctgtctcacatctcagtgatcagaaaaaaaaaagaagaaaaagggaggtgccatcagtgcaaaatagcatgcatgcatgcaagcacattgttgacagcatgattgtacatttttctctcttaagataatggaaaaccttacacatatttcatactagc

SEQ ID NO: 27523 - DNA, 2029 bp, Oryza sativa
  ref <308>: DATABASE ACCESSION NUMBER: AK102965
  ref <309>: DATABASE ENTRY DATE: 2002-08-28
ggcttttcttattccttgccgcgacgccgcctctttcctcctctgagctgcggcgtccgaggcaactgtatgttccccgatcattttcggatgcgatgaaattgcaacaaatctcctcgatcaaatcttttaggacgcgttatcaatcgcaatccatatcactatccctaacccgaatctggccggagtgagggggaacagctgcgccatcccactggtcgccgccgccgccggagtgccagcgccctcgcactcctcctccgtcggggcgtcctcgtcgcagccgttggtctccctttctcaccaacgccgtacttgcgggtctctcgcttccgccgcgccggccgtggcacggacgcaccgacgactcctccaggtgggcgcggcagccaggacggactccaccggcgtgcctatcggattctacacgcctcttttcgagcagcaaagatggcggactcgagcaagcaggtcggtatggacaccgatggtggtggtgcggcggccgcggctgtggatggacagaatctgccggttcttgtgactaaccgtaagcgggagctcacactggaggggaaggctctacctgtggattgttctggtcgtcgtcgcatcgatttggagaaagatttatctatgattggaagtccgttcacaaaacacacgagtgacaagaatggggacaacaacgagatgagggatgtggatgagcggtgcactatggatgttgataacaccgagatgagggacgtggtgcatgagcgggacgctagggatgtcgagctaggtgatatggctgctgccaaggagcttgagcaaggtcacatggcttctgtgaaggaggagtcggagctcattaaggtggttgaggttcttcacatggctcgctgccgggagatcactgagtacaacctcaagctgggtcgctatgttcctacccgattttgctttcggaacatagccttatttgaccttgataaagagtcaaaacttgggcgtgggccaccggtcaaatcgctcaattgctcggaatatacatggatggtgcactctatgaatatctcatctatcaaggtgaccgagtctgatgtgggttaccctatcagcgtatttggcactgtgttggctagggatgagtatgacttcaggtgtgtctatttgttcaggcgtgacagggatgatccccagctcatcacttcaccggaggatacactaacactgacaggacctaatcgtgcacttggtgcattagatagagtgtattttgagttccatctgaaggttagggtggatggtgatgttgacaaagttttttgcaaaggtgtgcgtgaacaccatgctgatgcttgtctaattcgacccgtgactttatggctacgaagctgtctgagtactgtcattttggtgtattcgcctgttgaatcagccatagaagcttgtgttgcagtcaacattcaaggggttgtatccaatttcaatggcaaagtaactgcttggacaactgaagaccatgaaaacaaaatcgttctgtatgagagtaaagtggcaggcactaagacagtacttggggttgatggatctgtcgagttaactcgtcgttttgtagctgttgaactggaagatatacttgtgctcaacatatgtgtttttgagggtgaagacgaggctgaatttgagctctatctaggacaaaatgatgaagaatgcactctcgagcaaggcccttataagctacaggtgaagattagttggacggctgccatgaagaagcgatggagggaaaggtccatgaaacttggtcgcaagttcgtgttggtgcgataacacgatgtcaatgtaagctgttccatctcaagaagtgctgccttggtataacaataaaaaatgtacaactgatcttgtacatgctcttgtacatgtactatttagtttgccttggtataacgatgtactggtagtctgcaagacttaggtactacccaatgaacgacaatgaacattgatgggtctaggattggtgtggttcttc

SEQ ID NO: 27524 - DNA, 1853 bp, Oryza sativa
  ref <308>: DATABASE ACCESSION NUMBER: AK102966
  ref <309>: DATABASE ENTRY DATE: 2002-08-28
gagccgacgattccctcccctccaccgactcctccgccgtctccctccacgccgccaccctcgccccctgcgcttccgccgccgcgcggtgggccaccccgccctccatcgccggcgggccaccccgcgcttcgttggttcgggccgcgccacgacgctgcctcggctcccttctccctccaggctgcacgacttgaaattctgtgtatgaagtagcatttactggagaaagctcaagggaaactatcatggatgccaactccagtttaaatgagcaaaagtctgaagaactcaagcttaaagcaaatgatgcctttaaagcaaacaagttctccctggctatagagctctatagtcaagccattgagctaaacagttcaaatgcagtttactgggcaaaccgtgcatttgctcatacaaagttagaggaatatggaagtgcagtgcaagatgcttcaaaagcaattgaaattgatgctagatactcaaaaggttactaccgacgtggagcggcatatcttgccatgggtaagttcaaggaagctctgaaggattttcaacaggtgaaaagaatcagccctaatgatccagatgctactaggaaattgaaagagtgtgagaaagctgtccagaaaatccgttttgaagaggcaatttctgtaggggatgaagagaagcgctctgtagctgattctattgactaccgtatcatagaagtagagccacaatatacaggaccaagagttgatggagacacaataacattagattttgtcaaggctatgttggatgagtttgagaaacagaaatgcatacacaaaaggtacgcctaccagattgtgttacaaaccgtgcagctattgcgttctgtaccttcgcttgttgatgtgaacgttcctgatggaagtcattttacggtttgtggtgatgtgcatggtcagtattttgacttgctcaatatatttaagctcaatgggcttccctcggaagagaatccttacctcttcaatggagactttgtagacagaggatctttttctgttgaagtcatactcactctttttgctttcaagtgcctctatccgacaggtatgtaccttgcaagaggaaaccatgagagcaagagcatgaataagatatatggttttgagggagaagtgaggtcgaagttgggagaagcatttattgaactatttgcggaagcattctgttgcctaccccttgctcatgtcatcaacaacaaggtctttgttgttcatggaggtctctttagtgttgatggtgttaagctttcagatattagagccatcgatcgattccgtgagcctcctgaagaaggtctaatgtgtgaagtattatggagtgatcctcagcctcaacttggtagaggtccaagcaaacgcggtgttggtctttcgtttggtgcagatgtgactaagaaatttctacaagaaaataatctggaccttgttgttcgatcccatgaagtgaaagatgaaggctatgaaattgaacatgatggaaagcttataacggtgttctctgctcccaattattgcgaccagatgggtaacaagggtgcatacattcggttcacagctccagaactaaaaccaaatatttcctctttctcagcggtgccacaccctgacgtcaagccgatggcctacgcgaacaacttcctcaggatgttccagtaacaacatatatccatatccgccttctttcgccatattttttttttgtgacgaggctgaagcctaaaaagcttgctagcatacgatgtttgtacaacagatctggtggtgtaagcaggaatgcaatttttctatatactgccatggcactctgtt

SEQ ID NO: 27525 - DNA, 1457 bp, Oryza sativa
  ref <308>: DATABASE ACCESSION NUMBER: AK102967
  ref <309>: DATABASE ENTRY DATE: 2002-08-28
actatattttggtgcgatgtttatggcctgctttttggcatttgtctgtagctgtatcaaattatcaatgttttatccaagaagaccgaagaaatggaaaagatgaaggttgattcagatcaagaaattttgttgttgaagaaattggtaaaggttatggaaagaaaagttgaacatctggaacagcagcttgagaaatcgcatagctcttcagcaccactcttcggtgtaacaaatgatgatgtagaagggccatcaatactcctaacaggtggccataatggcattaactggctgtcatcccttgattcatattgccctgcaacggacatactagaaactctaatgccaatgagctcagcccgtgcatatgcggctgttgccacattaaaggaccatgtcttcatttttggtggttggaatggcattcgcagtttgtggtacaacacagtggagtgctacaacaggggagccaataagtggataggattgccctgcttgaatcatgagaaagggcatcttgctggagctaccttgaatgcgatgtgctcctgctgcggctgaattaaatggcgttctctatgtaattggtggttatgatggcaacatgtacttacagtcagcagaaaggtatgatccaagggaaggcttctggacccaacttccacgtatgcggacaagaagaggatcccattcagtagttgtcttgggggattcactacatgctctgggtggcctgaatagaaataccacgttttccagcgtagagatttttgacacccgtgccaactcatggagaagggggagcccactcagcgtcccaagagcacacggatgtgcggttacattggacggcaacgcatacctcattggtggtatccaaagcagtgaagaatacgttgaaactgttgaggtttacaaggagggccaaggctggtccatctctggttccaaggcattcgggaagagagctttcgcatgcgccgttgccatttgacaggattgcagaagtgcagatgaacccccgggccggttttgtacagcaccagtccccaaccccgcctcacagtattaccttctctcaagcgaaatattgccgctcattgctgagcactgacgcctgacggcccatccattctgtgcatcccagtcatacggtttttacattttagaaacaacaccgtagcgagttctggtatgcgttaactctgcccgttgttgtttctcactgaagataggtgttgttggttgtcacctgattgtagcggagcaaactgaactgtctacaggacactagttacttagagaagttcgaatgaacaaactttagctggtgatagcagtacatatgggaggcttggaagctggtataatttttgattttttttttgaagcaacttttcaggttctgcttgctgggagcaggcgggaataatagctgcaacaatttcgccagc

SEQ ID NO: 27526 - DNA, 1749 bp, Oryza sativa
  ref <308>: DATABASE ACCESSION NUMBER: AK102968
  ref <309>: DATABASE ENTRY DATE: 2002-08-28
ggtcatcagtagagtagcacacaaaccaaacccaattttaccctaaacccgagagagagagagagagagagagagagagagagatcatggcggcggcggcggcgagtctggtgtccctgcccctcctctcggccatcttcggcgccgccatcgccctcctcttcctctccggatacctccgccgcaagcgcgccgccatcgcccatctccccccttccgccaccgccgccgccccggaccagcccaagcaagttcgaccatccaaccagaaccagcctaagaagggacaccagcgatctcaccacgccgtcgataaggacgccgcaaaaaagcaccatcatcttgatgtcaacactttgagggggcatactgattcagtcacagcacttcatttctccgatgatgcctgcaacctggccaccgtatgtgcggatggagctgtcagagtattcagggttgatgatgtctcaagcaagagctttaaaattctgaggatcaacttgcccgctggggcacatcctacagctattgctttctcacaaggggcatcatcagttgttgtggcagcgcaagcacttttaggctcatctctctacatgtatgcggatgttggtgctcctccagctggcggaaacaaacagcagggcaagctttctccccctgagataaagtgggaacaccgtaagattcacggcaaggagtcagtgctgaatcttgcggcagctcgtgcaacctatgggactggtgatggcagcacaatattgatttcttgctctgaagcaactgatatcaaaatttggcatgggaaaagtggaaaggagttgggaacagtcgacaccaatcaattgaaaaataatatggctgatatatccccaaatggccgtttcatagctgctgcagcttttacagctgatgtcaaggtgtgggagattgtttattcaaaggatagctctgtgaaggaggtcaataaagttatgcaacttaagggtcacaaaagcgctgttacttgcctgtgtttcgctctgaattctgagcagattattacagcttccaaagatggtacaattcgagtatggaacattaatgtaaggtaccatcttgatgaagaccctaaaaccttgagagttttgccaattcctctccatgattcaaaaggttctgtttgccagtatgatcacatgagtgtatctcctgatgagaaagttctggccacgacaagtggatcaacgctgcaatggttatgtgtggaaactggtgcagttcttgatacagctgagaaagcacatgaaggtgatataactggcattgcctgggctccacgaacaattccaaatggtggaactcctgcttttgttttagcgactgctggagtggacaaaaaggtgaagctgtggttagctcctaaggctatttcaacctgaatgagtgtggttggatcctggtcaccctctacagcgcagattcggtgtgggcactgaaggaagagaaaaaaacgatgaaagataatgcagatatgttgcttgagttgagtccttactgacgggagtcgtcaaacataacatgcagagagagtttgtgaaggggagacactgcacttttctctaaatacatatctgtcaacattttggaaataggttgcctgctgctcacaattttcccttttcttgttagaacaaaagaaactagagtggaacttggaagtaacttatcgagttctcttgcattcagtatgcatatgttagttactcc

SEQ ID NO: 27527 - DNA, 2137 bp, Oryza sativa
  ref <308>: DATABASE ACCESSION NUMBER: AK102969
  ref <309>: DATABASE ENTRY DATE: 2002-08-28
ggtaaaccctagccaaatcctctccatcctctctgcggccgccaccatcccctcccgacctcctactccggcgcaggcgcacagcatcgcagcttcgggatgaccacgactcggctcgacgaagccacgattgccccccatctgtccatctcttcgatttgataattcctcatctgcttcgaagttgattcgagtgacgaccaacgacggtgcaggtgcgcggggcggtgagaggcggcagcaccaagcaggaaggcggaagggccgccagccaccggacgcagctggagggcggcgcatccgcgccagagcgaggggtgcgcggcgccggcgctgcaggcagtgggccagcaagcgaaagcggtcatgcagcgccggctctgcaggcggcggcggcggccagggaacgggaggccatcgaaggcgagaaggatcgcggtataaactgcagcgtctgctactgcagcagtcggcacacatatcattttttgggacagcggcactgctccatcttgcagagagcaggtaaattctttcatactttcaactcttgatctgactagtccattgcagtaattgatttgactagtccattgcagtaactatgcctgctgatgttaatgaaatttgtaaattggaacttttcaatatgataactttttagtggaatgtaatatttaaaaagaactgcaccaattttatggttgatgtagtgatgctaatttacatatacccaagagaagcgacaaaactgctgttgttgcaacagttggattccttgaataaagaggtagatgaattgtaagcatcaagggagcagcagtcgaagaaaattgaaagtttgaagaactcatcagaagagaccaattcccttcttcgtcgtttgattggccatttggcctgaatactccatattttgctctgccttagtaaggtttgactatctcttcatgttgccttgcttattcatgatgtgatatatgaaattatgtctttctttatcctaacttacgaacgagtgtgacaatacttgttgttatgtaaattgtttcatctagacttttgggatgctagcaaaatattttatgtagtccaagccgtgttaccgtgtataagtgatgcattgcatctttttttttctcactgcataagattgtagtaccatgctatttatcaccaaataattgaagtattgtctatcaggcgatatttgtacagcatgttgttggctgaatgtttttggaaatcatggcacttatataaaatcttacatgctattggctactataataatcatgattagttagataaggtggatagctaagttacttgcttatgtatcatagctaagttgtttccagatattgcatctgccctaatatcatagggtaatttgttggtacaaaaactatgaccacctagttatcatagttgacttgaaaaatcaaaatctgaaaaatcataacttgataaaaatgtgccagttcctttttactgttatttgataaattagaatattgctcatgatctactttgtgcataagttcctttgatttgttttactagtgtgaggtgtacctaaattctgttctatgcataatagctattttttttagattgagtttggaagtctcatgtttgagccaccgaaagtagacatgcatttttcaggagttggtaatacgtatgtacctagctagactcactacattctatctagcctactgctttttaactatataaacccttgttgtggttctgagacatggtgggtatgcacctagcagtctagcacccatatttcattcacattggatggcattatgggcaggaaaactttacagcgatgtttcagaagcaaaactaagtatgaagatgtgctgcctgctgcaattgatcttttcaaggagcgccactgcagtagcaagactgatttttactgatgcatcaaagttgtttattttgctatggtccgtgtcatgtacatgagcttgttgtggtcacttagtagtcggtgaatctgattctatgtatgttactgggtttgtgtttttttattgagagaatcccttatatgccactccaaattaaccggtttcctttatgccactccaaattggctcctcccttctatgcc

SEQ ID NO: 27528 - DNA, 846 bp, Oryza sativa
  ref <308>: DATABASE ACCESSION NUMBER: AK102970
  ref <309>: DATABASE ENTRY DATE: 2002-08-28
ttggctcagctcaatttgagcaacagaaacactaacacgtcaccaataatggcgtccctcgccaactcttctgtccacctcctcctcctcgtcgtggtgctcgccgccgccgccgatgcggtgacgttcaccatcgtcaacaagtgcgggtacaccgtgtggccggcggcgctgccgtcgggcgacggcaatcagctcgacccggggcagagctgggccgtgtacgtgccggcgggcaccaagggcgcgcgcgtgtgggggcgcacgggctgcggcttcatctccggcggcagcctagggcagtgccagacgggcgactgcggcggcacgctgcggtgcgcggccgtcggcgcgccgcccgtcacggtggccgagttctcgctgggccaggcgagcaaggacgactacttcgacatctcgctcgtggatgggttcaacgcgccaatggccatcgtgccggcggcggcgggcgggcggcggtgcccccgcggcgggcctcggtgcgcggcggagatcacgctgcagtgccccggcgagctgcgcgccaaggccgggtgcagcaacccgtgcagggggaacagcacgtgcgggccgaccaaggacacggagttcttcaagaagctgtgcccggagacggtcacctacgcccgggacggccaaggcaccaccttcacctgccccgccggcaccgactaccagatcgtcttctgcccatgatgagcttggtctcgtacagggacagtaataactatcttagttcctgtacttgtatatggtggtaaataaaacctcgcactgagtgaatcacttgtttgggataatgaaaataaatggataaatcttgtc

SEQ ID NO: 27529 - DNA, 995 bp, Oryza sativa
  ref <308>: DATABASE ACCESSION NUMBER: AK102971
  ref <309>: DATABASE ENTRY DATE: 2002-08-28
gaggtttcccctcgccgacgcctccatcgccctccgggctccgcctccgccgccgccgccatggggagaaggcctgctaggtgctaccgccagatcaagaacaagccgtaccccaagtcaaggtactgccgtggtgtccctgaccccaagatcaggatctatgatgttggcatgaagaagaagggcgtggatgagttcccctactgtgtgcacttggtgagttgggagaaggagaatgtctccagtgaagctcttgaggctgcccgcattgcttgcaacaagtacatgaccaagaatgcaggaaaggatgccttccacctaagggtcagggtccacccgttccatgtccttcgtatcaacaagatgctctcgtgtgctggggctgataggctccaaactggaatgaggggtgcttttgggaagcctcagggtacctgtgctcgcgtggacattggtcaggttcttctttctgttcgttgcaaggagagcaatgctaaacatgctgaagaggcactccgccgtgccaagttcaagttccctggccggcaaaagatcatccacagcaggaagtggggcttcaccaagttcacccgtgaggagtacgtcaagttgaaggctgagggcagaattatgtctgatggtgtcaatgctcagctgcttggttctcatggtcgtcttgcgaagcgtgcccctgggaaggcgtttctggctgagaccattcaagcttccgcctagatgcctcttgctgaatggaacttgagagattttgctttagctagtctaattttgcatgctagaactcatgttttaagaattggttgtcttcaggatgatctatttttctgtaatagttccttctgtaggccagcttgatatggaggttttgcatatcatcagtaccttgtttgaatttttgctacatatcgttatcccaaagctatatctcagttggattgtgaagctttattaattcataaactcgcctgcgtctttgc

SEQ ID NO: 27530 - DNA, 1054 bp, Oryza sativa
  ref <308>: DATABASE ACCESSION NUMBER: AK102972
  ref <309>: DATABASE ENTRY DATE: 2002-08-28
gatttttctcccccaaaccttttcgcccttcgccggcggcggcggcggcggcggcgcagcgaggcggcgatgcctcccaaatctgatagcgtcgaaggaatcgtcctcagcttcgtcaatgagcaaaataggccattgaattctcagaatgtagccgatgcgttgcaaaagtttagcctcaagaagaccgcagtgcaaaaggcattggatgcattggctgacagtggacagatttccttcaaggagtatggcaagcagaaaatatatcttgctcgtcaagatcaattcaacatcccaaatggggaagaacttgaggagatgaagaaagcaaatatcaagctacaggaagaacttgcggatcaaaagaaagcaattagtgaggtagaatctgaggtacgaggtctgcagtcaaacttgactttagcagagatcaagtcaaaggaagctaaattgcaaagagaagtccaggaaatggaagagaaactaaataaattgaggaatggtgttatcttggtgaaacctgaggacaagaagattattgaagagagcttctctgagaaagttaaccagtggagaaagcgaaagaggatgttcaaggagctatgggataatatcactgagaatagccctaaagaccagaaggaatttaaggaagagcttggtctcgagtatgatgaagatgtcggtgttaacttgcagtcttacagtgacatgctgacgagtctcagtaaaagaaggaaagtatcccgctgatcatccagcatgggagtttctcaaatcaaatgtaggttacatgagagaagttttaccagctacaggcctacagttcatgaatactcgtagtccagacccggtcatatctgctgttgaaatttctagttaatgcatataagttagtagtatcgctgcattagtttatttccccagaggtaacgagattagaggaatattttggtcccagttgttgtaatataaaatcaatccatcctctaatatatctacaatcaatgatgaaacctgccatcaatatacaatgctgacttttgctccctcc

SEQ ID NO: 27531 - DNA, 1340 bp, Oryza sativa
  ref <308>: DATABASE ACCESSION NUMBER: AK102973
  ref <309>: DATABASE ENTRY DATE: 2002-08-28
gtccgtccgttcgatccttatcaaaacagcatcgcgtcctctgcctcctcttccccacgccgccggccgcgccgccgctgccgccgtcgccccgcgcccttctccctcatccccgccgctgtgaggtgtcaactccgtcgccgcctcccctgtggtagcacgaggggaaccagggctcacatgctactcgatcggggcgtaactttggatagccatggcggctatgcttcttcgccttcatccctgccctctcctctttccgccgccgccaccgcacccacatctccgccgccagctggccgtctattcgatcccgaaatcctccttccgatccgccgccgccgcggctcgagctagaaaccctccgcgtctggcctccgtcggtggagccgagcgacggcgcgtgggtgacgattatgatgaagaggaagaggacttgggacaggctctcgagagaacgcggcaacttgtcgagtgcgcgatgttcgcatccgtcgctggcctcgcgtacttcctcagcaactccctcgccatcgagaattactttagctgcttttttccattgccgattgttatctcctccttaagatggggactagaagctggcaggaaaactgcggtggctactgttttactgctattcacattgtctggccctgtaaaagcatcaacttatctgctcatgcatggagtagtaggtctggccatgggtactatgtggaggttggagaccaactggattgtttccatcatactctgctcaattacccgggctctaggggcttgtggatacgttttattgtcgtcatttctgataagagagaatattcttggattgataacagtcaatatacatgcttccctgacatacattctggcggcagctggggtgaacacgattccttccatggatgcaatttatgtactctttggaacgctgcttctactcaactgtggattctttatcttcctactacatataatgtatacaatattcctgactaagctcggaataaagccttcattgagacctccaagatggctggacaaagcaatttgagtttacaggtagagtggcaacttactcctttgtaccttgtgcgctgactgaaaccggagcattcagtgtcacaatgcttcctaatgtagattccgcagagtgtcagcgctgaattcgtcccctgcaaaatgataattagtgtcctttttctttggccatggtacatcctagatctgtaggtcttcttttctaacgaagatcaagctaaaagttaggatacgtaaagcaagaaagatcactgttactacatgattaattgagtttaatttttacgaacttg

SEQ ID NO: 27532 - DNA, 1088 bp, Oryza sativa
  ref <308>: DATABASE ACCESSION NUMBER: AK102974
  ref <309>: DATABASE ENTRY DATE: 2002-08-28
ggattcgcgcacacgtctccaccctctctccccgccgccgtcgcgactcgcgatcgcacggtaaaatcgccgccggtgggcacaccgccgccgcgatgtcgcacggcgacaccatcccgctccactcctcgtccgcgcagtcggacatggacgagatcgagagcctcatccacgcggcgccgccctccgcggccgcggtgctccccgcgcggccgccgtcgcctccgcgggcctcgatccccgtctccagctcgccccccctgctgcctcctccggtggccgggtccaagccgcagctccccccgttctcctcctcctcctccgtggcgtcgtcgtcgtctccgccgctcccctcctccgtctcggtcgccatcgccggcgacgggttcggccccccgcccaacacgctcaccgagcccgtgttggacaccgtcaagcgcgacctcgctcgcatcgtcagcaacctcaagctcgtcgtcttcccaaaccctttccgtgaggaccccgggaaggcgctgcgcgactgggatctctggggccctttcttcttcatcgtcttcctcggcctcaccctctcctggtcagcctccgtcaagaagtctgaagtgtttgctgttgcttttgctgtactagctgctggtgctataattctcacattgaatgtgctgctcctgggtgggcgcatcaacttctttcagagcctgagtcttcttggatactgcctgttccctttggatgtcggagctttgatttgcatgctgaaggataatgtactactgaagatcattgcagtagtggttacattggcctggagctcctgggcagcatatccattcatgagtgctgctgttaacccaaggagaaaggcgttggcactatatcctgtcttccttatgtacgtctctgttgggttcctcatcatcgcaatagattaagggcggaatagtcgctatgctactaatcctgagttttgtttcccgtttgagcatcataattcatacagaattagttacacgttcctgttgtcgttgttgctgacttttagttcagctatgatttttttttccttttctataagcagaagtcgt

SEQ ID NO: 27533 - DNA, 2345 bp, Oryza sativa
  ref <308>: DATABASE ACCESSION NUMBER: AK102975
  ref <309>: DATABASE ENTRY DATE: 2002-08-28
tggtgtaaaaaaaaaagaaaagaaacctagctccgcctccgccgccgccgccgccgccgccgccgcaactcgagcggcgaatcggcgatgccacccaaactgaggtcgtcgaagggggtggcgccatccccttccaccggcgagggtggagaaagccacacatcgaaaaagaatcccgctccggctacggctcccaccgccggaagtgttactcgatctagagcgagggatactactgagcgcgctagagctagtggcgggggcacggcactggatccgaagaagagaaagaggacagaagagtcagcggcgtcatcagcagcggcggcaggtccggttccgaagaagatgaccaccgccggtagtacgaccttggcctcccggccgctccctcttcgctacccgccttatcccaccttaccaccggggactcgtcctaccagcagacaatatttggatcccgtccttgacagaaaatatttggattccgttcttgagtgggccaaggagcgccgccggatcgccaaactctccaagaaagctcaatgtaaagatatccccactctcaggcattcgcccatggatcccatcactgcagatgccgtcgtcacatcacaagacaaggccatggtgctgcgtgtggctcgctccgttgtcagtgtttcatccacaatgcctgatgggggtggattgatttcccggtgcactggcgtcgtaatcggttgggatggggctaacaaacgtgccaagatcctcactgctgcttctgttgtttgtgacttccatggtgaattgcataacccagcactcaagctatccgtcagtatgccaaataagacaacaacagaaggaaggttgttgttctacaatgtgcactatggtattgctcttttggaagtcatgggagactacaagttggaggtcccttcttttggatcgggcacaaactacggtcaggtcatatttgcattgggtaggggtgaaaacatgtctttaatggttagccatggaacaatttcatggacagattaccctgtgttattgaggaaccacaatatgtttctgagctgtgatattcctgagggtggttcaggagggccggtggttgaccatggtggcaatatgattgggattgcatttgtagaaaatccgggtccggtctttatctctatcaagacaatcatgacttgcatggagatgtgggatcagtttagccgtgttgctcgccccttgcttggcatgcaattgaagtcagtggaactactggatgtctccattcaggaggaactctgtcgtgactataatatcaccagtggtttcattgtgagtcaggtgctcgttgattctactgctgaaaagcttggtattagacgaggggacgtgattgattttcaggatattgattgttctactttatcccagttagaagaccacctcctttctcttggttggggatacctgaaagggatgcatttgacagtcgatctgaaggttgaagttcataatctcttcgactcatatagggaaagtattactttccctgtacagttcactgatgcttctaagcaggtaaactagagttgaagaggtgctgcaagggattgaagttgcctagagtaatatgactgaccaaggggagggatgtctacttgtgccttttggataatctggcaacctcattgtgcttttgggacaatttggcacgtcttaccagcgatgcaacctcattcctctaaatggttgtgctgatatagttttggatgagattttgtaaagatagtgttactgcgcctcttacgctcttaacagaaaaccatgcccctccgtatatagcaaggtcagattagcgccataaactgaatctaaactttgtttttgatgaactcagacacacacaatcaacacattacagtcgcgtgggcccacgaatgtgccctcaacgacgtgctgctactatatcatcagtattcagtacttcctccgtttcacaatgttgaaattaaagacgaagccgttgatcacactcgaagactaaacaggtgcaacctgtgaagaacaccaaaaggttggaaggagaccatcaagacggtgatcccgacggcgacgcccggccgggatcaagtggattggtaattttggtgagatctgaacaagtgcatggtcacttactttcatctccaaatgggcggcgtaagaagtatgtacttggtcttgttcttcacctgtatatttatttttgttgtccaatcaatcttccacgttttctgaataatgaaatctgggagatcaatttgccgcgaagaattagcacttttaatcacaaaaggctatctgcctatatgctc

SEQ ID NO: 27534 - DNA, 634 bp, Oryza sativa
  ref <308>: DATABASE ACCESSION NUMBER: AK102976
  ref <309>: DATABASE ENTRY DATE: 2002-08-28
gaccaccaccataaaaaaacaccgggaggaggaggagatagatgggcaactgcgggacgcgagaggagaatgccgtcgtcgcggcgcacgcccaagttcagcagctccacttgctacaacatcctgtcaagaatgctgttgcagagaggaagcacacccgcatctcatcagatatgagtgatccttcaacacctaggaaaattgaagttgaagatgccaagaacatctccatatacaacgatgtgattgacttattgtttgaacttgagaccatcacaaaaagcttccgtgctgactaccttcttggtgaaggagggtttgtgactgtttacaagggctacatagatgagaatgtcagggttggtctgaagtcactacctgttgcagtcaaggtgctcaacaaagatggacatcaaggacacagaggatggctcgtgagttgccaacttgttcaatattcactatggttgccatcataagcccaccacatgtggtgagcttacgatgacgaccacagtttgttaagcatgcgagccgcatgcggcagatcgtgtgattcattttctgttgtggaatgtattatatattatcgtatacctatattcttcactcaaaaaaaaatctcattttgttc

SEQ ID NO: 27535 - DNA, 2400 bp, Oryza sativa
  misc_feature (204)..(204): "n"=any one base of a, t, c, or g
  misc_feature (244)..(244): "n"=any one base of a, t, c, or g
  ref <308>: DATABASE ACCESSION NUMBER: AK102977
  ref <309>: DATABASE ENTRY DATE: 2002-08-28
gggggtccgagagagagagaaacaacaccaccaccaccatcaccaacgacaccgagacggaaggaagaaggagaagaaggcgagagagagagtagttcacttccctcctctcctctccctctcttcccactctcacgtctcctctcttcccctccgcgaagcaacggggggcgaggcgacggcagcggaggaggaggaggaggnggcggcggcagccgaacccccacaaaaacgccgccccttnaacttccttccttgccttgcacagcctcatcctcgatccgtcgcgcgttcgtcgggcgatatccctcctcctcctcctcctcctcctcctcctcctccggtttcccccgcgtgcgagattgagcctggaagcccattcagcggcggggttggggcggcaggcggctgtgaggttcttgatttgatctgtggttgttgttgaggttgtggttgggcgccatggcggcggcgggagggctggagcagtggcagaaggacgggttcttcaggccgccgaggaggtgcaggagtcggcggacttgatggaatctatttatagaacttggatgcgggaacgcgatagcggagctaatttagaggagctgagcgatttgcaaagggagctgaagacagcattaggaactgcaaagtggcagttggagcagtttgagagagctataagcatgagcaatgataagtattctttggaagagggtacattggccaggcgtcggcagttcgttgtagcaatggaggaccagatttctcaagtagagaaacaaataaatgattactcgattgacaatgataggcgagggctcaactgggtaaagttagatgatgaggaacgagatgatcttgtggctttcctttcagcacctgcacagttatctcaagatacaaagaaaagagacaacacttaccatagtccatcaaaacaaaagaatgcgttgattggcgcgaatgatcccagggacatggctgcaatcagtaaagaccgacataaaactgaagcattatgcagagaaatttcaaatggtcagagtgaagcttgttgtctagccgagcagttaaatggtcacagtacaagcccgagttctggtggtgaacactggaagatcgatatttctgatgataaagacgatgatagaaaattgtcccctaacaaggtcgaggcatcaagtcaggcaactgcattttctggtatcatgaaaaccaccgaatctttcacaagagtaagatggttgaggaatagcttgtggaaagccaagagtgatgaacatcttccgttaagatatgatatgccaaatcacttagactggagggttataaccttattagcacagaggtttaacgggcttactgaaagaagcaggagttgtttcagcggttggaaggaaaactctagagtatctggaaggatgggtggacttcatatacaagggccgcaatacaacactcagtttggtcgttccattcgaataacccttttactggtgttgagcatctttctgattgtgccatttctcgtgtactcagcttggcaatgctcatattggtggctgctggtgaaggaaaaagtatccgttattgtacttgcaaaccgtggttggtgttattcacatgctcagatgaaacaaacgagcgggtaattacagatggagctgtacataggaggggaaaaagaaacaaaacgggaacgacttcatttgtggagaggaaaaagaaacaaaacgggaacgacttcatttgtgcaatgcaaaatttccaagatcagaaaacgtgttgtcaccagcagaaaatcatcctgagatggatccatagttaatggctatttggagtctgttgtgatggatgattcattgattcctgccaatttctccttgctgctgtaccctcaccaaggcaattgtaaaaaaaaaatgtagagctgttgggaaatggatttgaacgactattgtgaatgatttatacaatttgtggaagtgaacagtttcggtgaaatgaactgtttggctgatctgaaggcatttcatcagaaaaaaacattcagaagcatgcgagattctttgtccacaggtgattctgtaacaccttgttcccccctaattcttaaaccgtacttgaggatttgtagatagtatatcgcccttgcttgtcttaccattagcagtagtataattaatctggaaacgaagagttcatctgtataagaacatttctgtatagatagcagtcccagcttgtgtatggcttctctgctcacttctaacactcaccactcgtgtcagtcctacctagttgaggcagaaaaagaacacacttgtagatcagagatgacaatgtatcggatagtacatctagctcgggtatcctatctattaatgaggatgtagt

SEQ ID NO: 27536 - DNA, 1568 bp, Oryza sativa
  ref <308>: DATABASE ACCESSION NUMBER: AK102978
  ref <309>: DATABASE ENTRY DATE: 2002-08-28
tccccttctgaccctcctgacctccccgagccccaacacgacgacacggagcacaaacctcccgcgcctcaccacttcccctcgcctccgccgcccccacttggccacatctcctccggtctcggtccccgcggcggcggcggcggaggagctcgcccatgttgttccgcggacttctcgcttgggctgtcgggtagggaaccctgagaaaacgcataccggcggtcgcggagagcagagcaaaggcgggggatggggtacctgccgtcgctgggcgggaaggcggcgcacctggtgtccgacctcgccaccgtcatcctcaaccccgtctccgagcgggagagccagcgccacccctcccacctccccgaggccactgaagtgcaagaaaatatctatgaggatgacgatgatgataattcagtcaagaattctgagattcctaatggccctgacacatcttccttcagagcattcctgatgtcatttatgtcgtcatcaaactccagcagtgattctatagaaatcatacctgagcacaatatgaatatggaatatccaactttaacacctgttgggaagggaagcaatggaaggaagggcctgtttagcagagggaagcattccattggaaaaatcattaacaaagcaggcagaattggtggtttcagacaaaaacccagctacagcattgatggtgaaactgttcaaacagaatatgatgcacctgggttggaacttaagggatcaaaggaatctgcttcacatgataagttaccagccatgtctgaaccatcaatgcttttgtctgaaacaatgcgaactgttctttatacatctcttcctgtacttgtccaaggaaggaactggatgttggtatacagtacctggagacatggaatatctttatctactctgtatagaaggagcatgctttgtgcaggctactcacttttgatagttggggatcgaaaaggagcggttttcggtgggttggttgaggccccattgcaaccattaataaaaaagaagtatcaggggaccaacaactgctttgtgttcaccaatatagctggccgtcctgttatatatcgtccaacaggtgctaataactatttcacattttgctccaccgattatttggcaatgggaggtggtggtcactttgcactttatcttgatggagaccttctgaatggttcaagttccacttcagagacatttaacaacccgtgcttatcacgttcccgggagtttgaagtcaaagatgtcgagctatggggcttcgtcaatgcttccaagtatgatgagatgctcactatctgccgtactgagaagcaagggatctggaatctgtgactgtctgtttacaattgatctgagctgtttagtgcttgtacctgatgccaacccatcctggtggtttgtacagttttgtagttctgtctgttaagtatagtatatataggccttgttggagttctgtctgtatgtatagtaaaatgccccttgtaaaacaagttcatcaacggagttatggagcttaaaatgagtaactctgaaacatg

SEQ ID NO: 27537 - DNA, 1303 bp, Oryza sativa
  ref <308>: DATABASE ACCESSION NUMBER: AK102979
  ref <309>: DATABASE ENTRY DATE: 2002-08-28
gatccatcttgcctagtgcaagcgtgcaaagccaaaattcaagaaatcacctcgctccatcaagtgagcaagcaaaaccgatcgaacaagttccaatggctgacgagccatggaggctgccaaacatagtgcaagaactggccgccggcgtgcaggagccaccgagccggtacctgcaagacctcgccggcggtgaccagctcgccggcgccgagataccggagcccatcccgaccatcgatctcggccggctgtcaggatcggacggtgccgacgaggctgccaagctgcggtcggctctgcagaactggggcctcttcctggtttctaaccatggcgttgagacctcactgatcgatgctgtgatcgaggctgcgagggaattttttcggcagccagttgaagagaagaagaaactgagcaacctgattgatggcaagcgttttcagatagaagggtatggaaatgatcctgtgcaaaccaaagatcagatcctggattggtctgatcggctgcatctcaaggttgagccagagtgtgacagaaatctagccttttggcccacacatcccaaatcttttagggatattctacatgagtacacactgaagatcaagacggtcaaaaacgatatcctcctcgcattggccaagctcttggagcttgatgaggattgcctcctcaaccagttcagcgacagggccatcactactgccagattcaactactactctccttgtccaagacctgatcttgtgttaggcctgaagcctcactctgacctctgtgctctcaccgttcttctcactgacaaagaagtcggtggcctgcaagttcttagagatggaacatggtacagtgttccagctgtgcgagattactctcttctgattaacattggtgttacactggagataatgaccaatgggaccttcagggctccattgcatagggtggtgacaaatgcagagagggagagaatgtcggtggccatgttctacgctgtggatggcgagaaggagatagagccggtggctgagctgctggggctgaagcaacaatcagcacggtacaggggaatcaagggcaaggacttgttgattggacactatgaacatttctctcgtggtggtagagttgtcgattcattgaagatctaacgaagggtaaccgcaaagagtgctattagtactactgtactctctacatagataatattatactacttgtaaaaactatatgagccatcgatttagtaggctataatggtactttttcgtctatacgaattatgctattttgt

SEQ ID NO: 27538 - DNA, 1041 bp, Oryza sativa
  ref <308>: DATABASE ACCESSION NUMBER: AK102980
  ref <309>: DATABASE ENTRY DATE: 2002-08-28
gacttcaccttccaatgatcgaagcggaaagccaaatggcggaggcggcatcgtacgaggagcagcggaggcggcaggtggaggcgaacaagcggaagctggaggagctccgcctccaccacctctccgccgccgtccgcgaatccgcctccaagccgtcgccggtgaagcagcggaagaggaaggcgcgtgcgctgccgggcgccggcgaggatgccccgctccggcggtccggccgcgtcgccaacctccccgagaagcccaagtaccgcgacgagctccaagatttcgagaagaggataaggaggtcttatggcggcaagaggagggatttgtccaatcgagtttacgcgaccgacgagcaaagggactacgccatcaacgctgctcaagagctggaagaggagctcggctccgactacccaatcttcgtcaagcccatgcttcagtcccatgtcactggagggttctggctgagcctgccgacgcatttcagccggaagtatctgccgaagcgcgacgagactatccgtttggtggatgaggaggatgatgagtttgacaccctctatcttgccaacaagagggggctcagtggagggtggagggggttttccattgctcataagctagttgatggagattgtttggtgttccaacttatccagcgcacgaagttcaaggtctacataatcagagcaagttcctactatgaaactgacgactgatgtagaggctccaaatatctgtgattggggcacaggtcttctagtgaattaggttgacctgaattggagattgctaggccatcttcagtcttttgagtgatgaacaatgttcaaaatattaactacgtattaggttacttatggactagccatcctcagtcttttgatggcaaacaatgtcagaagtattaaattggcatataatttaccagctaataggctaagttgttagatttactttgagcttgcacagttcagaaatctgcactatgtaagggatatcattgcaattggtaactgaggatgctttttt

SEQ ID NO: 27539 - DNA, 3452 bp, Oryza sativa
  ref <308>: DATABASE ACCESSION NUMBER: AK102981
  ref <309>: DATABASE ENTRY DATE: 2002-08-28
gacttacacacacaaacacacagagagagaccaaaagcaaaccctcgcctcgcctcgcctctctcaaccatcgtcttccaccgccgccgccgccaccgaacgaacgcgccgaccgaccgcgcgaagatctgggcagctgggacgagacatagggagtataacggaggaactgaagaaggagacaaacgccggatttaactccacggaacgggaacacattgctgctgctaccattcaagcttggactccggtctcctcctcctcctagggtagggtggtaagggagaaaattgcagatgcagatgcagatgcagtcgaggtctcgcattcgcggccgcgacccgcccccggcctcctcgggaggacgataccgccgacgatcgccctccccgcgccgccaccaccgcgctcccccctccaaccccaacccgcacagagacagacgcacccccgaccgcccccgccgccaccaccacgaggacagcctccctctccatgtccatctcccacccccacccgacgccctactcaccgccgccgccgaccgccgctcccgcgctgacgtccttctcgaggccggccgcctcgccgcccgctacctcgtcgcccagggcgtcatccccgagcaccgtctccgcgccagggaggaccccctccctgctgccaggaaccatgacgtcgacgaccccaggtcccgccggaatgccgacttcccccgcgacagaggggacgatgacaggctatcccgtagatccggctgggacaggaggagcaacagctttgacagcaggcgcaagtacaatgatgccgcctcagccgatcggagtgcccgccggagccacgactacgacgaccaaaggagaccaaccatgtcacgctcctattcacaaaacgaccgccgtgtctccagtgatagcaggctggatcgaagacggaggagcaggagcagaagcaggagcagaagcagaagcaggagcaggagcagaaccaggacaaggagctataactatggcagccggagggattcagattggcgagcatccggcgccgatttggatcattccaaggtgccagagcctggcattgtccgtgacggtgatgctgatgtgggatacggtgatgctgatgatgtgccaagagatctcaaggcacctccccgttcagtggttgttatggagacaaaagagagtgccagccaagctgcagccaatgaagacacagcagaggtggagtcagagatcatagaggtcgatcaagctcaagatatatatggggatgacgatgacgatggtgacgatgctgttgctgccttcaattatccaagcgttgctgaaataaatgttacccaacacaagctgtccaattccaacgaggatgttgttcatccatcacagtctgatgaggaaccactgcataggcagtcccagttcagcgatgctgaggagggcatggagggtccgatctctcccagggattcatgcttggtagaaccagtggccgaggaagtcagagatggaatggaggctccgcagagtgaagttgaaactgataacgcagaccttaccaaagatgaacaagacctgccagcttggtatgggatttttgacctcaatgttgtggaatctcaagaaaactgtgaaatggttgagatttccaatgattcgcctttagataatggtcgtgactctgttcctgatcaagttggtcagatgagccaaggagcaaactgcgtcacttcaggaactcaaggtcaagatgaacatgcatttgacaaccaccagtcggaggatgaacaagtgcctctaaatcaaagaaatggtacggatgattttaacaatgaacaaggggttggaaatcagacaggtgatgaacatggacaggataatcaccagttggaggatgaccagatgcatataaatcatgtcatggatgtgcatactttagataacggccttatgaacggtgaggaaatgcttctaaagcggtgtgcagatgagcacacggatcatggacacctggtggaaactgaagaaatgcttctgaatcaggggcagagtacctctgtacaagtgttggaaaattataatatgaatggagaacaggtgcagctcaatcatgatgctgatgaacattcaggcgatgatcgcccaataaagaatgagcaaatgcttttgaatcatgttatgggtgtgcatgatttggataatcatgaccagaacagtgaacaaatgcttctaaacaatggcgctggtaaacaggctgcagatagtgctcagttacaggaagaccagatgcttctagaccaggctgcagatggacaagctacgcttcacggtcagagcattggccaaatgattcctgtaatcaatctggaagatgattatgaagagcagtctgataccatagagttttcagaatccaagtaagcttttttagattctttttgtcacaacctcaagggggtgaggaaaatcctttgcacttgaacatgttcgctatacagaagtgacaccttacataaacttactgaaaatgttctaccagaacatatctgttctcaagggcaacaaacttcgagtattcctgaccatcctcagactaacgtcccagctgctgctgctgcttcatcagttaccctcaaccatggaaataggtggactagaaggggcgctactgttgcacaggaaatcccagcgatgatgagttgatggcatgttgtatgttgctttttgatgaaatactgttagaggtaatcatcttgtattgtgggactgccatcctctgagcttgggaaatctttgtgaaccatgatgttcgtgttctcagctcctacgcttgagcttactgatatcctgaaccatgggaagctggcatgctgaagttggttgatcggtcatttgcttgtttgtatgttgtggtgtagtaagtagtaacaaattttgatccccagaggtcacaaattccatgctggtctagcgatgtgttagtagctgggtagctctaattttactgcgaacaatatgaatcatgttcgtctaacaaaattctctgctgcctttgtgctcctgcttttgctttgtgaagcgcaaaaggacagtgaagctctgtgtcaccgtgcagctcatcaggcagagatggttcatggctggctgcacggaatctagcaacagtcacttgattccgcgccgccgacctaacaagagagatggagctgttgattgcaacagcgtctaaattcagagtgcacacaatgcggtgctttggtacaacgcaattggatatttggatggatgctatttggatggtaatgacaaatgcacatcaacggcatattctcctgctgcactgcatacatcattcaaggatctctgaaaggaaacatgaacataaaacagcaagtatgtttgtaatgtagtatgtatataccgtgtcaattgttgttttgttgtgtg

SEQ ID NO: 27540 - DNA, 1092 bp, Oryza sativa
  ref <308>: DATABASE ACCESSION NUMBER: AK102982
  ref <309>: DATABASE ENTRY DATE: 2002-08-28
gaaggccttcgtctcgacacgtttgcattgcagcagctcataagtttcttcttcgtttctgctcccagtgctaaggcagcacagtcgttcgtcgccatgccagggctcaccatcggcgacaccgtccccaacctggagctggactccacccacggcaagatccgcatccacgacttcgtcggcgacacctatgtcatcctcttctcccaccccggcgacttcaccccggtctgcaccacggagctggcagccatggccggctacgccaaggagttcgacaagaggggcgtcaagctgctcggcatctcctgcgacgacgtgcagtctcacaaggactggatcaaggacatcgaggcctacaagcctgggaaccgcgtgacgtacccgatcatggccgatccgagccgcgaggccatcaagcagctgaacatggtcgacccgaacgagaaggattccaacggcggccacctcccgtcccgcgcgctgcacatcgtcggccccgacaagaaggtgaagctgagcttcctgtacccggcgtgcgtggggcggaacatggatgaggtggtgcgtgcggtcgacgcgctgcagacggcggcgaagcacgcggtggcgacgccggtgaactggaagcccggcgagcgcgtcgtcatccctcccggcgtctccgacgacgaggcgaaggagaagttcccccaggggttcgacaccgccgacctgccgtccggcaagggctacctccgcttcaccaaggtcggctagatcatatcgatatcgacctcgctcttcgtacatcatgtgcgccacgcgtgcgtgatagcgtgtgctggcgtgatgactatgcgagatgcatccctgtgtgtgttggtgtggataatgccgctacgtttggaacagtagtgcatttactctgtgctactgtctgaactttggctgtttggcagactgtttatgtacccgtatgttcgcccctgtactaatagagtgggtgttgtggttggcaagtactctcctcggacaacatttaactttgactactaataacaaacaaattaaaaagatcaatcagatgttactagacatcttaattttatt

SEQ ID NO: 27541 - DNA, 3714 bp, Oryza sativa
  ref <308>: DATABASE ACCESSION NUMBER: AK102983
  ref <309>: DATABASE ENTRY DATE: 2002-08-28
gaacctcctcgtcccccttcccctcgttttcccccaaattccgctcctaaaccctccctctcctctcactccggccgcgattctcccgccgccccggcgatggtcccgatctaagcatgtccgacgccgacggcttcggttgcgagcaccgccgaccctccaagcgccgccgcgacgggcccgatcatgccctcctcccggtgtcccgagaggtgctgatgggccaccccgatgaccccgccgccgccgccgccgccgtgggggcggaatcctcctcggcctcgtcatacctcggggttgtggcggccgccgcgtccgcctccgcctccgcggcggggggtttctcctgcggggcccacttcttcgtgcgggccaccgactcgaggaccgtgtcgatgcacgcggcgtggggggacaccgtgggcgccgtgctcgcgcacctcgccgaccgggggtacggccgcgacctccgcctcgtctacgccgggaggcagctcgcgccggagaccgccctcgccgacctccgcctcccgccggactccacgctgcacctcctctcccgcctccgctccaccccctacccggacgcgtggcagctcgcttcctacatcgcctccaccgccgccgccgccaagtccgaccccgcccacaccagctccgccgccaacatcaacgagctcgtcaaggagttcatcctctgcgcgcaccgagccaacatgcggcagcgccatgatcgcgactcccccctcttcgatgcccaacccacgggggaccacgcggcgcagtacctcgagattttccgccaggcgggcgcccccttcgcgctggttcgcctctacgccgctaatccctcctccgcctcccaccatcacgcggagaacgccatcaaatgcttcctcaccatggatccttcggccttgccacccgacgtgctgccggtcatggcgccggtgctgcttgaattttgcgggttgctctctttttctgtgggcaagagggatgaactctatatatcatcccgttctatgcttgcaacagtgctcagcttgccttctgggcttcccccttgcatcaagtcaccttccaagctgatcgagcaggtccttccgtttgctgaagaaatagtgggagtggttatggacgaacttgcatcactggatatgactgtgtcatccaaaaaccttgaagacctctcaaatttctttaaagtgctgcgccagcaggcactccgttgggttcccaatggggggccattgcccaagaatctgtataacagtgagcgtgggcataatgacacgtgggtgtggaagttgcacgaaatgtcaatgaacttattgaacagggtggatgagtgcttgaagaggttggaaatggatctgtccttgtcatcggagaacagaggggtcaatataagtcaatctcgatgggttgcccggtcacatatgctggtcatgctgacacaactagattttatatcgatgatttatgaggatttggcacataacctacggcttgtgttgctggcacacagagatcctctcaatgccctcgtgcgctgttccaagaggaatgagcatctccactggcttgtgaagcataaagacctcctttgctttgaatcaagaaggaatttagtcttgatgatgctacctgagggaaaggatgaatacggggagcttcatgagatgttgattgatcggcaacacttattggacgagtcctttgaatacattatacaggccagacccagtgagcttcgcagtgggctatttatggagtttaagaatgaggaagcgacaggccctggagttctgagggaatggttctgcatggtgtgtcaagctcttttcagcccgcagcaagttctcttctcgccttgtcctagtgatcgacagaggttcttcttgaacggaacatctgctgtggatccactgcacctgaaatacttcatattttcaggacgaataattggattagcattgatgcatagagttcaagtagggatcacattggaccgcacattattcttgcatcttgctgggagaagtattaaattggaagatatttctgctgcagaccctgtcatgtatgcaagctgtaaaagaattttagagatggatgctgctgttgttgatggtcttgaactaacattttcccgagatgttcatgaattagggtctcgaaggactattgagctttgctcaggagggaaggatctccatgtaaatatcaggaacagagagctttatattgaccttcttattaagagtaccttcgtggattccatatcagttcagttaacccatttcgtgcgcggatttagtgacattctagttgatccggaactccagaaagtattttttgagtttttggatctagaagacttcgacggaatgctagggggaagcaacaaaactataaatctggaagattggaaattacatactcaatataacggctacaaagaaaaagatcgccagattatctggttctggaaggctgttgagagcttgtcaattgagcaacagaggcagctgctgttcttttggacttcagttaaatatttaccctcagatggttttggtgggctggcctcaaaactgtacatatataaggtatctgagtcagctgaccgtctcccatcgtcacatacctgcttttaccggctctgcctgcctgcttatccatccttgaaagtgacgagaaaccagctgcagaagatcacacaagagcatgtgagctgtagctttggcacatggtagatgccgcccttatggtaatccaatatggtaaattctgtacatacccaagttagtgtcgatttacctgcctcaattgaagctagaaattaaaagcaataggctatcttttgtttgttttgtacatatttaaagtgttctgggccatttaatctagttaggcataatcagaagagagcaggttcctttcattctccctcttttgaaccaggcttccatttttcatatactttctggagaagtgtggtgggagcatttgcatcgtgctatgctcacaagctctggaagccagttaaggcttaaaccatgtcataaaggtaattgcaacgtgtagtagccatgtggcttggtgttcctggtggagctgaaattctgcatagagtcgagtagagttaaagtgatcatctgtttgtgaatctggacaaaatcggtcactgaaactttgaaggtatgcgactctgctaatgtgaagttaaaactcggatatgctttgctgtttagtaccagcaggcagcagaaattttctgggaatcagccagaaaccggtgtctcagcagctgacaagtgatatggaccatactctgcctgaacatatggattccaacgatgtctttggtatatgaatcacaattatatgttgacaactacacccggtggaatcggatgcctagttgatgtgtattcacacctttcaaatgttttgcatctgtgagagaaattccataccaaatcccgctgaaactctggcaaatttccacgggatgcttgtgcacggttgcacctacagtttctccacctttgcgagccgccgatggagagatcattgctgcactctaatcatctatcctctgattcattttgatttcactcatcttcctcccctcttcaacattttgtacaaccaatgaaatgcagttacttggcagcgctgaaacacaaatgccgaatagttttg

SEQ ID NO: 27542 - DNA, 1930 bp, Oryza sativa
  ref <308>: DATABASE ACCESSION NUMBER: AK102984
  ref <309>: DATABASE ENTRY DATE: 2002-08-28
ggagcgccgacgccgagacgccgagagcccaaggccggctagtcggagagtgcggccgcgtgcgggtggctgctgcgctgcgcgaactcccccgccgccaaagatgttctccccagcgatcaagaagccccacctgctccaccgcagggacaaggaggaggcgtccccctcaccccctcacgctcccgcgcacacgcccgcgcctcgtggatttgccgtccacgaccgccccgccaccggcaccccggcgccgtggacctcctcctccctgctcgccaggatttcaacatcaacacgaacagacaggacaggggattctggccagatccaaccggtgcatgtatccgaatttccccaaatagttcgaaatgctcaagccaaccttctgcaaaagagtttttccggcaagaacatgcttgctggtggcattgataaagaaacatcccttgcatggatgttatgtggaaatgagctttttatctggagttacctggcttctgttgcaaaagactgtcttgtacttgaggtcccttcttctcttatggggaacaaagaagaaaaatctctatgtggtaatcagtgggcagtttgcatagtgagatggggtagtagtggtgcatcaacacggagcagtggagatatattgcatcgaagaagttcgactggttttatcctgtgcaacaaaagaacacaagctatagcttattggtctgatatctatgctgaaagcagtaagagttcagttcttgatttaattggatatggtgatacatcttcaggtgatggcacatctggaaactgcaggattaattctcttattgcagtggcagttccaggaggtattaatgaatgcattgtgattgcttctcagccaacaggcacattatggatgttctggtgttcaccagctgcagttcgtcgaagagaaattcataagggtacattaggagtttataatgctgatcattctcagaaaaatagtggtggaaggtccttggcttggctaccaagtaaagcatcatctaaggctgctgaacggacgttctttttattgactagtcatgagctgcaatgctggagcatctcattcgggcatgatatcaactgcaaaaaaatagggtctcaggaaattgttggtagtgatggtgatatgggaataaagaaagacatagctggacagaaaaacatatggcttttggacatgcagatagatgatcatgggaaagaaattatcattcttgttgctaccttctgcaaagatcgggtgagtgggtcgaactacactcagtattctcttctgacgatgctgtacagacctaaccaaaagttttcatctgaagataatgtgattaaaactgaaaggtttttggagaaaaaagctccttctcaggtgataatccctaaggctagagtagaggatgaagagttcttgttttctatgaggctaaaaactggtggtaagccttctggttctgtaatcatactgtcaggtgatggaacagcaacaatagccatatactggagaggttcaacccgtctctatcaatttgatctgccttgggatgctggaaaggttctcgatgcttcagttatcccatcttccgaggacagagatgaaggagcttgggttgttcttacagaaaaggcaggagtgtgggcaattcctgagaaagctgtgttagttggtggggttgagccaccagagcggagcttgtcaagaaaaggaagttgcaatgaagcagttgctgaagagaaaagaagaaatcaggcattcaatgctagtgttgtacccagaagagctagttctgaggcttggagtgctggagagaggcaaagaccagcattaactggtatagctcagcaggctgtggttgatgaggagtctgaaatgttattaaaccggttatttcatgattttgttttgtccggt

SEQ ID NO: 27543 - DNA, 2012 bp, Oryza sativa
  ref <308>: DATABASE ACCESSION NUMBER: AK102985
  ref <309>: DATABASE ENTRY DATE: 2002-08-28
gagtgatgtgaagcacagcaggtgatcggagagaccatctctaatactaggcctctacactcttacttggccacggcgagttctcgccatggacgacgcatcgattagtactgtaaagcctacgcgccggcgccgaggcgctgggtggcaaggtcgcagcgcgctggcgcgaagccgacgcggccgttctggaggtcgtactccacccacacgttctgctggtggtggtgcccgatcacgtacgccgacatgccggccatgtccgagttgccgaacgtcaggcaccacaccgcctccgcgcccacctcgccgcgccgctcgcctggcaccatgtacaggagcttctccccggacacggccacctccgcgccgcggagtacgaggcccacctccgggaggaggccgctcgccgccgccacccgggcctccggcccgcggaagcacgcgtcgaacgcgccctggaacacgaaccctggctctcccagcggggccaggagcaggcgcgcctggctcgtgaactcggccttgagcgccgcgtaggcgtcggcgaggaggaaggtgaactgcgtgccggagtccaccattgtctgcccggcgccggtgtggtccggcgtgagcacggactttgggatggggagcagcgcgcagccgacgcggatgccctccagctgcacggagtatgccacccggtcgaagtacggcagcggctgggagatctcgatcagcggcgtgtagttgagcggcggagccacgccgccgtcgtcgccgaggaggaggacgccggggccctcgcctggggcgatgcagtaggcgaagcgacgggtgcccgtctgcgtcacgaaggagagggtgccccggttcatgccgaggaggccggtcgccgcctccgagacgtccgtgccggtgccgttgctgttggtggcggtggtcgacgagtaggaagtgatgcaaccgaagtaggcgcccacggccacgggcggggcgccgccagtgaggaggaaggtgtcggtggcgaggaccccgtcggccgaggaggcgtcggcgtaggagagggagacgcggcaggcgttcgacggcggcgtgtcacagaacggcgggacggggaggtcgcggccgcgccactcgcacgccgtcgacgggcaggggaccgcgccgtacgaggaagaacccgacgcgttgaacgccggggtcagcggcggcgcgtagctcccgttgcagagcagccacgagagctcgctgccggtgtcgagcaccatcgtcacgttctgcggtggcgtgccgacggccaccggcaccgtcaggctcacattgtgccggaaccggagcctgttcgccgccggcgcctccaactccacctcctgcacccgcacctgcagcgggaggaccgtgcccgccggcgacctcccttctccgccgctcgcaagaaagacgcagaggcagagcagaacaagagacgcctccatgacgcgcgcgcgcggccggccaacgcagccacccttacgttttacctctcaaaagcgcgcgttaagcgagaccaaactctgcaagaatgcaaacggcaacgcactctggttaattcatcggatgcaccagcatccggcaattacaccatcactacaccttctcctcctcctcctcctcctcgtggcatcgacatctccatcattagcgtcaccttcgcgagcgttttgatctttgcagatgtgtgtgtttggtgtagcagagcagtagagcagcacagtacactacgcctactcgccatgttgcatggtcctttccttcaccctggggcgggctggtcccgtgcgtgcgtgtggggggctctgcagctgcaaacatgtacaggaggtgaagtactacgtacttctacgtggagggatcacggatctcatctcataaatacgctagtccggccggggcagcgaggactttcagcacagatgctcgttgtcgatggcaccatccgttgttaagtttgtcaaaggagatctttctgtgttactattggctcc

SEQ ID NO: 27544 - DNA, 1259 bp, Oryza sativa
  ref <308>: DATABASE ACCESSION NUMBER: AK102986
  ref <309>: DATABASE ENTRY DATE: 2002-08-28
ggctcggctcttccctcctctctctctcgcactcacccggcgacgccgacgccccacccgcgcgcggttgatcccccgtccaccgctgctcgatttctctcctctcccgcgccgcccctccgctgtcgtcgcatccctcacgtgctgcccctccgtcgtcgtcggatcgtcatgccgcctgccgccgccacttgctcgtggagatggcgatgatcatcgaagaacggcgagcagtgaagagctcgagggagggttcagtgattactaccgcggtgctgcctggctgctacctctttctgcctcttcattccaccgcatccaccagcttctacttcttcagtccttggctgtcggatcgggctaccaaccagtcaacaacagatcctccctatacgagatgggtaacgtgaagatcattgctgccacatatgggtggaaagggaccatgatcgccacagggatcaccgtgatagaagcaaaagaagatagcatcgtgattctgaatattctgatgatcgcgatcggccttgggacgatgattctgaaagatcaataatcaatggaatattctgcactaccctagagtgaagggtgctgcggaggctagagaacaacagtattcagtcctccaaattagatgttgcaccattgttggtgaccggctgaccgacatgaatccatcgccactcagttttaagtttaacaaagttgcaaggaagttttcaagatattggggacttttatcagtttgccgactccacacttttttggcacccagaaatcacttcagttcctctcctgcacatgaggactgcatgtttgtacaatgaaagtattgtggggttttatcaagatgcaacaacgggaagattgaaaaggctgctgcctgtaagattgagagggctgcttctggaggaaaaagcacactacatgggcaatgacaatgggagagggattgaaaggagaaacactcccaaggagaaggagaagagcgagggaaaacaccagggtgatgtgagcaaaatctaatcgggaagcactatatcatactgtatgatatattaatacactatgatattggtttcacctcagtgtgatattgaagcaacagagattgttttatcaagctatcaggtcaaaaaaaaaatgaaatcctattgtcagcatttcataattttagtactaaatttttattttctgaatcgattcatgtatatggttttaccagactgaagctcttgatttagagaaactttgct

SEQ ID NO: 27545 - DNA, 1713 bp, Oryza sativa
  ref <308>: DATABASE ACCESSION NUMBER: AK102987
  ref <309>: DATABASE ENTRY DATE: 2002-08-28
gaagcgtcgtctttctcctctaatctctccttctcttaacccgcctcccctcccgttctccccgcagatcgcagttttttcaccgtcctccgcccgtgcagttgacgcttccgcctcccacactgcgtctgcgtgcgcacacagcaccaattcgaaacccctccccgcactccctccccctcccttccttgccttgcctaggcggcaacgcctcccgtcctttataaccctgcggctcctcccgcgtgaggcaccgaggcccgggtggtagaccgcgggacccgagccgagccgtgccctgccctgcccttcctccgcccagggtcgcagccaggtcgtcgtcgtcgtcggagggggaagagagccgcggcggcgtcaggaggaggaggaggggcgagatggaggcggagaagaagccgccggcggtgtccgacgtcggggcgtgggcgatgaacgtcgtcagctccgtcggcatcatcatggcaaacaagcagctcatgtcctcctccggctacgccttctccttcgccacgacgctgaccggattccacttcacggtcacggcgctcgtcggatggatctccaacgccaccggctactccgtatccaagcacgtcccgctctgggagctcgtctggttctccctcgtcgccaacacgtccatcaccgggatgaaccttagtctcatgctcaactccgtcggtttctatcagatctcgaaattgagcatgatcccggtggtttgcttgatggaatgggtgctcaacagcaagcactacaccaccaaggttatatcggccgtggtcgtcgtggcggcgggtgttgggatttgcacggtcacggatgtggaggtcaatgccaagggattcatctgcgcttgcgtggctgtcttctgcacgtcgcttcaacagattacaattggctcctttcagaagaagtacaacatagggtcatttgaacttctcagcaaaactgcaccaatacaggctgtgtctcttattatacttggtccctttgctgactattacctcaatgggcgatggttattaaactacaacttctcaactggggcaactttcttcatattgctttcttgctccttggctgtcttctgcaacatgagccagtacctctgcatcggccggttctctgcaacttcgttccaggtcctgggccacatgaagaccgtgtgcgtgctgattcttggctggatcctgttcgactcggccctcaccgtgaagaacatcctcgggatgctgctcgccgtgatgggcatggtggtctacagctgggccgtggagaccgagaagaaggcctccgccccaatcccccggaacaagagcgacatgctggacgactccgaggacgttcccctcaaggccagggtgagcggcctcccctcgtccgacctcgaggaagacgagatgaagagctagctaatgacatattatttattcattcttcttgttcctttcttttttgtacgtgttcaaatccatatattgcccccattctgggggaagttcttgaagctatcggcacttgtgttaattttgcctcctcccttgttcctggggttcatagatgatgatgatgctgatgaaccccagccggtctcgacgtagatgaccattttagaagccatgttcttgatggcgtgttgttattatagatgacaagacttataatggaatacaggtgtttatccgttgt

SEQ ID NO: 27546 - DNA, 1432 bp, Oryza sativa
  ref <308>: DATABASE ACCESSION NUMBER: AK102988
  ref <309>: DATABASE ENTRY DATE: 2002-08-28
gaggcttgcattgccgtggcggcggctgcgctgcgcctccgtgttcctcgagaccggccgaacccgcgccggatttgggcaggttttactagggtttttgccgatccgcttcccttccgccgcgccaccctctactctaccctactcctcccgcttcctccgcgcctacctgcgtgctcgcgaggccgcccgccatgagggacctccagctctcgctgaaccagacccagagggtgcgcctcgaggccgcgctccacgagctccagaccgtcgcccccgccgccgccgtcaccgtcgcggacaccatccccgtcaacgacgaggacaacattctcaaggggcatgggacgtcggatcaggacggggaggtggtggcgacgctgtgcggcgtggtggagcgggtcaacaagctggtgtacgtgcggacgcttagggcgaggtataagccggaggttggtgatatcatagttggccgtgttattgagattgcacctaaacgctggaggttggagataaattttagccaagatgctgttttgatgctttcttctatgaatttacccgatggaattcagagaaggagaactgctgtcgatgaacttaatatgcggacaatttttgaagaaaatgatgttatctgtgctgaagttcgtggtttccaacatgatggatctctgcacctacaagcacggagtcaaaagtatggaaagcttgagaggggtcaactgcttgtagtacctgcatacttggtaaaacgacggaagcagcatttccaccacctcgagcaatatgatgttgacttgattcttggttgcaatggattcatctgggtaggtgagcatgttgtggtaggtgaaaacgctaatatgatggaaaataagctgaatttgagtgctgaagtggagaatttcactccactagaaacaaggaaacatatttgccggcttgccaatgctgtacgtgtgctttcagctctgggtttcactttgacagttgaactgataattgagactgctgaagcaagtgtatcatcaaatatcgagataaacaacatgcttggggctgaattttatgtccagacagcagagagagaggtaaaacgtcgagctgatctgttgcgaaagaaaagtggagcaagataaaatctgctgatcctatgtaaagatgcctaaacgtgtacaagaagaaagcctgataagtgccatcgtactctgccatagagatccaactgttttcagatctacggtgcttgcatttgatgatagtgctagaaatggcaaaatgctgggcttgcagtgctggaggggcctcatctatgttaaatcacataactattgatgtacgtttgacgcttttttttttgaattgtattactgcatactccctttcttgaaaattctagtaatctatatcctgagattttgatggtgtc

SEQ ID NO: 27547 - DNA, 1232 bp, Oryza sativa
  ref <308>: DATABASE ACCESSION NUMBER: AK102989
  ref <309>: DATABASE ENTRY DATE: 2002-08-28
ggccaacccatcgcctcgccgcaaccgcgaccgcgccggcgagctgcaccgcccccgtcgaagtttcccgcggagctcgtcgttctcgagcctcttccgatgctttctgcacggcgagccggcgccggcggcgccgccgggaagacgtcgcatgctcgcccctgcaaccctggttacccgcggcgctcgtcggtcccgatgaccggcggcgacgcgactagaccagccgtggcgagggcgcttcgccttccgggtagtgggggaggggcgggtttccagcggcgggagccccaccgatggctccgtccctgctcctcctcccggagtggagatggcgccgccgccgttctcgcctcgcgatccgggagcagcgacatgggcctcggggtttcttctttctcgccgtgctcgcttccccgccgcgtcgacgctcctcgccggcggccagtgtggtgttcgccggctgctcctcctcctcctcctcctcctcgtgtggaggtgcagagcgtccggaagaggcgaatgagcgaggaatgggaggcgttgaaggcagccatcgccgacatgttccggcccttgctgcgaaacctagctgacatttgctctctccgcagcgcctacgacttcgaggactatcaaatcggcatgctctttggtgcgtttctcggatatgtcgggtgctaccagctgtggaaggcggctccttccgtcttcgttgatgctgcccttgcctttgtgttttacaagctcagcgttgtgtcctcagagctgcaccggcagcgcaagacaaacagcttgatcacgcggcttaaattcgggaccatacttatcatggttatgaaagacatcaagaagaactatgtactcctggacattattagaatgccggttttcttcctctacatttgtgcgttcgtattcgatgttgctggtatgaagaagtatgccaggcgctcacttatttcattgtttaatctgctgaaatctagaggtggcatacaagaaatatataggattatgtggtatcctggttatatatctccatatgatgattctgctgactggtgatgcatttgtgtgagtggttcccacttaggagcttgttctaggaaggatggagcttgttctaggaaggatgccctccccttcacaaagttttgtaaagtataataacgaataaatagctatgaacgtatggtgagtctctacaaaagaaacattcttcactgttt

SEQ ID NO: 27548 - DNA, 1582 bp, Oryza sativa
  ref <308>: DATABASE ACCESSION NUMBER: AK102990
  ref <309>: DATABASE ENTRY DATE: 2002-08-28
gacttcagctgcaacggagaaatcgacgcaaaaacaaaccgcagaaagaaagaaaaaaacaagaaaggttgtgttcacggggagcttggtgccattgctgcaagttggggaactttttgggttgtagaaaaggaagctgatggcgtcgggcaagatggagaacggccagcagcagcagcagcaggaggtgaggaggaggaggaacggcgaggtggtggtggacgggtcggagatcctgcagctggtggagaacaaggaggcgtttggtaagttcgtggagcagaagttcaggctgctcgacgccgacggcgacgggaggctgtcggtgagggagctccagccggccgtcgctgacatcggcgccgccatcgggttgccggcgagggggtcgtcggcgcaggccgaccacatctactctgaggttcttaacgagttcacaaaagggaagaaagaatcggtgagcaagtcagagttccagcgtgtcctctctgacatacttcttggcatggcggctggactaaagagggaccccattgtgatcttgaggattaacggtgaagatttgaatgaatttgttgagagcccaaggtacgaaccggagatggctgccatattttcgcaagttgaatcaggaaattcaaccttgcagcagtgcatgctagctgctattcgacaactgacggtcgaccacggcatgccaccggcttcagattcatgggttatggagaatatcatagaacctgcattgcaagaactccatggtgataacctggagcaacctgtcactcaagaggtcttcttccaggaattcagaaagttcttggcaatcctcacgcagcgactccaagggcaccctgtgattgtagcacataccgagaacacctttgatgggaatggtatcaagaagctgctgtcaaacaagctcgaattagataagctgttggattgtgtttggagaggcgtaccgaaagaaaaagatagaacagcgaagcagtacattcgggttgcgttcgataggatggctgactccataaatctaccaccatatggagctgttgaacaggtagatgctgtggtcgatgaggcgttcaagatggcgaaagccgaggacgggaaggcggtggatgaaacggagttcaagaaattgctcactgagatccttggggcagtgatgctgcagctagatggcaatccaatatcggtttcgaccaacagtgtactccatgagccaatgtccacttcttccaccctgctttcgccatcgccgccgtcgccaatggtgtcatcaccgagtgaatagaagcaagatggaaggaagctgatcatagaatggacagtggagaatataatttccactggtggtaacagtaactgcaatataatgctggttttcttctgatcaatgaacaaactgcagtaacttgatagttgccatgtaactggagacctggtgcaaatatgtttgtgttggtgtttgtaactacgttctaagtgtttagtgtcggaataataaggcttctaattaagccagcagttgaacaacggggaataatttatttcaagcttttgttttgggtgcagc

SEQ ID NO: 27549 - DNA, 2595 bp, Oryza sativa
  ref <308>: DATABASE ACCESSION NUMBER: AK102991
  ref <309>: DATABASE ENTRY DATE: 2002-08-28
gagaaggaagtcccggagggtgcccctgactgtttaactggtttgacatttgtcataagtggcactcttgacagtcttgaacgtgaggaggcaactgatctaatcaagcgttatggaggccgtgtgaccggctctattagcaaaaagacgaattacctattggctgatgaagacgttggtggagtgaaatcaaataaagcgaaagaactgggcgtcccattcctaactgaagatggtttatttgatatgattcggaaatcaaagcctgcaaaggctactgtggcaaaacatcaaagcgacaaaaattcagaaaagcagcaaaaatcaccaatgaagagttctccagttaaagttgaaagaagagatggtaatcaaattaccacaggcaaaaatatttcaccaaagagtaataaaggaagtgcctccattgacaaccaaaaggtcaacattgttgaccgtggttctttgcaatggactgaaaagtatcggcccaaagttccaaatgacatagttgggaaccaatcaatggttaaacagcttcatgattggttgagaagttgggaggaccaattccttcattctggccagaagggtaagggaaagaagcaggctgatagtggagctaaaaaggctgtgttgttgagtggacctccaggtattggtaagaccacaactgctaaagttgtcagtcagatgcttggattgcaggctattgaggttaatgcaagtgatagccgtggtaaggcagactctaagattgagaaaggtgttgggggcagtacatcaaattctatcaaagagcttattagtaatgcaactctgaattatagtaacaaccgattaaaacgacccaaggctgtactagtcatggatgaagttgatggtatgtctgctggagatcgtggtggtgttgctgatcttattgctagcattaagatgtccaagattcctataatttgcatttgcaatgaccgttatagccagaaattgaagagccttgtaaattactgcttgctactcaacttcagaaaaccaaccaagcaacagatgggtaagaggttgatggaaattgccaagaaggaaggtcttcaagctcaagagaatgcaatggaagaacttgcagaaagagtacacggggatattcgcatggctcttaaccatttgcaatatatgagcctctcccagtccgtggtcaaatatgatgatataagacagcgacttaatagtagcacaaaagatgaagatatttcccccttcacggctgttgacaagctgtttggttttaatggtgggagactacggatggatgagagaattgatttgagcatgagcgatcctgatttagtccctctgattatccaggaaaactatatcaattatcggcctatcactgttgggaaggatgacagtggagttaaaagaatgaattttcttgctcgtgctgctgaatctatagcggacgctgatattgttaatgtacaaataagaagatatcgacagtggcaattgtcccaagctgcttgtttgtcttcatctatagttcctgctgctttgatgcatgggaatagagagatccttgaagcaggtgagcgaaacttcaataggtttggtggatggttgggaaagtactcgaccacaaataaaaacataaggctactggaagatgcccatagtcatattcttgcctcccagcaagcaaatttggacagggagtcattgaggctggattacctcactcttctcttgagacaattgactgatccactgaagacaatgcccaaggatgaagctgtgcaaaaagtggtggagtttatggatacctactctttaagccaggaagactttgacacaattgttgaattatcaaaatttaagggtcatccaaatcctatggatggtattcaaccagctgttaaaagcgccttaacaaaagcatacaaacaaggaagtagttctcgtgttgttcgagcagcagatctagtaaatatcccaggcatgaaaaagccattaaagaaacgagtggcagcaatccttgagccagtgggagagagtttgcctgaagaaaatggagtagcgtcatctgaaggcgatgaagaggattcctctgatgctgaaaataatgatgaactggtgcctggtgacacaaaaccaaaactggacctgcagagtgataagaagaaagggatccaagtgcagctcgacctgaagagcaatggcaatggcttgaactcgaagaagatgccggctggtagatcaaaagcttctggctctgctgggaaggctgctggaggctcaggtgggaagaggaagaggtaaacgtccgccggccgccgtcatttagtcggtggtgaatctacatgaacatcctctgatattctggggcagaatgcggttcaaattttcttgcttgtacataagtcccaatcatctttgtaggcagtagtaggcaattggtatctgctccagatattttgtttcctcccacttgtatgagcttcatttcgctctactggcatttggccagttttcagctttgcaagacaacgtccattattgttgacttccgttcaatgaaattgtgtcatgtttgttgcc

SEQ ID NO: 27550 - DNA, 997 bp, Oryza sativa
  ref <308>: DATABASE ACCESSION NUMBER: AK102992
  ref <309>: DATABASE ENTRY DATE: 2002-08-28
gagggttcgcctccgatcttctgccggaacccatagccatgaggacttcccttgttcgtttcttccttactatcctcgccaacacgtttctccattccccctaccagcactcctcacctcctgaatcatcccaatgttcgacgccgcttggtagcgagagtggaggaaagaggaggcgggggaggagggggaagcagaagggcttgggtgaggtggtgtctgttcacgagaagaaggaggcaaaaacatcacctttccccctcctgctgttgtgccgtgcaacgagacggcggatcacagaggtgtatgatgagatgtaccaaattgttcgtgctaaaaggaatgatactggcaaggttcacgagttcattaactgtttggtagatgcaagaaatgaactgctgcacaagtcggagatggttcaaagaagctgcagaataaagaaggccttactatccaacccttgtagtcgcagggctaacagttatgaccgcctctgcgaacaggtgcataaattggaagccgagcacaaaaggctaaagaaggatgcggatatctacaactatattcaagagcagcttcagatgtcagagtcatacaaactgttgattgagcttagtgcgttggtggagaaggccgaacgtgaggatgcccttgccaccgaggccgcagagatgacattcgaggagctgctggctcaggagaagagcgacgccgccttctggcagcgtcacaggaagctgacctcaatcttacccaagtagagtttgataactgaccgcgcgatttcaccatcgtcaatagtagcccgaacccgtaaccagaatttgttcctggtggagcttttaatgttgctagttgcaaccgtggtgtaatgcgcttgccaagctcttgggcgcctgaaagtccagagtccttgaccataaaacctgagagattcaggtggttggctgacgaccagcaaatgctctcatatatcctatctggtacttcggcc

SEQ ID NO: 27551 - DNA, 1416 bp, Oryza sativa
  ref <308>: DATABASE ACCESSION NUMBER: AK102993
  ref <309>: DATABASE ENTRY DATE: 2002-08-28
ggggtcgagagagaggtcagtagtagcgtagtgagcggcggcggcggcggagatggggaagggcggcgagctgtgggacgattcggcgctggtagacgcgttcgaccacgccgtcgccaccttcaaggctatgcatagcaaaaacacccaagcaactacatcggagaatgaggaaccaggagatcctgctgttgctgcccctgctggagaagagaacatttcggctgaggtggccgatgagctcatagagaaggatggtagccagacagaaccttgtgaagcatcggagacaccatatcagacccatgaggaaagaaagtccactgagcaggctcctcttcaggaaaaggatctggataaagaggcacatttttcagaacctaagatccatgcctcagatgttgctgatgctgagcaaaaagatacctcaaaccagcagacctgggactacaatgaattggtaaaaaagtactatgaacttgaggagcaaagccggaaagttcttgagcaactccatcaaacaaactactggaattaccaagtccctggtcaatcttcagtgtaccaacaaccgcaagttcctgcctatagtgccacagcaccagatccgcattcctcaaccattcaatccccatgctgttgtgcgaatgtacccctggtatcagtctcctgctgttcaactggccagacgagtggggtttcttcttgtatgcaaccaagtggtggttgtagcatatcattgacttgtgatcaatgccctggcacaagtgcgacagattctactggagcaacctgtgtgcagcaggcagaaaaggtgtctactgacagtgatcaagttgctaaggctgcaatgatgactgctgaaggtgccatgaatttcatgagaagtacgatatctggagacttgggctcctttccaagaacagacgctgcatctggaaaggagagcatgcctatgggcatgaatccaaattttgacaccatgggagcagatagtgatcttgctgttgtcttaaatgcatggtacgcagcggggttttacactggcaggtacctcatgcagcagtccatgaaaaataccagacaaggctgacttctattaaaaagccatttggagtatcgccaaagatgtcctttccactccagaaaaatcaagagatctattgacaactcgtggaactgaacattccattagcatatgtaatgctatcagtgcttttctagcaagagttatggtacaattatacatgaatttgctgtaaggctctgattagacattaaggagaaacgatggtactgatcattttgctatccaaatctatcagatgatctgtagaaacaagcgatccctgtgtgatggttttgctatttgccgcccaaatctgcgttgaaaatgaaatgtacagtttttagact

SEQ ID NO: 27552 - DNA, 1547 bp, Oryza sativa
  ref <308>: DATABASE ACCESSION NUMBER: AK102994
  ref <309>: DATABASE ENTRY DATE: 2002-08-28
ggaaggaaaagaaaaaaaaaggaaaagaaaagaaaagaaaagagagagaaggtgtggtggtggaaggaaccctagcggcggcgaccggctccgatggcccctccaccgccgtctccgtccccatctccggcgagcggcgcgcagtacgcgcaccagttcctgaacacggcgctctcccagcgcgggccctccgccctgccctacgcggaggacgtgaagtggctgatccgcaaccacctcgtcgccctcgccgacgctttcccctcgctccaccccaaggccgccctcttcacccacaacgacggccgcgccgcccacctcctccaggccgacggcaccatccccatccaccacgccggcgcctcctacaacctccccgctgtcctctggctcccggagccctacccgcggtcgccgcccctcgtcttcctctccccaacacgcgacatggtcatcaagccccaccaccccctcgtcgaccgctccggcctcgtcgccaacgccccttacctccgctcttgggttttcccctcctccaacctcgtcgatctcgtccgatccctctctcacctgttcggcctcgacccgcccctcttcaccaggagccccaatcccccacccccttccccttccccgccgatccctgccaccccgctccctcgcgtccacccctcctcctcctcctccccctccccatccccctacagattccctgcctcgccccagcttgccgcgcgccccccacccaccgaagaccccgctgaggtctacaagcgcaatgccatcgctaagctcgttgacatggcctatgccgatgccgccacgctgcgcccagtccgcgaggctgaggtcgacactctcttcgccatgcaggctacgctgcgcagccggggggaggtggtctctgatggggtgcgcaagatgggggaggagaaggaggcacttgagcgccgcctgcaggatgtaatgatggccacggacctcatggaggcgtgggtcatggagaacaccaagggtgctgccggcgacactgaagcggacgaggcaattgagaccgcagatgtactgtctaagcagatgcttgagtgcactgctgcggatttggcactcgaggacaccatttatgcgcttgacaaggccattcaggagggttctgtgccatttgatggctacctcaggagcgtgcgagcgcttgcacgggagcagtttttccaacgcgtcctgtcaaccaaggtgaacaaggcacaacaacaggctcaggttgctagaatggctgctcgggcaccacagtatgcatcataggaccggtgaggggtaacttgagtatacttactttgatattgcctttgtctaccaactctactatagctgtcacagtgtaaagttcgtttgctctttgcacatcttttttggggtggatgggggttacttactagatattggatggatgatcccatgtcaaataagaaccttagttgggagtgctgcactggatcttgtgtacgatttctgtacttcaatacatatcttcagttttgttctttgtg

SEQ ID NO: 27553 - DNA, 2400 bp, Oryza sativa
  ref <308>: DATABASE ACCESSION NUMBER: AK102995
  ref <309>: DATABASE ENTRY DATE: 2002-08-28
ggttggcttccagaagcttctagaaggtgcccgaggcgtcgtctcggtcgagcgccatggatctggaccccgagggcctcttccgcgacgacagcgacgaggatgacgacaacgtccaggagagggaggccaacaaggagatggtcgtctacctcatcgacgcctcgcccaagatgttcacccctgcgaccaaggcagatgaaaaggaggagacacattttcatacgatagtgaactgcatcacacatgcgctgaagacgcagattatcggtagatcctatgatgaagtcgctatatgtttctttaacacgaaagaaaagaagaatttacaggaattggctggtgtttatgtttataatgttacagagagagaaccacttgataggcctgatgcaagattgattaaggaattttcttgtatagaagattcttttatgagtaatattggaagtcggtacggaataacttctggatctcgagagaataccttgtacaatgctctttgggttgcacaggcattgctgcgtaaaggatctgtgaagactgtgagtaagcggattgttatattcaccaacgaagatgatccttttggtggtcttacaggagcagtaaagactgatatgataaggacaacaatccaacgtgcaagagatgcacaagatcttggcctgtccattgaacttcttcctttgagtaggcccgatgaggagttcaacatgtccctgttttatgcagatttaattggtctggagggagatgaaatagtggattatctgccatcttctggtgaaaagctggaggatatgactaatcagctgaaaaaacgaatgatgaagaaacgcaaagtcaaaactcttgcatttgcaattaccaatgatgtttgcatagaggtgaatacatatgcgctaatccgttcaactactccaggggcaattacatggcttgattctatcagcaacctgccattgaaggctgaaaggtctttcatatgcaatgacactggggcccttattcaggatccacaaaagcgcttccaggtgtacaatgagtaagtacacacatgagactggtgaaccaaagcggtgttatttttgtataattttctgggttgggttctgtgatctgcttcttgattgcttcatcaagcgcagaagtctacagttatgagtcatggcacgatcattgtctcgtcattccgtcatgttgttccttttccgtttcagtttgatgcttatatttgtaatccaaaactactttatcatatattcatgcacttttttgcacagcaaaattgttaaattctctactcgtgaattgtctgatgtgaagagggtttcaagtcatcatctacgccttttaggattcaagccactggactaccttaaagattatcacaacttaagaccgtcaacatttatttaccccagtgatgaggtaataacattacttcatgtacttcttaacttcaatcttgaggccctcttggcacagctccggatccaagatttcttggagctgggtattccgagctccacaaatccatggatctggatctgtgattacgttgataaacatttggataaatcatcttgttcccatttaaaattttaaatcactataatttaatacacaaacttcaaatctaccgtttgagttacagtttgaagttatactagtacaattatctccttcatcttaatttttttttgtcaaacacgcaggagagctgcgtagtcttgacaatattttgttatcttgttcgtttgttccctagattattgtacttctctagcttgaagcaataatataatagttgaaaaccttaatcattttatttgatgatattatttttcataataaaagatctatttgtgttcgatacacatccctgctgcatgctacttccaaactaaactaaatctgtctgaacatatttaggattgtattgtggtgtatgcttatttctttctcagtctttacttaaatctagggtgcatgttaggtttacctccttttgtttgatgcagcaaatatttggaagcactcgtgttttcgttgctttacatagctcaatgcggcgtcttggaaggttaagtcgacttattatatttctgccataatttctttaattttgaaagggtttagaaactgacatagttataaatggacataatgtatgtcaagtcataaaatgtactgtggattaaattaattaacattactgctcattttttgggataattagtgaggggatgcaattgaaaggggatgttagttttgttgaaatatcactctatgcgatagttatctcaaattacagctcactagtaatatgcccgtgctaaatgctacggtccaattttatttgtctttaataattttcaaaacgtcatgttagcc

SEQ ID NO: 27554 - DNA, 3466 bp, Oryza sativa
  ref <308>: DATABASE ACCESSION NUMBER: AK102996
  ref <309>: DATABASE ENTRY DATE: 2002-08-28
ggttgggttgctccctctctcatctctagtcttcttccccattcaccaacacaaccagcagccacctcctcctcttcttccccaactttctgcttgatctccacctccactgccgccccgccgcccaatccaccaccaccggcggcggcggaggtcaacgccggccaccctcgtcgacgcccccccacatcagctcagcgacgggcattgggggtcgctggtgtgttgctgctgctgtcgaggtagggtggtggaggtggagggatggtgctgggactgggtgtagccaaccagccagccatgggtaacagcacctccagggtcgttggctgcttcgcaccagcagacaaggccgccggtggcggcgtcggtttggagttcctgcagccgctggacgaaggactcggccattccttctgctatgtccgcccaggggccatcactgactcgccggccatcacgccatccaactccgagaggtacacgctcgactcctccgtgctggattcggagacccgcagcgggtcattccggcaggaggttgtcgttgtcgacgacctggcggcggcagccatggccgggttgcagaggccgagcaagagtttctcggagaccaccttccggacgatctcgggggcctccgtcagcgccaacccgtcctcggctcggacaggcaatctgtgtgtgtcccttgctgctgatgtgcaggagcctgccgccgcattcgagagcaccgcctctttcgccgccgttccgttgcagccggtgccacggggatcagggccgctcaataccttcttgtcagggccgcttgagagaggatttgcgtcggggccgctggacaaaggcgctgggttcatgtctgggccactggataaaggagtcttcatgtctggtcctattgacagtggcaacaaaagcaacttctcggcacctctttcgtatggtcggaggaaggctggtctcggacagcttgtacgtagcattagcagaccgatgagaagtgcgctgtcaagaacatttagtaggagctcacaaggtactggttgggtccaaagatttctgttgcatcctatggctcaactgagcttgtcgagggatgcaaagggcacttcggaagattcacataatgggttggaagctgggctccctgagcttgagtatagtgtaacaaggaacctgcagtgggctcatggcaaggcaggagaggatagggttcatgttgtcctctctgaagagcaagggtggttgtttattggaatttatgatggttttagcggtccggatgcaccggacttcttaatgagcaatctatacaaggccattgataaagagctggaaggactgctctgggtttatgaagacagtcctgaagggagtgctcaagtatctactcttggagagggtgaatccgttgcagttcctcaggacctgcctgatggaggtgacattctgttccaagctgatagtgttgaatcagaacaacttgttaattctgaggaacaagatgtatccaatgtgaagataagtgatgggggtgcttcgcaagttcagatggatttgaacaccagtggtcagagagatttagtgttgcaggcttcaagtaatcagaagttgaatgctggtgaaatagtcgaggaaaaggtgggggctgatatggggaataatctccagagtacagagtcttataactctggtagagatatttcaaatacagatgtaaacactagctttggttgtacatcagatgtaaacactagtacttgttgtaatgaagatgtcaaatcaccgaaagaaatcaggagcagacgactttttgagctacttgagatggaattgctcgaagaatataatagaaatgtttccaaattatcaccagagggaatgaaagggaggagcatatttaatatgcaggcaggaactacagaagaaagctctagggatatagccgagctctctaggtcttcaatggcagcaactggagaatgtcttgatgattttgagaatgataaacattcaagatcaggtgacggtgtgcttggggtagatccaaaagagtgtaatgaatgctcaatttcatcatcgtcatcagggcacaaacaaattctgagaagatatttgtttgggtcaaagctgaggaagatgtacaagaagcaaaaattgttgcagaagaagtttttcccttggaactatgattggcatagagaccaacctcatgttgatgaaagtgttatcaaaccttctgaagttactaggagatgcaaatcaggaccagtagaccacgatgctgtattgagggcaatgtcacgggcgcttgaaaacactgaggaagcatacatggacgtagtggaaagggagcttgataaaaatcctgagctcgcgttgatgggttcatgtgtgcttgtgatgttgatgaaagatcaggatgtatatgttatgaatcttggagatagccgagttgtcttggcacaagataatgagcaatacaataactcaagcttcttaaagggtgatttaagacatcgtaacaggtcaagggagtcacttgttcgtgttgaacttgataggatatctgaggagtcaccaatgcataatcctaatagccacctaagcagcaacacaaaaactaaggaattgactatttgtaaattaaagatgagagcagttcaactatcgactgatcatagtacaagtgttgaggaggaagtctcgaggattagggcagaacatcctgacgaccctcaatctgtatttaatgacagggtgaaaggacagttgaaggttacaagagcgtttggtgcaggttttctaaagaagccaaaatttaatgacatactacttgagatgtttcgcatcgactatgttggaacatcatcatatatcagctgcaaccctgctgtccttcaccaccgtctttgctcaaatgaccggtttcttgtcctgtcctcagatggactgtatcaatatttcagcaatgatgaggttgtttcacatgttgcatggtttatggaaaatgtaccagagggtgatcctgctcaataccttgtagccgagctgttatgccgtgcagcaaaaaagaatggcatggactttcatgagttgctggatatccctcagggtgatcgccgaaaataccatgatgatgtttctgttatggtaatttcccttgaaggcagaatttggcgatcttctggttgagcatcaagatgtgacttggtctgttccttgcagcctcacttagcgtagtgaattatcaatcagaaaaggcatcattgtcttgttcattgtcttcagtttttgaagttctgatcaaatttcattaggcaatacatagtgctttttctgccttaacattttggatttgtggtgcatgcttggccagtccaactttgacttatacatgtttcttgtttcttattagtaaaaaggttcatttttgtggggatttttattccctgtgccttct

SEQ ID NO: 27555 - DNA, 1639 bp, Oryza sativa
  ref <308>: DATABASE ACCESSION NUMBER: AK102997
  ref <309>: DATABASE ENTRY DATE: 2002-08-28
gggctgttcctcctcctccttcccccgatccccaactccttccaactcacatggcggcggcggcggcggctgcgtccgtggcgagtcaagcgcaggccgtgctccgcggcaggctctgcgaccaggccgtcgtccactccgccctcaggtcctcgccggacaccaactacagtaagctgaagtacctcgtcgccagctccgtctccgaagcctgcaacaactccgtcctactcctcggcccccgcggctgcggaaaagccgcggtgaggttttccttcctagtatactcttctgccccactttcagcggttttctcggatgcgggggtggtgttcgacgaaatgtgccagtgggcgatctacgactttacgctatgggttgtttcggcatggactgaggtggtcgacatggttctagatgatctgaagaaggatcatcctgatgcaatatcagtgatcaggctgaatgggatgctacatagtgatgacaactgtgccacgaaggaaattgcgaggcaactttgtttggaacatcagttatcattttccaaaatggcttcttcagatgacaacacggaattcatgattgacatgttacgggagtgtggactagctcacaagacaataatttttgtcctagaagagtttgacctctttgctcaggggaagcagaggttactctatagcttacttgatgcaatgcaatctctcacctcacaagctgttgttattggtgtgagttgccgattggatgcagaccaactcctagagaaaagggttagatcccggttctctcataggaagcttctgtttgttccttcttcagtggatagtttacagaggttaatggagcacttgctagcacttcctgaagattctcccttaccaacaaagtatgtcagggagtacaatgcacggattactagcattttcaatgacaaaaagttcaaaggaattctcagctccctcactgatgctgacgcaacaacaagccacatccttagatttcttttcagagtggtgtcatacatggacatagattctggacttctgtcaatgcaaagcttcatgaatgcgctatcttcgatgcagaggcagcctaagatggacagtttgcaagatctctccattttggaactatacattcttgtatgcatgaacaggctagaagataaggagaaaagttcatacaactttatcactattatgaaagagtacaaatctgtgcaggatgcctacaaaacgtcggacaaatattcacacactgtttgttttagagcttttgagcatcttttggatcgcgagttgattagctttgcagacaacaaagggagaaatcaggcgcttgaatatcgtcctgtcaaacttctgatatcttcacgtgagcttgctgagtccctcaagttgaacacgacctgccctgctgttttgcagaagcttcttgaccgtgaaagatacatgtaaaagtttctatatgtttgctaagttgatactggttcaagtgctggcatacttctttcttctttgttactccctaacaccgtgttggaacatcctatctactgcaaagagatttaccttgaagatgaaaaaggtatatcggtctctggcaaggtaacaaactaacaacacaccatttc

SEQ ID NO: 27556 - DNA, 816 bp, Oryza sativa
  ref <308>: DATABASE ACCESSION NUMBER: AK102998
  ref <309>: DATABASE ENTRY DATE: 2002-08-28
tgatccagtgtgagctccgtttcttgctccatccatctatccatccaaggagtgtggaacgccacacgtattttttttttatctatgctaatctgatcattagcagaggagagttttagcagtaggattggattaaattggagtagtttcatagtttgtgtgtagtgatcttaattagctttgattagacagacagtacagtagagtagaggatgttggctgtgttcagcggcgcggtggtggaggtgccggcggagctggtggccgccggcagccggacgccgtcgcccaagacgcgggcgtcggagctggtcggccgcttcctcgccgccgccgagccggccgtgtccctgcagctcggcgaccttggccacctcgcctactcccacgccaaccaatccctcctccgcccaaggtatactagctgctgcttctactctgcttcagctgaaattgctgaaaaaacatctgccgttttctttaccctgaactccccaagtcctggatttcacgagatctagctaagaacagagccaagaattgattgctctctgtggctagatcagttaactgttcatcctgagaggctgagacagagtcatttactctgaatttgttcttcagttagtgtctcggtgaagtctcatggtgatgagatttaatagttagtctctgcaagaagacaatctaagttggtggttgagataagcttttgcaagttgcaacaggctcactgttcttggcaacactagtcactgcgtggtgggcgacagcttttcatccaaggggaaaaaaaaatctgaggacatgttgctg

SEQ ID NO: 27557 - DNA, 2484 bp, Oryza sativa
  ref <308>: DATABASE ACCESSION NUMBER: AK102999
  ref <309>: DATABASE ENTRY DATE: 2002-08-28
ggtgttcgagcaaatgcctcctccagtctcctccccgtcggctccgcgcctctcgccgtccgcggcgcgcgcggccgagcagcattgcctccgcctcctcgcggcctcctcgacgcccacgtccctcctccagtcggtcgccttcctcctcaagtccggcctccacgccaactcgctcgtcctcacccggctcttcgccgcctccgcctccgccgcgcccgcgctgctcgatcccctcgtcaccgccctcctccgcccctccgtcccgctcgacgccttcctcgccaacaccctcatccgcgcccacgccacctccccgatccactccctccgcctccgcgccgccgccttcttccccctcatgctccgcggcgccgtcgttcccaacaagttcaccttccccttcctcctcaaggcgtgcgccgcgctcccgggatccccggacgtcggcctccaggcccacgccgccgctctcaagttcgggttcgcgacggatcagtacgtctccaatactctcatacacatgtactcctgctttggcggcgggttccttggcgacgcgcggaatgtgtttgatagaatgcccaaggagagtgccgttacctggagtgcgatgatcggcgggtatgtgcgtggggggctgtcgagtgatgctgtcgatctcttcagggagatgcaggccaatggggtacaggccgatgaggtgacagtgattggagtcctggcggcggccacagatttgggtgcacttgagctggctcgatgggtccgacgctttgtggagagagaggggatcgggaagtctgtgacactgtgcaatgcactgatcgacacgcttgctaagtgtggagatgtggatggggcggtggctgtgtttgaggggatgcagcagcggagtgttgtttcatggacatcggtgattgatgcgcttgcgatggagggtcgtgggaaggaggctgtgcgagtgtttgaagagatgaaggttgcaggtgttccacctgatgatgttgccttcattggggtgctcacagcttgcagccatgctggtatggtggatgaaggctgtggctactttgatgccatgaaagtggagtatggcattgagcctaagattgagcactatggttgcatggttgacatgtttggtcgggctggcatggttgagcgggcgatggaattcgtccgtacaatgcctatacaaccgaacccagtaatatggcgatcacttgtttctgcttgtcgtgcgcatggccgccttgagctaggtgaaagcatcacaaggagccttcttcatgagtacccggcccatgaggccaactatatcatgctctcgaatgtctttgcactaacacagagatggaaggagaagtcagagataaggagagagatgagcaagagaggaatcaagaaagtgccaggctgtagtatagttgagcttgatggagaggtccatgagttcatagccggagatgagtctcacccgcagtacaaggatatataccggatggttgaggaaatggcaagagagctaaggcgcgttgggcacattgcagctacctcagaggtcttacttgatcttgatgaggaagataaggagggtgcacttcagtggcacagtgagaagctggcaattgcatttgcactactgagaactcctcctggaacacaggtccgagtggttaagaacctacgtgtgtgctcggattgtcatgcagctataaagtgcatttcacaggtttatcgacgggagattgtagtgcgtgaccggagtcgtttccatcgcttcaaggatggttcctgctcatgcaaggatttctggtgatgaaattgtgttttacaaggttattctgttttggacaagatgctaatgaattttccagggagctcctgcaagtctcacacatctgcattgcaacacaaaggttttccacagaaaaatgtgatgcttattcaaggacgatggaatcagaattggaatataattcagaaaatatcaattatcaaggttgaacttttcttttgtacatacaccaatagattggatcgatcaatcctgaggcatcattaaattttgatctctcgacagtgtgaggttatggattctgcccgccgcatgcatgaaaatgggatcttgatctatctggagcataataaatgactggtgttagccccatggcttgaacgatggttcctgctgcaaagaattccggtgatggaactttgattgaccaaggttgtggaaaaccaaggggagtgctacgactttacgacagacaagaacgttatgtttggaggggtggaattttgggactagattgggcacatttcagaagaacacgaacttttctttttattttttgccctaaacaggacagcatgtgagcttggtgggatagagttcggtggttgctggtcggaaatgagatgtaagatcatttgaagaactgagagaagaacatggtagaattgcagagagccagtgac

SEQ ID NO: 27558 - DNA, 3833 bp, Oryza sativa
  ref <308>: DATABASE ACCESSION NUMBER: AK103000
  ref <309>: DATABASE ENTRY DATE: 2002-08-28
gattttgcacccctggttttgtgatgtcgatgtatgcattgctgagatcaagtgaacagcctcctactgaagagcagattgaagatagccttgcaggaaatttatgtcgctgtactggctacagaccaataatagacgccttccgtgttttctcgaaaagagatgatcttttgtacaacaattcatctctgaaaaatgcagatggccgacctatctgcccttcaacaggaaaaccatgttcctgcggagatcagaaagacatcaatggtagtgaatcttcattattgacacctacgaaaagctactcaccttgttcatacaatgagattgatggaaatgcgtacagtgagaaagaactcattttccccccagaacttcagttgagaaaagttacgtcacttaaattgaatgggtttaatgggattcggtggtatagacctcttaaactaaagcaagtattgcatttgaaagcatgctacccaaatgcaaaactaatcattggtaactctgaagtaggagttgaaacaaagttcaagaatgcccagtataaggtcttgatctcagttactcatgttccagagcttcatacccttaaagtgaaagaggatggtatacatattggttcttctgtaagacttgcacagctccaaaatttcctcagaaaggttattttagagcgtgattcacatgaaatttcatcctgtgaggcaatactgcggcaattaaaatggtttgctgggacacaaatcaggaatgttgcttctgttggaggtaacatttgtactgctagtccaatatcagatctaaatccactttggatggctacaggtgcaacgtttgagataattgatgtgaacaataatattaggaccattcctgcaaaagatttttttctgggttatcgtaaagttgacttaaaacctgatgagatattgctctctgttatactgccatggacaaggccatttgaatttgtcaaagaattcaagcaggcacatagaagggaggatgacattgcgttggtgaatgctgggatgcgtgtctatataagaaaagttgaaggtgattggataatttcggatgtttcaattatctatggaggggtagctgcagtttcacaccgtgcttcaaaaactgaaacctttctcactggaaaaaaatgggactatggattgttggataagacttttgatctgttgaaagaagacgtagttctggctgaaaatgcacctggtggaatggttgaatttcgcagttcacctactttgagtttctttttcaaatttttccttcatgttactcatgaaatgaatataaaaggattttggaaggatggattacatgcaaccaatctttcagccatacagtctttcactagacctgtcggtgttggaactcaatgttatgaattggttagacaaggaactgcagttggccaacctgtggttcacacatcagctatgcttcaggttactggtgaagcggaatatactgatgacacaccgacaccccccaataccttgcatgctgctctggtgctgagtacgaaagctcacgcacgcatattatctattgatgcttcacttgccaaatcttcccctgggtttgcgggtctcttcctttcaaaagacgtgcctggcgctaaccatactgggcctgttatccatgacgaggaggtttttgcatctgatgttgttacatgtgttggccagattgttggacttgttgtggcagatacccgtgataatgcaaaagctgctgcaaataaagtcaatattgagtattctgaacttccagcaattttatccatagaggaagctgtgaaagctggtagctttcatccaaatagcaagagatgcctagtaaaaggtaatgttgaacaatgttttctgtcgggtgcatgcgatagaattatagaaggaaaagtacaagttggaggtcaagagcacttctacatggagcctcagagcactcttgtatggccagttgattctggaaatgaaattcatatgatttcatctacccaggctccccagaagcaccaaaagtatgttgctaatgttcttggtcttccacaatcaagagttgtttgcaagactaagcgtattggtggtggatttggtggaaaagaaaccagatcagcaatatttgctgcagcagcatctgtagctgcttattgtttaaggcagcctgtaaagcttgttttggacagggatattgacatgatgacaactggacagaggcacagtttcctagggaagtacaaggtgggatttaccgatgatgggaagatattggccttagaccttgatgtttataacaatggtggtcattcacatgatttgtcccttccagtcctggagcgtgctatgtttcattcagacaatgtctatgatataccaaatgtcagagtcaatgggcaagtatgtttcacaaatttcccaagcaatactgctttcagaggttttggtggtccacaagctatgctgattgcagagaattggattcagcacatggctacagaactcaagcgaagtcctgaggagataaaagaacttaattttcaaagtgagggatctgtgcttcattatggccagttgcttcaaaattgtacaatacattcagtatgggatgaactaaaggtttcttgtaattttatggaagctcgcaaagctgtaattgattttaacaataataaccgttggagaaagcgtggcattgctatggttcccaccaagtttgggatatccttcactacaaaattcatgaatcaggctggtgctttagtgcaagtttacactgatggaactgtccttgtaacgcatggtggggttgaaatggggcagggtttacacacaaaggtagcccaagttgcggcttcatcattcaatatccctcttagctctatatttatctcagaaacaagcactgataaggtaccaaatgcaacaccaacagcagcctctgctagttcagatttatatggtgctgcagttttggatgcttgtcagcaaattatggctcggatggaacctgttgcttcaagaggaaaccacaagtcctttgctgagttggttctagcatgctacctggaaaggatagatctctctgctcatggattttatatcactcctgatgttgggtttgactgggtgtctggcaagggaactccattctactatttcacatacggagcagcatttgcagaagttgaaattgataccctaactggggatttccacacaaggacagtagatattgttatggatcttggctgttcaattaatccggctattgatattggccagattgaaggaggttttatccaaggattaggttgggcggccctggaagaactaaaatggggggatgataaccacaagtggattcgacctggacatcttttcacttgtgggcctggctcttacaaaataccctctgtaaatgatatacctctaaacttcaaggtctcacttttgaagggcgttttgaatccaaaggtcattcactcatccaaggctgtaggagagccaccgtttttcctcggttcagccgtcttgtttgccataaaggatgcgatatctgccgcaagagctgaggagggtcacttcgactggttcccactcgacagcccagcaacaccggaaagaataagaatggcatgcgtggattccatcacaaagaaatttgctagcgtatattaccgtcccaagcttagtgtatagtggctactgccaaagtacaagggtcattaaaggtttatgcttgtcgtacgtatatttgtacagtcccaagctactgtgtaaacataaatataggcgacagattagggg

SEQ ID NO: 27559 - DNA, 831 bp, Oryza sativa
  ref <308>: DATABASE ACCESSION NUMBER: AK103001
  ref <309>: DATABASE ENTRY DATE: 2002-08-28
gtgtacacacgagatctcatcgatcagtcacagtgacgcagtgagcactagcttccactgctcgcatcgcttgtcatcatcatcagttcatcaccaatggccaccgtcgaggtccaagcagtcgccgccgcgcctagtctggcggcggaggaggctccggccgtggtggaggctgtccaggaccaggagccggtcgtcgccgccgttgaggaagaagaagccaccgccgccgccgctgcggctgcggctgcgcaggtcgaagagacaaagccggcagatgatcaggctgcggctgctccggcggagactgtggctgaggccgaggcagaggccaaagaggcagagcctgcagccgccgaggaggccgagccggaggcggagacggcgccgccggcggcgatcgccgaggccgaggcaggtgaggcgaaagaaccggagccagaggcagaggcagaggcggcggccgctcccgtcgaagaagctgctgcggcgcccgtcgaggtggcggaggaggctgaggcggcgccaccggccgcacccgaggtggctgccgtcgaggccaccgagtgagctggcgagagatggcgagccggagatgaagctgatggctgccggcggcggcggcggcggcggcggcgtacgtgtgtgttgtgtaatgaattgggctccaataaaaatgtgtcaggttggctaccgggcccagtgtcagtaggtgctgacgtggcaggtcatcactggccctggagctcgtgcccgtgtatgttctcggtctgtgttgtggtttcatcgttaaaaatgctagtaataattttccgtatctttttttttgtt

SEQ ID NO: 27560 - DNA, 834 bp, Oryza sativa
  ref <308>: DATABASE ACCESSION NUMBER: AK103002
  ref <309>: DATABASE ENTRY DATE: 2002-08-28
gccggctctgttgcatcgacagggcagcgcaaccaagcacaagctagtcaggagcttcttcttcttcagagctagtagcttggacgacacactcccgggtttcggagagaagagagagagcccaatatgtgcatggaccgagctgccgtgccggtgaagagggtgtggctcggcctcgccgcgcgcctcggcctccggcgaaccagcgggctggggaagctgaagaaggaggtgaggacgtgcgagtaccacgacgtgcacatcatgtgggagatgctgaggaagacggacgcgccggtgcccatggcggagaaggaggccgccgccgccgcggccgtcgcggcggccgccggcgcccggaggaggaaggcggcgtggagacggttcctctactactgctgcgcgttctaattagcctcagggatgaatcaacaacaccaaagatcaatcgagcactgctcgatcggttgctttctggcctcgccgccgcctcggttcttcccagctcggactcgatcggctcccggcgagcttcgaatgaagctcgtcgtgttcttgattcgaggctgtcccggcgaagttttgctgagaccaatcgtcccggcaaaagaggggctgcgaaccagaacgaaatggcacatattgcagaggttttgcaaacttgaaataataagtatagagacagaaacgatgatcacgatctcgagtcgatcgatcatcaaatcgagatgtaaaaagtcaaataaaaagattttggttttctttttatctatgtcagtgaaatttctgctcatcacaaccagaagatctttgtcagtacagaagagatcttcc

SEQ ID NO: 27561 - DNA, 2419 bp, Oryza sativa
  ref <308>: DATABASE ACCESSION NUMBER: AK103003
  ref <309>: DATABASE ENTRY DATE: 2002-08-28
gaccctccctactctctccacttccactctcaccggccaccgcgcgctctctctctctctctcccccttctcccgcaagattcttcccccaaatcccacccgatccaccgccgccgcccgctcgccggagtcccatcgctgccaccgccgccggagccgcggcccgacgcccgccgggcctgcttgctgtgtgtgtgaggaggtggagttgctcgcgctcgttcccgcggccacctccgcctgctgctgcttctgcttccgctggcattgcggggaggtcgtgtgccgggggacgtgggggctcgtgttggagcgcggctgccggtgaggtggggggtgcggcgcggcgcggctcgcgcttgtgcgccggtggcgcgggcgcggggggaagcgtacgggggagggggagtgtggcggcggcggcgcgcggggtagggacgggcgccgccaccaccaccggctcgttcgctggcaggcgctacgcgtccagatccgtacgccggttgttgagaagtgaagatgtcgacaggtgaaaccctgcgtgcagagctatcatccaggacgccgcctttcggtttgaggctatggattgtgattggaatcagtatttgggtggtgatcttctttatactaggtttcatgtgcctctggtccatataccgaaggaagccgaagaagtcctttgataagattccagtatctcaaatcccggatgtttccaaggagattgcagtagatgaagttcgtgagcatgctgttgtcgaaaacttccgtgtgcaagaaagccacgcgatatcggtgcaggagaaacattacgagaaagattcagggaaaatgctggcacacttggttaggagtaaatcgagtgatgccgataatttgagccaatgcagctcggtgtaccaatgtgatagggctggtagctcgtattctggtgatgaaggcagctcgggcaatgctaggaggcacttttctcaatatgcaactgtctcagcatcccctctggttggtctcccagaattctctcatctgggctggggtcattggtttactctgagagatttggagcatgcaacaaatcggttttccaaggagaatgtcattggagagggtggatatggggtagtttaccgtggtcgactcataaatggaactgacgtcgcaataaagaagcttcttaataatatgggccaggcagaaaaggagttcagggttgaagttgaggctattggccacgtcaggcataagaatcttgtccgccttctaggatattgtgttgagggaatccacaggatgcttgtatacgaatatgtgaataacgggaacttagaacagtggcttcatggtgccatgcgccaacatggtgttcttacctgggaagcccgaatgaaagttgttcttggaattgctaaagcgcttgcttatttacatgaagcaatagagccaaaagttgtacaccgggatatcaaatcaagcaacatactaatcgatgaagaattcaatggcaaactttctgattttggcttggctaagatgctgggtgcagggaagagccatatcacaactcgagttatgggaacttttgggtatgtggcccctgagtatgccaacacaggtctgttaaacgagaagagtgatgtctacagttttggtgtgctattactggaagcagtgactggtagagatccagttgattatggccggcctgctaatgaggtgcatctagtggagtggctcaaaatgatggttggcacaagaagatctgaagaggtagttgaccctgacatggaggtcaaaccgaccattcgggctcttaagcgtgctctcctagtggcactgaggtgcgtcgacccagactctgagaaaagacctactatgggtcatgttgttcggatgctcgaggcagaagatgtcccatcccgtgaggaccggaggagccggaggggcaacactgccaatgcagataccgagtccaagacaagctcaagcgaattcgagataagtggcgatagaagggactcagggccatcagcaaggtttcaaccctaagaagacggtgatcatagtcaagaacaatggcttcaaaactctatgcagtaacatggtggttggcagagaaaaaggggtatttctggagggcattgcattttgtattgtaggtctgcatggcggtagagactggagagagcacagtgtctgatgatggatacccggagacctgtaattcccattcagtattctgtttgctagtcaagcagcttgtacagatcgttgtctgttccattttttcattcttctggtttttttgtttaggaggctcttggattaccagtacgaaccgctgtctcttttctagaatcaccaacatggaacctatcaatatttactactagtactacgacttgctttcttcttgctg

SEQ ID NO: 27562 - DNA, 3485 bp, Oryza sativa
  ref <308>: DATABASE ACCESSION NUMBER: AK103004
  ref <309>: DATABASE ENTRY DATE: 2002-08-28
aatcataatttgtttttcactccctaatccccctccagtccaccgcccgcgatgagcgccgccgcggaggggaggccgccggcggcggcggcggcgggtgagatggtgcgggaggccaccgcgtggtgcgcgctgcacgggctcgtcgtcggcgaccgcgccgaccctgtaacgcctcttctcctcctaatttggtttcacaaatcgcaagcgcctccctctcgcctccatggagaggttgggatctgttcttggatcggctaaggatagttttaccaagatcgagctataggttggactcgtgattctttcacggtttgagtagttactggtgaggtatacatgagtagcagtgtagcactgtgagtggctgagagtttactaataattttgtttcatcgcacctcttgattactgataatttcctatacagatgatgtaggaaacacagaaatatatgtctgcaattttgtttccgaaagagcaaccataattgtcgggaaaagtacatgagatgttataacattctctttgattcagctatcttgaaaaaccactactttgtttatagtacccaatttcttcggtaaaaccactactttgtttcttggacttcttaggttactttgttttggtttaggtagcgcatttctgcatttcactcttggtttggctgtgcttaatgtcttttggcagaatggtagtactagatacagaaaacatggttgcctcagaatcaactgttgagtaatatagtgaaattttgtggtaaaccttcatgcgatgaactgaattgaggtgtttgaaaagcatttgtcctgattataacattgtcattgatctctttcagcgatctggaacagtccccggcgttggtttggttcatgctcctttctctctgctcccaacgcatcttccagaatctcattggaggcaggcgtgcgagttggctcctatttttaacgagcttgtggatcgtgttagcttggacggggacttcttgcaagattctttgtctaaaacaaagcaagttgacgatttcacttctaggctgttagagattcataggaagatgatggaaataaataaggaggagaatatccggttggggttgcatcggtcagactatatgcttgattcagagaccaattctcttcttcaaatagagctcaacactatttcagcatctttccctgggcttggttccttagtaagtgagcttcacaggtaaaatctaacaatcaatatatttagtagagctatactgctatgttttaatgtgctggcattctacatgttatgagaactctgccttgagataaaatggaaggtggcatgcacatggtttctatgtttgaatatatgttttcaatgctgtttaaaaaagaatgccacgttgtacttcactgttaaaaaatggcttaatatatatttaaatacagatgtttaggaacttctaactagatttacacattgcagagctgtattcctttttctgtgcacctgatatttaaatatgctccagtattcaaaacgaatgtcctgtgtcctcattagttgactaggtattgcagccataccactgatattggtatgcaatatcaaatttgtaatcgtaatgagattatatgtaagatatatatagtgcatcttctgcatccctctctagtactcaactttcttaagaaggtacagcactaaagatttccttcaagtgctgtagtgctccaacttccatgccagtgaaagaaaattgaggaactttctccctagtttctttcataaagtaggagtaactttcatttgttacctctgaatattttctccctatcaatgtgcagcattaccattgggtcatcaatatgatgaataccaaccgagtgttcactaattgccatgcaggaccttaattgatcagtatggacacttattttgtctagactccaagagggttcctggaaatgaggcaagcagtcaatttgctaaagcattggccagagcatgggatgagtttaatgttgacagtgctgtaattatgatgattgttcagcccgaagaaagaaatatgtatgaccagtactggctcgccaaacatttgaaggaatcatatccttttatgctctttttatcttctacctggtactttttctagtatgcagaaacttaattggactaccgtactttcttgctttcctgtaaataacctagagcccactttgtgctgtccttttgtttttgcattataactaaagtttagtacccactatacttgcttgtctccaatatggtgcccaagaacttgctttgcagtttgtctgctaggctcactaaaatgtttgatactctttgggcattgtttcaagggtttggcaagcatttgttttctaaaattttatattctattagaggtccaaacataaaatttacactcccttaacaattcattacacatggcataacgactatcaggaaaactttgtcagaggtagaggctgaaggccacgttctcccagatggaacacttgtcatagatggcaagacagtttctgtggtgtacttcagagctggctatacaccaaatgattatccttcagaagcagaatgggctgcaaggctattgctggaacaatcatctgctgtaaagtgcccttcgatatcataccatttagtggggaccaagaagattcaacaagaattagcaagacctaatgttcttgaaaggtttcttgaaaacaaggaggaaatcacaaagatccgtaaatgctttgcaggactatggagcttggatgatgaagagattgtgaaatccgcaatccaaaaacccgagttgtttgtcttgaagccccaacgtgaaggcggagggaacaacatatacggtattgatgtacgagagactttgatcagactccagaaggaaggaggggatgcgcttgcagcctacatactgatgcaaagaatcttcccaaaagcctctctctctaatctggttcgtggtggtgtttgccatgaggccctcacaatatctgagcttggaatttatggtgcttacttgcggaacaatgataaggtggttatgaatgaacagagtggttacttgatgcggacaaaagtttcatcgtcagatgaaggtggcgttgctgcaggatttgctgttttggatagtttgtacttaaccgacaaggcgatgtagacatgattgttgaacattttctcagatttagcctgctcatttctgatggacagcaaattccaaaacaagaacacattgtatcgtgtttcaagtgtactatatgcttgaagctgaggagcattataggcttatagcttctcatctgattatttccttgggacgttatgataattatccctatttatgctcccgatatgtaattttgtactacaaggtggtgtcttcagttggcagtttactttagatgtggtgtttgcagtttttgaatggcaatcccagtgatgttctgctgtct

SEQ ID NO: 27563 - DNA, 2627 bp, Oryza sativa
  ref <308>: DATABASE ACCESSION NUMBER: AK103005
  ref <309>: DATABASE ENTRY DATE: 2002-08-28
gtgggaggaggagatcaatcggcaagccaaaaaacaaaaaaagatttcttttcttttcttttcctcctgttgctcgtcgacgcgccgccgccgccgccgccgccgcctcctccatcgccatcaactctcccggccggccgtcttcttcctccgctcccttttggtctgaatgaggcaggagctagtcaaacgctcctttagagaggatgcttcaatggcaggtgccatcttcatgtccaacaccgccacaagggagctgtgcttccgttccaacatctttggacttcccatagagtaccaaccttttgtgcggaatatcagacaaggaatgcctttgtttctgtttgatcatactgaacgcaaactctatggggtctttgaggctacctctgatggtggattcaatattatcagatctgccttttcgtcgattggatgctcatatcctgcacaggtctgcttcaaaattatttggaagtgcagaccactcaccgaagatgagttttcacctgccataaaagagaactactatatgccatggaagttctactttgacctttcctaccaacaggttgtctgcttatatcagttatttgatgagaagagggttgaacatcctattcacaaccattcaaagagtgctaatttggaaaatgatccctttaggaaagggacacaagaaagaaagagcttgagtccaaatattcctcattttcctgctgatcagccaggtctttttatgcctgcgagtacccccagattttcaacagttgaagcaagctactgtgcatccacaagcatgcaccaagcaccacatcccaatatgtcaatgcccctgggaactaatccttttggagttcaaattgcacctgtccacaacagccatcacgaccaagcagaactaccttacaacaataacatgctttttcctggatacttgccttctggacatgtagctcgggacacaactcaggaacttgggctttctgcaaatcactcatatcctccatctatgggctatgcatacggttgcttgccgcctcctggacatagacctcaggatgcaattgcaggagatgtaaactatgcccctccatatcctcaatttcctctgccaaatgaacaaggcagtgctactaacaggagagattattatgatgtccactgcaaacaatgccagtttgaagatatttatgaatcggagcatcagcacttcagcaaagcaaaagtcttagcacctccaatattaaaccaacaagatgttccagtataccctgcaattgctgaatcagcatttgatcagcggaaagaatgtttcactgaagaagactctgagaatgctcgacagaaacaaagttttaatcacactgatatggtgttttctggtcttggaaatagcaatagagcctacatgccagaccatctaaacaaaaatcctgatataagatctgaaagcaacacaatagctgttggtcagcatgcacaaagcagtgtgttttctcgcttatcacggatcccaccaccactgcatcaagaaattcctggtccttcgctcaacaagttggttctctcactttctcagagagcagaacattggggtaaccaggataaaataatcaccaatgatgtttgtgaacagttggtcagtgagcaagtaatggatacaccctatcctcttgctgagttgaaccagcaaagcggcttaattgaagaagaaattgaagggcttgcattcatgaactttaagagacgcagcgaaacaaggaacttggatgcaaatctaggaaaggaaattagggggcaagtgaagagaagaaagcttgttcgcccttcctttggagaagttaacaatgctggtagttctggaaaagagcttgaagctaaagtcttagagggagaaaaacatagcaatgatgaacatgatgaaaacaagttcagtattgacctaaataaacctgctgccatagatggtgatgtagcaaaggaggatgataccaccaccgcattgccacatccttctgttgcgatcaagatgcataaagagaaaccatctgaagaaaacatgagcaagccaaacagcccaaatacgacggaagagatgaaaaaacaagatccatcccttgacagcgccacgcatactgaaaagatttcacttgaattagatgttgcggatttgaatacaattgaccagtccaaactgcaagcaattctcagctcatctctgttgcaagcacttgacaagctcagaagagagaagctcaacaactctgaagaggctgaagaggtaaagatagcaacttgactgtttccatgaactctgaaggagatgcaaagcctacatgcagttgattttagtacgtagtaccaaccaatactacttcagcagtactggagcagaatgactacaaggcatggttaagcaccaagtatcatgtgatgtagtataggaacaatagctaccttttctcatgtagtagtaccattgctattttgtgttatcctataaaactaactaatattctcggggaagtacggctctctcacgctgctctgccacgtagatctgtgtgatctgtcatgtggaattgtaaagcttctgcgtgcaaagaaatggattgagtttctct

SEQ ID NO: 27564 - DNA, 1420 bp, Oryza sativa
  ref <308>: DATABASE ACCESSION NUMBER: AK103006
  ref <309>: DATABASE ENTRY DATE: 2002-08-28
ggatttcttccgcgcggttgcggaatcgcgaattcaattcgattccgctccaccaccaccacctcgcgccgcccagctgctccgattcgcgctgcggagcttccctttttccacccgctgatcgattgattcgttgttttttgggggggatttttttctggtgtgtgtgttttttttcccgatcggatcggtccagatcgggtcgatttgggcggggtggaggaggtggagggaagggggagatgcggatcgaggagcttccgggtgattccggcggaggaggtggggatggtggtggtggtggtggcggcggggcgctgctgcagctgcgtcgtggggcggcggcggcggcggcggcggtggaggaggagggtggggtggtgatgcgtgtggctttcgacgcgaagcgcgcggcggtgggcgtcggcgcgcggatgctgttctacccgacgctggtgtacaacgtcgtcaggaaccgattcgagccgcacttccactggtgggatcaggtcgacgagcatgttctgctcggtgctgttcctttccccagcgatgttctacggctgaaggagcttggagtttgcggtgttgtgacactgaatgaatcctacgagaggctggttcccaggtgcctgtatgaggctcatggaattgaaaacctggtgttaccaactagagattatctttatgcaccatcatttgagaacctttgccgggctgctgacttcatccacagaaatgctttgtgtgggaagttgacatatgttcactgcaaagctggacgtggacggagcacaacagttgttctttgctacttggtgcaatacaaacaaatgactccggctgaagcttatgaacatgttcgcttgcgcaggccaagggtgctattagcttctgcacagcggcaggctgttgagcaattctaccagcttagggtgaagaaatctgggaaatccatttgcctggacagcccaataatgaaaccaccgctgttccttgccactcgcaacctcattgcatttgacgagaagacattcgtcatggtttccaaatcggacctcgaagggtatgatgcggataccttggccgttaacgtgggcagtggcttgtgggagataagcctagtataccgcgtgcagtttgcgagccaggcggcctttgcagggttctcatacctgtgggtacgatgccgtgccccccgtaagaacaaggaggcactccctgtccctgagagtaacaatagcgtggggagcgagagctgctcccttgaggcagagcaactcgccaaacctcacccatgtttgcttcaaggtgtcatggttaatccatgatcgttcgacttgcattcgccgcgacctttcttttaactttttgtctggcatgtcatccgtatatattaaagccaagaacatgcaaatgc

SEQ ID NO: 27565 - DNA, 2791 bp, Oryza sativa
  ref <308>: DATABASE ACCESSION NUMBER: AK103007
  ref <309>: DATABASE ENTRY DATE: 2002-08-28
ggtgttcattgcttttttatgctcaatgctgtctgttttatcagaaactaacagatgaatataatatttttgctgcttcttgttagtagtactagtacatacatatagatttcttccctgcgttgtaaatgcaaatgtttcagatattttggttctccgtactgcaaaagttttttttttcttcactgtcgaccatgcatgcgttgatgcatgcaggtgctttggcagtactgctggattgaattaatggatcaagactgaatttatctgtaaataattagttcatcgtaataaggttgatgtgtttgtgcttacctgcttcagtactgcgcttcatgtgcagataggttcgccttcagcaccttgccggtgaataacgccggcaatgccgcgagccgtgtccgacgggggcgaggccatcgacgccgacatcgccagccggacgtcatcgcacagccacatggacggcggccatcatcatcatcatcacggccacaaggtcgagttcccaccgaagaagaagctcatcgacgagttcaccgacgccgtgaaggagacgttcttcgccgacgacccgttgcggcagtacaaggaccagccgatgtcaaagaaggtgttgatcagcctgcaaaacttcttcccggtgctggactggggccggcactacaccttccgcaagttcaggggcgacctcgtctccggcctcaccattgccagcctctgcataccccaggacatcggttatgcgaagcttgctggcctattaccaaattatggactgtacagcagcttcgtaccgcctttgatatacgcgatgatgggaagttccagggatatagccattggtccagtggccgtcgtttcgctgctgcttggcactctcctccagaatgagtttgatcccaagaagaatcaggaagagtacacccggctggccttcactgcaacgttcttcgctggggtcacccaggcagcgctcggattcctcaggctagggtttatcatagagttcttgtcccatgctgccatcgttggattcatggcgggagcggccatcaccattgcccttcagcagcttaaaggcttccttggaattgcaaacttcaccaagaagactgacatcatctcggtcatgaaatcagtctggggaaatgttcaccatgggtggaactggcagacgatattgatcggagcatccttcctggcattcctcctggttgcaaaatacattgcaaagaagaataagaaactcttttgggtggctgcaattgcaccactcacttcggtgatcatatccaccctttttgtctatatcactcgagcagacaagcatggtgtcgtgattgtcaagtacataaagaaaggcatcaatccaccttcagctagtctcatatacttcagtggcccaaacctgatgaaaggattcagaataggagtaatagctggcatgataggcctaacagaagcaattgcaataggaagaacattcgctggcctgaaggactacaagattgatggaaacaaggaaatggttgctctaggaacaatgaacattgttggttcaatgacttcttgctacgtagctacaggttctttctcgcggtcagcagtcaattacatggctggctgccaaacagcggtatccaatattgttatgtcaattgtagtactgctcacactggagctgattactccattgttcaagtatacgcccaatgccatcctttcttccatcatcatatcagcagtgcttggcttagtcgactaccacacagcataccttatctggaaggttgataaacttgactttctggcatgcttaggagcattctttggcgtcatattttcatcagtggagtatggtctgctaattgcggttgcgatctcactcgctaaaattcttctacaagttacacgacccagaacagttttgcttggtaaccttccaagaacaacattatataggaatatcgaccagtatccagaagctaccttggtaccaggagtggtaatagttagggtggactcagctatctacttcacaaactcgaactatgttaaagacagaatcctgaggtggctgagggacgaggaagaacgtcagcaggaacagaagctacagaaaactgagtttctgattgttgagctatctccggtaattgacattgatacaagtggaatccatgccttggaggatctatttagagcacttgaaaagcgcaaaatccagctgattctagccaatccggggccagctgtgatcctgaagctccgatcagcgaaattcacggatctcatcggtgaagacaagatattcctgactgtcggggacgcagtgaagaaatttgctcctaaggcagtggagaatgtctgaagaaacaggcatagtacagagaagttattttcattcttttgcaagctccatgtttgcaggtgtgatttatagagcagagcagcacaggaagtgcataacatagtttttcaaaaaggtaaaataaaggtggtgtgccggagttggagcgcatcaggtttgcaagatatggttggagaaaaaagcagatggtgcccgttgcatatctacttcagtggctgtgaattgtgattagtatgttggcaagcactttgggtgaaagtttgatggataagataagaaaagatagtcatttgcttaagctgtcagtgtgtatctccatctggttgtaattaccccctttctttctacttgatcaagcgtacaaattacaatgaggttttactttttgacgaccaatgttgtctatagcgtccatcc

SEQ ID NO: 27566 - DNA, 990 bp, Oryza sativa
  ref <308>: DATABASE ACCESSION NUMBER: AK103008
  ref <309>: DATABASE ENTRY DATE: 2002-08-28
gaacgccccacactgcgtgcacttctcgatcattcgatcgcttccccaaatcgctctcctctcctctcctctccaccgccgccgatctcctcctcctccggcgccgtcgccgcgtcgcctcccggagctccggtgctgccaccagcctacgcagcgccgcctcctcctcctcctccggcatccgccaatcgccgccgcctggttcgtcggggagccccgcgccctaacgttttctagaggcgccgcggatccagcgcgaatcgatcgagaggtaaaggggaagttgatttgagtcggcggccgaagaaggaagccatgaactcgagaagcaactaccgcagcaccagaacttctctttttgatggcattgaggagggcagaatccgtgcaacatcctattcttcacatgagatagatgagaatgagaatgatcaagctattgatggattgcaggatcgagtcagcattctcaagcggttgtctggtgatatccatgaagaggtggaaactcataaccgtatgctagaccgaatgggcaatgatatggattcgtcaaggggttttctgtctggaacagtggacaagttcaagatggtttttgagaccaaatcaagtcggaggatgggaaccctcgtagcatcattcgttgcgctttttctgctggtatactacttgaccaggtagaagaggaccatgcatcacttgcctactgttgtgaagcgatgtgaactgggttgggtactcaagaacacgctgaaaatgtctgtgtcaatttaccgtggtgtcgtatatacctccaatatctcgctgtcataaagcaaaatatgttgaccagaatgtttctaactctgcactgtgtgaggattacaacatgttcgtcgtttgctctggtgctgtaattacctttacagaaaatgtttcctgctgtgttctgtaacatctgtttctgtatgcggtcatgctatctgtattatattataacttcacaag

SEQ ID NO: 27567 - DNA, 1155 bp, Oryza sativa
  ref <308>: DATABASE ACCESSION NUMBER: AK103009
  ref <309>: DATABASE ENTRY DATE: 2002-08-28
gtcagagaatacttgcgagctccgatctcttcttcttcttcgtgagctctcaccaaaccaaccccaaccactgccctcctcctgccgcgatccgctcctgctctccagctcagggaatccacctccacccgcagagaccaaccagcagctgtccgtcctctgcggcggcggcggcggcggcgagatggggcaagctctgcggcggctcttcgacgccttcttctccaccagggagatgcgggttgtgatgcttggtttggatgcagctggcaagacaacaattttgtataggctgcacatgggagaagttctttcaacggttcctacagtaggttttaacgtagagaaggttcagtacaagaatgtggtatttactgtgtgggatgttggcggacaagaaaagctcaggccattatggaagatgtacctcagcaattctgatgcactgatctacgttgttgattcattggacagagaaaggattatagacgccagacaagaatttcagaccattatcaaggacccactgatggcaaacagcataatcttagtatttgcaaacaaacaggacctgagaggtgcgatgagcccagatgaggtgagcgaggggctaggcctgcacgacctcaggaacaggatatggcatatacaagggacatgcgctctccgtggtgagggactctacgatggacttgattggctcgcatccaccctgaagcaattgcaagagacaggccatgcaacttcagtcgccggcccttccatctgatttcgctagagaagagatgccaatgcctcaactagtcaaccaatctgatgctcctgggcagtcatccttctgttcatccaatgagaatattgagttccttggtgcatgcgtgatcttcgctatcggctttcttggtgtggctgctcgcagaggagggcattcaatcgctgtgttcatatgagcaaactcatttgacagtaacttgcggcataattttctcctaaaatgtttgtaaagtgtttggacgtctgtgtactttgttgtagtgaacaagagctgagtagtttgcacggaccgtgcttgtgtatacttgatggcacgtccacatgattgtttgctgattgcctatcaataagacggttggatgatggatgttgtttggtgat

SEQ ID NO: 27568 - DNA, 2251 bp, Oryza sativa
  ref <308>: DATABASE ACCESSION NUMBER: AK103010
  ref <309>: DATABASE ENTRY DATE: 2002-08-28
ggcggagccctactattttcagcccacggtgacggaagacacgggaagaaattggaaaaaggaaaaaaaaatctgagatataaaaattagtaattcgcaggaagcgaagcgcggatccgcttcctcacccaccgatcggcttcttccccccacgctagcagccatggcgtcgtcggcgctcatctgcgacaccgagcagtggaagggcctccaggcgcatgttggggagattcagaaaacgcacctgcgccatctgatgcatgatgttgagcgctgcaaggcaatgacagctgagtatgaaggcatatatctggattactcgaggcagcgtgcgactggcgaaaccatggagaagctgtttaaattggccgaggctgcaaagctcaaggagaagattgagaagatgtttagaggtgacaagataaatagcacagagaacagatcagtgcttcatgtagctctaagggctccaagagacgaagtaataaatagcaatggggtcaatgtggttcccgaagtttggggtgtaaaagataaaatcaagcaattttcagaaacttttaggagtggatcatgggttggggcaactggtaaagcattgacaaatgttgtgtcagtaggaataggtggtagctttcttggtcctctgtttgtgcatgctgccctccagacagatccagaagctgcagaatctgccaaagggcggcaattaagatttcttgcaaatgtcgaccctgttgatgttgcacgaagcatcaaagatttagatcctgaaacaacacttgttgtggtagtctcgaagaccttcacaacagctgaaacaatgttaaatgctcgaactcttaaggagtggattgtctcttctcttggacctgatgctgttgcaaaacatatgattgctgtcagtaccaatcttgagcttgtggagaagtttggaattgacccgaaaaatgcttttgcattttgggactgggttggtggccgctatagtgtttgcagtgctgttggtgtcctgcccttatctcttcagtatggctttccgattgttcagaaatttttggagggtgcagccagcatcgacaaacactttcgttcatcttcatttgagaaaaatattcctgtactccttggtttgctgagtgtgtggaatgtttcatttctcggatatccagctagagcaatactgccctattcccaagcacttgagaaatttgcaccgcatattcagcagcttagcatggagagtaatggaaagggtgtctccattgatggtgttcaactgccctttgagagtggtgaaattgattttggtgaacctggaaccaatgggcaacacagcttctatcaattaatccatcagggaagagttattccttgtggttttatcggtgtcgtaaaaagccagcaacctgtttacttgaaaggggaaattgtgagcaatcatgacgaattgatgtccaatttctttgctcagcctgatgcgcttgcttatggaaagactcctgaacaactgcatagcgagaaagtacctgaacatcttatccctcataagacttttcagggcaaccgaccatcgcttagtttattgctaccctcattatctgcttatgagattggacagcttttagccatctacgagcaccggattgcagtccagggtttcctatggggaataaactcatttgaccagtggggagtggaactgggcaagtctcttgcctctcaagtgagaaaatctctacatgcatcccgcgttgaaggaaagcctgtcctggggtttaacagcagtactacaagtttgctgacacgatatcttgctgttgagccatccactccttacaacactaccacactgccgaaagtttgacacgacacgtttggcacgctattgtcttgagttaaacaagattactagagtcttcatatcttgtaataagtttaagttcgttttggagttgttacaggcttacagccagttctacagtactgtagtttcgttgttttcctttactccgacctccaggaaacgaaatggaaaagaaaaaaaaaggaaactgttgttgaataaataaatcaagtcgtgtcagcatgaggaagctgtcattaaataaattaggtgaaaccccgcgcattgctgcgagaatttagtatgaagatatacattaaaacattatgtaaattatgttggatgataatttaatatgtttgtgtttgaaaagctcttaaattataaaaactataaagatatagc

SEQ ID NO: 27569 - DNA, 1695 bp, Oryza sativa
  ref <308>: DATABASE ACCESSION NUMBER: AK103011
  ref <309>: DATABASE ENTRY DATE: 2002-08-28
gattgcaaaacaagctcaagttttcaacaacgtaatggctcacagcttacctcttgatgtatggggttggatcaccaacctgcctccgttctcccaatggcgctccaacgccatgtccctttgcatctgccccacaccatcagcatcagaatcatcacagccatcgttgaacctatcagttgtcaaaacccctcccacccagccctcctttgtcaccttctccatctttgcaaattaccgtgtgccaatttctctgtggacgtcaaaaccagtccacctgaaatcatacacccagcagtctctagacgaacaagagatgttagagttgtttgttgacattgtggactgggtcctgagatccggaccaaacaaaaagctgtcctttcagtttcccagggcacagattcatggcaatctaaaggacgtgtttaacatagttttcttgtccctggccttcctagtttgcatctatgaggctccccatgctcttcgctgtcgatgcctcgaatccctgaggactcagctgactgggccaaagtgcaaagatgctgcaaagacctttgtcagaatgttgggagcaaaccttgaggagcaatggatgcagacaatgaatcttgcagtgactaactggattgttgagcaacgatcctcacaccattcatttggggtgccatcgccactgttctcatatgctctttcagcaagtgggctctggaaggtccagctatactgcccactcattgccatgagcatggaagatcctgcagtgccaacacaggatgagcgccttctcttctcgcttacttatcagcaacttgaaggtgtgattcagctcgcctacaaaacaatcagaagggacaactggattgatgtgagataaaggtggacaacataaggtgtgatgtggactctttggtctccgagatcctcatgactgaacgtggacatggctctgaggagaagcactttccatcacgtgttatgctgcaaatcacacctatgcaacaatcagatgtcctgtcggtttcagtcagcaagtcctccgacaaccccacgcatgagtttggccttgagaagggcattgaaggttcattcgaccccccaaacacatttggactaaaggcatcggtcagcgaaagcctcacactgaccatgaaaccctggaaatttgaacagtctgtgcatggaaacactacaaccttgaactggtttctccatgatggtgtaaacggaagggaggtttattcttcaaagccttccaagctctccctgcttcagccacgggcctggtttcgtgacaggtactcgaccgtgtatcgcccattcacgaagaagggtggtgtcattttcgcacgtgatgaatatggagacagcgtctggtggaagatctgtggtgcagcattagggaagaccatggactgggagattagaggctggatttggctgacctactggcctaacaaacagaagacctttcacagtgaaacaaggaggcttgaattcagagaatgtctgcaacttccccttatgaaatctccatgatgtatcttttggtactttgaatgaccatagagcgctataatgcgatagtagtatgtttaagtatttaaaattccatatgcatgcaaatttgtactatcatagtttgtcatacttttatgcatgcagaaataaacttcctaatatacctgtttg

SEQ ID NO: 27570 - DNA, 2199 bp, Oryza sativa
  ref <308>: DATABASE ACCESSION NUMBER: AK103012
  ref <309>: DATABASE ENTRY DATE: 2002-08-28
gtattgtcgccccagaatccccacgtctcgcgctgccgctttggcgcctttaccccctctccatacctcataaatttgcggtcgccttctgcgccgctgagaacgcgtcataatacggaagagtgagctctagttcagtacaagttcgccagctctttcctgaagcagaggagaggaggaaaagatagtgtcttgctgtgtacactcaggtcaacagaggcggctggagatggcggcggcggcggacttccggcggcccacacccaagttcgtcgccgcgttgtcgaggacgagctccgcgttcctcttcttctccgtcgtcgtcgtggggttggtctcgtctgctcgttggatcaccaggttcacgttgcaggcgagccccccagccacggcggccattcccgccgccgtcgccgccactacccgcgccggagtaccagcggcgccgccgcatcccacctactccatctcctgctccacgccgccgcgccccccgtttaacctctccggtggtggcggcgccagaacgccccaaacctcccaaaccctcgcgctcgcgctctcctcctcctcgtcctcctgtcgctcctcccctgaccccgccaccgcctccgcctccgtctccgcctccaattcctcctcgtgcccctcctactttcgcttcatccacgaggacctccgcccatggcgcgacgctgggggaatcacccgcgccatgctggcgcgcgctcgcgtcaccgccagcttccgcctcctcgtgctgggcggccgcgccttcgtgcatcggttccgcccggcattccagacccgcgatctcttcaccatctggggcgtcctccagctgctccgccgctaccccgggcgggtccccgacctcgacctcatgttcgactgcgccgactggcccgtcgtccgcacgcacctctaccgcgggaagcacgctgccttcatgcctccactgttcagctactgcggggatgacaggactctggatatcgtcttcccggactggtcattttggggctggccagagatcaacataaagccgtgggatgccctgcggcaagacctgaaggatggcaataatagggtgaaatggttggatagagtaccttatgcatactggaaaggaaatccagcagttgctgtgacacggcaggaattggttaactgtaatgtctctactacaaaagattggaatgcaaggatctacaaacaggattggttcagagagagcaaggcagggtacaaggactcaaatttgggtagtcaatgcacgcacaggtacaagatctatatagaagggtcagcatggtcagtcagtcagaaatatattctagcatgtgattcaatgacactgctggttacaccaagatactatgatttcttttcgaggtcacttatgccgattcagcattattggcctgttcataatgacaataaatgtgactccataaaatatgcagttgactggggcaactctcacaagcaattgggatatatcacatgtttctgcttgataaaatatggccccatactctaaatctgtcataggcacagcgcataggaaaacaagccagtgatttcatcgaagaagatgttaatatggaccgtgtttatgattacatgcttcaccttctaactgaatatgccaagctcctaaggttcaggccaattaaaccacctgaagctgttgagatctgtcctgattctttggcctgccaagctgaaggccttgagaagaagtttcttatggaatccatggtgaagtctgcccgtgatgcaggtccgtgtgatctgccacctcctttcaaccctcaagagctcgcaatgattaagcgaaggaaggacaattcgatcaagcagattcaaacatgggagagaatatctgggagggcttagttgcttagagatgatctttaagcctctgccttccccccctcccaccccaccacaaatacaggcatacataattggattttctaggagttctggtctattttggtttcatcgtggttctaacaaacaccaagcattggttgacctattcaaatgtccaaacatttagagaatttgaaatacggtgttactcatttcatattatttttcttctttttgctagatttagtgtttgctttgtaaagccattgtaacagacagatataataatctgaactgttcagaagatattcttaacgc

SEQ ID NO: 27571 - DNA, 1008 bp, Oryza sativa
  ref <308>: DATABASE ACCESSION NUMBER: AK103013
  ref <309>: DATABASE ENTRY DATE: 2002-08-28
ttgggagcagcagtactagatcttgctctagtctctgacttcctccccatctcttttcaccatatatatctgaagcaaatgggagacaagaaacttacgaagctcaaggttcggggtgcaaacgacgtagaggtcaagagcgtacttcgtcaagagttcaaagaatctgtcgaccaggataatttcaaagtaaaagtagatggcagcagtttgaaggtggacgtgccagggactgtcgacgtcgggaagctctatgagcgcctcaagaaaatgtcatccagtgtcaagattgaatcagttgtgccggatgatctaatggcgaaaatggatcgatacaaaaaggaccttcagaacatgaagaaacagaaggaagctgtcgagtcaaagcaaatcaaacaagaggaaggatacaagcttctccagcaagaacaacgaaaatggaagagagacaaagaaaatctcaactcaaagctcgaaaaaaagacaaaggagaccaaagatgccaaggaagaactcaaaatcacaaagagagagaaggaatatctcaacacaaaacttgagacaaagagggaagagaacaagcgcctcgatgaggaaaacaagaaattgcagcgaaaaatcaaggatctacaggaaatgcagaagggatggataactacaacttcaactaagttggacagtttcgaatctgtggaccataatcatcatggtatgcatcacagagtgcataaggaggtgcacaggcatgaatttcacatgcatcaagaggttcgtcaccacggtaatgtgatggcattggagaatgatggtaggagggcgcactaacaacccaggctggaatattaccactgaggaaattaaatttatcctcctaccaaaactatatacatatgtgtgctgacgtggtttgtgctatgtttgtgtgtggtttacttgcctttcttggagttttctctctgtttgttgtgatgttctagcataataaataaagctgcattattgagaacc

SEQ ID NO: 27572 - DNA, 998 bp, Oryza sativa
  ref <308>: DATABASE ACCESSION NUMBER: AK103014
  ref <309>: DATABASE ENTRY DATE: 2002-08-28
ggctgacctttcccaagtcctcctgccgccgcagcgccgcggaggaagaaagtagaaactgcttccccctcctcttcccctcttctcgcgggaatctccccgtctccgccgcgaaaccatggaagctgccgccggcgccggcgccggattggcggaggcagcgaacggcgggatcgagagctcggccgccgacccctccacctccggcaccgcctcgcggctctccgtccaccggatcgccggcggcgggaaagctgctgatatcatcttatggaagcgtggacgtgttacaattggtgttatatttggcgctacaatggcatggtggctgtttgagaaatctggactgtccttcttgacagtttgctctgatgtactgctcattttgattgttgtgcagttcatacggattaaagtagctggattgctaaataagcaacctaggccactacctgagttagttttatcagaggaaatggttagcaatgctgcagcttcattccgtgttaaagtcaacaacatgctgatgatcgcacatgacattactcttggcaaggactttcgactctttttccaggttgtgttgctcctatggctgttatctgttattggaaatttctgctcgtctattactcttgcttactttggaaccattgctttggtcacaatacctgcattatacagtaagaaccaggagcaagttgataggtatgctgggatggtccacaggaacatatcaaggcattacaagattgtcgacgaaaatgtgatgagcaggctaccaagaagctttatcagagataaagaggattgatttgtttagaagctgtgatagtagtcatgccactatatccacacccaagtgtgtgtgttttctacacttgtatttttatgccgtagattgtgcaaattaggaatttagggcaaaagctggagtatgctgtagatgccactgcaatgtgctactattctaactcttgagcaataaggttcgaacc

SEQ ID NO: 27573 - DNA, 1820 bp, Oryza sativa
  ref <308>: DATABASE ACCESSION NUMBER: AK103015
  ref <309>: DATABASE ENTRY DATE: 2002-08-28
gaatctcgatctctgctttcactgcaggctgcagctagctacctcggcgacccgccatcatgtcgattgctctacgcgaccgccggccgtcgcgctcgcgccgcgggcgctaattaagggcactttgattttggggatattggaaccctgtaggttctcgatcgatcggccgtcgttggaaattaaagccaaacttagtttgatcagcagagctggagcgtggatggaggtggtgactggggcgatgggcgccttgctgtccaagctgggcaacctgctcaaggaggagtataagcttcacaggaacctcagggaggagatcaccttcttgaaatccgagctggagagcatggaggctgcactcctcaaggtttctgaggcgccgatcgaccaaccgcctgaccgccaagtcaagatctgggctagggacgtcagggatctgtcgtatgacatcgaggacagcgtcgacgagttcatggtgtgtatcgacagccgtacgccgaacaactcgtgtagcttcgggggctttgtttacagaagcatggatttgctgaacagagccaagtttcgccacaagatcggcacggacatcaaagggatcaagagccgcatcaaggaggtgaatgatcggcatgataggtacaaggttgatggcgttttgaccaagcctataggaccaaccgttgatagccttgtataaaagggtaaacgagtttgttggcatcgatgagaagagcgatgagcttgtaagaatgctaatggggacaggcgagtcatcgataagaaaaagaaaaagggatgtgagtgaagagtcgaagcagaaattgaagatagtttcgattgtcggagttggaggattaggaaagacgactctggctaatgttgtgtatgagaggcttaaaacacaattctattgctttgcctttgttcccgtctctcttactcctaacatggagaagatattcaagaatatgctccatcagtttgataagaaaaagtatcggaacatcaatgaggtaacatgggatgaagcacaactcatcgcagaactgagagaattccttagaaacaaaaggtacttaattgtcattgatgatatatgggatatatctgcctgggaaaagatcaagtgttcttttgttgatagtgaaaatggaagtggaataatcacaacaactcgcaatgttgatgttgcaaaagaagttggtggtgtttatcaactaaaacctctttgtcatgttgactcaaggaaattgtttaatctgagaatatttggtgctgaagacaaatgtcctcctcagttggctgaattgtcagagagaattttgaagaaatgtagcggagtacccttggctatcattaccatagcgagtatgttggccagtaaaatagagaatgaaaacgcacatgaagatgatttcaagcagttatctatttcgaacttgtcgcatgtcaggtcactaatttttttcaaaggcttcaattcatttcctgcctactcaagcttcccactattacgtgtattgaacttaagtggctgcaagaaagtggataccaatccctgcaaggatatttgcttgtacttgtttcacctaaggtatttgaacctgtccaggacatctgttacagagatcccgagagagatcgagaatctacaatctttacaggtactgtgcataaatggcatcgaaatagaagatttgccatccacctttgttcgactaggacaaattttgtacctcaatgtctacttgaaaacccgaataccagatggatttgggagtctaaagtatctgcaagaacttaaaggaagaatcccc

SEQ ID NO: 27574 - DNA, 2705 bp, Oryza sativa
  ref <308>: DATABASE ACCESSION NUMBER: AK103016
  ref <309>: DATABASE ENTRY DATE: 2002-08-28
ggtttccgtaataaaaaaattagaagagtggtatctcgatagtgccactcgtaagagtggcaaatagttaaaaaaaacccatattccttccgtcgtctccgactccgaacatcctctccggcggccggcggccatcgtcgttgcctctcggtactcccgcccatgaccgctgccacgacctagcaatggggaggctttcctgtatcaaacgccttcctcgattcgctctccggcgcggcgtctccgatgctttcctccgtccccttctccgcaccgcattcctcctccgccgccgccgccgtctcagcaccgcggagagcactcatcctccgcggcggggacgcttccgtcgggaccccgattctgatgagagcaaactcgtctccctcgcgcggcagcgtggggcggcggccgctcgcgccatgttcgacggaatgccgcgccgggacgatgccgtcgcgtacgccgcgatggtcggaatccacctctgggaccgggaccttccccacgcggaggcgctctaccgtgcggcgccaccggattgccgggggatccatcttgacactgtcatgctcgatgggtacgtcaaggcaggccaggtcgaccgtgcccgcaggctgttcgacggaatggcggtgaagaacgtggtcgcctggacatgcatggtctctggatattgccgtgcgggccttgtggacgaagcgcgccgcctgtttgatttgatgccatacaggaatgttttttcgtggacgacaatggtgcagggttatgcacacaatgggatgctacgggaagcgagggagatgtttgataagatgccagagaggaacgtggttgcttggacagtgatggttaaagcctatgttgataatggttgtattcaggaggctttggagttgttcaacaggatgcctcagatgaattcatattcttggaatgccatggcaaccggtcttatgagtgctgggaaagtggatgacgcggttcagttgtttgataagatgccacataagaatgtagtctcttggactataatggtcactggcttggcacagaatggttttgtttctagggcaagagagttctttgacagaatgccaaagaaggatattccggcatggaattcaatgatcactgcttataccaatgatggccaagtgaatgatgcacaaaggttgtttgatattatgccttcaaagaacctggtgacttggaatatcatcattgatgggtattccatgaataatctgaaggacgaagctttgaggttgtttcttcttatgctccgctcagcagtatctcctgacagcactacattaattagtgtcttagtagtatctgagagcacaatggaggttagacaaattcatgggttgtccacaaaactggggtaccagcccgaaactaacttaggaaatactctggtttcaatgtattctagaagtggcgatctgtcatctgcatggcttgctttcaggagattgaacgagaaggatgccataacatggacatcgatgatacaagctttagcaaaccatgggtgtgcaccttgcgccttgcagggctttgcccaaatgttaaggtgtggatataagcccagctcaactacctttactgctgtgttgtcagcttgtaaccatgttggattagtggagaaaggccgaaaaatattcaaatcaattagccatgtttatggactagggccaaccattgagcactactcttgccttgtggatctcctaggtcgagcagggtacgtgagggaagccaaggaagtggttgacggtatgcagcgggatatgtgtgatgaggccattctagggacgcttctgggatcttgcatgacacataatgaggtggaggtaggaagagctgtgggtgaggatcttgtcaaaattgacccctctggttcaggaggctatacgcttttggccaatgtttttgcatctggtgggatgtggaatgaggtggcaagtgtgtggaagattatgaagggaagcaaagtcaagaagactcctggttttagccagattgaagtaaacgcaaggaaccatgttttctactcaagggaccagatgcattcacaacgtacagaaatttatgagatgctaaatagtaggcttgtccctcagatgaagggttcatcaagtctaggaactgatttctactgatcaaaatgatttactatatgctttagagtcaagcccaaaaggctatcagtacaatcctgatattcatcctctggctagtatggaaagaagcaaggcaaaggtgttcgaaaacaggtcgtcttccatgctcacttctgggctacagaagctgcaagcgtggcgagacaaagtggcatggaagttcaaaacttctttgtgaaatattagcctttgatttttttttcctcagagcctgtgtgctgctgtttcaccgcttgggttgggtagctatgtaaccagactttgtttggggacagctctctttctaatgacatgatatgcaagtttttgcatgttatccccgccctcccaacacacacacaccctcccaccacccaaaaaaggttaagtaggttatcgagagttgatctgatcatgtaagaatgatatagactagcccggctgacagatatccaaaggtttatgttaccttgatggggctgttaattattttaggcaggacagaaaaggttaataccatcatattcaggagtc

SEQ ID NO: 27575 - DNA, 1500 bp, Oryza sativa
  ref <308>: DATABASE ACCESSION NUMBER: AK103017
  ref <309>: DATABASE ENTRY DATE: 2002-08-28
gacttacggcccaaacaaggcccaaaaggtttctgctttcagccttcttcatgccaaaaccccaatccggccggcgactctccgacatcccggccggcgaccatggcggcggcggcggcggaggtagcagcagcgggaggaggaggagagatggtggtcgtccgcctgcctcccctttcccaggacgaccccctcttccaagacaagaagaggatattggacagtagaaacttatcctgtctatttcaagttccaaactcatgttctgctgctgatgccttcaaagtactggataggataatccaagctgctaggatagctcatatggatgagcttgagctttattttactggagacgatgatttcgggccattatctacaaggaatgaacttgaatctctaaatttgttgctcaaaattttgaacacgttgcttctgactgccaatgttggtgccatgggagttttgcaagtcctacgtgatgaaatacttattaggctcagatctcttgagttggaagacaatgaccaaatggtagttcaaatacgaaaccagaacatggaagattctcttctgaaatggggggagcaacatggtgttaaaactaaattgcaaatagcattttttgaaggagctgggagaggaatggtagcttctgaaaacatagatgtgggggatattgcacttgaaattccagagtcttctatcatatctgaggaacttctctgccagtctggcatgtttcttgcattaaaagatttagatagcatcaccactgagactatgctattgttgtggagcatcagagagcggtacaatccatcttcaaagtttaagatatacttcgaggcactcccagcaaatttcaatacagggctgagttttggaattgatgcacttgctgcattggaaggaacccttctttttgatgagttaatgcaagctaggcagcatttgcgccagcagtatgatgagttatttccaatgctgtgcataaagtttcctgatatattcaaacaagacgtgtatacctgggacaattttctatgggcatgtgaattatggtattctaacagtatgatggttgtattaagtagtgggaaattaacaacttgcttgattcctattgccggacttctgaaccactcggtttctcctcacattcttaactatggtcgggtagataaagttacgaaatctttgaaatttcctctgtctagaccatgcaaagcaggggagcaatgttttctcagttatgggaagcatccaggatctcatcttatcactttctatggttttctaccaagagacaacccttatgatgttatacctttagatcttgatacatctgtggatgaagaagacagttcatctccgtccgtaactacaagccaaaccagtcatatggtacgtgggacatggctgtccagattaagaggacctccgacgtatgggctgcctcatcgcttggtatcccatctccatgccattctaggttgt

SEQ ID NO: 27576 - DNA, 1397 bp, Oryza sativa
  ref <308>: DATABASE ACCESSION NUMBER: AK103018
  ref <309>: DATABASE ENTRY DATE: 2002-08-28
gttgattgattgggaacggagccgaccagagagagtatatgatattttctgctcatatggcatagactcagcatggaaatactttgttgaatctttaagatcaacaacagatgctattggaaggaatatccatcgacagcacttactggttgtggcagactgtctgtctataagtgggcagttccacgggctaagcagtcaaggtttaaagcaacaaagggcttggttatcaatctcctcgccattttcggaagcatgcttttctaggcctgcatatagctttataaatgctgcaaagcgagattcagtggacaatctctctggtgctctagatgcaattgccaggggcaaagaaccttgtgctgggacatcaggtcctttcaaggttctatactccggaaagtcacaaaagacaaaacaaaacaagaatatctatgactttctacataaccccgaagttcaggctttggaaaagaattttatggatacctacaaacaaaggactgaaaaaccttccaagcagagatcagcattcagttctaaaggcaatgctaccatcaatggtggtaccatatctgtcaatcagaagtttcttgattctaaagttggcatatgggagaacatcattgacatgcgcacttgcttgcaaaatatgctaagagagtacacattaaatgaagttgtcacggaacaagataaatcatgcttgatagaggcgttgaaatttcatcctagaggatatgacaagattggtgtggggataagagaaatcaagattggagtgaatcctggtcacccgaactcaaggtgcttcattgtacaaaggagtgacgatactagtgcagatttctcttacaacaagtgtgtccttggtgctgcaaactctatctcacctgaacttggaagttatattgagaagatactatctaatagagcaattcggccacatcagttgtagggtgagctttcaaatactttaggaacaagaaatcttcagaagcaacttagggtgctcaatttacccagatgacgatagatataggtgaatgttgttttttgtcttcttcagttaacagggctcaaagggctctgcaggaattaagacagggttgtgcgtcaactcaactcaaccaatctaggtattagctctttttttttttttcaaattagtggagctacagatggccggcctgagccttagtggcccactgccattagagggtttacggatactgtaacccttcattttctctccaaggataggtagtggcacttagaaatgcaataggcgttgtcgttaccctttgcatcatctgtcctgttgtaaagcgaaaaacgaggactgatgatccatattcgaaatgagaactccaaaattttggtggttcaattaccgg

SEQ ID NO: 27577 - DNA, 945 bp, Oryza sativa
  ref <308>: DATABASE ACCESSION NUMBER: AK103019
  ref <309>: DATABASE ENTRY DATE: 2002-08-28
ggtctcgaatggagggatgaaaattcatctttgataagtggaggacctgattatgatgtcctcctgggaagaagagatggtctggtggcaaatcagacgggggcgaacagtaacttgcctagccctttcgattcgatcagcgttatcactgcgaggttcaaggatgtcggtctcaacgcaaccgatgttgtggtcttatcaggggcgcacacgatcgggcgatctcgctgcctgctgttcagcaaccggctggcgaacttctcggcgaccaactccgtcgacccgacgctggactcgtcgctggcgtccagcctgcagcaggtgtgccgcggcggcgctgaccagctggcggcgctggacgtcaactccgccgacgcgttcgacaaccactactaccagaacctgctggccaacaagggcctcctcgcctccgaccagggcctcgtctccagctccggcgaccccgccgtcgccgccaccaaggcgctggtgcaggcctacagcgccaacggccagcgcttctcctgcgacttcggcaactccatggtcaagatgggcaacatcagccctctcaccggctctgccggccagattcgcaagaactgcagggccgtcaactgatgagcaaaaaggcaaagattttttgcatctgccatgaccccatcttggatttgccagaagctatatcgtcttcttggactcaagtgtgaatctgtcgtttttaatgtgttgtggagcgctacatgtttcgttttgttcaagctatctaggattctctctccaatgcacgagtagaataagcaattagcatgcaaagttgctcgtcctacacgaatctgcagctgcattttcagtgggtgtatcaccaattattagagcacagacaaacgcgctgtgtctatcagagtaaaagaaagaatatgcaactgccatatggttttatcg

SEQ ID NO: 27578 - DNA, 1482 bp, Oryza sativa
  ref <308>: DATABASE ACCESSION NUMBER: AK103020
  ref <309>: DATABASE ENTRY DATE: 2002-08-28
gaccggcatcaacacgctgctgcagtcgctgttcgggacgcgcctgcccacggtgatcggcggatcctacgcgttcgtggtcccgataatggccatcatacaggactcatcgctcgccgcctttcccgacgaccacgagaggttccttcagaccatgagggcgatacagggggcactcatcgtgtcctccagcattcagatcatcctcggctacagccagctgtggggcattttctccagattcttcagcccgttggggatggcgccagtggttgcattgctcgggtttggccttttcgaaagaggattccctgtggttgggagatgcgttgaggttggacttccaatgttaattctgtttgtcgtgctttctcagtatctgaagaatgtacagataagagatattccaatactggagaggttctccctgttcatctgcatcgcgttggtttgggcctatgctcaaatcctcactgcaggtggcgcgtataagcatagccctgaggtcactcagatcaactgccgcactgaccgcgccaatctcatctcttccgcgccatggattaagatcccttttccactacaatggggcgcaccaactttcagtgccggacaatccttacggtagaggctatgctgggctgggatctctagctgagtacagggcttcttacaaagctgcagctggactggccagtgctactccacctccagcacatatgctcaatgaaggcatagcgtggcagggaattgggatccttcttgatgggctattcggaacgggcactggctccaccgcggcaccggacaatgacgagccgttaggatcaacgaggatccgtagccgacaatgtatacagatctctgccggtttcatgaccgtcgtcttcatgctaggaaaatttggatcattggccgcttacatcccatttaccatctttgcggacgtgtactgcgtcttgtttggactagttgcggcagtggggctctccttcttgcagtttagtaacatgaactccatgcacaacctctttatactggatgtctccatctttcttggcctatctgtgcccgaatactttttccggtacagcatggccgctcagcgtggccctgcgcacacaaaagctggatggttcaacgactacatcaacactatcttctcatcgcctccgacggtcggactgatcgtggccgtcttcctggacaacacgctggaggtgaaaaacgcggccaaggaccgggggatgccatggtgggtaccgttccggtcgttcaagggggacgccaggagcgaggagttttacagcctgcccttcaacctcaaccgcttcttccctccgtcttaaaaccagcacggggagaagtttgagggaaccggggatttcgtcgctgatgcgcgatcgaatcgtttgtgtctgtgtcagaaagaactcagaatgctgagcagaggcaatgtagatgttcttctagttggccatt

SEQ ID NO: 27579 - DNA, 1375 bp, Oryza sativa
  ref <308>: DATABASE ACCESSION NUMBER: AK103021
  ref <309>: DATABASE ENTRY DATE: 2002-08-28
gctccgcttccctttcaaagttgcaccatcgttttcatcgctctatcgttttcatcgctcttttgctgcttgcgtcctcacgtgtactacttgatacatctatttgttgttgcttttgatcattgaatatggcacgagggccggatttgcacgggctgaagcggtgcttcaagggttcttgattgattttgccaaggaatgttcgggctgctggttcaatcaagcagctctggtcacctttattggtgaccgtccctttctaccctttcttctatttctcggtcaaggcctttgtcttctgtgggtatctttcttgcgtggcatcttcttggttacattgcttctgctgcgttgtcaacacattgggtgctgtttcgtataaggtggaagaattggtgcaagcagacttggttttattctcctcatcttcagttcaggtcctcaacaacagccttccaatggcgtacgtgcttatttcagaccttatgtatggggacactgataaacggatcaaagcgagggtatctaggcaatgggactaccatgatctgaatgatgaaacaaagatctaccacactgatcttgtcttgctggatgaaaagggcaatagcatccatgttcaaatctatccacctgccatgattaagcttaggactcttctacaggaagggaaggtttactactttgactccttctctgtcagatatgcaaacagaacatataggccagttacgaaccctttgatgatctcattcactaaatggacaaccttagaagaatgcattgatgcttttgatgattttcctgccataactttttcattgacaccttttcaagacgccccgtctcttgtggacagaaatgctttctatgttgatattatgggtgtcataactgaaattggtgcaacagacactctacgcccaaaatcaagaaacacagaaactttgaaaagaacaatgcagatttgggatgcaagcaatgtcaggcaagcatccgagcacaattttcactgatcaagacgcagccattgcagcagcaattgcttttgtactcccggatataagtcattgtctttgtttgtggcacatttatctaaatggttgtaaaaatcttggtcatgtaattcataagcatcctaacaagtttctaactgattttaagagatgtgtctatcaggacagatcagagtatcatttcaacaagatgtagcatgaattgttgagtgaatacaagtttgaggataacgtatggatgtcaaatctgtatgctttgaggaagaagtgggctattgtgttccgtgactcttttacaactgatatgacctcgactcaaagttgcgaaagtatgaataacgtcttcaagaaaagatttc

SEQ ID NO: 27580 - DNA, 1535 bp, Oryza sativa
  ref <308>: DATABASE ACCESSION NUMBER: AK103022
  ref <309>: DATABASE ENTRY DATE: 2002-08-28
gttccgttgcgctcgtctcctcctctcgccgcgccgccgccccccgcccccacgatcgacgactcgccgcgccgccgccgccgccgccgccaacgcatgcaggcaagatgaagttcggtgcaatatatgaagagtatcttcgggaacagcaagacaaatacctaacaaagtgctcacatgtggagtacaaacgtctcaaaaaggtactgaagaaatgtcgagttggtcgctcattgcaagaagactgccccaatggtgaccagcaggaggggaacaacgaatctccagatatttgcaaatgcaattcatgcacattgtgtgatcaaatgttctttacagaacttactaaggaggcttcagaaatagctggctgtttcagctctagagtacaacgtctcctaaatcttcatgtcccttcaggatttctacgctatatttggcgtgtaaggcaatgtttcatagatgatcaacaaatcatggttcaagaaggcagaatgttacttaattatgtaaccatgaatgctatcgctatccgtaaaattctgaagaagtatgacaaaatacatggttctgtcagtggtagagatttcaagagcaagatgcaaactgatcatattgaactgttgcagtccccttggctgatagaactgggtgctttccatctaaactgcaatagttcagatattgatgaaactgtggggttccttaagaatgagttcttcaagaatttttcctgtgatttgaccgaagcacgaccactaatgactatggctatttctgaaactatgaagtatgagtacagcctaacttgtccaatttgcttgggtactttgttcaacccatatgcacttagctgtggccatctcttttgcaaaggctgtgcttgtggagctgcttctgtgtacatctttcaaggtgttaagtctgcacctcctgaggcgaagtgtcctgtatgccgatcggatggtgtctttgctcatgctgtgcatatgactgaacttgacttgctcatcaaaacaaggagcaaggattactggagacagagactgcgagaagagcggaatgagatggttaagcaatccaaagaatactgggactctcaggctatgctgtcaatgggaatttgactgagatctgaagttacaatgatcgccattcattgcttgcattggtgtcaaaccaaaaataatcaggtcgaccataatctcaagcgtggagatcatccaagatgattttaacttattaactgccagtctcctaaaagttgcaatcagtgaggactaccttgggatagcacaggctaacacagctgaggttattttattttagctcttgaagaagcaattccattccattattttttgtcctaatgttgtcgcctgatatagtttaatttggaaatgcaaccatatttaattaattttctttggaccttcaaatgtagtttggaacaatttatacgcaatttatctgttctttgctttgtaaaaacgagtgtagaaatgtcttatttgaatgtctctggctcgctgccg

SEQ ID NO: 27581 - DNA, 1088 bp, Oryza sativa
  ref <308>: DATABASE ACCESSION NUMBER: AK103023
  ref <309>: DATABASE ENTRY DATE: 2002-08-28
gacttccccatctactactactactactcctactttgaatacctgctcttgctcttcgcctcgttcgtctccaagaagctcgagagccgagggcttctccgtctcttcgttcatctgctgctgtgtctcccctggtgaggtacgacaagatgttggaacattcggagagtgcaacagaaaaaattatgagcagcatcatggataccattgctgagaaccttcctaagcagaaatctgggaaatttgacgtaggcgctgcctctgacaaaatgaaggagaagctgtttggtcgtcagaagaccattcatcgagttctgggtggtggaaagcctgctgatgtgttgctatggaggaacaagaagatatcctccagtgtcctggctcttgcaacagcaatttgggtattctttgagtggctcgactaccacttcctaacaattgtttcatttgcccttgtccttggaatggttgtccagttcgtgtggtccaatttctcaagtgctctaagcggatctccttctaaagtaccccgtgttgagctgccagaagagctgtttgtgaacattgcagttgcagttggtacccaagtaaataagttcttgagttttcttcaggatgtgtcttgtgaaagaaacctgaagcactttgtactggcaatcgttggactgtgggctgcggctgttattgggggctggtgcaatttcttaactgtcatttacattggatttgttagcgctcacacgctgcccgtgctctacgagaagtatgaagatcaagttgatgatttcctatacaatattcttggcctcctgcgtgaccagtatcagaaacttgatcaaggtgtcttgagcaagataccgaaggggaacatgaagttcaagaagagcgagtagattgtctgggttttaagaactgaaatcatagattagctgggttttcatcagtggaatgaatcaagaatttgtaccatgctcagttgcgtattgcagacattggttgtcagttgtcatctgagagctgtgtgctttcctgaatggggcgctcatttgctgcaatctgaattaatatttcaactgctctgccctgcc

SEQ ID NO: 27582 - DNA, 1349 bp, Oryza sativa
  ref <308>: DATABASE ACCESSION NUMBER: AK103024
  ref <309>: DATABASE ENTRY DATE: 2002-08-28
gaattctttaatccctcccacccagcggacgcgagacgcctctgctctgctctcttgcttggagtttggagagatcgagagaaaggagaaggatacagcttttggaggaaaaacaacggatcgaaatccctcccattaggggctttgggattaaaatagcggtaacacacacacaaaagggatgctcagttggaataatagctggcattcaagttcaacagaaaatagaacaatggagagggaaattgtggcctcatatgaacccaagaagaataacgaaatcaggatgtttgagagttcagacgagatggcaacagatctggctgagtatatttcacaagtttcagaaatttctattaaggaaagaggttactttgctattgccctgtctggagggcctcttatcagttttatgcggaaactttgtgaagcaccatacaacaaaaccctggattggtctaaatggtacatcttctgggctgatgaacgtgcggtggctaagaaccatgtggatagctactataaatcaacaaaagaagattttctctccaaggtgcctattcttaatggtcacgtctactccatcaatgacaatgtgacggtggaggatgcagcgacggactacgaattcgtcatccgtcagctggtcaagattcgcacagtcggagtttcagagagcaacgactgccccaagtttgatctgatcctccttagcatcggctctgatggtcatgtagcctcattgttccccaaccatcctgcacttgagctcaaggacgactgggtcacctacatcaccgactctccggtgccgccaccggagaggatcaccttcacccttcccgtgataaactcggcatcgaacatcgccgtagtggccaccggagaagacaaggcaaaggctgtgtattttgccatctctgacggtacagagggtcctgatgctccatcaattcctgcaagaatggttcagccaacggacggtaagttggtttggtttttggacaaggcgagtgcctcgtttcttgaggccaagaccaagaacgatgggtatgagcatccaaagtattagcgacttggcattccctttttgctgcctatgaagagttgagttgatcatgtagtagttgatggtttttgatggaagatgctttcctccattaccttggtagtaagcagttcaggtgctcgttttgaaggtacttggatctgagaatatgaaaatatccgtgtctttttggagttgaccatggcgcatgggtaatagagatgtaatctgtactttattttgagaactcacagaagttactgagagtagctaagttcaaatattggccgaatatgttagc

SEQ ID NO: 27583 - DNA, 1088 bp, Oryza sativa; identical to SEQ ID NO: 27581
  ref <308>: DATABASE ACCESSION NUMBER: AK103025
  ref <309>: DATABASE ENTRY DATE: 2002-08-28

SEQ ID NO: 27584 - DNA, 2197 bp, Oryza sativa
  ref <308>: DATABASE ACCESSION NUMBER: AK103026
  ref <309>: DATABASE ENTRY DATE: 2002-08-28
gtctacactctagagagagagagagagagagagagagagaccaagccaaggccaccatggacagcacaagcaacaagatgaagaagatggagccgacgagcggcggccgccacgggactccggggcaggtggtgggcctgtgcgctgccctcgtcaccgccatggctgcctcactgctctgctccacctccatggccctcaccccggacgggcaggcattgctggagctcaagctctccttcaatggcagcagccagcggctgacgacctggaagcccaccgaccctaacccctgcggctgggagggcatctcctgctccttccccgacctcagggtccaatccataaatctcccttacatgcagcttgggggcatcatttcacctaacattgggaagctcgacaagctgcagagaatagcattgcaccagaacagcttgcatggcccaatcccttctgagatcaagaactgcaccgagctcagagcgatttacttgagagccaactacctacaaggaggcatcccttcagagattggcgagctcattcacctcacaatcttggacttgtccagcaacctgttgaggggcacaataccggcgtccattggaagccttactcaccttcgtttcctgaatctgtccaccaatttcttttctggagaaatcccaaatgttggtgtccttggaaccttcaaaagcagctcgttcgttgggaatttggagctttgtggactgcccatccagaaggcttgccgtggaaccctcgggtttcctgccgtgttgccgcattctgatcccctctcctcagctggcgtttcaccaatcaacaacaacaaaacatcgcacttcctgaatggcattgtgattggctcaatgtcaaccatggctcttgcattgatcgcggtactaggcttcctctggatatgtcttctgtccaggaagaagagcattggtggaagctatgttaaaatggacaagcaaactatcccagatggtgcgaagctcgtgacataccagtggaaccttccgtactcatcaggtgagatcatcaggaggttggagctgcttgatgaagaggatgtggtcggttgtggcggttttggtaccgtgtacaagatggtgatggatgatggcacggcatttgctgtcaagaggattgatctcaaccgtgaagggcgcgataggaccttcgagaaggagcttgagattctgggcagcattaggcacattaaccttgtcaatctgcgaggatactgccgtcttcctacagccaaactactcatatatgatttcttggagctgggcagtttggattgctaccttcatggagatgctcaggatgatcaaccattgaactggaatgcacgtatgaagattgccctgggctctgctcgagggctggcgtatttgcaccacgattgctcacccgtgattgtgcacagggacatcaaagccagtaacatccttctggacagaagcttggaaccccgcgtatcagattttggccttgcaaggctgcttgtagataatgatgcccacgttaccactgttgtcgcgggtacttttggatacctagcaccagaatacctgcaaaatggccatgctactgaaaaatctgatgtgtatagctttggagtgcttttgctcgagttggtgaccggaaagaggcctacagatgcatgcttcctcaagaagggactgaacattgttggctggctcaacaccctgacgggggagcatcggctggaggagatcattgatgagaactgcggtgatgtggaagtggaagcagtcgaggcgatcctcgacattgctgcgatgtgcaccgatgcagacccaggccagcgtccatcgatgagcgctgtcctgaagatgctggaggaggagatcctgtctccctgcatgagtgagctctactacgagcagcacctggaactctgagtgagtacctcctataatggttgctactactcatgattgcagtgacaagcaacaaattttgtagatacatgatgatgaaccgtgtaggagtgtagctggacaagtgcagcttcacatcttcttcttttgtgcccagctggttctttgggcagaaccaaatcactgtggtggtctgtacatagtggagaccttctgttcatctttttttttctcatttatctgtctggctgctgcaaatccacttaaaccaaacc

SEQ ID NO: 27585 - DNA, 1857 bp, Oryza sativa
  ref <308>: DATABASE ACCESSION NUMBER: AK103027
  ref <309>: DATABASE ENTRY DATE: 2002-08-28
gtgctgcgtgtgcttgcgctactgcttggtctcactgtgtgaacaactgctgccgccgcctgccggcggtgtgctccggccgcgcgcggtcgtgatggctgcacggcgagcgaactgcgcgctggtgctggtgctggcgctcgcgctgttggcggcgcgggatgctggtgccgcggcggtgcccaagcccaactggctgggcgggctgagccgcgccgcgttccccaagcggttcgtgttcgggacggccacgtccgcgtaccaggtcgagggcatggcggcgtccggcggccgcgggccgtccatctgggacgccttcgcgcacaccccgggaaatgttgcaggaaatcagaatggagatgttgcgacagatcaatatcatcgctataaggaagatgttaatctcatgaaaagtttggattttgatgcctaccggttttcaatctcatggtccaggatcttcccagatggtgagggacgagttaaccaagaaggcgtagcatattacaacaatcttataaactaccttctgcagagaggtatcactccttatgtcaatctttaccactacgatctccctcttgcgcttgagaagaagtacggaggctggttgaatgcaaaaatggcggatctattcacggagtacgcggacttctgtttcaagacctttggcaatcgtgtcaagcactggtttacatttaatgagccaaggatagtagcacttcttggttatgaccaaggaacaaatcctcctaaaaggtgcacaaaatgcgctgctggtgggaactcagcaacagaaccatacattgttgctcataattttctcttatcacatgctgcagctgttgcaagataccggactaagtatcaggcagctcagcaaggcaaagttggaatagttctggacttcaattggtatgaagctctttccaactcaactgaagaccaagcagcggctcaaagagccagggacttccacattggttggtatcttgatccattgataaatggacattacccgcagataatgcaagatcttgtgaaagataggctgcccaagttcactcctgaacaagctagattggtcaagggctcggctgactatattggcatcaaccaatacacagctagctacatgaagggccagcaattgatgcagcagacaccgacgagttactcagccgattggcaggttacctatgtttttgcgaaaaacggcaaaccaattggaccacaggcaaattctaattggctttacatcgtgccatgggggatgtacggatgtgtgaactacatcaagcagaagtacgggaatccgacagtcgtcataactgaaaacggaatggatcaacctgcgaacctcagccgcgaccagtacttgcgcgacaccacgagggttcatttctacaggagctacctcacccagctgaagaaggccatcgacgagggcgccaatgtggctggctacttcgcctggtctctcctggacaacttcgagtggctgtcaggttacacgtccaagtttggtatcgtctacgtcgacttcaacacgctcgagcgccaccccaaggcgtcggcctactggttcagggacatgctaaagcactgagaatgaaagacacgcagactgaagttgaagttgccatccattgatcatcatgttcagttctaggctgccgcttggatggcatcagagctggctatgaactatgtgatggaaataaaaggactgcaaattgattcgattatgcaattcgtgtctatgatcagaattgtggccgtctagtgaacttgtagaagtgtactcttgatgtgtgatcgatcttgagtaatcaatgtttgatcagatttcgcctt

SEQ ID NO: 27586 - DNA, 1424 bp, Oryza sativa
  ref <308>: DATABASE ACCESSION NUMBER: AK103028
  ref <309>: DATABASE ENTRY DATE: 2002-08-28
cacgcctttggttcgccaaatttccgtctcgtgagcttctcgtcgttcttgtgcttgttttccgtcgaatcctcgtgcaattctgtgagaaaaagagggcgatctccggtgctgccatgaacgcgctagccgccaccagccgcaacttccggcaggcggcgaggctactcggcctcgactccaaactccagaagagccttctgatccctctccgcgagatcaaggttgaatgcaccatccccaaagacgatggcaccttggcgacgtttgttgggttcagagtgcagcatgacaattcccgtggcccgatgaaaggcggcatcaggtatcaccctgaggttgacccagatgaagtgaatgcacttgctcagctgatgacatggaagactgctgttgctgctgtgccttatggtggagcaaagggaggcattgggtgcactcctggtgaactgagtagaagtgaacttgagcgtttaacgcgcgtgtttacccagaaaattcatgacctcattgggatcaatacagatgttccagcccctgacatgggaacaaatgcacagaccatggcatggatactagatgaatactcaaagttccatggccactccccagctgttgtcacgggaaagccaattgatcttggaggatccttaggaagagatgctgcgactggccgcggtgttatgtatgctactgaggctttattgactgaatacagcgagtcaatttcaggatcaacctttgttatccagggtttggggaatgttggttcttgggcagccaagctcatccatcagaaaggtggcaagatagttgcagttggagatgtaacaggtgcaatcagaaataaatccgggatagacatacctgctctcttgaagcacaggagcgagggtggatctttggaggacttctacggtgcagaagttatggacgctgcagagctgcttgtgcatgaatgtgatgttctcgtcccgtgcgccttgggtggtgttctcaacagagaaaatgcagctgaagtgaaggccagattcataattgagggggctaatcatcccactgatacagaagctgatgagatactcgcaaagaagggagtcattgtgctgccagatatctatgcaaattcaggcggcgtggtcgtcagctattttgagtgggttcagaacattcagggcttcatgtgggatgaagagaaggtgaacagggagctccaaaagtacatgaagaacgcttttcagaacatcaaggacatgtgcaaatcccaaaactgcaaccttaggatgggggcattcactttgggggttaaccgggttgcaaaggctactctgttgaggggatgggaggcatgagaatctgttgaggaatcacctcaattttgtaattcaaaatcttcattcggtaatatattggcacaatctggt

SEQ ID NO: 27587 - DNA, 2792 bp, Oryza sativa
  ref <308>: DATABASE ACCESSION NUMBER: AK103029
  ref <309>: DATABASE ENTRY DATE: 2002-08-28
caactttggcactaatgttccttacgtgctagtgtgtgtgtatatatatatatatatatatatttgaaaggagtaagttttttcagtctatttatgaatgaatttttgaaaaggaccgaaatgtaaaaatccagccaaaatcattgtgcggccctggtgctcggcgtcgactcccgtctcgtctcctcgcgagctcgcccacccgccgccctgcgccgatctccatcgattccgcgacttcgcgagcagtggcgccgtcgtccgtcctgctgcttccgccgcatcctggtttgggggttcaactgaaccccctatgtccctcgttagatccgcccctgcccggcaatgggcagcatggacacgccaagaggaacaaaattttttcaatgcgctgcgccaagtagggaagaattttgagaagattacgctgcgtgtccagagcaaaagcaaagatcaggtcagacattattactatcgtcttgttcgacgcatgaagaaacttctcggtcctgagttctcgctcgatgcaaaaaattccaaggacaccattgctgctatgctctgctggtggtctctgcttgaaaaatttagctgcagtgcatcaaaactgcatctgaagcctcggagattcaaaactttcgtagaagcattgggaaatcaactactaaaggatagaaataaaaccagaaaaaagtgtccacgtggggatgtgtgcctgtcctcttcatcttcggctgtcaacaggactcctggaaatgaatctttctcagtaaaactcttggctgtggatgtctccaatggtagcaaagtaggatcttctaaagggtcatttttcaaaaaggtcacagaaccaaattgcagtaacaagtcaggtgcaactaaaggggacctctccgccacaagaactgtgaaacagaaaagaagagtaggtggtgttgttgcatctgctgcatataaaaaatgggagagagctgccatggctggtgtttctttggttgctgatgcagctgaagagcttgagcgcaacacagtgaacgctgatgcaagaatgttatctccatcatcaagcaatgcctgcacagttgatggtcttggcacaaatcatataaaggaagcagatcaacaagcacctgcaaagctaaagttgcagctatttccaataaatgaagctacacgaaaggcattagagaaggatgaacataatccacatctggaactcacattaagtgctaggaaaaaaatatcatcagtactagaacatttgaaccgcaagtggggcaactcaaacattgcatctggagagcttttgctttttccatattgtgctcatcaagaagatttagctacatatcagaggtggaccacaaaagatactgtcgcagtggctgacgttttcctttctgtgaatagcccatctgtttttcgattaaggtatggttggttttcccttgctgagcttgaagcaggcgtaagtgaaatatctttgactcattttgagaattgcttgatacctgaagacatccatgccaaatctcccttagaggcttgtgtgcaaaaggatggtaattcgctgagtagttgtgctcctgagcaacacccttgtggttcgaaagatcagtcagcattattgtttgctatgccatctagtacaggcaagagtgctcaggtgccagagcagtgcattgatgttctcccctcacagtttggcaggcagaatcaagaccaagttaccacgaaccaagtttttgaggttgatcaagggatggattgtgctgcagtatctgaaggagagtgggcagatacccttactgatatcagtgttggatacttactgacagaagcttccagaggtgctaatactgattgtccagggacatctgttgtcaaaaacacactgttgcttgagaatccctgcagctatgattcatttgatgctgctgttgctcttcatgcttctcgttataaatcagcagagcagccagcccttgcatcccattcaaccatctggggtgctgaagaaacctgtgacgcattcagttttaacctaccagcatctaggaagcgagaaggttcaaataattcagctagcagctctcccgatagtgacagtgatgttcatccttcaaactcagaagggtttcaatgttttcttcaggacttagctggagcggcggttgctcataatccttgtattgacgatgccaaagatgtagagtcactttgtgctgaatcgccacctcgaagtgaccacgattctgctccgaaggatcaatctctagctgacttatactggcctgattcacttggaccattggacttggacataccgtccgcgacataccatgctgatgacttactcctaggggacagccagaatagttggaaccgcatgatggcgaatagcctggatgcatttcgaaacctgtcgttcttcacggcagataagaatgactcgataccatccatcatgtagagctctgaatactggtgcttccttcatgcgcttgcgtggtgaaattgctacgttggctacgaaggtttaccgccaacgatgctgtgcatctcgctgaagaggctttatattgtccaagtgagctgtttgtggctagatccaacagctgcggacttgctgtgcgtttgcagtcaagagggacgcatgttgttgtaaagtagtaacataagagctgttcgtgctaacatgtatgtcgtgtaaattgtggtgttcctgtaaaaaaaaaaagctcacacaatcgcttggttacaataaagcttctcctgccgtgtaccagatc

SEQ ID NO: 27588 - DNA, 928 bp, Oryza sativa
  ref <308>: DATABASE ACCESSION NUMBER: AK103030
  ref <309>: DATABASE ENTRY DATE: 2002-08-28
ggtcgctgcggtgcacagaggctttgggggaagcagagccatggtccgggaagagaagcttgactttgtgctggtgccgctgggcctggccgtgctggccgtctaccacctgtggctcctctacgccgtcctccgccaccccacccgcaccgtcgtcggcctcaacgccatcgcccgcaagcgctgggtcaccgtcatggtggccgtcgaacacggagaagaacggcgtgctggccgtgcagacgctgcggaacaacatcatggcgtcgacggtgcttgccacgacggccatcacgctcgtctccgtcatcagcgtcttcctcggcgccacggcgggaaggtccccggcgtccccctcgtcgtcgtcgtcgggggcgccgctgctggtatacgggagcaagaccggggaggtgttcgcggtcaagtacctggccatctcgctctgcttcatgctcgccttcgtctgcaacgtgcaggccatccgcctgtacgcgcacgccagcttcctcctcggcctgccgcccgtcgccggcgagggggagggggaggcggcggcggcggcggcggtagcgcgggaggagttcgcggcgtacgtggcgcggacggtgaacagggggagccactcctggtcgctgggactccgcgccttctacgcgtcgctggcgctcttcatgtggacgttcgggcccatcccgatgctggcgtgcagcgtgctcatgtgcggactgctctacttcctcgacaccaccagggagcgcgccgccgccgtggccgggatccaccacggtcacaaggatagcaccgtgtagcagcactagtagtaagtagtaaccagtttctcgatggcatggatgtacatctattgatctatagacccatcaattgttttgcttgagtaatgaactcagtcacaggagagagttagctc

SEQ ID NO: 27589 - DNA, 2330 bp, Oryza sativa
  ref <308>: DATABASE ACCESSION NUMBER: AK103031
  ref <309>: DATABASE ENTRY DATE: 2002-08-28
tggttgtaattggatataggcccctctcccgcgccgcctccgcctccccctcgccccgtccccgtcgccgagcgccgccgccgccccctcaaaccctagccgccgccacccgttcgctctccctctgtcgcgccgccgcctccgcctccccctcgcgccgtcctcgtcgccgagtgccgccaccaccccctcgcgcctttgccacctcctccgctgccgccatcgccggtcactcttccacctgcacgcccgccggtccccaccccgacgacatcgacctccacgcccaccggccgcccaaccccgacgaactcgtctcctgcgtccctcaagcccgcaccggcggcgctcgcctcggtggcacagggggaggaggacgacgaagagaagacggaggtggatgacggcggtggcggcggcggctgcgcgcggacgccggatttggggtgcccctactactacgctccaccgaagacggtgacgacgacgccgccgccgcctcctcctgcggcgtcggcggttggagggtgggatttctttaacccgttttacggggcgcccctctgccgccatcgccgccgccgtgctccacctccgccgtcgtctcggagcgccgttgccgtcggcgaggcgagcagccatctccgccgctgcctccccctccccctcgtgcgccgctgccgtctcatcgccgtcttcgagcgcctccgcctcagggccggcccagcagtgcggccgcactaggccctcaaactcacaggtcccccacctagctccgtaagaatcgtaaagagcgatgccagagccgcttattccaaaacgcgatacgtctgagattgccgccgtgatgagtatgcgatgcgaggcatgtagcgattccatctgttttcgtttcttctaatggaaattgggagatgacttctttcctttcaaaaagaagagtagcgatcccatttatgccattgactgtcgactgtcgggctcgattctagcgccagccaccgtccccggccagccgctccacgagctgccctgaatcgggactgctagagtgcagctgtgcaagaaacgggctcactaccaatctgctcatctgcatatgacataggggaggttgagcttgcacgaagtggtgttcggcgtgtgttgtcgactaacttaccgtgcccatccatggtctaattaatcaggaatatttcatagctttgtaatttactgccatgttatggactcactaatatattgtttttttaattaccagccgtcctgatatcatgttattgagaaagtttgtatcgggtaaaagaaaatgataaatgagtttatagaataaagtaaggggccaatgtatgaaaaactgttggatgagattgatattgatatcatcaacaatagtttcacatatagaaatatttgaagaaatttttagataattcatgtaaatactaatttgtattcaggttgttttttgccagatgtggtctccatgcggtcggggtgaggtcttgaccaggctgacaggtggagaagcttggcgtgccttgatgagatcttcctcatgtccatcaccctaggccgcaagcggcgccattggcttctttgccaacacagggtctgctccgccaacgttgttgtcaattgtgtatttgagcatgttgattttgtgtgtgatgtgtaatctgcaagactgcaacagttgatcctatgttgatgacagtaatactatgggagggagggagaagctacgagcattggcccattgtcatgggtcatcccagcagactgtgtgccaccaagtagtagatgattggctgctacatccagagacgcttgccaaggtgccacaacgaggaataggccatgaagaagacataattttccccattttgtttgttggctctgtactctcaagaaactagcttccagagtgcatggaggcctgaggaagttgctcactactaatgtcagaatccacatgaatcatctatgcaggtcctgtactgcttcgaactgcaaggaactggcagtacaacctgatcttaatggttttcttgtcagtggagcttcattgaaggtaaagaggaatacaaacatattagaataattgtgtagacacaattacctgcctgattcactgaataccgtcttctttcttggttgtgtaccctgaattcatttacattatcaactctagcacggtgatgttttgcctaagatcttcacccttctcacctcggcattgaaaaatgcctgaaggggaacatacctttttccgtttgactttaaagtatgctatgcaactattaatgcttttatttattgtataaagg

SEQ ID NO: 27590 - DNA, 2338 bp, Oryza sativa
  ref <308>: DATABASE ACCESSION NUMBER: AK103032
  ref <309>: DATABASE ENTRY DATE: 2002-08-28
gagacggccgcgcactacctgcctgcctcctagtagtgggggagcgcgcggcgcgccgtcgtataacctcgcgctgagagcggagcggaatcggaagatcccgaggggtcaagccacaaaagttcggcgccaaccgtgaggaagaaatctgagagcgccgggcaggcggagcagcataaactagaacggaggaagctcccgcggcggagaggaagcggcgtccatttgctgtccgcgaggtcgtgcctgatcggttcagatgggttcgtctgcggttcgctgcccgtcttcgtccagttcctgatcagctcttaacaggcagaggacttgggaatgcagaaagatgtgcttgcacgacaggaagttaatatttcgtgcaaacaagatcccagcttggatcaagccgatgttgctggaccttcatgtgaatgtgctgcatagtgataccgtgctgcttttccgtgttttgaagcatagtagattgaaggactccaagtttgttgatcatcacattgacgacgacggataacatctgctgcattcattacctatactttgtagatacttctatagaagtggtgtggtggtgtttgctcattttgttgtgttccaataacttgatatgatggatgggaggtcaatcttgatgggccgttatgaggttgggaagcaattaggacaaggaacatttgcaaaggtgtattatgcacgaaatcttactaccggccaagctgttgccataaagatgatcaacaaggataaggtcatgaaagttgggctaatggagcaaataaagagggagatttcaattatgagattggtgaaacatccaaatgttcttcagttatttgaggttatagctagcaagagcaagatttattttgttctggagtatgctaaaggtggtgagcttttcaacaaaattgctaaggagggaaagctcagtgaggattctgcgaggagatatttccaccaattgatcaatgcagttgactattgccatagtcgaggtgtttatcatcgtgacttaaagcctgaaaatctgctcctggatgagaatgaaaaccttaaagtctcagattttggtttaagtgccctggctgagtccaagaggcaagatggtctcctgcatactacatgtggaactccagcttatgttgctcctgaagttcttagcaggaaaggctatgatggtgcaaaggcagatgtatggtcttgtggagtaattttgtttgtgcttgtggctggttaccttcctttccatgatccaaatttgatagagatgtacagaaagatttgcagagcagacttcagatgccctcgttacttttctgctgagctgaaggatcttatacataaaatccttgattcagatccaagtactaggatttctatcccaaggataaagagaagtacttggtacagaaaaccagttgaaataaatgctaaaaacagtgaggcagccacaacaaacagcatctcttcaggtgtagctacaacctcaggttctgcagagtgcagcacttctgaggaaaatcaagggtccttaagcctcccaaacctgaatgcatttgacataatttctctctcaacagggtttaatctatctgggttttttgaggatacgcatggtcaccaggaagaacggtttaccactaggcagcctgtgacaacagtacttggaaagctgaaggaattggccaaacgcctgaaactaaaagttaagaagaaggataatggagttttgagattggcagcaccaaaggaaggaaagaagggctttcttgaacttgatgcagagatttttgaggtcaccccttcattcctcttagttgagttgaaaaagaccaacggggatactatggagtatcgaaagctggtcaaagaagatataaggccagcactcaaggatattgtttgggtgtggcaaggtgatgagcacctgaactcacaatctatcctgcaaggagagcagcagcagtccccattgccaccagagctaccacaggatcagttgcaaccatcattgccacaacaggagaagcaggacatgcctgaaccaccgttgttgccacaagtaccacaagaagaagtgcaaacatctatccccgcagaacaaacaaagaattagttttaacagccaactggtaattcaaatgttcttgtcatccatgtttgtatccttcttttatgtctttgctgcttgtttctaattcctctggaattgcaaagctgtacctgtttgtacagaagtgcaatgcacttcaattttggaaactacaaaggaacacctccgagtgttactcctgaattttcgaaagagaaacaatcattgatg

SEQ ID NO: 27591 - DNA, 3729 bp, Oryza sativa
  ref <308>: DATABASE ACCESSION NUMBER: AK103033
  ref <309>: DATABASE ENTRY DATE: 2002-08-28
gacgagaccaaccacctctcgtctcctctctttctctctctcctccccccgcgcgatccgaccggccgccgaggccaccgacgacgacgacgacgcgcgcgcgcgagccctagcctccctctgccccccggatctgggagcttccacccctcccctccctcccatggtcccccgccgctgcgccgaggggcccaccggcggccaccggctgcgctgccgctgagatgcgaggcgacgcgcccgccgcctcctcctcgtcatcggcatcgtcacccccctcgctcttcggcggcggagacggcggcggcgagctgttcgggtccgcgcctgggccgctcgtcttcctgcccctgctcctgatccagggcggcggcatggacctctcccgcgtcggcgagaagctcctcagctccgtccgctccgcgcgctccctcggcctcctccctcccaccccaccgccgcccgcctcccgccccgaggttccagctagagctgcggcggcagcggcggccgcacgtgcgatcgctgggctgccaccgcacgagaagatcagcctgccttcgaattcggaggacttggtctccatctacgggagcaacccgcaggggcatgccgtgggtgagctcgaggaggtgttctttcaggaggagttcgacccaataaagtacattctgcaaagtatccctgcagagggtgattccagctatttcgataagcagtctactttgagattagcgcagctcgacaaaattgcagaacgactatcacatcatgttatgggtcatcatgaagaaatggtgaaggggatgcagttagtgatggagttagaacaagatttaaaggttgcaaatgtgatctgcatgaatggacggaggcatgtatcctcttcaaagaatgaggtatcgagggatctggttgtcaatgtaaaatcaaagaagaaacaagctttgctggatgttcttccaattcttacagaacttcgtaatgcacaagacatgcagatggaacttgaaagttttgtggagaaagaaaactattttcaggcgtttcaattattgcctgaatatttgcaaatcttggagaactattcaggcctttcttctgtacaagaaatggggcgtgggattgaggcatggttggcacgaacaatccaaaaattagacacccatttactaggggtttgtcagaccttccatgaggaaagctatctaactgttattgatgcctatgcgctgatgggtgacatcggtggcatggctgaaaagatgcagagtttctttttgcaagaagtactctctcagactcattatgtcctgaaagaaatgttggaagaggaggttggaaataatacgcagagaaatagatttacatatagtgatctttgtgctcaagttcctgagcccaagctccggccctgcttattaagaacctttcagagtttgttttcattgatgtgctcatattatactataatgagcttttgcccaggagtaaagagtatcgagtccgagggcgaaaactctctgacaggaaggaacaacacatcccagagtgcagatgaatcattaggtgattcaggtagaggtcatgcagctgaaatgagtgacaggacatcatcttctgatgtcagcaatcctgatactagcacatcaggaacagattcaccattctatcagctaaggacagatgctgcaaaacttgttgcacatgcatttgaaagagggcggagaaatctttggcaactagcaacaagtcgcttatctgtattactgtcctcttcagttgttttctcaactagcacgtatcaatttttgaagaactacgaagatctcaccatttttatcttggctggtgaagcattttgtgggtttgaagcgagcgagttccggcaaaagttgaagggtatctgtttgaactattcggtggcctttcaccggcaaaatatctatgcactaaagatggtactggaaagggaatcttggacaataatgtctgctgaagcatcacggataattagtttagcaggccttaccggtgatggtgctgctctaatctcaccaaccagtcgtatctccaccttgccaatacatggttctactatgtctgatacagggaaggaaaaaaatggatttgctgcttggactaagattgaaaacccatttttttacaaggtagaaaatggcaccacggaatccccgaagtccaatatgatgttcaactcagttgacaatagttctgcccatggaagtactaacaatggcaatggaaataaagcacctcttgacgaagagaatgaagaccttcttgcagattttattgatgaagatagtcagttgcctagtaggttagcaaaaacaaaaattgtgaaaggcaattcttcccattggaaggatggggacatttcatcacagacaggatcatcgctttctttattaaggatgatggataaatatgccagattaatgcaaaagctggaaattgtcaatgttgagctttttaagggtatatgccaactgtttggcatcttttatcactacatatacgagacatttgggaaccaggacaggggtcaaagtggcaagtctttacctgatcatcaatcgtttcggcttagagtggctttgtcaaaaataacacaagactctgaccagtggatcaaaccacagagtatttcatattcaccttcatcacccgtatcaatggatgtgatgcctactgcgcctcccagctcaatgttcaccttgtatggtttgaaggagcgctgtgcagctgctgaaacaatatcattggttgctcgagttttgaacagatctcgagcacatctacattccgttctgtctcaaagtaacacttccattcttgaagaattctttgggacaatggttgactctgttccagatttggctgagcacattcgtagaacaagtgcaaggatgcttttgcatatcaatgggtatccagataagattgcaaatgccaaatgggaggtcaaggagcttggcatggagcataatggctatgttgatttgttattgggtgaattcaagcactacaaaactagattggaccatggaggaatttccaaggagctccaagacctcttgctggagtatggcatagatagcatcgcagaagttttagttgaaggtctctctagggtaaaacggtgcacagatgaaggacgggctttgatgtcactggaccttcaggtactaattaatgggctgctgcacattgtatccgcaaatgttaggccaaagctgcaaattgtgggtactttcataaaggcttattatttgccagagaccgagtatgttcattgggcacggtctcatccagaatacagcaaaagtcaggttgtcgggttggttaacctggttgcgactatgaaaggatggaaacggaaaacgaggttagaaaccatcgagaggattgaggcaggaccataggcgaaaacggctgtaattgtttttgttttcttcagctgcatatagagctgttgtgttttgctcccttattttttttccttttcttattatttcttttttttcttgtcgattctttcacctttcggctcattttgaagctaaccccatgattcacccttggtgtatattgaagcgtcgatctttgtatcatattactggggtaagtactcaacagcaaaaataacagtatgtatgtacaccatacatggagcattggctcaataaataccaatctttttct

SEQ ID NO: 27592 - DNA, 1340 bp, Oryza sativa
  ref <308>: DATABASE ACCESSION NUMBER: AK103034
  ref <309>: DATABASE ENTRY DATE: 2002-08-28
gtcacgcgcgtcacggacaccacccagtcccctccccacaccacgcgccgcccaaaacctccgccgcgtttcgcaccaccaccaccgccgccgaccatggcctccttcttcgccgacgacggcgccgacgagctcccccgcaccgcctcccaccccttcgacgccgacgacgacgccgcgcccgatgcatcaggaggcgccgccgccgacgacaccggatacggcggctacgcctccttcgtcgacggcggcgtagaggatgtggaggaggaggaggaggagatcgccgtggagtccgagggggtcccgatcggccacgtctccggagggttctcgccctcgcccttctcccccgacccggagctggacggcggcgacggccctatcctcccgccgccggcccagatgggggcggaggaggggatcctcctccgcgagtggcgcaggcaaaatgctatagttcttgaggaaaaagagcggaaggagaaggagctacgggcccagatacttgctgaagccgaagagtttaagaaggctttctatgagaagaggatacagaactgtgagacaaacaaggtccataacagagaaagagagaagattttcgtagctggccaggagaaattccatgccgaagcagacaagcagtactggaagtcgatatcggagctcatcccacatgaaatagctaccattgagaagcggggaaagaaggacaaggacaagaagccatccatcacagtcattcagggccctaagcctggcaagccgacagacctctcacgaatgcgccagatcttagtgaagctgaagcacgctcctccaccgcacatgatgcaacctccaccagcgtctgctgctaaagacggcgcaaaggatggtgctaaagacggcacaccagccccagcaaatggaaccaagaagcctgcagagagcaaagagaaacctgccaacggatcgcctgcggaagcagagaaggagcagcctgcagcatcggagtaacttatggtagctctacaggaacgcccgaaccttgactgcagatatggaaatgcattttatttctaatccctggatctgtctatcctgtatttatctttttatggagatttgcgtcaggatggctatgtatcagctctcagaacattcagcttagtatcacagcaattgtactctttacttgttttcacctggtacaagtagcttcagtggatactttgtgatcataagttcagaactgaaagcgtaactgaatgatggatatcagacacgatttcttccctgtggatactctgtgatcataagttcagaactgaaagcgcaactgagtgatggattat

SEQ ID NO: 27593 - DNA, 2038 bp, Oryza sativa
  ref <308>: DATABASE ACCESSION NUMBER: AK103035
  ref <309>: DATABASE ENTRY DATE: 2002-08-28
gctttggggtgagaacttctttgacccggccacaaagaagtggaccaacaagagcactggctcagctacctgcaaaagaggtttcgttcagttctgttatgagccaatcaagcaaatcatcaacacttgcatgaatgaccagaaggacaagttgtggcctatgctgcagaagcttggtgtggtcatgaaggctgatgagaaggatcttatgggcaaggctctcatgaagcgtgttatgcaaacttggctgccagccagtaatgcacttcttgagatgatgatataccaccttccatctccttcgaaggcccagaagtaccgtgtggagaatctgtacgagggtcctcttgatgatgtctatgcaactgctatcaggaactgtgatccggaaggtcctctcatgctgtatgtttccaagatgattccagcatcagacaaaggtagattctttgcctttggccgtgtcttctctgggagggttgcaactggcatgaaggtgcgtattatgggtcccaactatgtccctggccagaagaaggatctgtatgtgaagagtgtccagcgtactgttatctggatgggaaagaaacaagagtctgttgaggatgttccttgtggtaacactgtcgctatggtcggtctggatcagttcatcacaaagaatgccaccctaacaaatgagaaggaagctgatgcctgcccaatcagagcaatgaagttctcagtgtccccagttgtgcgtgttgctgttcagtgcaaggttgcatctgatcttcccaagcttgttgaaggtttaaagcgtctggcaaagtctgatcctatggtcctctgtaccattgaggagtccggtgagcatatcattgctggagctggagagcttcaccttgaaatctgcttgaaggatctacaggaagacttcatgggtggtgctgagattattgtttcccctcctgttgtctccttccgtgagactgttcttgagaagtcctgccgtacagttatgagcaaatccccaaacaagcacaaccgtctttacatggaagctcgccccttggaggagggactggccgaggccatcgacgatggacgtattggcccacgtgacgatcccaaggtgcggtccaagatcctgtctgaggagtttgggtgggacaagggcctcgccaagaagatttggtgctttggacctgagaccactggccccaacatggtggtcgacatgtgtaagggagttcagtatcttaatgaaatcaaggactctgttgtggctgggttccagtgggcatcaaaagaaggtgcattggctgaggagaacatgcgcggcatctgcttcgaggtatgtgatgtggttctccacgctgatgctattcacaggggcggtggccaggtcattccgacagcgaggagggtcatctatgcttctcagctcaccgcgaagccaaggctgctggagccagtctacctggtggagatccaggcccctgagaatgcccttggcggtatctatggcgttctgaaccagaagagaggccatgtgttcgaggagatgcagaggcccggtaccccgctgtacaacatcaaggctaacctccccgtcatcgagtcgtttgggttctcgagccagctccgtgccgcaacatcgggccaggccttccctcagtgtgtctttgatcactgggacatgatgacttctgatcctctggaggtgagctcgcaggcgaaccagctggtgctggacatccgcaagaggaagggtctcaaggagcagatgacccctctctcggatttcgaggacaagctctaagaaaaaacccttttggtctcgcatatgtttttgccattaatttacctgttctaatagctgttctactattgttaaagagttataagacaagtcagaaatatgatgtgtttgttacacatcaagtatcggtgttggtagtgttgtgctgtggaactatatattttgctgtctggtgatatgcaacagatatggaactttgataatgtatctgttgatagtttttacggttttctg

SEQ ID NO: 27594 - DNA, 2728 bp, Oryza sativa
  ref <308>: DATABASE ACCESSION NUMBER: AK103036
  ref <309>: DATABASE ENTRY DATE: 2002-08-28
agcttatgatattgaggattgcatcgacctcttcatccacaagttgagttgtggcgatgcgaatgccaactttgttcagaagataggaagcaagataaagaagttatggggcaaacaccagatcacagagtgtatccaagaactgaagaatcgggttatggaggaggatcaacgtcgcaagaggaatcagatcgatgatttcatctccgagccaagtgtggtggaaattgatccccgtctaccggcattgtatgaggaggtggagaggctcgtggggattgatggtccaagggagaagatcattaagtggatcatgaccaaaggcaagccattagagcaacgtaaagtggtttctattgttggtttgggtggtcttggaaagacaactctagctaatgaagtgtacaagacaatacaaggggattttaagtgtataacttttgtgtctatttcacgtacccctaatataaggaagatcttggttgatatgcttaaaggactcgggagcaatggagatgtatcggaagatgagcagaacctcatcagtcatcttcgaggattcttgaaagataaaaggtacctcattgtttttgatgacatttgggacataggtgcgtggaaggtggtcaattgtgctttcccagagaataatttgggcagtataatcataacaacaacaagaaacactgccgtagctgaagcatgcagccgtaccacatctgaaggctatcttcacagcatgcagccactagaagagcaagattcacagagattattttaccggagagcttttaattctgagagttgctgcccgcctcacctggaagacatctctcatgccatcatatcgaaatgtcgtagtttaccattagctataatctccatagctagcttgctatcaatcaaacctgatacagaggaccagtggatgcaagtgcacaattctattggtgttacactaaactcagacgtcgaagtgagaaaaattttgatgctcagttattatgatcttccttatcccctgaaaaattgtctgttgtatctcagcatgtatccagaggattatgtaattgatagacaagaacttatatggagatggatagctgaaggattcatcattgaagcgaagggaaaaacacgggagcaagtaggagagaactacttcaatgagcttataaatagaagcttgatccaaccagtttatatccaatatgatggtagggccagttgctgccgagtccacgatattgtgcttgatcttatcattagcctatcaactggacagaatttcgtcacaatagtgcatgaacaacagcattggagttctttcaagaagattcggaggacctggttcccatccaatggcacagataatagaatagtcaaggagattacgaacaactgctcacatgttcgttcgctgttctttgacagtcctaaaccggagcaaataccacaatttaagaaatgccatgctctgcgggtattggttctggatgggtgcatgagcctggagagccagcatattaacagcctaacataccttttccagttgaagtatctgaagctcaatgttgcaaatgttaccgagatgcccaaggatattggacggctgcagcaactagaaacactaattattcgtggaggaggacatgtcaacgaaataaacattccgtcaagtgtttgtagactgcaaaaactagagcgcctaattgttgattacccaatgagattgccagatgaaattggatttttgcaagctttggagatgctatctcttttttacaacatagagtacagcataaaatgtttacaagagctccgtcggctgaccagactaaggtatctgcgcataaggacgccttttggaggtgatgtagcaaggttcgagaggtacaaggacgccttttacatgactctcgatgagttaggtaaaaatagccttcaatcattacatgtacatgttacaaccaagttttcagatacattgatggattcatgttgtagtagtgctcccggtctcagagagctttctacttctggcgttggaatatcaaaactttcggagcagatgatttccctttctaatcttgcctatcttgtgatcttctataatactagaagcaatgatcagaaagatatcaacctccttgggtgtatacccaagcttctctatcttaaagtaatattcgcccaaggctgggaggatggactcactgtaggctgtggtggatttccctgtctaaaggagttgatgttcaggcatagtcgcctgcattggttgttgtttgaacctggcgctatgccaaaactccaaaggctttctattgagttgtttgcacaaaaagcagcatccaaacttgggtttgagcagagctttgtgcacctttccagcctccagcatctaatcgtcgttctcgattgttctgatgcccactacaagggacgtgaaagctttggaagatgccattaggaacgtggccagcatccagactcgctgtcttactctcgaaattctaaggcgctatgaagatgaaatggtaaaggaagatgaagaggagcagctaaaaggcagtacagagggaggtggaactgaagagcatcatattcagcagccactgatcatagtcggaaaccagaagcgctggaagccagtgctattcgggaattcagacaaagtgcaagctagctaaacatttaatatatggtcctgttgagttagcgccgt

SEQ ID NO: 27595 - DNA, 2501 bp, Oryza sativa
  ref <308>: DATABASE ACCESSION NUMBER: AK103037
  ref <309>: DATABASE ENTRY DATE: 2002-08-28
ggctctcctcctcgacttcccttccaccaccacccgccgcgcggcgtcgccgatgccaccctgcgcgctcgccgccggggggagcgcgcggcggcggcttcctccgcggcgctgacgagcgggggacctcgggggttgcgcgggtgggcggcggcggtgaaggtgcgtgtgtgcgcgcgggtgggggtgatggggaaggaggggaagcggcgggaggaggaggggaggcggaggaggaaggggaaggggaagggggcgggggagatggtgctgcagcaggaggaggaggacgcggcgcccgcgatggggtgctggatccgcatcccgcgcaggctcggcggcggctgcatgtcgtcgcgctccaaggtcgactcctccaccaccaccagcggcggcggcggcggcggcagcgctcgcgtcggcggcgaaagcaaatcagcgaatgatggttgtcgagaccattcagttcaaccaatggcctctggttccacaacatccagtaacactggaagcatctcaccttcgtccatagtcggagaggaacttaaactagctttccaactccgtaggtttacatttaatgaacttaagtgtgccacaagaaacttccggcctgagagtctccttggtgaaggaggttttggctgtgtctttaaaggttggattgaggagaacggaactgctcccgtaaaacctggcacaggattaacggttgctgtcaagacacttaaccatgatgggctgcagggccataaagagtgggtggcagaagttgattttcttggaaaccttcaacatccacacctagtgaaattggttggttactgcatcgaagatgaccaaaggttgctagtgtatgaatttatgcctcgtggaagcttggagaaccatctttttaggaggtctttacctctcccatgggccatcagaatgagaatagcacttggtgctgctaagggccttgcttttcttcatgaagaagctgaaaggccagttatctatcgggatttcaaaacttcaaatattcttttagacgcggactacaatgcaaaactctctgattttggactagctaaagatggccctgagggtgataaaacacatgtatctactcgagtcatgggaacttatggatatgcagctccggagtatgtcatgacaggtcacttgacatcaaagagtgacgtgtacagctttggagtggtgctactggagatgatgtcaggcagaaggtcaatggacaagaataggccaaacggtgaacacaacctggttgaatgggcgcgtccttatcttggagaaagacggcgattctataggcttgtagacccccgtctggaggggaacttctccataagaggcgctcagaagacagctcagctggcctgtgcctgccttaaccgggatcccaaggccaggcctctcatgagtcaagtggtcgaagtcctcaagcccctcctgaacctcaaagacatggccagctcctcatacttcttccaatccatgcagcaggagcgtgccgcaagcctcggcaacccaattggcagccaaagcatgaaggcacagggcaccttcgcgcgcaacgggcagcagccaatgaggagcctctcctatggcccgcacgcctccccgtaccggcagtccccaaggcccaacaacggcaaactgcaatgagagagtccttggtgctcattctgccatccattcaacaatgatcagtgcaagactggacttcctatccaacctgggtgcattggtggtgcacccaaccaacctaccatggcacctgggagcaccctgtgtcgtggaggaaaccgggtttccagaacgactagaactgcgcgcaaacgtgtacaatgtgcaaactttcatcttgtcgcttaagcttctacatttccaattctagcttacccttgacttgggagagggggtggatcaaaccgggtttttcttttgcttttcttctgaacaaatgctcagactgaggtggttaggtttgccccttcccggagaatgctgggtttgggctcttactcgcactgtcatcacctgtcggtcgccttcgccttgtaattaatcgccatgtggagaatggcaaaaaaaaaggggaggcaaattggtcgtcatcaaagaccgtcgtcttcgtcgtcgccatcatcattccatgatgcttgctggattatggagatggtgaggaagggaggaagggcaggcaggtcagttaaggcgcatgtgccattgatggggtgacagagctaagctccgctttcaggtaggccgtggtacgcgacgcacccctccttcctttgacagatagatcatgatcatatgcatgcatgcgacgatgcgagtttggtaatctaagatgctcgcacgtgccattactcccctgatcattttacccatcctttttaccggctggtaactctctactcactctcttgtctgtgatggattgattgttactgcttcttgttgtactgcgtcgttgtaagtgagtc

SEQ ID NO: 27596 - DNA, 2674 bp, Oryza sativa
  ref <308>: DATABASE ACCESSION NUMBER: AK103038
  ref <309>: DATABASE ENTRY DATE: 2002-08-28
gatcgacggtataaagcgaggcgacgaactgactcgactcaactcaaccccccccaaaaaaaagaagaaaaaaaagaaaaagaaaaaaaagtcgtcgaaaagcgagagaaggggatcgattcgaagagagaggaggtaaagcggcggcgggagaatcttcgccggatcggcggcggtggcggaggaggaggaggaggaggaggaagagggtggtgctgatttggtgtggaggcggggaaatgcgtgatgtgtgagatctagggcgtggggaggcggatcgcggcaatggcggcgcatcggtgggcggtgtgggcggtgctgctgctgcggctgctcgtgccggcggcgcgggtgctcgccaacatggaaggtgatgcattgcatagcttgaggactaatttagttgatcctaataatgttctacaaagttgggacccaactctggtcaatccgtgcacttggtttcatgttacttgcaataacgacaacagtgttatcagagttgatcttgggaatgctgcactatcaggcactttggtcccacaacttgggcaactaaaaaacttgcaatacctggagctctacagtaataacataagcggaacgatacctagtgaacttggaaacctcacaaacttggtcagtttggatttgtacttgaacaacttcactggtccaataccagattcacttggaaacctattgaagctacgattcctgcgtcttaacaataacagcctttcgggttcaattcctaaatcactaactgctatcactgccctacaagttctagatctttcaaacaacaatttgtctggagaagttccatcaactggttccttttcattattcacccctatcagttttgccaacaacccttccttgtgtggtcctgggaccacaaaaccttgccctggtgctccccccttttccccacctcctccatataatcctccaactcctgtgcagtcaccagggagttcatctagtactggagcaattgctggtggagtggctgctggagcagccttgctatttgctattcctgctattggttttgcatggtatcggcgcaggaaaccccaagagcatttctttgatgtgcctgctgaggaggatccagaggtccatcttggccagcttaaaagattttcactacgagaactacaagttgcaacagataccttcagcaataaaaacattctcggaagaggtgggtttggcaaggtctataaaggaagattagcagatggttctttagtagctgttaagagactaaaggaggagagaacacctggtggggaactacagtttcaaacagaagttgagatgattagcatggctgtacatagaaatctgctgcgtttacgagggttctgtatgacacccacagaaaggttgcttgtgtatccatacatggctaatggaagcgttgcgtcacgtcttagagaacggccaccatcggaacctccacttgattggcgaacaagaagaaggattgcgttgggttccgccagggggctgtcctatttacatgatcattgtgacccaaagattatccatcgtgatgtcaaagctgcaaatattttattagatgaagactttgaagctgtagtaggggactttggtttggccaaactaatggattacaaggatacccatgtaacaactgcagttcgtggaacaattgggcatattgcaccagaatatctttcaacaggaaaatcatctgagaaaactgatgtatttggttatgggattatgcttttggagcttataacaggacaacgtgcctttgaccttgctcgtctagccaatgatgatgatgtcatgctactggactgggtaaaaggattactcaaggagaaaaggctggagatgttggttgatccagatttacagagcaactacattgatgttgaggtagaatcactaatccaggttgctcttctttgcacacaaggctcccccacagaacgccccaagatggcggaggttgtgaggatgcttgaaggtgatggccttgccgagagatgggaggagtggcagaagatagaagtagtacggcaggaggtagagcttggccctcatcggaactcagagtggattgtcgactcgacggacaaccttcatgcggttgagctatcagggccgaggtgatgacagcgcactggtagtttgctgctaattcttgtccgtcggaagagtgatttttatcagccatcctagtcgaatcgccatttgttcataccaaccaattggcccaatgtagccagctacaactatgttttgatgtatattgcttgatttgctccttgatgtgccgccttggatatcggtgacccgaaaacagcaggagcccaaggaactattgtcctgaagcttgcaagttgcaacaagatcccagtatgttaaagctcacaaggtagcagctaggagtgaggttgctgcggctgtttgctggacctgtgaaaattgtactgactggtgacatctaactattttgtaccaaatgtaaggaaaaaccatggtattattactttggcctcctctgggaaaggttcagaactttcagatgatgcagttggcctcactggtatactctatttggacatttgattatgatgtgtttactgtaaatgatacccagttctgaatcaaatgtaccttctgc

SEQ ID NO: 27597 - DNA, 1292 bp, Oryza sativa
  misc_feature (361)..(361): "n"=any one base of a, t, c, or g
  misc_feature (452)..(452): "n"=any one base of a, t, c, or g
  ref <308>: DATABASE ACCESSION NUMBER: AK103039
  ref <309>: DATABASE ENTRY DATE: 2002-08-28
aagtatcttctccgtcctcctacctcctcctcctcctcctctgccgccgcctcttcacaccgcaggaatggtactaactctcgccgctgggaccggctcttggcctccgggcgcgtctgcctggcaggagacgcgcaaacgctccgccccggagatgcgcggtcggcgtcggatcacgccccgctcgagagggcgcaagcagcccataaaggtgtgcgcgtgccccacgcactcgcgtcccgattcgcggcgcagcggagcatccgtctgcggtcgatccaatgagcgctatgccagcgcgccaggcacgcacgaacgattagtgcatcgcgaacgactgtgtaactaactccaacgcaantatatcacgtacatagggcagccagcagtaccgtgttgcacatgaccacagcacacaatctcgatgtgcagctctggtacatatctggaangaatgtgagggaccaccttccccgaccacctcatacttggggaggaaggtggacttattggagatgccttgtccgagtatctctggtgcattgatcctttagatggagccaccaactttgcgcatggttaccctagcttttctgtatccattggagttctgtttcgcggaaagcctgctgcttcccctgtggtcgaattttgtggtggtcctatgtgctggagcactcgtaccgtttcagcatcatctggtggtggtgcttattgtaatgggcaaaagattcatgtcagtaagacagacaaggtggaacgatcacttctggtaactggttttggttatgaacatgatgatgcatgggtgaccaacataaatttgttcaaggaatacacagacattagcaggggagtacgaagactaggttctgctgctgctgacatgtcccacgttgccctaggcattacagaagcctactgggaataccgacttaagccttgggatatggctgctggtgttctgatagttgaagaagctggttggatggtgtcacgcatggatggtggggagtttaccctctttgatcgttctgtccctgtttccaatggtgttgtacatgatcagcttttggtacggattggccctgccactcgagatcttaaaaagaaaggagtctgatttctccttgtggtttacacccgacgaatacctaaccgtcttttaagttcaactcttcacccagagagattttatgctcctataagaaaagagaagaacacaggctcttatgttacaataccatgtacctgaaatgaatatttgtttattgaagtccgttgaagcagcc

SEQ ID NO: 27598 - DNA, 1718 bp, Oryza sativa
  ref <308>: DATABASE ACCESSION NUMBER: AK103040
  ref <309>: DATABASE ENTRY DATE: 2002-08-28
ggcctcccatggcctcctcttcctcctcctcctccgcctcatctcatgcctcactcgcctagaacccctcctcctcctcccgatctccgaggcaatcctcctcgaattccccgcgccccgatctccccctgacgccaccctcctcctccgccccggatcgccccgcccgatctcgccgcggggtcgaatttccccttctcttgtctccgatcagggccgcctcgatcgaaggcggcgccgcgccgaccatcccaccttgtttggttgtaatttcttcttgtcgcgtgaggaggggggcgtggcggcgggggagagcgcgtgagcgggcgggagatgggggcgccgaagcagaggtggacggcggaggaggaggccgcgctcaaggccggcgtggcgaagcacgggacggggaagtggaggaccatcctccgcgacccggaattcaccgcgctcctgcggctgagatccaatgttgacctcaaggataagtggcgcaacttgagtgtcactgctggaggatatgggtcaagagagagggcaagggtagctttgaagggaggcaagcgagggcctaaggcccttgctgaaccgatggatgccgacgaaaagaaccctgacattgatgataatgcaatcattgatgcacaaccgttggcagtggttgttgagcccatgcaacttgagagtactccagagaaagagaaatcagttgctaggcttgatgaccttattttagaagctataaagaagcttaaggaaccgtctgggtctaatagaacaacgatttcttcatacattgaggagcaatactggccacctgaagattttcaacgattactttctacaaaattgaaagcattggttgctactggaaaattaatcaaggtgaatcaaaagtacaggattgcaccaagttcgaactcttcaggtggaaagagcatcaaggtgtattccactggagaaatgaacatagaaaataataatgttagacagctgagtaagccgcaagtggatgctgaacttgataagatgagaagcatgagtaaggaagaggcagcatcatttgctgctagggcagttgccgaggcagaagcagccattgctgaagctgaagaagcagcaagggctgcagaggccgcagaagccgaggctgacgctgcaaaggcttttcttgatgctgttgtgaccacgatgcaaaacagaaatcatgcttctgcgatgcttcgagcttgctgatcttctctacggattcagattgggtttcagccagtgaaacttgtcaagacaacgctggtgttctgctacaaagcttttgttgatagatgagattcttgtatagccttatagatcaagatgctttagtgaggggggttttcaacattttgctctgatcctgaaccctaactactcatatttgagttgatgtcatccagtggtatccaattagatacatatatcacgtgactggtgtttgtgctatgttaagacaatcaacaactccaataacaagggcgaatgagaatttagtctgaatttccccccgttttgtattgcttttgtaattagccttttccctttggtcaagcgaagtcatgaaatagtagaattgtagttggaaagacatgtcgtatgagctgtgctaatttatggacatggctttaatatgacaagttggtggtggtgttttagcattacattacaactaattagcacatgct

SEQ ID NO: 27599 - DNA, 2562 bp, Oryza sativa
  ref <308>: DATABASE ACCESSION NUMBER: AK103041
  ref <309>: DATABASE ENTRY DATE: 2002-08-28
gagtttcctcctcattattcctcctcttcccccctcgccgcttacaacatccatccccaaacccgcattcaaaacaagcaaccctcctcccgaatcgaacaaggaaacagatatcgcctctaaaacccccatcgtctcgtctcgtctcgttcccctctccatcttccgcggctttccgcgcgatccaccgatccggtttccccgcgccgtgcccggagtcggcgctccattcccgcgccgggttttggggtggtgtgttgatgcggcgggattcgagccctggcctgtgagttgggcgtcggctcggcggctgcggggtcggcgcgggcgcggacgcggcggatgtctgctatgaggcggcggccggtgctgccgactcaccaggacgacatggagaaggtgggcgggaagccgccgcagtcgcgcctctgcttcctcgccacgctctgcgccatgttctgggtcctcatcttctacttccacttcttcgtcatcgccaacgagcctggctccgcgggggcggacaccgccgccggcgccgcggcgagcattgcccgcgcagaacttccgctccccgaacccgagcgcgtctccgatcccgcggttcccctccctccgcctgccctcgtctcggagccgccacctaccaccgctactgtcgccaaagtggaagatgaggagaagcccacggccgtcgcccaccaggaggcggcgcccagggattacgcgttccagcgagcgctcaagaccgcggagaacaagagcgacccgtgcggcggccggtacatctacgtgcacgagctgccgccgcggttcaacgacgacatgctccgggagtgcgagaggctcagcctctggaccaatatgtgcaagttcatgagcaacgaagggcttggtccgccgttgggcaacgaggaaggggtgttctccaacaccggctggtacgcgacgaaccagtttatggtggatgtcatcttcaggaaccggatgaagcagtacgagtgcctgaccaaggactcgtccatcgctgccgcggtgtttgtgccgttctacgccgggtttgatgtggcgaggtatctttgggggcacaacatttcgacgagggatgccgcgtcgctggatttgatagattggctgaggaagaggcctgaatggaatgtgatgggcgggcgtgaccatttcttagttggcggcaggattgcgtgggatttcaggcgcttgacggacgaagagtcggattggggcaacaagctgcttttcatgccggctgcgaagaatatgtcgatgttggtggtggagtcaagcccatggaatgccaatgattttgcgataccatatcctacttacttccaccctgccaaggatgctgatgttttgctttggcaggatagaatgaggagcctggaacgaccatggttgttctcgtttgctggggctcctcgtcctgatgatcccaagtctatcagaagtcagcttattgatcaatgcaggacatcaagtgtctgtaaattgctggagtgtgatcttggggagagcaagtgccattcccctagcgcaatcatgaatatgttccagaactctttgttctgcttgcagccccaaggtgattcgtatacgagaagatctgccttcgactcgatgctggctggttgcattcctgttttctttcatcctggttcagcgtatgtccaatatacgtggcatcttccgaagaactatacacggtactctgtcttcatccctgaagatggcgtccgtaagggaaatgtcagcattgaggacaggcttaaaagtatccatccagatatggtcaggaagatgagggaagaggtcattagtctcatcccaagggtgatatatgctgatccaaggtcaaagctggagaccctgaaggatgcattcgatgtttctgtagaggcaataattaacaaggtgacacagttgagaagagatatcatcgaagatcatgaagataaagattttgttgaagagaatagctggaagtatgatctgttggaagaagggcagaggacaattgggcctcatgaatgggacccgttcttctctaagcccaaggacaagggtggagattctactaatccatctactaatgctgccaagaactcctggaaaaacgaacaaagaggtcagaactaaaatacaggtagttagatatgtgatcgaggaaaggaactagatatcctctctagagaagctccttgcaaataccttgcccatatgtcaaagatcctccaacgcagtagctctgatgatcatgtatgttcttgatgatctagcccctacaggtgtaagtggtggtagaaaagatgcttggggaaaaaaatgcacggccttcgagttgcccttataaataccatttcacactctatttttgttttgctttgctcaataatcctttgtaagtccttacgggatttataggtatatcaattttgctgttgtttctgttttgtttgctttgatctgtatgtgtatggtttagaatttgtgtatactacctttttatactcacaattagtaagcaatcaaagagatttttgt

SEQ ID NO: 27600 - DNA, 1586 bp, Oryza sativa
  ref <308>: DATABASE ACCESSION NUMBER: AK103042
  ref <309>: DATABASE ENTRY DATE: 2002-08-28
gaaaaaggcaaagctccttccttctcctctgtctcctcctctctagagagagaaacagaaaaaaggaggagactagggctctgctcctccccctgcgccggttggtcggagctctgcctcctcctgattctgctgtcccctcccctccccgatccacctcctcctccatctccttctcctcccgccgatccgatgcgtcatcactagcctcccctcccgcgcttccaccaaccactgcccctccaccctcacctcgtggtttggtaatttggttggccgcttgtccccttccatccaccgatccaccttcccgttgctgcggggatggccgtcgtcgagacctccgccgaccacgccgcgcctccgccgcccgagggggacgccggggagagggagatgcgggatctggaggacctgctctccaagctcaaccccatggccgaggagttcgtcccgccttccctcgccgccgcctcccccaccgcctacgcctactaccccacccccaccccctcccacgtcttccccgccgtcgatggcctcgccggaccccgacccaggaagaagggcggaggaggaggtggaggaggagggttcggtggccagggccacgccgggaagcgccggatgaacagccgcaccagcatggcgcagcgcgacgaggtcatccgccgcaccgtctacgtctccgacatcgatcaccaggtcactgaagagcaattggcagcactatttatcaactgtggacaggttgtggactgtcgtatgtgtggggatccgaattctgttcttcgttttgctttcatagagttcactgatgaggagagtgcaagggctgctctaaatttgtcgggaaccgtgcttggatattatcctgtcagggtgctgccatcaaaaactgcgattgcacctgttaacccaacatttctgcccaggtccgatgatgagcgtgagatgtgtgcaaggactatttactgcacaaacattgacaagaaggtctctcaggcagatgtgaaattgttcttcgagtcgatatgtggagaggtatatcggctgaggttgcttggtgactaccatcattctactcgcattgcctttgtggagtttgtgatggctgaaagtgccactgctgctctcaactgcagtggtgtcatactgggttccttgccaataagggtgagcccctcaaagactccggtgcgtccccgtgcacctcgccagctgatgcactaggtgttgtaggtacaggaggtgctgatggcactgcttatatatagagatagacatatatgaaagagaagttacgatatatgtcttttgttttatctgctcggccttctttttactgtaccgttagtaagtatctacacttgcaacggaggggggaaaccgttaccgggtttggtctttttcttttttaccttgcacatagcgcttcttagaagcgggcctgacgcttttgtccttgatgcagcaaggcaaaactcctggacttttgtcgctgttcagttgtttgctgtgtcttgtttgctactgagaacctgatgaactcgttacctgaaaatggagacttatcgttatgctgt

SEQ ID NO: 27601 - DNA, 1244 bp, Oryza sativa
  ref <308>: DATABASE ACCESSION NUMBER: AK103043
  ref <309>: DATABASE ENTRY DATE: 2002-08-28
gaggttcgccgtcgtcctcttcttcccgacgcttcatatagttgcctcgtcggcgtgcacgatcccccgccgatcaagctagccggccagccagcgaagcagctccggtgctacttcttgcctatacctcgcaacttctctcatggcggcggcggggaaggagccgagcagggttctggtcatcggcggcacgggctacatcggccggtacatcgtcgccgccagcgcccgggaggaccacctcacctccgtcctcgtccgtgacccggcgccggcggaccctgccaaggctgccgtcctccagggcttccgggactccggagccaccctcgtcaagggagatctttatggccatcaaagtttggtggcagccatcaaatctgctgatgtggttatctcggctgtgggttacgcgcaactagcagatcaaacccgtattatttctgctattaaagaagcagggaatgtgaagagattcttcccttcagagtatggtaatgatgtggaccatgtacatgcagttgagcctgtgaaatcagtgtatgctacaaaagctcgtataaggcgtgtaattgaggctgaggggatcccatacacatatgtctcctcgaacttctttgctggtcgtttcttgccaagtctggcacaggcctggatcaagggccttccaaccgacaaggttatcatccttggtgatggaaatgtaaaaggagtctttgccacagaggaggatgtgggtacctacactattaaagctgtcgatgatccaagaaccctgaacaagatcttgtatctcaggccatcaagcaacattttgtctcacaacgagctcgtctcactctgggagaagaaggttggcaagacatttgatagggtgtacatcccagaagatgaagtcctgaagaagattcaagaatccccagcaccgttgaatgtcgtactgtcaatcaaccattctgtctgggtgaagggggatcacaccaactttgagatcgagccttcatttggagttgaagctactgaactttaccccgatgtgaagtacaccactgtggatgaatacctgaacaggttcctttgaaatctgtacaaatcctacaaggctcgaatatataaaatatggaatagatattagacagtgaaagttgtgtttttcaataagcaaaatttaattttgtacaaaacgctctagagtgtaacttattgagaacagtgatgctggtgctgtctttgctgccaccgcc

SEQ ID NO: 27602 - DNA, 3638 bp, Oryza sativa
  misc_feature (873)..(873): "n"=any one base of a, t, c, or g
  misc_feature (880)..(880): "n"=any one base of a, t, c, or g
  ref <308>: DATABASE ACCESSION NUMBER: AK103044
  ref <309>: DATABASE ENTRY DATE: 2002-08-28
gatcactgatatgctaatggttagtagtagtaggttttctctcgataatgatgccaatggagttggtagcggcatcagattagtaaattttaccgcggtcacgtgagatgccatgcacgatgaatcgaatccattcccagccagctgacgaggtgtctccgtgtgtgaatcggatggtagaaaaagctttgcaccaccctccaccaccgctagattcgctcacatcgccgccattactgttgccctctccttcccggcgcggccactccgtccgccgccgccgggggcgaacccgaacgcctctccaccgtccgatccgccagccggatcagatccaacacctaccaacctaccttggcaccttctccctctcgtctccttcctcctcacctcgcccactacacctccacctccggagctcacaacacaaatcgatttctcccaaaccccccctaaactccccaccgaatctccaatgcaggtcctgctgctgccgctgctcgtcgcggcggccgtcggcctcgcgcgcgccgccgccaccgacgaccccttcctctccggcgcgccggggaaccacagctacaacatcgactgcggcggcgcggcggacttcgtctcggtgttcggccgacggtggctcgccgaccagttcttctccgccggggggcaggcgggcatggtcgcggagccgcaccggttcccgcagccgcaggagcgcacgctccgcttcttcccgccatcgtcggcgggcaagtccagctgctactccctcccgctcccgcccggccgctactacctccgcctcttctccgtctacgacaactacgactccaagctccgcaccccgtccttcgacgtctccgccgccgccangctcgtnctctccttccgctccccgtggcccgagccggcatcgcgatacggggcataatccgacctcatcttcccctccgccacctcgcccacctccgacatctgcttctactcgctctccaccgatgcccccgtcgtcgcctccatcgaggtcgcgcccgtgcacccgctcgcctacgacggtgccaccaccggcgcggacctcatcctcgtcaactacggccgtctcacctgcgggaacaacctcttcggcccgggcttcaccaacgactctgacgccttctcccgggtctggcagtccgacatcgatttccggaacaatgacctcaactacgacgccattacggccggggggaggaagattttcggcagcaaccagccgcccaactacttccccaccaagctctacacgtcggcgatcaccaccggcggcgatgcctccaacgagatcgagtacctcatgccggtcgacaccaggatgtcctacatggtctggttgcatttcgcggagatcgatgctggcatcggctcagctgggcagagggtgttcgacgttatgcttgccgggaagaacgtgacgaggattgacattttcaagcaagtgggagggttcaccgcgttcaagtggacatacattgtggagaatttgacgagctccaccatgagtgtgaagcttgtgccagtagtaggacggccgatcctgtgcgggcttgagaattatgcaatggtgccacttgagacgaggacagtgccaaatcaagtggctgcaatgaaggcattgaaggattccctgaaaattccagcaaggatggggtggaatggggatccatgtgcaccaaggacatgggatgcatgggagggagtcacttgcctccgcaaggacaaagggcttgtgatcacccaactggatcttgcaagtcaaggactaaaaggttacatcactgatgaaataagtcatctgacagacttggtaagcttgtaagtatcattaaacctactgaaagtcgatttttcagtttgttcattatcttctttgatatttaaagtatctggatatcaacagttggttttgttatcggtatcttttgcactacgggaatatataaaaccttgaattatcaaagttaagtctcaaatagctctatagactggtttgcattgctcaggttaatagcaaataaagttggagtggccactttcctctagaagataaaaagagcaatgtatcaactagtgaagtacttcccggcttgcctatccacattttctgaacattgtggagccaaagacaaagaaattcccttttgcttttctccaacgtagatattttttcatcctgttaatgatacatttgcttcaccaggaacttgagctataattctttgactggaagcttacctccgggcttagggcaaccttcacttgctacattggatctgtcatcaaaccagtttactggaggaattcctggcaccataggttcatcaaaattacaaacagctttactgaacaacaatcaactcgatgggcaagttccagaaagactttactcgattggcgtacatggtggtgtgatagatttgtcaggtaataaaggcctttgcggggtgcctactttacctgcttgtgcattattttgggagaaaggagggctgaacagaactggtaaaattgcactaggggcctcgcttgggtttgttctacttgtcacactcatagtggtctacatattgtgcatcagaagaggaccgtacgattatgattttgagttcccccaagatttgacttgtgagtataccacatctcaccttcatactgtgggtcaacctcatatatgactttaagattctttagttttgagtgattattgttttccattgtaagttagtggtagccgttcttttcttaaactatacctaaggccattcatatcagttgtcatgtcatttgaaaaaattatcagtgttcctatgttcctattaacgcaagtaacaatgtttcagatatatcaacctagagtttagtatcccttttatgaacaagtaatcactgtttacaaaccaatttcctgtcttcacaaatgtctaccatgtttaaatttgctactttctcatcctacacagcgatatcagcaatctctgcaaaaaggaataggtatcagagggcgaagtctgtaatgcttgccgagatggaggcgcacggcccggacggttattataccaacgggggcgctcactgaattgatgggcaccggaaatggatatcttcacaggttgttgtatttctacttacagagcaaacactcattgacaattgctggcctgaagcaaggacagttgtgacttgtgactcgtgaacacaattcaccagcatcatcaacatgacgtccctgtaacttcagtcaagcatccatggcattattttgcagttacactcacagcttaattacaaatgtaaaatatgtgcatgttttatgtgtactataatacgatgaagtggtggtggggtggtagtagtagtttggtaatagtagtaggggtgccttattttttgcagaggctttgctgtctcgtattagctttagctttaggcgtgtgcactccatcagcaatgtaaatggaaccaggttgggtcaggacagattcaggcgttgaaatgcttggggggtaaaagctggtgtactcataggtgtattctttctgtataaaacctgacttcgttggcactgtctgacttcaggagattgaaaacattagctttggacc

SEQ ID NO: 27603 - DNA, 3186 bp, Oryza sativa
  ref <308>: DATABASE ACCESSION NUMBER: AK103045
  ref <309>: DATABASE ENTRY DATE: 2002-08-28
gactctctccggtggagggaaaagcaccgaaaagcgcggcctttttttcttctttttttccctcccttgttcttccccacactccactccactcctcgcatcgcatcccatccatggccgcctccgccgtcgccgtcgcgttcgtcgtggcggtggccgccgtgctggccgcggcggcgtccgcggccgtgacgtacgaccggaaggctgtggtggtgaacgggcagcggaggatcctcatctccggctccatccactacccgaggagcacccccgagatgtggccggatctgatagagaaggccaaggacggcggcctcgacgtggtgcagacgtacgtcttctggaacggccacgagccgtcccccggccagtactacttcgaggggaggtatgatctggtgcacttcatcaagctggtgaagcaggccggcctctacgtgaacctccgcattggcccctacgtctgcgccgagtggaacttcggtgggttccctgtttggctcaagtatgtccccggcatcagctttaggactgataatgagccgttcaaggctgagatgcagaagttcaccacaaagatcgtcgaaatgatgaagtcggaagggctctttgaatggcaaggagggcctataatcctctcccagatagagaacgagtttgggcccttggagtgggatcaaggtgagcctgccaaggcatatgcatcatgggcagctaacatggcagttgcgctcaacaccagtgtgccatggatcatgtgcaaagaagatgatgcccctgatccaattattaatacatgcaatggattttactgtgattggttctccccaaataaacctcacaaacctaccatgtggactgaagcctggactgcttggtatacaggctttggtattccagttccacatagaccagtagaggatctagcatatggtgtcgccaagtttatccagaagggtggctcttttgtgaattattacatgtatcatggtggaacaaactttggacgcacagctggtggcccattcattgccactagttatgactatgatgctcctattgatgaatatggtttgttgagagaaccaaaatggggccacttgaagcagttgcataaagccataaaactttgtgaacctgccttggttgcaggagaccccattgtaacttcacttggaaatgctcagaagtcatcagtttttagatcaagcacaggagcttgtgcagctttccttgagaacaaggataaagtatcttatgcaagggtagcatttaatggcatgcactatgacctgcctccgtggtccataagtattctcccagactgcaaaacgacagtcttcaatactgctagggtgggaagtcagatttcacagatgaaaatggaatgggctggaggatttgcatggcaatcatacaacgaggagataaattcctttggtgaggatccacttacaacagtaggattactggaacaaataaatgtgacgagggataacacagactacttatggtataccacatatgtcgatgttgcccaggatgagcagttccttagcaatggggagaatctcaagcttactgtgatgtcagctggtcatgctttgcatattttcattaatggacaactgaaaggaactgtttatggcagcgtagatgacccaaaactgacttatactgggaatgtgaagctctgggcaggcagcaatacaatttcctgcttaagtatagcagttggcctcccaaatgtgggagaacattttgagacttggaatgctgggattcttggcccagtgacgcttgatggcctgaatgagggaagaagggatctgacatggcagaaatggacttatcaggtaggactgaaaggtgagtctatgagtcttcattcactcagtggaagctcaacagtggagtggggagaacctgtgcagaagcagcctctaacatggtacaaggcttttttcaatgcaccggatggtgatgagccattagctttggacatgagtagtatggggaaggggcaaatctggataaatggacaaggtattgggcgatattggcctggctacaaggcttctggaaactgtggaacctgtgattatcgaggtgaatacgatgaaacgaagtgtcaaaccaactgtggtgactcttctcagagatggtaccatgttcctcgttcatggcttagtcccacaggaaaccttttggtcatattcgaggagtggggtggtgaccctactggaatctcaatggtcaaaagaagcatcggaagtgtctgcgctgatgtgtccgaatggcagccatcaatgaagaactggcatacaaaagactacgagaaagcaaaagtccacctccaatgtgacaatggacagaagataactgaaataaaatttgctagctttggcacaccacagggctcctgtggaagctacaccgaaggaggctgccatgcgcacaagtcgtacgacatattttggaagaactgcgtcggtcaagaacgctgcggggtaagcgttgttccagaaatatttggtggagatccatgcccagggacaatgaaacgggctgttgttgaggctatatgcggttgagaaccgcaaactcagatcctcccaaatcatcctatatcttagtttcgacacggttttcggcttaccgaccttctggcaagaggtgaaagtcacagcaacagtgacgcacggaccgtcagaagttacagaaaatttagttgtaattgaagcatcagtgtatgtacattattctacatagaaattcactgggaaggaaagattcaggactctgcagtgcaggaatgggaaaccaaggggctgtatgtatggtcctctggacagtattggtttttggctggggaagggcgcataggagactctgctgatacatgagtccatatgcgcaatggcttttgcatattggattggaggatcaactctgtttcatacgtgatgtgatgattcatttttaagctcactgaaaactactgcaatgtaatgctggtaatgtgcagggtccatcattgatgtattaaattgtcctcttaattagctaattagcaatgtactaccttttcagcttataaataaatctgctgtatgttattcaaccgtatgtgaatgaattctctcaggtggtcatctcaatgcccacttgatgattaatctg

SEQ ID NO: 27604 - DNA, 1813 bp, Oryza sativa
  ref <308>: DATABASE ACCESSION NUMBER: AK103046
  ref <309>: DATABASE ENTRY DATE: 2002-08-28
gtctctttcttcctcctctcctcttcgtgtcttgccctccggcatcagcggcggcggagtggcggggttgcggcattgggagctgacgtggccgccggaggaggagcaaggcgcgcggcgccgccggccatgtggtgatctgggggggcttgatcccgccggagtggttcttgggctgagagtgcggcgcccatgaacggagcaagctccggcggcggcggcggcgccggtgccggcggggatgggccgttggtgtaccagcgctggaaagggaacaatgtgtttgttcttcaggggaggtttatatttggacccgatgcaagatccttgtacgtcaccatgttcctcatcatcgcgccagcgtcaatcttttgtttgttcgttgccaaagaactgatgaataacttttcttatggtctgggattaccagtaatgatttcagcagttgtgttcacggcatatgacttgagccttctacttctcacttctggtagggatccaggtataatacctcggaatgcacaccctccagaacctgaaggtttggatggcaatgcagaggttggatctaaccagactccaccaatgcgtttgccccgagtgaaggatgttgttgtcaatggaatcactgtgaagacaaaatactgtgatacctgcatgctgtaccggcctcctcgttgctcccattgctctatctgcaacaactgcgttgaacgttttgaccatcactgcccatgggttgggcaatgcataggacttaggaattacaggttcttttatatgtttgtcttctcaacaactctgctctgcctctacgtctttgggttctgctgggtatacattgttaagatcagaagctctgagcagataacaatatggaaggctatggcaaagacccctgcttctattgctctgctagtctacacatttattgccgtttggtttgttggtggcctctctgtatttcacttgtatctcatgagcaccaaccagacaacatatgagaacttcaggtatcggtatgatcaacgggccaacccatacaacaagggagtcatggaggacattaaagaatattcttctctgcaattcctgcctccaagacaacttccgcgccagagtcccagttccacaggagcaaggtctgaggcctcgctcaaccaatggtttcatgagtccacacatggggagagccgtcggtgacattgagatgggtagaaagccggtggcatgggatgagccaaggatggcagccgatatcggcgatctgggagcaggcctgggcaacttgttggaggacaaggatggcaggtttcgcagtgcatctccagatctaagccgtgacgccctcgcaatcggaggcctggatgatcaaggatcctcagtgatgaacccagggcgtacaagctggggagttgaggcaggtcgatgatgacaatgtttagttgcccatgtatgcagttatagtggaagactcagggatttttagtgccggcttgttgctaatttggtgtttgggttgagatttgaggtcactgatgttcttaggcctatgaccttgggtggttgttttcacatttccatttctccttttaattttctgttcctccttattgtcccttgtatttcctgtatcagtggtttgaagcagttggttggttgtgaggtatccagattagttcagttctaattgtgtatgtatatagctagagcactgaacttaaagggattgttttacttggctttgatgaatgattgtgaacaagattgtattttgcagtggacaaacgccactcacttgagctgccattcc

SEQ ID NO: 27605 - DNA, 1906 bp, Oryza sativa
  ref <308>: DATABASE ACCESSION NUMBER: AK103047
  ref <309>: DATABASE ENTRY DATE: 2002-08-28
accagatccctcttctttgtctgatcgatcgattgcttctccctcctctcgctactagactagagagtaggtagagctagctttctagctcgtggatcgttaagtttgtagtcctgcccgggcgccggcggtgaggtcgcgatggccggcggcgcggtggtgagcacgggggcaggcaaggactaccctggcaagctcaccctcttcgtcttcttcacatgcgtcgtcgccgccaccggtggtctcatcttcggatatgacatcggtatatcaggtggtgtgacgtccatggacccgttcctgaggaagttcttcccggaggtgtatcggaagaagcagatggcggacaagaacaaccagtactgcaagtacgacaaccagctgctgcagaccttcacctcgtcgctctacctcgccgccctcgtctcctccttcttcgccgccaccgtcacccgcgtcctcggccgcaagtggtccatgttcgccggcggcctcaccttcctcatcggcgccgccctcaacggcgccgccgagaacgtcgccatgctcatcgtcggtcgtatcctcctcggtgtcggcgtcggcttcgccaatcagtcggtgccggtgtacttgtcggagatggcgccggctcggctgcgggggatgctgaacatcgggttccagctgatgatcaccatcggcatcctggcggcggagctgataaactacgggacggcgaagatcaaggccgggtggggatggcgggtgagcctggcgctggccgccgtccccgccgccatcatcaccctcggctccctcttcctcccggacacccccaactcgctcatcgacaggggccacccggaggcggcggagcgcatgctccggcgcatccgcggctccgacgtggacgtgtcggaggagtacgcggacctggtggcggcgagcgaggagtcgaagctggtgcagcacccgtggcgcaacatcctccgccgcaagtaccgcgcccagctcaccatggccatctgcatccccttcttccagcagctcaccgggatcaacgtcatcatgttctacgcccccgtgctgttcgacaccctgggcttcaagagcgacgcgtcgctcatgtccgccgtcatcacgggcctcgtcaacgtcttcgccacgctggtgtccatcttcaccgtggaccgcctcggccgccgcaagctgttcctgcagggcggggcgcagatggtggtgtgccaggtggtggtggggacgctgatcgccgtcaagttcgggacgagcggcatcggcgacatccccaaggggtacgcggcggtggtggtgctcttcatctgcatgtacgtggcagggttcgcgtggtcgtggggcccactggggtggctcgtccccagcgagatcttcccgctggagatccggccggcggggcagagcatcaacgtgtcggtgaacatgctcttcaccttcgtcatcgcgcaggccttcctcaccatgctctgccacatgaagttcggcctcttctacttcttcgccggatgggtcgtcatcatgaccgtcttcatcgccctcttcctccccgagaccaagaacgtccccatcgaggagatggtgctcgtctggaagtcccactggttctggcgccgattcatcggagaccacgacgtccacgtcggcgccaaccacgtctccaacaataagctccaaccataatccgctcacgaatatcgtcgtccatgtctccgtcacgccctatattcttcttcttgtgttcatccccgtgtacagtagatgccttttattagtttgttttgttttgcctagtcagtcttcaatcttaatgtacgtgtgtttcttgtttggccaaattgatcttaattgctgtacctttcactgtcaaagagcgtcccttgttaccatt

SEQ ID NO: 27606 - DNA, 859 bp, Oryza sativa
  ref <308>: DATABASE ACCESSION NUMBER: AK103048
  ref <309>: DATABASE ENTRY DATE: 2002-08-28
ggcttctccgcagccgccgccgccgccgccgcgttccaccacctaccacccccaccggagaagaagaagaaaaaggagaggaagatggtgtcgggttcggggctgtgcacgcggcgggtggtggtggacgcgcggcaccacatgctggggcggctggcgtcgctggtggcgaaggagctcctgaacgggcagcgggtggtggtggtgcggtgcgaggagatgtgcatctccggcgggctcgtccggcagaagatgaagtacctccggttcctccgcaagcggatgaacaccaagccctcccatggccccatccacttccgcgccccctcccgcatcttctggcgcaccgtccgcggcatgatcccccacaagaccccccgcggcgaggccgccctcgccaacctcaaggccttcgacggcgtcccccctccctacgaccgcaccaagcgcatggtcgtccccgacgccctcaaggttcttcgcctccagcccggccacaagtactgcctcctcggccagctctccaaggaggtcggctggaactaccacgacaccatcagggaattggaggagaagagaaaggagaaggctaaggttgcatacgagaggaggaagcaattaacaaggcttcgtgtcaaggctgagaaagctgctgaggagaagctgggttctcagatagatattttggccccaatcaaatattgattggcctgattgtcatcaattttcttttcgcctttataatatttctgcttatcggtaccatgagaagtgaaatgatatgtctgtcgaaacatgataattttgttccaattgaatactagagagttatattggcttgatctgattttccctcttg

SEQ ID NO: 27607 - DNA, 1453 bp, Oryza sativa
  ref <308>: DATABASE ACCESSION NUMBER: AK103049
  ref <309>: DATABASE ENTRY DATE: 2002-08-28
ggtcatccatccattgacgagcaacccttcatccgcattcattcatagcaatattcacacacattcctcacacattcaacgacacagccatcgagcaattcactcaccatcaacacacacatatgcagagatcgatatcaaaagcagctcttctattcctcatctgatcgatttgcacaagcggcgcagacgcagcctcatcggagtagccaggcgggaccagctcgacgggaggagacctcaccgacaacaagaggcagcatcagatcatgggcatcaacaacctctgtaccatgggtaatgatcctgtggctttcttattgatttttctttttcagttcatgcatgcatgagatggcgatggtgatgagatgctggagcactgctagttggcgcccgcacgccgtcgtcgagtttgccaagtctcatggaagtgtcatttgtgggaccaggaggcaagccgccgtttttctacgtcgtcatgaccggccgaatgacctcgtcgcgctacctcgccggagcatgttgtcacggcatcgtgaatgtcgtcgagtcgtgcccgactgaggaggtctcgtcggagtcgtcggaaacgtcgccaagtctcccgcatctacatcaaccaaacacatcattgggcgatggagattgtcgcactgccctcggagccatggtgctgccctcgtcggagtcgccgtgccaatcatctgatcgacatcatccagtcgagtcgctggtgatgacactactcgttgctgtgatctcatcgccgacgtccgccggccatcttcggtggtgttaccatcttcctcacactcgtcgttgagccgcgtgacgagaatgccaatcgaagcgccgctagctgctcggtgcccgcatcgtcacgctggggttgctaagccgttcgtgatgctgtgaagccatcccttcatcacaccggagcaccatcgcttggtgcccgcacaccgtcgtcaagttcatctgcgatgctttcacctcgtcaagccagagtcatcgtgccgtccgtccgtgtctccttttatctatagtaacatgatgagatgccatctgtctacaacgcttccacttcgtcatggcgagatcgatgctgtccgtccatgatgcactctctcttcatcacgccaagatgagatgttgtccgtccgtgattctctccctcttcatcgagatcaatatgccgccgcttgtttgtgtattggagcgtcgctcgtctatatcaacatgaagaaagaatagtgccgtctgtgatgccaatgtaccgttcgtgttagatctacaccaaccaatgtcctcggctattccgccgatgaggcatttacttcttccaaggtcgccgttactatcggcacactcatagagcgccttttgcaggctcgtcatcatatcaaccggatcaatagtagattcatcatccgaaggaggtgccaaagcc

SEQ ID NO: 27608 - DNA, 1794 bp, Oryza sativa
  ref <308>: DATABASE ACCESSION NUMBER: AK103050
  ref <309>: DATABASE ENTRY DATE: 2002-08-28
gggttttcgccatttgttctcgcggcggaggccagcaacggcggtgcgcgcggcggcggaggcttgccgcgccggcggcgacccctccgattccctggcggctcctggacggcgcgaccttcgccgcgaatcggtggaatggagacgcggattggtggcttggcaagtcgtagcggagatgggatgctggagcatgtggattggggttcctgggcggaatgcatagctgtgaatcttgtgatctgcattaactagtgaaggtggctaaagggagaaaggcacggtgacttttcttcagaagcgcgtcctgtcacctgtgacttgatcctttcaaagaaagggatttcgattctctgaagcaagtcagagaagcacggcttggtagttttgagctaatcttgctcatccattcgaagacaacgtgctacagtagatgcaactgctacaggtgcagtaatgtttgctacaggcaactgatacatgatggtggcaagtgtcaagtgtgtgaattcttgaaaattaaggaagacctgcctgactaaggtggcatgtatctatcaccgcgtgcgatttccaaggtacgcaagtcttcagctaatggcagtgcacatcaattctactttgctgcttctagactagcgcacatcaatagcatgcaagacttttccatgttcagtttgatcttgctgcgtgacgtagctggtagattagtgctgataatagttcaagctcatcaggagatgagcttggtaaagcttggaaccagctttggaactgtaatgtgcccccaaaagtcaaggtgtttatgtggagagctgtcactaacagtctggcaactatggtgaataagaagaaaaggaatctagagcaaaactccttgtgtaccatctgtggaacagaggaagaggatgttgctcacgctctgtgtcgttgtccgcatgcgaagtacctgtgggaagccatgggaaacaccaatgccatctcctgcaaaccggacagcaactggaaagattctgactggatccttgacatttgagggagagtttcaaaggaggagcgcatggggctcatgatgctgctgtggcgaatttggtatgtacgtaatgggattactcatggaaaggcagcaattccggtggaggtttcccaacgttttatcatcagttatatggcatcactgttggagattcgacaacacccgaatgccaatttgattaaagggaaacatgtggttcaatatgggtcgtcaatgcctttgccaagacaatgcaagccaagtgcagaatccagctcttggataagaccacaggaaggctggatgaagctaaatgttgatggctcatattaccctagtgatgggaagggaggaactggcgctgttctcagggacagctctgggaacctaatttttgcggcttgtggtgttttgcacagaccggcaagtgctctggaagctgagatggtagattgtagggaagggatcagcatggcgctacaatggacgctgctgcccatcattgtggaaacggactgcttggagatggtgcaattgattcactctgatgagaaggccatgtccgatttggcattcctgatcagggaagttaagctccttcttaaaggaaatagggagattgtcataaaaaaagttagtcgtggtcaaagcagagactgtcatgtcttagcaaataaaggtagatgtgagtccttaactgccttttggccggatgataattgtaactttatcccgcacgttttgggtgcggatgagtaatatatctcccttttccccgc

SEQ ID NO: 27609 - DNA, 2881 bp, Oryza sativa
  ref <308>: DATABASE ACCESSION NUMBER: AK103051
  ref <309>: DATABASE ENTRY DATE: 2002-08-28
gacaaaccgagcttgaagctctcctctcttttctctctcctttccatggccggctatcactgtcgtcggccgatctccctcaccggagcaataccggacaatccctcgcgccatcgagctttcctcgatgagaggaatccatttttcccctttcccctcttcctccacctctgaatcaaacctcaccggagctctctctctcctcccggttcacgaccttccatccgccgttccggctatttcccttactccctttgccggccactgccatccctaggtgcgttgcagtcgggaacaccagtggccgccggcgttaccgcctcctcgccaccggagcccggcgccccctctccttctcctctctgttcgaccaaggagaaaaagaagaaagagacgggaagaagaagaagaggagaaaaagaaaaagaaaaaggaatccctgacaggtgggcccatgaacagtatactttcgcaatttactctatttaattcaaattccaatatttagaagcctatatctcctaaaccgcatatccgatctcagtgaaacctggacctaaattcatctaaattcaaatgcttcgttttgatgcctaatttgttattttataattttatttgaatttattcaaatatcatttgaatttatatttgcctttttcaaatattttcttttaccccaaaataccctttagccactaaaaagccgccggttggaactttacgccttccatggggacgtttgcggtctattggccccaacgtcgaaccgttggttgtaaagcccagcaaaaccaaacccaaggtcgaagtgctgctcctagcaccccacgccttgatgcgtacaacggtcggagcttcactattccctcgacctccacagcacgcctcatagttagctcttgagctctgtgtgatcctagccgcttcgccgccagtcacggttgtcggagtaacacttccgcatcgctaaacctgcacaaacctcccatccctctagccgttatattgtctatcgacaccggctagagacgataccaaacctagtcgtcatgctttagagacgactagcgaacacccaaaccctagtcgatatttatcttacatcgatatacgcttagacaactgaaaccttagtcagcttattttctagactccccaccagctataatcacaaccatttaccctcctactacccatagcctatgcatgaattacgatccgatatgctatcctatttcaacatcaactcgagaacaactaaatcctagccattcttctaccaaagcccaacctcgaccaatactagccacatatccacttaaccagatagattattcggtatatctcctactctccaaaaaaccaaaacccacacaagaaatataagcgacaattgttgcttaatctcctatccaccttagcccccaaccctttagaacctgcacataaaatatcagcccagtaatccatatacctgcataaaagagataagctataccctaaaccctagtcctcctaaccgtttatctctttcttgctattttatggcttttatcgaatttggatcttcctcttctttagtagagtctattttatatggatagcaacctgtggtatttcaagcatcagataatcaggttgcctatttcggatttatttgcgttggagcaaggcaagttattattattcctctcctttgagcataataatcctatattctatatctccagtatcttgtgcattagccatacatgattttaaatgcataacctgaatatatagcaaaccagatatatgctagattttgcttagccatgcctagttagattatgcataaaatataatgaacttagattgggacagtacggtagaaatggttgatttccgggtggctagtactgttccaaccaacataagactgccaagtacatgtgaagaacatacgagtacgaccgcaattctcgtatgggcatagacctagctgattaagttatctagcaaaggtgatacctctgtatagtggttcttcttaagtcctcgcgcaggaggcaaacttacaccgagcagggcgattgtgatatttaccgaggcgcaggtaaatatcttgattatctcgcgagctgtgtgtgtgaattatgaaaacctgattgagatgacgggggtctctcaaccagttctctctaaaaaccccgggaacgctagaactactctcgctgctgataacattacgttcagagcgtatggggactagagttcatggaacaggtactactgatgttagtgaccgaaaagctttgccatgacaaggctaatgtgtttggcacgtcatggattgcgggtaaagcgtacatctactgcagtatgaatattattaaaactattcgaatagccgtgctcacggttatcgggcattgggactcacaatgatatcttggttagaaacataatttcaaactttattaaatactgttgcatttaaaacattatagactttccttctatattctctgcattctgcaagtaaatctaaccctactcaaatattattattccatgcattcattgttgattaatataatagcttactgagtatgttgtactcacccttgcttcaaccccacatttttttcagagtccgtttgatgttcttactgaagccgggagttcaatcatataagttaatctcattttaacttagttctcaagtatagattagatagatggtttaagtctatagcaaaacactagagttgagtcatcgtatagcttctgctgtaatagttagccacaagcttgtaaatacccttatattttgtaatattatctcctttgaaaccttgatcaaatgtatgcaatgaagatccagatcattgaacct

SEQ ID NO: 27610 - DNA, 2370 bp, Oryza sativa
  ref <308>: DATABASE ACCESSION NUMBER: AK103052
  ref <309>: DATABASE ENTRY DATE: 2002-08-28
gcggggaggagaaaaagtggagagctctctctctctctctctctctctctctctctctctctcgctctcgctcgccctcaagccaagaaaaggttctcctcttcgctcttgctgcttgcgctcctcacccgatctcgccattcgcgtcggcggccggccggttgcccctgccgccccggttcttggatcctagatttggctgtccggggagcggaaagggttggatttttctttttttgtttttgtttttgtttttgtttttgggagtgtgttggggaggggcgatgggggcgtcgccgccgtcgcctgatccgatgaggccccgggcggtggagtgagcggctgttcctggaccaggtctgattctccgtgctgtggttcaaatgatctgggcctcgtgttgattgggttgggggaggctgggtggtggattccttcaggtctggagatctttgtgctgttgggtgagttgggagggagctgtgggtttgtagatccctgctggttgctgcggctgatttgggtattgctagggtttttggttggctgtggtggggggggggggaagaagatgatcaagcagatccttggccggctgccgaggaagccagggaaggccggcgatagccgggacgccgctgggccgaacggcaatgagccgtctaactcgtacagcgtcgccaggagcgtggagcaagggaacaagaggagtggaaatggggattacgtggtgccggctgggctgacgcccaatccgatgatgaatgggactgtggtgtatcactccaacgagccgctgccggcgttcaaggacgtgccggcctcggagaagcagaatttgtttgtcaagaaggtgaacctgtgctgcgcggtgtacgatttcgcggatccgacaaagaatctgaaggaaaaggagacgaagcggcagacgcttatggaacttgttgactatgtcacttctgcaaatggcaagttctctgaagtcgtcatgtcggagattaccaagatggtgtcgattaacttgttccggagctccagccccacccctcgagagaacaaggccatcgaaggagttgatctggaggaggaggagcctctcatggacccagcatggtcacatttacagatagtttatgaggttttcttgaggtttgtcgcatcacaggagacagatgcaaagctggctaagagatacatagatcattccttcatccttaggctactagatctttttgattcggaagaccccagggaaagggattatttgaagacaatcctccatcgcatatatggtaaattcatggtgcaccgccccttcatcaggaaagcaatcaacaatattttctacaggtttatatttgaaacagagaagcataatggtgttgcagagctgctggagatcttgggcagcataattaatggttttgctcttccacttaaagaagagcacaaattgttccttgtccgggcactgatcccacttcacaagccaaaatgtgtatctatgtaccatcagcaattatcatactgcatcacacagtttgttgagaaggactgcaaacttgctgacactgttattaggggcttgctaaaatattggcctgtgacaaacagttcaaaggaggtgatgttcttgggtgaactagaagaggttctggaggcaacacagcctgcagaattccaaagatgcatggttccactcttccgtcagattgcctgtagcatgaatagctcacatttccaggtggcagagcgggcgctgtttctttggaacaatgaccacattgagaacttaattaagcagaattacaaggtgatattacccattatctttcctgcgcttgagaggaatgcaaggggtcactggaaccaagcagttcgaagcctgacactgaacgtacgcaagatcttctcagatcatgattctgcatttttcggggagtgcacacagaagttcaacgacgatgaactcaagcaggaagaatctaattcgaagcgagaagctttgtggaagcgcttagaggaagcggctgtccccagatccgacaataacaaccctgtgggcacgcctaatggcaaattcagtcaagcagctggctagaaaataccatagcaattacagtcttgcaatcctttaaccccatgtgcgattctctggaacttggtttgtgattttagtgttgaaaattttttgttggtgagttggtttcccccttgttctaggcgggtaggatgtctttggtttcctgagaactgcatgatgaaaaatgtacacatacagaagaatttctgcgagctttgccctatgtgtagtcacattaatcagaattatcatatagttgaataaacagtgttaagtttctgttgcgg

SEQ ID NO: 27611 - DNA, 1113 bp, Oryza sativa
  ref <308>: DATABASE ACCESSION NUMBER: AK103053
  ref <309>: DATABASE ENTRY DATE: 2002-08-28
gggccacttccatttccattccccccaccaccgcgcagcggcgcaggcagcgatggtgaccaacgctcgccgccgccgccgcctcaggtgagcacgacgccccgcgcgcgtccccgcaccctggaaggaagagcagcagaagacgactccgacgcccacgcccgccatggatccggcgtccgaggagctcgagcagcgcagccgctacctcagctcgctcatccgccgcaccaagctccacgccgcgccggcgctcgccccgcccccgcccacgcctcccccggagcccgagacgaagctgcagctggagatggagccgcagccggagcgagtcgaggaggccgccaagaagccggcggcggtggccgccgtggtggagaagagggaggtcaagggagggggtggcggtggcggccaagctgggaaggggaaggggaaggagaaggagatggagaaggggaaggaggagaggaaggtgtcggtccgggtgcgcgcggccgacatgccgctggcgatgcagcggcgcgcggtccgcctcgccttcgacgccgtcgccgccatgccgcggctcgacagcaagcgcctcgccctcgccctcaagaaggaattcgacgcaacatatggtcctgcttggcactgcattgttggtacaggctttggttcctatgtcacccactctgtgggaggcttcttgtacttctccgtcgacaaggtctacgttcttctcttcagaaccgctgtcgagccattaggccatccacaatgagatcaaaaatcgattcattacaaggtaaaaaattgctgtgtattatatgtatctgacgtccaagagccgtagaatgttaaggtgagtagaacaatcgtggctctccatggaaattaatctgcagccgatgtaaacatttggcatccaatccatgaactctggaagcttttagttgagtcacttctccagcatgaagaaaactagcttttgcttccgaccgtgccttgtatgttgtatctggttcttattgatcagagctagaaaacctgagctgcgagttgtggtacctgaaaaatcagggaaatatagcgagtctgatgatgcttcccatttggacttcttggctg

SEQ ID NO: 27612 - DNA, 1282 bp, Oryza sativa
  ref <308>: DATABASE ACCESSION NUMBER: AK103054
  ref <309>: DATABASE ENTRY DATE: 2002-08-28
ggcgcgttcctcttcctcctccgtcgccgccatctcaacccaccgaggacgactcgccgccgccgccgccgccgcagccgccggccatcgccgcctccttccgtccttctcaccgggatccggctcgtactcgtcaccatgggtaaggcctccaaagacaagagggacatctactaccgcaaggcgaaggaggaggggtggagagctcgtagcgccttcaagcttctgcagatcgaccaggagttcaacatcttccacggagtgaagcgtgttgttgatctgtgcgctgctcccggaagctggagtcaggttttgagtcggaacctgtatgttccagcaaaacaatctcctgattgcaaagaaggtgaccttcctcttattgttgccattgatttgcaaccaatggctccgatagaaggcgttatacaagttcaaggggacatcactaatgctcgaacagcagaagtggttattaggcattttgatggatgcaaagcagatttggttgtctgcgatggtgctcctgatgttaccggccttcatgatatggacgagtttgttcagtcccagcttatactggcggcattgacaattgtgactcacgtacttaaagttggtgggaaatttgttgcgaagattttccgtggaaaagatacaagtctgttgtattgccagctgaaactattcttctcacaagttacctttgcaaagcccaaaagtagccggaactcaagcatcgaggcgtttgcagtttgtgagaattattcgcctcccgaaggatttaaggaaaaagatttatatcacctgctagagaaagtggggactccttctggggctgatgatttagactgcagaagtggatggttagagggaccaaacaaggtctacatcccatttctggcttgcggtgacctcagtggttacgattcggatcgttcttacccactaacaagcacagagggaggatcctaccagagcttggatccagtccagcctccaattgctccaccttacaaaaccgcactggagatgaaaaaggtcgccagccatggcattggagcagatatcagcaaattatccctcgactcctgaactacactctggatcgctgtttgtgttcttgtaactgccaaccctgtggaatttgcaaattgtatggcattgttgttccacagattacacaagagatgaactgaaacttcagcttcatgtggttgttatatcaaccaaaaatgtactacctgttatttttatttagaaaaggcacgaattctttttctgg

SEQ ID NO: 27613 - DNA, 2160 bp, Oryza sativa
  ref <308>: DATABASE ACCESSION NUMBER: AK103055
  ref <309>: DATABASE ENTRY DATE: 2002-08-28
gctggttttgcaaacatcccacacacacacaaagcagtgacagtgagtgccaatgctgagctcttgtggtggccatggccatggaaatccaagaagcttgcaagaagaacaccatggcagatgtggtgagcagcaaggtggaggaggaggaggagggcaagagcaagagcaagatgggttcttggtgagagaggcaagggcatccccaccatctccatcttcttcatcatttcttggatccacaagctcttcttgttctggaggaggaggaggagggcagatgttgagcttctcctcccccaatggaacagcagggttgggcttgagctcaggaggaagcatgcagggggtcttggcaagggtcagggggccgttcaccccaacacagtggatggagctggagcaccaggcactgatctacaagcacattgctgcaaatgtttctgtcccttccagcttgctcctccccatcaggagaagcctccatccatggggtactaccttttttattcagctcatgtgattgttattctgttctgcgtcatatcccctttctgttgtaaatagctcaagataggaataaaggaataagtacttagaaaatatgaaagaagaaaatgcaggtcatatggttgcagttgcctgttagtttcagatgtataaaggtgtcccagattggggttctgttgtgttgaggttggtagttatatcttgttgtctttcttgggacaggatggctttgtgattaattagtttgtaaaggcagtaatcgaagtccctttctggtactaaaagcagtattggctgcaaatctaggcattataatgatttgaagattgcattgatactagaaatgtactgcttttggatgtttgcatgatgctcatgtgctaatatttccagttaccaatgtggtgcttcttgagtttagatataaaactcttctcttacattgggattctgatttttttttagttgtgcctctagtcttttccacaacaagatctccaaatgtagtcataaagtgttctgattccctttaactggcgtcatgtttggtatgtacaaactaagttcttatgcagacctgggaggaatgttgctgaaatagtgcaagaatatatcgttttgaggtggtttatatatttctgacatgaaatgggcattctattttgcaccaggatggggatcattccctcctggctgtgctgatgtagaacccagaagatgccgccgcacagacggcaagaagtggcggtgctccagagatgctgttggggatcagaagtattgtgagcgacacataaaccgtggtcgccatcgttcaagaaagcatgtggaaggccgaaaggcgacactcaccattgcagaaccatccacggttattgctgctggtgtatcatctcgcggccacactgtggctcggcagaagcaggtgaaaggctcagctgctactgtctctgatcctttctcgagacaatccaacaggaaatttctggagaaacagaacgttgtcgaccaattgtctcccatggattcatttgatttctcatccacacaatcttctccaaactatgacaatgtagcattgtcaccactgaagttgcaccatgatcatgatgaatcttacatcgggcatggagcaggcagttcatcagaaaaaggcagtatgatgtacgaaagtcggttaacagtctctaaggaaacacttgatgatggacctttaggtgaagttttcaaaagaaagaattgccaatcagcttctacagaaatcttaactgaaaaatggactgagaaccccaacttacattgcccatctggaatcctacaaatggctactaagttcaattcaatttccagcggcaacacagtaaatagtggtggcaccgcagtggagaatcttatcactgataatggatatcttactgcaagaatgatgaatcctcatattgtcccaacacttctctaaggctgtgtttgaaagttcatgttggattcgcaaatgattgaaagtacgtttatggatggttctataagttcctgttgtttccttcgttatgtgttcttgtgttcctcacctttttatcttttggttgaggttggtatgttgtaattttctcctgtgctaccttgtaatatgctgaagttaaatgctcttct

SEQ ID NO: 27614 - DNA, 3974 bp, Oryza sativa
  ref <308>: DATABASE ACCESSION NUMBER: AK103056
  ref <309>: DATABASE ENTRY DATE: 2002-08-28
gagccgccgttgccgcccggacggggtcagcaggccgccgccaccaccctgtgtaggctcgagcacgaccatgacgaagacaaccgcggctcggcgacgatggttgtctggtcattcgtgctttcctttttcctttgtctcacgttttcccctcccagaaatcctccgccgtctgctcatggtctcatggagcctatggccagccgccgccttcccctcgagctcgcgaagccggagccgctgccttcctctcaagctcgctgagccagccgttgctgccgcggtgcggagccagtggttactgtcgtcgtcttcccagcgagctagcggcggctgctgcccccttcttgcgagttcgatgtccactgtcgccgccatttcgtctctttctccatcccacgagaacttggttctgcaagatctgttccgcatcgagcgcctacaagcacgcggcaaccaacaggcttatatgactggtggaaatctctacttgatttttctgtggtgcatggtcaatcaagtctgaagatatgaggcctgcatctatttttggaaccacagatttcgctgttagaaggccatattccgttgattcaaaactttttttttatgtgcagcctgcatttatttttggaagcataaacgaaaggatcacatatgtatgtctgtttgctaattaataccttttcctgcaaatacacatacaccacttggatgtagatacccattctgccttgctttacatgttaattaacttgattgggtaaatgtttactgcattgatcgaccggtatctcaaagtacaatcagtaagtgactgaagctaattcattagccttttatgtctatatatgatcataaaaatatctgtagagtgcatcagacaagcaaaaagtatatggcaagtgatagcacatttcttagggaagggatttatgagttcaatgttaaaatcctctctatcagtcgcctcgcatttttaacttatctaggttgcttccctattttttgctacataagaactagatgtatgtcaccatatcagagttatttatattcacatgttatattctaaatccatatgttgttgagatgtgttctttaattgatctcttcatctctatgcagagtatcctatcataacattaacaatgttagatcatacttttagtgggagttgcatggagttattattatcaaagctgttattattatcaaagctattgaaggtattgtacattgttacatctccttcaccctttataggtttctatattacagatgctcctgctattgttttaattctttttcgaccagtacaacctgattagctattcttactaattctttttatacaaaaaaatatttagacatggatatttacaccatcaagtgtaaaatgttacttacactgcttgcatatgtaagggaaaaatactgccagctccgttcaagttccccagagccatatagactatattgctattttgcttgatctttaatcttatgataatgattctatgattaaggttaattatgtatatcgtcgtcatgtatcttgcatttcatttgctgaataatacacaaattgttgtataacaacataactacataattgagcttaatttttgtaaagaccatccagtacaacttctgagttacattggtaacataacaaccggcgttattatactgctctcatatgctctgatgaaatttcttccatatatacattgtactttgatagcctttgtgtctctactatttgatctcaccaattcgtttttaaagctttctcctgcttgcatgaagagattttttctgttggtgttgctgagtacgaagaatttgttcatccatgtgttgccagtgcctcttccagtgtgatatgatgtgaattgagtattcatgctctgttagcctcttttaagtagctaatggaggaaatgattctcaccatttcagtagctccattatgtcattgatgattgagttacacccatttaaaatatttagtttctactttagttacctcatcaaggtatattgtttccactgagattcacttgagatggaattttaaactagcattgatgtgtatctttcatgccatctctacaaaacatgaagggcgccaaaagaatgttatcagttgattatgactatatacactgttaggatatgtcttcaatcattttctttaaaagaaggatggctccatttttgagtcatgaaaacattagcagtctcgagaatgaccttcatttattcatgcttcatcacatatctctatattctttttttattaggtcgaaaaagacatggatggattggatccatcacggaaagctgatttcctgttcatatctgagacgaacgtaaatttcttttgaaggtacatttcaatttagtttgtgcatcaactgttcaatcggaatgctttgctagacatatcctaaccgttacgatgcaaaggtaaagcaatatcatagtccatttttttttatattttgtctttcagttggtttgcttttacatgtctgtgctcagatagattatttcactgtttagttcaccagtctattttacacatgtttttttcattatttgtgaaagcacacttttaaatcctaaaagttgtgcagtcgatctgtttcgtcaaactgtagtgtagcctgctgccactgtgcttttacaagctctttgtttccgcgttgtatattttgccggctacttaaaaggaacagggaagaaaaaaatggaacctaacctgaagaagtatatatgcattgtagaactataaggcttatgttattgcatccatactttggttaagtgattatgcatgctttcgctcataaactttgccacgtggccacatggtagcagcactttgtactactccactccaaaaaagatagaacttttggtagaaaaattggttgcatgtgtttagaattgtgatgccaagcgaaaatattatctctctatataagtggttgatactatactgttttagctgtgctaacattactattaaaactttctactacctttgtcccaaaatataaaaacttctggccctatatcttgaaaggtatgtttaggtacacagctcaaaattgcgatatattttgggacggaggtagtatacttttttttaggtgtaccgatgtcactaaccgcacataacggaggattgttgttgactagggcacttgcatgttgcacttaaaaaacatcattttctatctgttcattttagctttgcatatgtttaatatggaccaacagtaggcatttaggtcttctgtttttagcatccaatagtccaatgtgattctagcgtatagagagaaaaggggtagcattgaaacctatgtaaactcattgtaattgacatgtaatttgcccctttttttctatttattcaaacttccaataccttttggttttctcctttagcctatacactatatttttgtatgtgcaatttttttataagggtagtttatgggatatagacgaaaaataaaccaatgctatgggtgaatagtatatgcatattattcctcgaacatattggacttcaattgattcaggcgattgattcaggcggcgcagcgtagtgtgcttctattgctagtgagttttatctttaaccaagaggaagaccctagaactgtcccctctatgtgtaacggctgctaattttaagctgttatagatgagttttatccttaagggtctccggccgttacagatgattggacacatgtgtaaccaattgtttgtaatgcctgctgagccgttacagatagataggtctgtgctatatgtttcttaatttttggatgttgaaaaataattttaaatgtcttgaccgtcaagtgcacatattctacattttgtaatatataagccacatttgtacaaactacggttaattggatcatgctattacaacttcttcg

SEQ ID NO: 27615 - DNA, 1729 bp, Oryza sativa
  ref <308>: DATABASE ACCESSION NUMBER: AK103057
  ref <309>: DATABASE ENTRY DATE: 2002-08-28
ggccagagcagcggttgttgctgtgcttctcctccgcgctccacatcacatcgcatcaccaccgccgcgacgagcagcgtgagatctcggtgccaccgatcgagtcgacgcagaggagagagagatcggggtttggttttttggaggggagagcggagtgtaggaggaggaagaagcgggtgatcgattttgcttcgatggtaagggagacggggtactacgacgtgctgggagtgagcccgacggccaccgaggtggagatcaagaaggcgtactacatgaaggcgaggaaagtgcatccggacaagaacccaaatgatccgctcgcggcggcgaagttccaggaattgggagaggcataccaagtactcagtgaccccacacaacgtcaagcgtatgactcatatgggaactctggtatttcaacggaagcaataattgatccagcagcaatttttgcaatgctgtttggtagtgagctttttgaggattacattggtcaattggcgatggcatccatggcttcacttgatatatttggtgacgaagaagagattgatgcaaggatgttgcaagagaaaatgcgagttgtacaaaaggaaagggaggagaaacttgcagagacactgaaaaacaaattgcacctttatgttcaaggaaacaaagaggaatttgtgcagtttgcagaagctgaggtgtccagactttctaatgcagcgtatggggttgatatgctgagtactattggttatgtatattcaagacaagctgcgaaggagcttggaaagaaagctatatacctgggggttccatttatagctgaatggttcagaaacaaaggccattatattaaatcccaagtaacagctgcaacaggtgcaatagctctcatgcaactgcaggaagacttaaagaagcatcctagtgctgagtgccactacaccgaagaggaacttgaagcttacatggagacccacaaaagtgttatggttgattccttatggaagcttaatgttgctgatatagagggaaccctatcacatgtctgtcagatggtgcttcaagatagcactatcaggagagaggaactaagagctcgagctaaaggattgaaaactctaggcaaaattttccagcgtgttaagcttggttctagtgagggggaggtcacaacaatcaacaatacaataaataattctgatgacaatgatggtagttctcctgattcatcaccaatgtccccaagggagcatccatatgatccaaacccaccgtattaccagagcccgtatgtggaggcccctcaattcgtcggaggttacccttcactcaactttccaatgccaaccgctccccccggtgcacagagggatccaatcccatgatctatatgggacggacgcggtagtagctttggttccagaaagggtcatcattttgtacaatatttttcttcctcctggtagatggttggtcacataggtcaagatgatttgtgcttattagtcgtagtagagtgctggttgtcctactcctctgcatgcttttttttttcccttcagtttcagttgtgtttgtgtcgtgtacaggcaggtgcgcgtgttgtgcaaatagcgctgctgttaaatctgtaatgctgttgctgaggcggcaacagatcggcatttgttgtacatgaacaacaatctccatatgtctatgggtgcataactgtttttgcctatggccc

SEQ ID NO: 27616 - DNA, 1386 bp, Oryza sativa
  ref <308>: DATABASE ACCESSION NUMBER: AK103058
  ref <309>: DATABASE ENTRY DATE: 2002-08-28
gaccttctcctccctcgtctcctctcctcgttcggaccgacggcgacggccgcctaaattatccatacctcccctccgccgtggccaccagccacctccacgaatccaattccaacatctcctcctcctcctccgccgccgccggggggatccgcgctgcgccgtggtaagcccatctctctcccggccttcccggctcgacgttcgttgtggggggcgtgttttgcgcccgaggattggtgggttggcggggggatggggattggggcgtcggacgagctgctgggcacgttcgtgccgatcgccgtgtactggctctactcggggctgtacctcgcgctggacggcgtggagcggctggacgtgtaccggctgcaccccagggaggaggaggccgccaagaacgtcgtctccaggggcaccgtcgtcaggggcgtcctcgtccagcaggccttccaggtcgccgtctcgctcaccctcttcgcggttattggtgatgaaagtgatattgaacagaagcaaccttctgcccttgtgatattgctgcaatttgccattgcaatgttcgttatggatacatggcagtacttcatgcacagatacatgcacatcaacaagttcctatataaacatatccactccaagcaccacactcttgtagtcccttattcctttggagctctttacaaccatcctcttgagggtcttattttggacaccattggtggtgctctctcattcctcgtctctggtatgacaccacggacatccatattctttttctcgttcgcaaccatcaagacagtggatgatcattgtggtctgtggcttcctggtaacatcctccatgcgctgttcaacaacaacagcgcttatcatgacattcatcatcagctctatggaaacaagtacaacttttcacaaccattttttgtcatttgggacaagatacttggaacttacatgccttactctatcgagcacagaaaaggaggagggtttgagtcacggccagttaaactcaacatagcagagcagaccaagactgattagtgtattctcggtccactactctcggctctgtggtaccctgatcttctaactacactgttggtgtgaaattatcaccttgttcgtatagtgatgtttttcttgttctctatattcttcttctgttaccttttgggaggggttctccttgtaccaaggtatagtgagtaaattagtgtactatatcaaagaatactaaagcactaagatccacttggatctgtttcctggagattggctgcatgtattgagcttacatgcatgccaatgttaacaagagaagatgatatttacactgtatgcagctatgcagtaagccagtaacttttgtggtgc

SEQ ID NO: 27617 - DNA, 1620 bp, Oryza sativa
  ref <308>: DATABASE ACCESSION NUMBER: AK103059
  ref <309>: DATABASE ENTRY DATE: 2002-08-28
ggtctgtcacagtgtcgtgtccctctctctctctcgttactctccaagcagttctcactctctaactctatcattctctctcccgttctatctctcactctctcttaatctctcgctactcaccaaggcggccggcagtggtgctcgcctggatcctgcggttctgccgtcgacggcgacgggccggccagatccaccactggcccaagtcgtggttgctgcttcctcgcgtcgatccagccgccaccatgttcatctccatcgttggctggcggcggtgaggctggtgagcggcggatccaacggtggggaggctcgagggcggcgacgaggctggtgggcggtggatccggcgttgggaggcgaggcagtgggctcccgtagccggcggctgcccagcggaggaggtggcggcggccgcgccctcccctccgctagatgtggcaggaggggaggcaacgggctctcgccgctggcgcctgcccggcggaggcggtagcggcggcggcggcggcggccgcgccctcgatgggcggcgggttcccgtaggcggcagtgtcactttctccatgtttctcctcgtcgtgctcagatgctctcgatggatccatcgccttcctccttctgctacttccttcctttcgttctttcctctcggttttctctcctctcctccgccactcagcgacgccctccttctccgccgatccccctcctcgaccacccaccgacggcgcctctccctctcctcagctccccttcctcgtccccccaccgagtccgccggcacggatccaattcccccgagctcactggcgatggatcggccttcgccgttgggtggcagtcgtcatcgtaggatcgagctgccacgatggtccagttcggtgccgagcggattggggcggtctcgttctttaggcggagggagcggtcggagacgaggaggccgattgagtagtggatgccggatccggatatggtgcagtggacgaatctggaggtcgagttgtacaagcagagctgttcggtcgtccggataggagggttcaagttgtcggacgaaggtggacctctatggattttccaacgaggatgctgctgtggccgccggatccagtgacaattgacccccccgcagtagaggtgcttgaactggtcacaaatctaggttcactaaacccaaaggcttttgtagcaatgggatgcctggtgctagtggttacttgggcagcaatgggggtgatggtgggtatggcagtacaccaggagcccaggaagaaaatatatggtcaataggtaagatatatggtaagttcaattcccacaccacctctaatcgctgcgcaatattgctggttatagattgattggtttatgactggtactatatcaaatatattactgtctttgatatgttatctctgtaggaatcagattactgtcatggttcttatattgtgcacttccacttactgcaagcttaagcttgtatcctgtatattttagttagtcaagtaatagtagtatgaaaacaccaaaacattatatgtctaatctgaacaatcattttgagtagcctaattgattgcaagctcttgtgatgattttgttgtgtgc

SEQ ID NO: 27618 - DNA, 2512 bp, Oryza sativa
  ref <308>: DATABASE ACCESSION NUMBER: AK103060
  ref <309>: DATABASE ENTRY DATE: 2002-08-28
gactgcacccataactgccaagaattggagctgtctcttctccctctctctctctctctctctctctctctctctctctctctctctctctttctctctgcatctgagagagagccggaagaattggagttggagcaggagaagcgtggagcttctgaggattgattttggaaatttggagcttgaggatcggattgagtagtttctgaggattgggaacaggagagatcgaagcaggagctaggagaagcgtctggaactgaaggggaaagcgagaaaccaaaaaaaacaaaagatagacatcgagcttgatcggttagcacctgccggatacaccttttgctgcatgcgagtgatgttctgtggccttgtcggctcatggcaatctcagacgccagagtggttcgccatgtgaggtgtcccaaatgcttcagtgttcttcaggagcccaccggcgcgccggtgtaccaatgcggtggatgcggcactaccctccgagcgaaaaaccgcaccggcaactcacaggaggtgatcagtgctccctcctctttggggagtggcctgcctcctcacagcaagcacctgggctccagtgatgttgcaagcaccagtggatccactcctgaagctcaaatcagcagtgggcagcaaggagctgacatgacaagccgacgcgagactgatgatctcgtgtcggcgaggaacaatgctcctgagccagagcgagtggtgccagctgagaaggaggaagagcatgttcagagtaccagtcagcaagctgttggcaattctgaagatctcacaagaggagatgcagctactgcagctgatgcacagtgcagtgacagagcatctgaaggcaaggtgcaattttcagagagtagagaagacagtaacaccgaactgcaagatgttcaacgaagcgaccagactgaatctgatgctgaaggcaagaaaagttcagaggaaacatcccaatctccacgccgcgatgtcgtcgagcttccaccaagttcagttcaaaccccagactcacaacctgcaccggctgtgttgaaacgggaggatgatccggcgacgagtcctcctcatggccatgcgcgtcgatcaccagaaagcttggcgccgcttcagaagaggatcctgaagacagtggacaacctgaaagacgacctctctgaacttttcagtaaatctcctgaactgaacaagccgaggacgcacgcgcgccctcctcgtcttcccaggcaagaaggctacgctcctcgcgacgcggccatggcggcggcggcgagcatccaagccatcagagcgcgtcacgcagctgtccaccgtcccggctacatagctcgtgcaggcaagcctggtcagctcgctgctccacctccaccacgtggcttgccgtcgcggcgctaccgccggtgcagggctgatcacccgtgctgccacgacgcgcgccatgggccgtcatgccatcacggttgctgcccccctcaccatggcaagcaagcgtgcaccagctgccggggacaacattgctgcaggccaagaacgcaagaatctcctgcgccgcggcggccggcggcggcggcggcaaaggaggtcgtcaagcggcgggcgccacccaggaaccattgccggccggtgctcaagggcgcgccgttcatcatctgctccagctgcttcaagctggtccaggtgcccgccgacttcgccgtctcgaccaagacggtgcgcaagctgcgttgcggctcgtgctccgccgtcctcagctactcctaccgggaccccgacaggaagaagcacggcgatcagtacagcgccgacggctcaccggcggcgccgcgcggccacgggcggcgaggcgacaagttcgcgttcctggacgacttcggccacgtcgacgtgagctactccacggaggacgagcagccgctgcacgtgtcgaggaactcgtcgttcaacaccgtcgacgagatggcggcggcggcgacgcagcagcatggctccagcctgcaccggctgatggggtacggctcggcgagcgacctgctgttccggcagcactcgcctgacctgtacgagagcttctccgagaggacgacgccggaggccgccgcgctgtacgaccggaaagggaaaggcgtctgcgtcgacctcgacgacgacggcggcgacgatgactcagacgaggattgcagcggcgcgctgaagaggtcgaggctgagagggtccggttggccattgccggggatactcaacagcaaggggacgactggaatgggagcaatcaggatcaagtcatagtagtgtagagaactagagatagattcaggtgctggaattttgacagaattttcagtcgttggaattcttataggtagagtgaatttcattcggattcatttaggtaggtttcatattggtggatcaacaggttgtttgttttgttcattttcgggtgtaatggtgctgcatctaaatgtaaatacaacactttacgatcccggtg

SEQ ID NO: 27619 - DNA, 4640 bp, Oryza sativa
  ref <308>: DATABASE ACCESSION NUMBER: AK103061
  ref <309>: DATABASE ENTRY DATE: 2002-08-28
ggctttatttatttaataataaagggatcgctaagctttattgctggtgtggtgctcacctgatatcccaagcaagttcgatattctcgacttaaataggctggccattttactaagcaaagctgaagtaagcctagctagctagccagaatactgaaggtgtgtggtgtgttgtggctggacggcggcgatggctgagctcacggcgggcgccgtgagctcgctgttgggcctcatccgcaacgcggagctgatgatgtcgggccgcgccaaggaggacatgcagttcatcaaggatgagatggacagcatcaacggcaccctcatgtacctcaccgagaataaggcctcccacaacgaccaggtccgggtgtggatgaggcaggtccgtgatatcgcctacgtcgccgacgactgcatcacgctctaccgccgcgacctcaccccgccggagccgggcttctggccctggctccgccacgtcccgacgtggctgagcacggtgcccacccgccatcgcctcgccaagaagatccacgagctcaaggaccgtgtccgcgacgtcggcgagcggcggcagaggtatggagtggtgggggagatcccgacgaagaatgcggcgtcttcttccggccacgggtctcagacggcgccgtcttctgatgctgcggcggccacagctgcagctgatgctcgagcagatgaagaggacgacgaccagaatcatgcagcaacggcgaccgtcgtcgatggtcgtcctgaccgccgaagagctctagagcctcgcactctagaggactactgctgcgagaacctgcacaagtggctcaaggaattcaacacaaagaggggttcaatggtgccatttatcgctgttgaggcaccgcgtccagaggatgccgccgccgtttcttcaatagtctcgtatgtggcggcggaggcagctggtttcaatcccgcagtctgggtcaatctcccgctgctgcacgcggaatttgatctgccacttgaaccctgggaaattctctgctacatcctgggggagctcaagcctcgatcccagcccgtacaagcacaaggcagcagagataaacgcaagcagaagcaggaggagggaggcaaagatgacaaggccatgggcagtgacgacgacgacgacaaccttcaatcgcaagcctccgatgaaaaatggcaagtgtttgatgaaatgtgggaagagatagaaaaaaggaatttcgacgaccgcattgaacaactcaagacgaagatcgacagcatcaaggacaagaaaacgaccaatgaaatcgagaaaacggtgagaagccaagaaaaggttaatctcaacgctcttgtctacaataaacctttgggcatacttttcctggcattgctgcctcccatgccaaatgatgtaaagtcggtgaggcgtgccctgcgtaccttagcatcgggcgaggcgaatattatcagaaaaattgcagaggcgcttaaaattcatatggaagtatcagaggtgaacaagattcatctcagtaagaagcaatatgtaaacatcctgagggaagtgttcccgacagtcagcagcacgccactgaagcaggataaatctaccaccaagtccactgcactaggaccaagtgctgctgctactatgttaggcaaggatcaaatcaaagaaattgtccacaaggctatactagacaagcaattggagaagcacttggaagtggctgatgctattgaagaaactaagaacaagataggggatatcaaggagaagattaaagtccagctggtgatccaagggattgtggacaagatcaaagaccatttggagaaggataaaaggaccctgattatcctccaagatgataaaggcttcttgtcttcgtgcgaggagaccaccatgaatgctttaagcctactgggttacacttgcgctgatgcaatggtcgtggttatcacaaaggaaagccaagtggccaataaattttgctatccaccgcgagagcctattacctattctattgctggtctctatcatgataccgtgctccagcttacaagtcagcaggcgaaacaaaacaataactacaattcccagcttttccgtgacatcttggacaagtgtgatccagatgagttctgcatgaagatgtttgctcatgctttgtatgctgaacccaataggagcaacaatgatctgcgcgagttgtataaaaccctggttccacaaaaatcgctagccagtaatgcttccaaggctagtcctgagcctgacaaaagcaatgacagcacccaactggtctcagaagaatcatcgttgtgcaacaatgctaagaagatattcgagttctcctacaacgacatgcctacagaatacttgtcctgcttgctgtacctagctatcttccctcaaggccaaagcatcaggagatcaaccttacaagcacggtgggttgtagaagggctgataaccgggaaggacgattggcctagtgcagactgtgcggtgcgtaatgctgagagatgttttgacgtgctcatcgatcggtggcttgtttatccaggggatgttaccgctgcaggaaaggtcaagagctgcatggtagacaatcttgttcatgagttcatcaccaaggctgccaaggagaaacaatttgtgaaggaaagccaattgcatcacttggctcaccacttttctattttttgcaatctccgactccgccgctctgacaacatcgaaaagttcatgcaaaatctcaagtatttttcaccttatttgcaactgctcaaggtgctggatctagaaggctgccaatcatttgacaagaacaaccactacctcgaagacatctgcaacaaagttttactgcttaagtatctgagcctaaaggacacaaatgttgcccacctgcccaatgctatcaataaccttcatgagctggaggtattagatatccggcaagccaaggtacctgagattgacacaaactctatcatgcttttcaatctgaagcgactactggcaggtcaagtttatccaagcccaagatacaatagcaccggcatgtatctcaaacgacatgaagagacaatatcatccagtgtgcggattcctcgcaagattgagaaaatggttaaaatggaagtaatgtatagtgtcaacgtttcacgggatggtaatatgttgacagagattggaaagctacggcaactaagaaagcttggtgtggttatcgacgaccatgatggtcacctcaggaagttgcttcaggtgatcagtgacctgagtgggtccctccggtctttatcgatcactctaattggaacaggaagtgagcaggctccttccagcgaagagacatctgcagattgcttgaaacaacatcccaagcttctagagagcttaagcatcagtggagtgatagacaaggtgcagcttctaccattgttggccataggtcagggcaaccgtaaccttgccaaggtaactattagtgggaccatgctgaagcaagaggatctgaaaaaagacatcgccaagctccacaatctatgctgttttaggctcaggcatcgatcatacgacgatgagaaaatcacttttgaagagaatgagttcctggaactcaaataccttatcatagagggcaccaacatgatgagcattatatttaaacaaggagcagcccctaagattgagaagattatcctgtccttcacgtccacaactcatattgctggaattgttgaccttccaaacctgaaggagcttgagctgaaagggaataataatgatcggaagcttgttgcatgtcttgccggtgctcctcacctttccaggttaacactcgatggtaccttgctggatctcaatgaactgaaaatactggccgagctaccaagcttgcgcagcctcattctcctgcaacagtcttgcgtcagaagtagcctcaacttcaacaatggtgagttcagcaagcttaacctccttgttgttaattgctcgaacatcaccagcatcagcttcacagacgaaggagcagcacctaagctcgagaagatcacctggtccttcactaccaagatgttgtccctctctggcatctgctaccttccgcaactgaaggagctcgagctcaacggtaaaattatccctgatcaggtgatacaagacattaaggaacataaaaacaaacctatttttaatcaccagtaagatcgaaaaggagcagaagaagagaaacaacagatgcaaacgtatgcatccttcattcgtccatgtaaagttggtatgtgctagctgcatgctttgttacaaataaacttgtgtcgatctgctttgtgtttctgtttctagtagtttttccctcccctgtttttctgttgattctgttagagtcacgcacatgacctcgctgtgttttcggtcgtgtgcgacgttggggcttgtcgtgtgcgtttagttcgcacgggggctcgtcatgcgcgggcacgatcttggtgattgggatggcagtcgccgttgagggatcgtgtccgcgtcaactgggccaacgtacgtgcccatgatcttgtattcacagaataaaaggaagaagataaacagaaaatgctgctcagttgttcgcagcgcc

SEQ ID NO: 27620 - DNA, 1224 bp, Oryza sativa
  ref <308>: DATABASE ACCESSION NUMBER: AK103062
  ref <309>: DATABASE ENTRY DATE: 2002-08-28
gggcgactcctcttcacaccacacgagccttatcgcctcctagatctctctcgcgtttctccccgccgccccctcctcgatcgattccatcgacgcggcggcgtatgcgcgacctacgaagcttccgactccctccctaccttcgtcccgctcctccccacacatctctccccgctccacaccgctccccatcgctccacgccactccccatcgctcccgcatctacggtgacggcgggagatagatgcggtggatggatgcagcgacaacaacgatggatggatgttgcggcgacggcgggagatggatgcatcgtcatcggctgaggtgacggggagatgcggcggcggcggcgacgacggcggtggaggaggagacgaggagatacggtgtcgtcggcggcggcggaggcgacggggagatgcggcgtcagtgtcggcggaggagacgaggagatgcggtgtcgttgtcggcagcggaggcgacgtggagatgcggcgttggcggcgacagaggcgacgaggagatgcggcgcgtcgtcgtcggcggtggatgcctcggcgtcgcggggcgcccgcaccacgtccttccgtgcgtggtttcgtgccgcgtgacacggtcaaggcacaagccacaacgcgatgcagacgcttccccaactgtcctcttttcttcttttttacaagctctggaactcgctgttgtgtctctgcatttcggtctctgctgcagtgctgcttcgtggcggttggtttcttgcttcttgttgatcttggaagaaagtgtgattgtttgagcggcagatgtgatgcgcaaggcgttagcgatcgatggatgcggtgctgttgatggatctgatgcagttttcttttcttgcagttttcttttcttggttgttcttggttcttgctagttcatgcaggtgaattcaaaacattttatttggttgcggagatattatcttttcttttagcggagaatggattttatccattttattttattttatccattttatttggttgcggagatattatcttttcttttggcggagaatggatttttagcaagcatcttcctttttttttcttttcagattggagaggtcttttctttctgttgtataaaaatccaacctttttttttttgtccttttttatgcgctgatgcctctgtacgtactgcagtactactaattaaataaagatgtagttaatgagggc

SEQ ID NO: 27621 - DNA, 2136 bp, Oryza sativa
  ref <308>: DATABASE ACCESSION NUMBER: AK103063
  ref <309>: DATABASE ENTRY DATE: 2002-08-28
gatatggctcatccgccgcggcgccgccacactgccgtagccctcacgcacgtggagggcgacacatcggcgcacaccgccggctctccgcctcgcacaacggagcgagggcgtggtgtgcgtgcccgccggccgccgctagctccccacttcacgcccctctctttgcctcgccttctcttcttcccactcttctcgtgctctcgccggcttttctcctccgtcgtcgttggcccatcgatggtagttcgtccccaatcaagtgccattgtggcaacgtctatacaaagcatcatctcgacggtctgcgagcttgagctcgagatgcggtgtttccccatctcatgcgaatcatttgggccttgtgaatctcaactcccgaagtgtccagggtgaatgagtgtatccgtctccatcgtcagcctgctgatactcagacaatgctgatctaccatccctcctttcaagtttcgtagttcaggtcaacattcatgacttcgacaaacagtctgccaccttcatcagctcagccactggggccatcaccatctcctacatcatgaggatatgcacaatgtgctttgtacagagggatcgtgatctaggtgtttgcaaagagcatgcgtgagggctatataccattagaggagctcttacagacaatgcacagacaatatagtatttcaagcatcaggtaggctttcagtcatttacgaattagcatttttctttgtgtgtttgctctcagtacccacttggttcttcatgtagattctagacgatttaggtttggcactaatagaactagactttcagttaaatggatgatttatatgcaggaagatccaatttgcttgataccctattatctgtgtaccattttcagtacttttgttgtacgactgttatacctatcctgacaatgttatagatcattggatcaaatggactagatccttctttacacttttaattctcttagctggtagatcattgaatggttaatatggtcaattataggttgtatgctaacatggtgtatatttgtctgcaggattttttttcttccctttacccatcatcattctctgcggtgaggtattgttttttatttctattttactcatccaggccttctgcaataactattttgatgaaacaattgtagtttccacaattatattcagctctttgtcttttaaaactgaattactagctgtgagctcagaatagcaaagtatttgttgtcgaaaatagagatgatttcctacagcccactaaggagtgatagcaggatagatgtggctcttatgtattatggtgattcaccttgaactaaaaaaaatatttgtctagacaattaatgcctcctatttgcatcaatgaatagtcagtttaaatgcattgggtatattcgcccagttcattgtattgccagttgtttctgaatgttacttatttagtttttcaaaatatgtagagtaaatgacaccatagtgaaaattttccaattcaaccatatgctcatccattttcttcccttaaacgtggaaaacacttttactggcagttgcacttcaaagttttagcgagaaaagttatttcagtatctcaacttggccgttccttttcaccatatagttgatagcttgatattatagagagataacagaactcgccaaaagcgttataattttgattgaatgcaagataactgtagtatacttccctatgggattgtaaaattcatcattgcttaatctgtcaaccttcaaatcattgtcatcggcaagcatagactaatcttcttttgttttactgttataggactactagggagggagtttctgcggtaatatatgcaacaccaagcatatccgatatacttcccgtcagtgcaggagagtagtttagaggttgcataagtgcatgtcattgctggagtgtaccagtataaaatgtgctgaaattatttcgtagctaataaagtaaatttacaaccttttgtttatacgggttactggtaattagtaagtctctctgacgtgttccggctgttatgcttaattccatgtccagtttgtagttctgttggaccttcaagcaattatatattggttgttcggtgacatcttc

SEQ ID NO: 27622 - DNA, 1784 bp, Oryza sativa
  ref <308>: DATABASE ACCESSION NUMBER: AK103064
  ref <309>: DATABASE ENTRY DATE: 2002-08-28
gctcagctcgcctgccgccgcaacgagcgcttgcttcgcttcgccctcctcaacggcggcggccggaggaggaggagatggcgcggctcacggtggagcaggcgaagcgcgaggcgggatccgccgggacgctcgccacgtcgctcaacctctcccaccgcgccctctccgacgtgtcgtgcctgagcagcttcgtgaatctggagcgcctcgacctcggctacaactgcctcctcactctcgagggtctatcaaactgtgccaatttgaagtggctttcggttattgaaaacaagcttgtgagcctaaaaggtgttgaaggcctctcaaagctgcaggtattgaatgctggcaagaataaacttaaaacaatggatgaggtcaaatctttgacaagcctgggagcattgattctaaatgataacaacatttcttccatctgcaaacttgaccagcttcatcagttgaacacacttgttctttccaagaatcctattttcactattggtgatgcttggatgaaggcaaaggccatgaaaaagctatccttatctcactgccagatagaaaaaattggttcttctctcactgcgtgtgtggaactgaaggaacttatcacttgctcacaacaagatcactacaattccatcagacctggcaaaaaatgtcaagagtttgaaccttgatttaggaaacaacttaattgagaggagatcagatttggaggtcctttctgaattgcactacttgaggaacctaaacttgcagggaaatcctattgctgagaaagacggtctagccaagaaggttaagaaattagttcccaacctacgcatatttaactcaaagcccatggaggccagctccaagagtaagaattctagagaagagaatctaccaatcaatgatgctgatacgcctgatgatggtcctactgacatttatacaaaaaagaaaggcaaggggaaacactcaaagcaacaaattaagagccctgaagaacctgcaggacaaagtactcgcccggatgtcaccattgctgccccagccaaatctgaactgcttgatggcaaggaaatgaagaaggaaaaagcggctgtagaacatgtcaagaacaagaaatcaaagaggaaggatgacaactcttctgttgatcatactgataaaaaggttagtaagggagccaagaggacaaaatctgccaagaaggaagagaagaacgccgacggaattgatgacgcagaaatgccatttgcagacttggtgttctccggtgaaggcaacaatccagagcttgagttgaagggcaaaaatcaggaaattgcccgagatggaaaatttggtggcctggtaatcgatcacaccaagaagaagaagaaagccaaaggcaccgtctttggctcgtcagctcttgagcagctatcatctgtgccggaggtaggatcaggtgcactgtcaggatgggattagttgtaatgagctgcgagtctgatgactggcgattaatgcttaatggaatgttggaactccttattttggctttacttgcaagccgagcttttgtatgcaccatctgcttgttttgtcacttcaaacgtgcaaactgacctgtcggtgcagcaagtgttgaaaattttgtacaagttcaggttggaagttttgtaaaagttcagatgatggggagctcaatttccctgaactcaacagtgttgttgcttttcatccattattatccaactctgtagttaagcaaagacgcaacatttcgtactagtttttttctg

SEQ ID NO: 27623 - DNA, 1382 bp, Oryza sativa
  ref <308>: DATABASE ACCESSION NUMBER: AK103065
  ref <309>: DATABASE ENTRY DATE: 2002-08-28
gactccctccgctcctccgctcctcgcctcttttacccgctcttccccccgatctccccggactcccacagccgcagcgaacaaatcccgcgcgggttgggaagagcgagctcgtgaggagagcagagggaaagcgcgagggggaaggaggaggaaaggtgcacaaggtcagactaagtttgcgttgaagaacaaaggagaggaaaaatgtcgcctgctgaggcatcgcgtgaggagaatgtgtacatggcaaagcttgccgagcaggctgagcgttacgaggaaatggtcgaattcatggagaaggtggcaaagaccactgatgttggtgagctcaccgttgaggagcggaacctgctttctgtggcttacaagaacgtgattggtgctcggagggcatcgtggaggatcatctcttctattgagcagaaggaggagagccgtgggaatgaggcatatgttgcatcaattaaggagtaccgtagcaggattgaaactgagctcagcaagatctgtgatggtatccttaagcttctggattcccaccttgtcccatctgccactgctgcagagtccaaggtgttctacctgaaaatgaagggtgactaccacaggtaccttgctgagtttaagtcaggagctgagaggaaggaagcagctgagaacactcttgtggcatacaagtctgcccaggatattgcactcgctgacctgcctacaactcacccgataaggcttggacttgcactgaacttctcagtgttctactatgagatactgaactcaccagaccgtgcttgcaaccttgcaaagcaggcgttcgacgatgctattgctgaactggacactcttggcgaggagtcttacaaggacagcaccttgatcatgcaacttcttcgtgacaatctgactctctggacctctgacaatgcggaggatggtggtgacgagatcaaggaagcagcgaagcctgaaggagagggccactaatctgtcctgaagtctatttctgagtccatttactcagctacctgctgtattactggatcataagatgtactaggatcaattgctatgtggaatcataagattagggctgcgtatgtcaaaatgtgtcgagctgaagtacccagtggacacagtttatgtgcactacattgcttccgtgacttatttactagttaattagcaactttcaaccacttcctgtatttgcagcacattattagtatcgctgtattagcgttttccatgggctggttatgattgagaatacaggccaggcattgcatgtcctttatttgtaagctcgatgtggacacgttggaattcgtgcttttcttattgtcatgagagttgagatgatgtttggattggcggct

SEQ ID NO: 27624 - DNA, 2552 bp, Oryza sativa
  ref <308>: DATABASE ACCESSION NUMBER: AK103066
  ref <309>: DATABASE ENTRY DATE: 2002-08-28
gcctcgtctttctccgctccgatcccccggcgtccaacctcctcctcctctccaaaccccggcgcgcgcaacaaagctccgggcatggcgaccgccgggggcgccgccgccgcggccatcccctaccgcggcctccgcgtcgccgctcgacaccatcaactcggcctccttcgatcccgacgtctacatgaacgtcctggtgcaacaatcaaatctggaagctcttttacagaggcatgtgaagatggccgctgagatcaagaatctggatacagacttacaaatgctagtatatgagaattataacaagtttatcagcgcaactgacactataaaaaggatgaagactaacattgttggcatggaagcaaacatggagcagctcctttcaaagataacatcagtgcaatcaagaagtgacacagtgaatacatctctttttgacaagagggaaaacatagagaaactacatcgtacacgcaatctcctccgaaaagttcaattcatatatgacctgccgactcggcttaacaaatgcatcaagacagaagcatatgcggatgctgtcagattttttactggagcaaaacctattttcgaggcttatggcgacacttcctttcatgactgtaaaaaagcatctgaggaggcaatcgatttagttacacagcacttgaagacaaaattatattcagattctgaacctattgaatcaagagcagaagctgtggtgcttcttaaacagctcaactttccggtggacagcctgaaatcaaacctacttgagaagttagaagattgcctcttaaatttccagaaggagcccacacaggcttcaattggtgatatttcaaagacattccgtgcttatctcataatatttcctgattcagaaaagcgcctcattgaacttgcacaggctttgttctcaaaccggtatgaaacggtcagagagaatctgaggaaaagaattccatcaacatatctattggctatgttacgatccttatgggaggacgccactgccattgatgaagttatacctgaggctgcattaccagctttttctctggagactactcgggatattattagacaacatatcgcaactgcctttcttcatcttcaaagtgaaatatcagatgtactcgccagaacaccctcgacatcaaatgggaagttagaagagtcacagctgcaaactgccatggaaacaagcaaggttaaagtattgcaaggatgtatagatctcctgcaggaatttcatcatcttatagatggcaatacagagttacttgtaaaactgagagatttggttattgattgggtacaagaaggttttcaagatttctttcagaaacttgatgggcattttcatatgctttctgggagaagcaagagtccatctcaagagatggaatcggtgcaaattgataaggttccaacggctttggtgcttatgcttgcacaactttgtgttttcatagaacaaacagcaattcccaaagtcacagaggagttggcttcttctttttctggaggtggtgcacgtagctatgaatatgggccaccttttgtgcctggagagatatgccggctttatcgttcatctggggagaagttcttacatcattacataaatatgaagacacagaagatctccaaacttcttaataaacgatttacaactccagtctggataaagcacaaggagccgcgggaagtgaatatgtttgttgatctacttctcctagagttcaatggagtagtgtctgaagtcaaacaggtattacctggtttgattcggcgacatcgacattctgatagcactggcagcacaacttcctcaagaagtaatccaatgcgagaggacatgttgaaccgatcaaacacacaccgtgccagaagtcaatttttagaaaatcatctagcaaaattattcgagcagaaaatggaaatattcaccaaagttgaatacacacaggaatctgtaatttctgctgtcctcaagctctgcctgaaaagcttgcaagaatttgttcggcttcagacattcaacagaagtggatttcagcaaattcagctggatatggaatttctcaagacatcccttaaggagtttgttgatgatgaagcagctattagctttttacttaaagaggtgaacaatgctgctcacgagagatgtcttgacccaatccctctcgagccgcccatattggataagctcatcagtgcaaaactagcaaagattaaagagcaaagtccaaatatgcagtagctacgcccaattggttattccttcccctagcaatcagtttcatctggtcatacaccgttcacagctatgtgcatatgtaaatctgtcaaacactcaaactgaaccaactcaccccgaaaatgtaatactatgttgagctctcagcatcgagaaatgctctgttagtcttgtgtgcattgtctcgagttcaggggaaatattgatgatcaaggacttgaatttaatcaaacgtgagtccaccgtccacattaattcaattttgtgaggaagc

SEQ ID NO: 27625 - DNA, 1520 bp, Oryza sativa
  ref <308>: DATABASE ACCESSION NUMBER: AK103067
  ref <309>: DATABASE ENTRY DATE: 2002-08-28
gagagcaacaaagaacagagcagagcagagcagcagcagcaagaaacagagagagaagcagagcaatttcgatcgagaagaaccaaagctactcctaagccaaagatggtgcacgcaccggcgaaagtggcagctgcggcggcgatcccgctgctgacgccgtacaagatggggcagctggagctctcccaccgtgtggtgctcgcgccgctcacgcggtgccgctcctacggcaacgtgccgcagccgcacgcggcggtgtactactcgcagcgggcgaccaggggcggcctcctcatcgcggaggccaccgacatctcccccaccgcgcagggctacccggagacccccggcatctacacgcagcagcagatcgaggcgtggaagcccatcgtcgacgccgtccaccgcaagggcgccctcttcttcctgcagatatggcacgtcggcagggtctccaccacaggttcgtccatctgccagattatttacttgctagttgttactacttggttactgattgattcgaagaatcaaaggtcattgtgctctttgattgattaaatttccaaatgaaatcgacagatttccagccgaatggacaggcgccgatctcaagcaccgacaagcagatcacaccggacgattcaggcatggtgtactccaagccccggcggctccggacggatgagatccctcagatcatcgacgacttcaggcgagccgcgcggaacgccatcgaggcggggttcgacggcgtggagattcatggcgcgcacggctacctcctggagcagttcatgaaggacagcgccaacgaccgcaccgacgagtacggtggcagcctcgagaaccggtgccgcttcgccgtcgaggtgatcgacgccgtcgtcgccgaggtgggagctcaccgtgtcggaatcagattatcgccgttcgtcgacttcatggactgcttcgactccgacccggtggctctcggctcatacatggtgcagcaactcaacaagcacccagggtttctctactgccacatggtggagccaagaatggccataatcgaaggacgaaggaagatcgcccatggcctcctaccattcaggaagcagttcaatggcactttcatcgctgctggcgggtatgaccgggaggaagggaacaaggtggtggctgatggctatgccgatctcgtcgcctatgggaggctcttcttggctaaccctgacttgccgaggaggtttgagcttgacgcaccattgaacaggtatgacaggtctaccttttatacacaggatcccgttgttggctatacagattacccttttcttgaggagattgatgaggagtcaagaactacttatgcttaattgtcacctaaataatccaattttagcctattatttggattaataatgtaacacttatcatgtgatacggacaagcatgaatacatttttttgttgtaagtttgtagctgttgattcgagattaatgagctaatgtaatattgatattgttcg

SEQ ID NO: 27626 - DNA, 2758 bp, Oryza sativa
  ref <308>: DATABASE ACCESSION NUMBER: AK103068
  ref <309>: DATABASE ENTRY DATE: 2002-08-28
gatttcaaatccacactccgcctcccctctccggccgccgccggcgagatggatctctccgccaccccgtccagatccaaatccggcctcagatcctccccgaggaagcccgtcgccgcccccgccgtggcccagatggacctctccaccccgtccaagccgacccccaggcggaagcccaaggcgccgccggtggcggctccgatgtcccccgtgaccccgtcctccgtccgccgctcctcccgcctcctcgagacgccgaccaaggtaacttccgagacccccgtgaagcccaccccaaccccgaagcggaagcgcgccgcgccgtcgccgtcgccgaagacgccgacccagtccgagcccaagcggcagcggcagaggcagaggcagaggcagcagccgaagaagccgaagaagagggcgtactaccggaaggtggtgtacgacggcggggagttcgccgccggggacgacgtgtacgtgaagcggcgggatggcgcggagtccgacgcggaggacccggaggcggaggagtgccgcgtgtgcttccgcgccggcgccgcggtgatggtggagtgcgacgtgtgcctcggcgggttccacctgcggtgcgtgcgcccgccgctgcggcgcgtgccggagggggactgggcgtgcccctactgcgaggccgagcgcgcggggaaggccatcgagaggcccaagccgccggaggggaagcgcatcgtgaggaccgccaaagagaagcttctctccagtgatttgtgggctgcacgaatcgagagtttatggagggagccagatggaatattctgggcaaaggtaagatggtatattatccctgaagagactgcagcaggaaggcagccacataatttgcgtagggagctgtaccgcaccaatgatcttgcagacattgagatggaaacaattcttagacattgttatgtcatgagccccaaagaatttaaggatgctagtgatcaaggagatgacgtattctactgtgaatatgaatatgacatacactggcataattttaagcgtctggcagacatcgatgatgaacctgagacaaaggaagatcctggcgacgagccatacaatgctggtaatgattatgtcagtgactcggatgaagattctgaatatgatgaggaggaagaacctactaaatgtagttctgctagaacacatcaatcacatgcgttggctgcgaatctgcggaaagggaggacatatggcctacaaaaaattgggatccgtaaaattcctgaacatgtccggtgtcatcaaaagaccaatctggagaaggcaaaagcaaccctgttattggcaactcttcctaagtcgttaccttgtagggataaagaaatggaggagatatctgcatttgtgaaggatgcaatttgcaatgatcaatgtctaggacgctgcctttatattcatggtgtaccaggcactggcaagactatgagtgtacttgcagttatgaggaggctaagatccgagcttgattctgggaatctgaggccttattctttcatagagattaatggtcttaaattagcttctccagagaatatctacaaggttatatatgaacagttgagtgggcatagggtagggtggaaaaaagcccttcattatttaaccgagcacttttcaggtggcactaaaattggcaaacaagcaaaccagccaattattttgctcatcgatgagcttgatcttcttttgacgagaaatcagtcggtgctgtataacattcttgactggcccaccaggccaaattcaaacctagttgtcataggtatagcgaacacaatggatcttcctgaaaagttattgcctcgtatttcaagtcggatgggtatccaacgactgtgttttggcccatataattatcggcaactgcaggagatcattacaagccgtctaaagggcattgatgcctttgaagaccaagctattgaatttgcttctagaaaggtagctgctatgtctggtgatgcaaggcgagccttagaaatatgtagacgtgcagcagagtttgcagattaccgcgttaaacaatctgggcacacttctgtgaatagaggaaaaaatgttgtttgcatgggtgacatagaagctgctattcaggaagtctttcaggcaccacatattcaagtaatgaagaactgcccaaaatttggaaagattatattggtcgctatggttcatgaattatacagaagtgggctaggtgaagtgatgttcgataagctggcagcaactgtcctctcttggtgccatgtcaacagagaattattgcctggctatgatactcttctgaaaatctgttgcaagcttggtgaaggtaagataattctctgcgaggaaggcactaagcacaagttgcagaagcttcagcttaactatccaagtgacgatgtaacttttgccctgaaggaatccccagatattccatggttgtccaagtacctgtgaagtttacacttgcagcggttgtactttcccagcatttcattcatctactcctggagttggagagcaacgatcgcaactacttgcccttgatcagcaaatctcggaatttatgtgggtccaattgttcatcttccaaaagatatcgactcgaaggatgccgctgcaacaaaatgtaaatgcagtgtcgcaccaggactgtaacatatgtatgattcgaaggagattgtaggtcgccattttattttcgccaatctgttgttaccct

SEQ ID NO: 27627 - DNA, 1393 bp, Oryza sativa
  ref <308>: DATABASE ACCESSION NUMBER: AK103069
  ref <309>: DATABASE ENTRY DATE: 2002-08-28
gtcctcctcgcctcattccatttcatcccctcctctctctctcaaaaccctaattccccgacccgagcaagccctaggtcgccgccgcgccgcgaggttggaggagttggatttgggtctgatttgattcggattgggcgtggtggagatggcggagaaggaggtcgggaggatcttcgtgggcgggctgtcgtgggacaccacggagcgcacgctcgagcgcgccttcagcgagtacggcaaggtcatcgagacgcaggtcgtattggaaagagacacaggccgctcccgtggatttgggtttgttacattctcagaacctcgggctgtggatgctgcaattcggggaatgcataatggagaactagatggcagaaccatttctgtgaacaaggctcaacctaggatgaacactgatgatggctatggctatggtggtggtggtggtggtggtggtacttactcatctggtgctagaggtggatatcgtggtggaggtgatgcagttccctctgcaaatgatgactgcttcaaatgtggccgtgcgggacattgggctcgtgaatgtccttattccagtggaggtgggggtggtagaactggaaggtactcacccccttccagatatggcagtggaactggtggtggacgtggtgaccgctttggaggatcagaccgttttgctaaccgctatgttgatgaccgatatgatggtgggcgctatgttgatgatcgctatggtggtggtggacgtgatcgatatgccactgatcgctatccaccaactgccgatcgttttacaggtgacagatatggtggttctgatcgttatgcatcaagtggatttaccagggaaagaagctatgaaagagatggaggacggtccggtggaagttactatcgtgatgaacctagaggctctggtggttatgacagaggtggcatgcgcatggggagtggtgacagatacgggaccggtggacctgctcgctttgctgggagttacagagataggcctgccccatatgatcgtcccagccgggcagcagcacgcacttatgatgaccgctgctgatggaggttacttcggagcattgcagaagaccagaattacaaatatatgttccagttcgcagttcctactttatttgccttcctgtattagtacatcgactctttgagtgttgttcttccatgcagtttgtttaattactagtgagacaataaggcagttcttgaattgttagtatgttggcacattaagctccaggcagtgggtgattctgattccctgttatcgtggtactgtgtaattaccctccagtgtaataatcgtgttccgagtgtgctgtcttatataattttattctggatagcattgaagattactgtg

SEQ ID NO: 27628 - DNA, 1434 bp, Oryza sativa
  ref <308>: DATABASE ACCESSION NUMBER: AK103070
  ref <309>: DATABASE ENTRY DATE: 2002-08-28
ggcctccgctgccgcggcttctaggttttccattccccatccgctcccgcgacttccttcgcgtctccaccgtcgccgctccaccgtgggttcttcaccgctcgcctttcccctcaccagatcgatatatccctttcacccgcgcagtctccatcgccgccgtttctttgtctctctaccccgtcgagccgaaatcgctgccatcgctgatttccacacaatcttctgctacggtcgtcctcagccatcggcccgctattctatcaaggcctgctggcgtacatcttcattggctggacacaccgtccccaacgggatcgacgggtgcccacggctgcaggtctgcccgccccttcaccgctagtttgaacataggccaagctatgtttcgtcctcagccataggccatctgctcgggggtaatggtgggtgcccagttgatcctcacggctcactgttcgacagagcgaaccgtgcgagcccgccttgacgggttcaaaagccgtcttcgggccaaggatgatgaattaggccgcaaaaatttggagatggaggcccttgcgaacacccttaaggaggcgaaggccgaaaacaagcggctccaatcggaacgggagaaagggaaggaagctagggccgaagtcgatctcttaaaggccgaactggagaaagagaaggcccactccgccgtgctcatagattattacaacctcaccgagccgaagatggaggctcttcggcaggaggttcgcaaggccgaagcaagcgctacggaggagtcgcggcggttttcgcgggagatggtgaaaaccacctagtccgcgcggacagcgtgccaaacgctccgcctcgccattactgatatgggcgcaaaagtgcagggtgtcccctccgaagatgcctcagccttcgacttctccgaatggacccaacaggctggtggttcggtttcggactgcgccaccgcatacggcgactgctgtgcgcgcgtgtcagcggcctttaccatgggcctcctgcagcagttcggctgcgagcacatcgccgagttccccaagtacgcgaagggggattgggaaatcagcgcgcaagacatttcgcccgcacttcgtgcgtagcgaaaacaattctggcagaaggatggccgctccgccgctaaggcgcgcctcttggagcagctggtgaaagcagaggcggcggacctttgtgaagaggaaggcgcggcggccggagggggtggaagcgatgcccaggaccacccagaggtgtgaggccctccgcccttctcttagattttcatagttttcttttggtgttcgctagatgtggcgaaccattgtatattcggcaatctgccgcaaacccttttattgtaaccgaaacaggtggccgttgggcgtttttaaaatttgtataacagacctacttttcgcc

SEQ ID NO: 27629 - DNA, 2761 bp, Oryza sativa
  ref <308>: DATABASE ACCESSION NUMBER: AK103071
  ref <309>: DATABASE ENTRY DATE: 2002-08-28
gacttccgaacttgaagctctcctctctctctcctgccatggctggccatcacccaccaccggccgatctcctcctccgttgatcctctttctatttccttgcgccatagcgtttgcctcgacgaggagaatccatttttcccctttcccctctccctccaccttgagataaaccgccaccaccaccttctcttatcgccggagttgagctcctgccgtcgccgttccggcctcctcccctaactccttcgctgggcgaccacttccccgggtgcgtgtcgctcgggaacacacttggccgccgctgttgaggccgttccaccatcggagcaccggcgtcccttctctctctctctctctctctctctctgctgttcacgggaagaagagaaggaagaagaagacgagaggaagaagaaggagaaaaaaaaaaaaataaagagctactgacagcgcgtagattccgccgttttggaagatcgcgatcgcgaggaaaagtgttcagaagattcttttgaagaagcaagtacttctgagctgaagacgaagttagaggaccaaggcacatacccagttgagttttgcctgtggagtagagctgaagccccgctaggatcgcctttttcgcttctatcgttctcttccgatgtgagtactaagtgcctcttttgtaagtatttacactttatttatgtttggaactatatattacttgtcgttttgtgtacctgactggtcctggatagggatttaatacacaaaataatctagaaatttggggctaaatttctgggcgtgacaatccctcagccatatatatggtgatgggtgaatgggcccatttgaatatgtttcgttaggtttgtgtgcccaaaactccataggcttgaatatgagtttgattctcctcctactttatgtatatttcttctcaactttagtagtttgtcaccagcgtccaaatatacaccaactctcgtggaatttgttagaaataaatcctaccactatgttggatgttttacattttcatattaatgaaggtattgacggtgtaaatttggtatttaattcagtagtggcatataatggacatgcttgccagtcaaagttacaaatctatttctcatttgttacaacttgcttgcaatactaaaagtcaaatagaggaggacatggaaaaacaacacgctatgtttttgcctccttttactaaccatttgctggaagtgcataatcatgaaaaggaggagagagacatgattgaaccatcattccctttattcacactcaaattcgatgcacctccatcatctgaagaaatcaccaaaggtaaactagatgatgctaaaactaatcaaggtgaatgtgttgttaataaattgaatttgtccacttttcatgctatagtagggcaaccattaatgaaaccaattgttgagattactttgtcacaagttgatttttttttgttgttccttgtgataaagaagagttgcgtgatactgcttcacttatactcattccacaattagtgaatgaacatgatattcctattgttaatcctttatgtgttgattttaagcatgttgttcacatgtctaatgaagttaaggaacgcaaagtattgtcttctttaaatactttgggctatgttcagtttgatgatatttgtgagctagtaaataatttgaagaagaaattattggctaagtttgaattgccatgtccaactaatactatattttatatctttggcaaacataataatagaggattatatttggtgcacataatttatatatatttagatttggaacctcttataattacgtgagaaaatagcaagctagagagtagtatcattgctaatcatgttatctcgagtttgtgttgttttgatttgaagcatcaggtcggttttaaggaagaggagagaccggatcactctttgtggtcaccatgcacctagatagttgcgccatatgagtactcggcttctgaagaagggagcaaatgagtagcaagcgaaacaatcaaatgtggcatcgatgttctttgttgtgcgtctatatcgggtacatttgtttcattggatattaatactatttgctaaataactgatgatattacatgacgaaagtttgttgcatttattttcatgtaggcacttctatgtgcaagaccatgcactacacgataagcaccatatggaaaaactgaggacggttttctatgaagaagaggaggatgatgtgacctggctaccataggtataacaattgttcacttcagggatcaagaagaatacatcaagatcaagccgtccaagtgatggaatcaaattcggctacctgctaccgtgctgacttcaaacgactgtcaaatatgtatacaagctctgttttggttctgtgagtatttgatggatagctcttatcggagtcctctttccaacggatctagcctcatcgccaaattccatctcagtcatccgcaatcaaagaaacatggtgctaaaatacctgtcgtgggcctttggatttgtaacttcatttaggaccccggcccatgtggggtgagccccatcctggtggagcacgaccctagggaccctttggtcgtcccctcatctccttaaatagccatgtatcccttcagagtgtctagagtttgtttagattaaagtttagccattgctactttaccttgtacttacacgtgtcggctagaccacctaattactcatctttgaaacccc

SEQ ID NO: 27630 - DNA, 4162 bp, Oryza sativa
  ref <308>: DATABASE ACCESSION NUMBER: AK103072
  ref <309>: DATABASE ENTRY DATE: 2002-08-28
tgagggatccgtggaagcaaattaaaccgtgggagcgcacgagttacgcggttactcggcgagccgagcaccgccgccgacctccggtgagatattttctttttaactacctcggtgaagcacggccggctataccttctcccgttggtacaccgtacacactgtataaaagcgatcgcatactcgtagcgggggccgatcccgaggagagaggaaggggaggggcgctgtattaattcgaacgtaaccaccctccccgtcatcggcggcgagaaacagaagtacagaacagagaagaagagcgagagaccgagggaggaggaggagagagaaggcgaggcgcaaagcgcaaatggagctctgcgtccgcgcctcctcgcttctgctcggcctcctgctccagctcctttcctcagtggacgtggtgtcggcggcgcagaaatttggtatcaactatggccagatcgccaacaacctgccggacccgacgcaggtggccggcctcctccagtcgctgaacgtgaacaaggtgaagctctacgacgcggaccccaaggtgctgatggcattcgccaacaccggcgtcgagttcatcatcgccatcgggaacgagaacctgcagtccatggccggcaaccccggcgccgccaggcagtgggtgacgcagcacgtgcagcccttcctaccggccacgcgaatcacctgcatcaccgtcggcaacgaggtgttctccggcaacgacaccggcatgatggccagcctcctgcccgccatgaaggcgatctacgccgcggtcggcgaactcggcctcggcggccaggtgaccgtgtcgtcggcgcactcggtgaacgtgctcgccaccagcttcccgccgtcgtccggcgcgttccgggaggacctcgcgcagtacatccagccgctgctcgacttccacgggcagacgaactcgccgttcctgatcaacgcgtacccgttcttcgcgtacaaggcgagccccgggagcgtgtcgctgccgtacgtgctgttcgagcccaaccccggcgtgcgcgacccaaacaccaacctctcctacgacaacatgctgtacgcgcagatcgacgccgtgtacgcggccatgaaggccatggggcacacggacatcggcgtgaggatctccgagaccgggtggccgtccaagggggacgaggacgaggccggcgccaccgtggagaacgccgcggcgtacaacggcaacctgatgcagcggatcgccatgaaccaggggacaccgctcaagcccaacgtgcccatcgacgtgttcgtgttcgcgctgttcaacgaggacatgaaacccgggccgacctcggagcgtaactacggtctcttctaccccaacggctcgccggtctacgccatcaacaccggcgccggtggcgtgtcagggcggacggggccgttcgacccgtactcggcgcagatgttctcgtcggcgtccagattggcggtaaggacagcatctttgacactgctactgctagtattgccccttctgtcctcattctcttgctaattaatgatacctttgtatacaaaaacgtgcaaatcaaccatggggtaggcctggattccaaaatttggccgacagcgatgtggctcagaaaaaagctttcatcttttctcttattcccctcacaacgatctgaaaaaaagtcgccttttcccctctgtgcactaacctatcaagatgtggaaacacccaaaggggaggtcgaaagatgaacgggcatcacagaaagcgcggcaatgttaggaatgtttgactgaacaggaaacagagaacattttagccgcggcggcctttgcatcgcttttgtactcgcgtttctgaaagtgtcacagtagcagcacagaaacatctcattccgtcatagtagttgcacagagacatctcgttttgtcactgacaaacaaggcttgatcggtgtgatcatctcactttgtttttgctcaccttctcgcttgcagatgacgtctgggatgggggtagttgtcctactcggcgcattattcctctgagcttcctccacacgtaccacgcagcagagaaagaaagtcccacgactgaacgaatgattgggggtggttcacttctgactaacgcatccagcagtctctgagttgtcatttcattcagagccggccgattgcatgtgttcgtcctgacagcaaggtaactaaccgaagctcatctctgcaccctccaatacctgatacggcaatttgttactactgccagattgtgtgcttagaaagtccatcaagtaccaaacaacctgttgaaaattgcaacggaatcctcgggtttagatccatgcgggtaggtgaccggtcactggcacgcgtggccgactcggcgctttggccggtagccgcttgtgcgccatgtgaaataatggcgagttagcgtatcctcccgggtcgcgtgtcatggatgatgggctactgtttgttcggtgcatcatattgcagcgccattgctgcaggtcccttcaggctttgagagctccttccaaaccaacggcaaccagccactgtcgagaaccatcgaaagctttcctcgagtcaccaccattgctgctacaatccaaatagagtagggacgttttcaggtagagcagtgttgtccctgtctgcgactgcagcaacacgcttggataagcaagttgttgatcactactcgctaacgaaggaagtagttttgagaggtcaattaagccaactaatgtgatgcaaaaaaaaaaaacggaatggctatctgtctgtcgcatgatttttatgggctgtatcatgcgttttattggccctctgatatgtttgagattcgtgcactcttttctttttttctattttctttgtgggttttttaatatttttagttgtgggctttgggctttcacggttatgttggacctttttttctctttatgggacccactgtatgttgtgtccatgagagtttatgtagggcccacttttactgttgaaattttgaaatccgcgccggagagagggtttgtctgaattacatcgtatttacactataattacatatgtaattttagtatatttacgatgtaagtctgaaaactacttgagcccatttaaacccacgtgagctttagattgtccacgtggcccgtttgttgttttgtattttgtttgtatatattaatgtcatccgttagatgttcatccaaagggtaagaaatctgcatgataggaggctaaaaaatctgtcacatgatgtatatacagtcaaaaaaaaaaaaccgtatcatgtagctgagcctgtatcgtcatgttagtaatcatcgcgtaaacgtggaggcgcttcctcgaaagaggacgtacaagtggatcgtggaatatctacgcctttgtctgatacttttattctaaagtcacactcttccatgtagcattgtgcgattgctggctaggagactttattcccgatatcagaaatgtgtagctaatataccatctattaccaaccagtcttcagaaaaaagaagaaaaaaatctggctgcctaccctatccctgtccctgtagtggtatatttttttcctgtttggcatctatgaaagtttttatactacctcgctagagcaagattacaagaagcatgcgttcatgcttgtccagactccagagagaatgcattatgcaattttcacttctaagttctatagcttctatcaactcattatgcttgttttatgatgcaggagactgagaatttatactagttctgaatggacatcgagatctttactatagtcgcactaactgcggaggaggaagctgttagataaacctggtgtactagctagcttgaccatgtccttgttattgctaatcggtcagtcacgtcactttgaaagaactgaaggctctcaattctggacgaagtggctgtaactgtctttaagcaacggcaagttcatgattaggctcatagaattcattttgctacctttcgttttccgttttattggtggggttactgtatctattcatctagattcgtagcagattttacacggaattatagctacagatgaagtatatgtggtgtgtcatttgttacatttaaatacagagatacgattttttgtctg

SEQ ID NO: 27631 - DNA, 2233 bp, Oryza sativa
  ref <308>: DATABASE ACCESSION NUMBER: AK103073
  ref <309>: DATABASE ENTRY DATE: 2002-08-28
ggtgtgtggtaatcgtgggcaccaaactgaacaccccttagcaactagtgttgatgtgctagactgaatttagttctcgcaggactggtagttactgatataaacagatgctgatattgttcatttagtccagttgattcagagacacctcttatgggctataaaatttttgaaggttctttggttctactgtcgttacttcttttcacctcattggccgtggcagacatcgcctctgagaagcaagcgctccttgcttttgcctctgcagtctaccgtgggaacaaactcaattgggatgtaaacatttctttgtgctcatggcatggtgtaacttgctcgccggaccgatcacgcatatctgcccttagggtaccagctgctggcctgattggtgcaattcctccaaatacccttggcaggcttgtctccctccaagtgttaagcctgagatctaatcgtttgattggaagtatcccatctgatatcacctcacttccttctttgcagtccatatttcttcaggataatgaactgtcaggagatttgccttcttttttctctccaacccttaataccattgacctatcctacaattcctttgcaggacaaatccctgcaagtttgcaaaatcttactcaattatctaccctgaacttgtcaaaaaattctctctctggacctatccctgatctcaaacttccgagcttaagacagttaaatctgagcaacaatgagttgaatggctcaattcctcccttccttcaaatattctcaaacagttcattcttggggaaccctggattgtgcgggccacctctagctgaatgttctcttccttcaccaacatcctcaccagaatcttcattaccaccaccatcagcattgccacatcgtgggaagaaagtaggtactggctctataattgcagctgcagttgggggctttgctgtatttctgctagctgctgcgatatttgtcgtgtgcttttctaagaggaaggagaagaaagatgatggattggataacaatggtaaaggcactgataatgcaaggattgagaagcgcaaagagcaagtcagtagcggtgtccaaatggccgagaagaacaaattggttttcttggatggatgtagttataactttgacttggaggatttactgagagcttctgccgaagtccttggtaaggggagctatgggactgcctacaaagctatacttgaggatggcaccatagtggtcgttaagaggctaaaggacgtcgtggcagggaagaaagaatttgagcagcaaatggagcaaattgggagggtaggcaaacatgcaaaccttgtgcctcttcgcgcttactactactcaaaggatgagaaacttgtcgtctatgagtatgttgccaccggcagcttttcagccatgttgcacggtattaagggtattgccgagaagaccccgttagactggaataccaggatgaagattatacttggaacagcgcgtggtatagcacacattcatgcagaaggcggctccaagctcgcccatggcaatatcaaggcaaccaatgtactcctcgaccaagaccacaacccctacgtctcagactacgggctgagtgccttgatgagcttccccatcagcacatcccgggttgttgtcggttaccgtgctccagagaccttcgaatccaggaaattcactcacaagtccgatgtttacagcttcggtgttctcctcatggagatgctgactggaaaagcaccccttcagtcgcaaggacaggacgatgtcgtggatctaccaaggtgggtgcattccgtggtccgggaggagtggaccgctgaggtgttcgacgttgagctgatgaagtacctgaacatagaagacgagctggtgcagatgcttcagctcgcaatggcgtgcacgtcgcgatcccctgaacggcgcccgacgatggcggaggtgatcaggatgatcgaggagctccggcagtctgcttcagagagccgcgattcctccaacgaaaatgccagggaatccaatcctccttcggcgtaatgcctgacgagctgctgtgtggtttactggtttgtatgtttgcaggttgcagcaattcatttagaattaaggctggtcgtgatggcctcttcaatgtagccagaagctttcagcactggcactatgtagaagcattgcatgatgcgcaagttgatttgctggcttcttgacctgc

SEQ ID NO: 27632 - DNA, 2430 bp, Oryza sativa
  ref <308>: DATABASE ACCESSION NUMBER: AK103074
  ref <309>: DATABASE ENTRY DATE: 2002-08-28
ggggcgtgaggcgtgagtggtggtgcgcctgtccgccccgggcagtcgcctctcgccggcggcgggcttggacggccggagataggccgcaaactcgcgaaggcgcctccgtcgcggcggcagaagcgggtggcgtcctgtcggtggtcggcgtccgggtggggggttgggggaaccctcgcggtcgcggcggcggggatggtgaagatagtgacgtacaacgtgaacgggctgcggccgcgggtggcgcagcatggctcgctccgccgcctcctcgacgccctcgacgccgacatcatctgcttccaggagacaaaattgtcgaggcaggacttgtcgggggatgtcatcatggctgagggatacgaggcttttatttcatgcaatcgttcatcgaaagggcgtggagcttactctggtgttgccacgttttgccgggtaacatcagccttttccagtcaagaggttgctttaccagtagcagctgaggaaggctttactggattgcaagagactgcaaagaacagtgaaactattggggattttgttcttgtaactcctgtggaagaggaaggtcttggtgaagtaacaaaagaagagctgctcaaggtggacaatgaaggacgttgtgtaattacagatcatggacattttgttctttttaatatatatggcccagctgttgaagaagatgatatagaacgagttcgctttaagctactattttacaagatactacagagaagatgggaacatttgttggctcttgggaaaagagttttcgttgttggtgatttgaatattgcaccttcttcaatagataggtgtgatgcccaacctggattcgagaagcaaacgtttcggaaatggttgagatccatgctgagagaacatggaggtccattttttgatgctttccgatcaaaacaccctgaaagagtgggagcttatacctgttttaatcaaaaagttggagctgaagtatacaattatggttctagaattgatcacattctcatttctggtgcctgcttccatcactgcggttctgtggatgaccacagcatctttccctgccatgtggaagaatgtgaaattatggatcatttcagaagagggaatagcgaaaatatgtcaatgtggaaaggagggagaagtagtaagctagaaggatcagatcatattccagtttatattgtgctgaatgagatacctgaacttccagttcataacactccttcatcagctgctagatatcttcctgaaatccgtggacggcaacagagcatagtatcattcctaaggaaaggcatgatttatgaacataaagatgccatgtccatggatagagcagatgaaagctgctgtggtggtggcttggaaaggaaagctatatataaggaagaaccaccaactgatatagccaaattttccaaaggtaacgaccttcatagtgtcatcaagcggaaaattcgtgatcaattgttaaatgaaggttcaagtggcaactcccataatagcactgcagcattactggcaacacaaagtagaaaagcttccttttcttgcagcaaggctgtgtccaacaagaaaaacaaacataacttgtcttcccaacctacgatcaagtcattttttcaacaaccaaagtcaaagccaggagatagcagtaccaatagcatagttactccaccagatactttgcatggtatggatgaattacatgatccaaagaatgactgtctgccagaaagcatccagtgtacaactccagcaaccgaagatcagggtaactcagatgtaccctgctcgctttcaacagataaatgcaatgaagcaacactggagtggcaaagaatacagcagagaatgaagatgaccctaccactttgcaaaggacaccatgaaccttgcattccaaggtctgtgaagaaaggctctaatattggtcgcctattctatgtctgtgcccgtgctcagggacctgcatcaaaccaagaagcaaattgtggtcactttcagtgggccactgttaagtctaaagagaaacgccggtgactaatttctcttttatcgcataggtgtaacactcactcctggacatgtgtgtgtcacttgtttctatacacatgaaatgctgatgttcttctcgggagcaagctggtatttgagtcagcaactcggcattaatctctagttatgcattacgcaggtacataatttaattttgtgtttaatttagatggctaccatggcctcctttgttgtttacatatgttatattgtttggtcaaatgccaccttgtagctttctcgtagttttgttttctcgggtttggctagcttatgtttgcaactacccttggatgtattaattgaaaaactagctgagaagcatgaaaagaaatcaagtgaagtaaattgtgtact

SEQ ID NO: 27633 - DNA, 780 bp, Oryza sativa
  ref <308>: DATABASE ACCESSION NUMBER: AK103075
  ref <309>: DATABASE ENTRY DATE: 2002-08-28
gagtgacctccacaagccaagaagctgcaagagcaagccaagccaagccaagaacgaagcagcagcgagagcgaggtgagcagcgagcatggcgggcgaggcggcggcggcggagcggtgggtgggggcggcggtggacttctcggaggggagccgcgcggcgctgcggtgggcggcggacaacctgctccgcgccggcgaccacctcatcctcctccacgtccccaaggaccccgactacgagcagggcgagaccctcctctgggaggccaccggctccccattgattcccctctcggatttctctgaacctacaattgcaaagaaatatggagcaaagcctgatgccgaaacattggacatgcttaatactgtggccaggcagaaggaggttgtggtggttttcaaagtcctttggggagatccccgtgagaaactatgccaagccatcaacgaaatccccatgagctgcttggttattggaagcaggggtcttggcaaactcaagagggtgctgttaggtagcgtcagcgactacgtcgtgaacaacgccacttgcccagtcacagttgtcaagacagccgatggttgatcctattgtcataaatatccatgtgttatatagtctgcttaaatctttgtccatctatctgaaacatattgaaccaccatgcagtgtaattgtaataataaacgaagtcaactgaagacgctcagttgtactttgtgcttgcactctctgagcctgactatgaaatggatcctgctgtttttcttagc

SEQ ID NO: 27634 - DNA, 1068 bp, Oryza sativa
  ref <308>: DATABASE ACCESSION NUMBER: AK103076
  ref <309>: DATABASE ENTRY DATE: 2002-08-28
gattcttctccttcttctccctccgcgtcgcattcgcatcacccccccgaaaccctagacccaccaccaccaccaccatccccgagctcgcggagaggcagcgagagcgagaggtagctgctagtaggcgtcgggcgaggagatgtacgcggaccagatctccaccggccggaagcgctccatccacgaccgcatcgacggcgaccagcccgccgcccgcgctggcgccggcgccggcggccggggggcccgtaacccgccgtccaagaggcaacggcaaactgatgaaaaatggaagcatgatctttaccgggaagacgatgaaccagcttcaaaatcaattgatccacgggatttgcgattgaagcttcagaagaaaagctctcagcaaagctttgctggccaaaggggttctggtgtacgtgatctacgtgagatgctttctggaacaatgcacccacagccagtcaatgcggaccctccaaaggcaaagccatcatcagagatcgtgaaagtcacaaggcgtgaaaatgcagatgtaatgcctgtacgtcaaagtaagaaagtaccaaaaccgacgtcatcgaagaagacatctcagccgaaggctgacagtccacttgatattttcctgaaatctcttggacttgagaagtactcgattaccttccaggcagaagaggttgacatggcagccctaagacacatgactgacagtgatcttaaagctttgggcattccgatgggtccccggaagaagatcatgcttgccttggaatcgagagcgtagggagggctggcgtgtaatgtagaaaggctgggcgattaggaattgtatgctcctctgcttgcttggtaaacccaaagtgtccgcatgtcctggatacggcgcaagaacaaaagcgctgggcgtcttgtaatgcgtcttctgactagttgagcattccgcattctcagccagtttaggatgttttagaggctggatgaaggttgacaatgtaatattattagtctcctgttaatttttatctggtcggcttgcttgtcaggactcaggaccagctgatt

SEQ ID NO: 27635 - DNA, 3779 bp, Oryza sativa
  ref <308>: DATABASE ACCESSION NUMBER: AK103077
  ref <309>: DATABASE ENTRY DATE: 2002-08-28
ggagagaattcaaactgtactacgtagtagtactagcgctagcactagcgagcggtggttgagcggcgcatcgcacgcgccgcccttgaccagcgacggcgagaagctcctccgcctccgcctcctcgtcgtcgggcgcgcgcccaccgccggcggcggctctcggcggcagcaggcagcggcagtggcctcgatcggcgggttgcgcggtcggatccccaatccccgggctgcgctgcttcgtgagaaggctgggttcttgctgttttccccagacttcaaggaatctgcaatttactagcgaaaatgggtgtatcaagacctccaagcacccctgcatcaaagattgagcgcacaccgatgtcgaccccaacccctggtggcagcactagggtcaaggaggagaagatttttgtcacagtgagggtgcgaccattgagcaagaaagaactggccttgaaggatcaggtggcatgggagtgcgatgataaccagacaattttgtacaagggccccccacaggatcgggctgcacccacctcttacactttcgacaaggtgtttggaccagcttcccagacagaagtggtgtatgaagagggagctaaggatgttgctatgtctgcattgacaggcattaatgccaccatttttgcctatggtcaaaccagcagtggtaagacattcaccatgagaggcgtcacagagagtgctgtaaatgatatatacaggcacatagaaaatactcctgagagggactttatcatcaagatatctgctatggaaatttacaatgagattgtgaaggatcttctacgacctgagtctaccaatcttcgcttgttagatgatcctgagaaaggaacaattgtagaaaaactggaagaagaaattgccaaggatagccaacatcttaggcatctaatcagtatttgtgaagaacaaagacaggttggggagactgcactaaatgacaccagttcacgttcccaccagatcattaggctgacagttgagagtaggctccgtgaagtgtcaggatgtgttaaatcttttgtggctaatctgaattttgttgatcttgctggaagtgaacgagctgcacaaacacatgcagttggcgcaagactgaaagaaggctgccatataaatcgcagcttactgactcttactactgtcatcagaaagctaagctcggataaaagaagtggacacataccctatcgagactcgaagttgacacgcattctccagctttctttgggtggaaatgcaagaacagccatcatctgtaccatgagtccagcgcaaacacatgtagaacaatctagaaatactctattctttgcaacctgtgccaaggaggttacgaataatgcaaaagttaatatggtggtatcagataagcaattggtgaagcacctacagatggaagttgctagactcgaagctgagctgagaacccctgatcgtgcctcctcttctgagatcattataatggaaagggacaggaagattagacagatggaaaaagaaatggaggaactcaagaagcaaagagacaatgcacagttgaaacttgaagaattacagaagaagatgggtgataatcagccaggatggaatccttttgactcaccacaaaggacacggaaatgcctcacatattctggatcactacagccaagtaacaaaatgaagatacggagctcgattagacaatcagccactgctccatttatgttaaagcatgaaattcgcaagcttgagcagctacaacagcagcttgaggttgaggctaaccgagctattgaagtactgcacaaagaagtcgaatgccataaacatggcaatcaagatgcagcagaaactattgctaaactacaggctgaaatcagggggatgcaatctgtcagatctgacagagatgttgacatgatcacagatgaaggaaatggatctgatttgaaagaagaaattagtaaacttcatatgcaagacaatgatattgcaaaacttgaggctaaactagaaaatgtacagaggtctattgatagattggtgatgtcacttccaaatgttggcacacaatgtaacgagactacaccaaagtccaacagagcaaagaagaagaagaggatgcttcttccactgggcgtgagcaacataaacagaccaaatctgataagagcaccatgctctcccctctcttctagtaggcctttagagccagaagttgagaatagggctccagagggtgacactgtgtctcatgaaggttcagaaagggctactcctactaagagtgaagacactggagatgtatcatcgcgtgatgaaaccccacgctataggcgatccagctcagtgaacatgaaaaagatgcagaagatgttccaaaatgctgctgaggagaatgttagaaatatccgggcttatgtcactgaactgaaggagagagttgcaaaacttcaataccaaaagcagctgcttgtctgtcaggtcttggagttggaatcgaatgaaggcaagacaaatgacatggaagaagattcagaggaaaatgcaggatctctacaggatggtcctgattcatgggacagattatttaaggagcagatgcagcacattatccaactgtgggatctctgtcatgtatcaatcatacacaggacccagttctacttattattcaggggggatagggctgatcagatatatattgaagtcgaagttagaagactgacatggttgcaacagcattttgctgaggtgggcgatgcaagtcctgcagctggtgatgactccacaatttctttagcctcaagtatcaaggcattgaggaatgagcgagaattcctcgcgagaaggatgggctcaaggctgacagaagaagagcgagagcgcctcttcatcaaatggcaggtgcccctggaggcgaagcagcggaagctccagcttgtgaacaggctctggacagaccccaatgaccaagctcacattgatgagagcgccgatatagtggccaggctggttggtttctgtgagggtggtaacatcagcaaggagatgtttgagctcaattttgcagtccctgcaagtaggaagccatggctgatgggttggcagcccatttcaaacatgatcagggagaagacacaactttggtaagcagagatatgcccatcttccttgttaagatgaggtagaaggatcatataatctcataaaaattttggtgctctggaccaaaggtgaagtggctgagcttctgggttggtcaaggccaggattgacagggggtgaattgatgcaagcatggtgccaacatgcttcagtctgtgtagaatcttctcttgaacctgtattcttctttcatcaccagtgtagagagacttggatgttctcatattctttattaagtagtgttaagaaatgattccgttccaaattttgcccccaaattgatgatcaaaagttcgtcttgccatgtggttaaaggctgaatcatttaaagaatgcatagagatatttccactctttctcacaggaacacatggagttcaggaaccaggatctcgcggagttagaaaatattgtggttctcgctgtacaacgaggacctctccttttggcttgtgctatttgttccgctttctggattgttctagcgtctttctagttccagattcttctttcttggcgagtaacttctcgtcagacatcttccttttagttttgttagtcaacctcgtctgcatgagttatcagtgattttg

SEQ ID NO: 27636 - DNA, 1950 bp, Oryza sativa
  ref <308>: DATABASE ACCESSION NUMBER: AK103078
  ref <309>: DATABASE ENTRY DATE: 2002-08-28
gggtgagagagagagagagagagagaggttgcagctagcagcagagaagcacctgcagaggcgagaggcatggagtgcggcggcggcggcagggagcagcagatgcagatcgtgtgcgtgcggggcggcggcggcggcggcggcggcggcggcggcgaggaggatgggtcgtcggagtgggaccagtcgtcgtcgcggtcggcgctgtcgctgttcaaggagaaggaggaggagatcgagcggaagaagctggaggtgcgggagaaggtgttctccatgctcggccgggtcgaggaggagaccaagcgcctcgccttcatccgccaggagctggaggtgatgtcggatccgacgcggcgggaggtggagacgatacggaagcgcatcgacaaggtgaaccgccagctcaagccgctcggcaagaactgcctcaagaaggagaaggaatacaaggcgtgcctagaggcttacaacgagaagagcaacgagaaagcaacgcttgtgaacaggttgatggaggtgagtgacagaagagcggttttcagtggtttttagctacccaggaaagatagcatatatattcagtcaaaatagttgtaggactgacttgaattttgatcaaatttcattgaaaagttcaaaattctttgaactatttggagcaaaaaaaattgtgattccaattatctaaatataaaatggaaatgtttgcataaaaaatatgtaggaaactaacaaccgtagtaccatttactccatccgtttttaaatatatgactttgatttttcgacatgaggtttgataatatattttattaaaaaaatagtataaatatgtaaaaagataagacatgattaaaatacctttattgataaaacatatttaaaaaaccgaagtagttatatgagaatagtccaaggtaagggtgagaacaaagaacagctagcttgatactacattcgtactaaaatatagttatttctagtacttgtctcaaaatgaatctatttctacaccttttttttagggaagctatatttttacacctaccaacttctcttaatcaattataactattctctatttaatttttttacctactttcttttctcaaccaatcacaagaatcctccaatcattttcacctacccatggagtaccaaatggaggtttctgttttttttttgcgccaaaattgtttaaagttgatgcctacttccatttcaaggtccagttataattttcgggcctagcccaaaattcccaagcaacaagacaacatccagcctttgtctcaaatcttcatcaacaaggttgggcctaatgtatatttgtccaaaacttcctctaaatgcctaaccaccgttaatggagcaagattcccactagcagatgatatatgttaattaattaagttttttttttcaccatttatagcaaagatagacagtggaaatacacaattgtatatcttaatttactcgatggataaacacggaacaacttgtaaagtttaaactagacgaataatattgtgaagtgggtattataatacccatttcataatgtattcagaagatcattactacacgctgcagttcttatagtaatgttttttggtacattatatatttattcttctgaatttattatgttatactctcattaagtatttccatatgatcttgagcagcttgtgggcgagagcgagcagctgcggatgaagaagctcgaagagctgaacaaaacggtagagtccctctactagacttgggcttttgggggcccatggctgccaccacaaagagcttgtttgcagtgtgcaatttcttctttttttttatgacacgaggatgagccaaatttgtgtgacctcacatgtgtcgtcgcgtttgatatagctgatgggatcacgagtttatctattctgtatggttcagtttaattgc

SEQ ID NO: 27637 - DNA, 2400 bp, Oryza sativa
  ref <308>: DATABASE ACCESSION NUMBER: AK103079
  ref <309>: DATABASE ENTRY DATE: 2002-08-28
ggggaggtttccattcaagaccagtgctcgctgcgagtcccgacgcggcagcggcggcggagccgctctcctcacccgctcgcaatcgctgctccgttcgccgcctcacatccatggattccaccccggctcctgccgccgccgccgcggagacgccgaccaccgccccggcgttcgaggaatgcctccgcctcctccgcggggagcgcgacgagcagaagctggcgggcctcctcgtcgccgccaacctctgccgcgccggcgacgccgcctccgtcgtcgaggtgtaccgcgccgtcgggccccggttcctccgccgcctcctcaacaccgggctggggaaagtggagggcggcaaggaggaggacagggaggcgtacctgcgtctctcggtgacggtgctttccgggcttgctcgattcccagaggttgccgccgacgagggggtcgtctccactgtgcccctcatcgccgagatcgtctccaaatcgtctgatctggcaattactgaagaatgttttgagctcctgtctcttattgcaatagcttcagatggtggggcgcatacgttttgtgaacctggagtgatggatatgctcttcctccaaatctcaaacttcccagatggttcaaggtgcttagagcttgccattcatctaatgcagctacttgttcataaaatcagaatagacaacatgaccgtggagaaactgcaaggcatgacaagcatggtgacctcacttgctaggctttttgctgttcttcatactacagttaaatttgaagcgctgcatatgcttaccgcccttctatcccaaaaggaatctccgcttcatgacgctttgagatcagtaccttccatgatttggaaatgtcaaattcgagttgggataacggccgttctccaaaaccgtgttgtatcttctgaaaagttgcaagctcttcttttggcggagtgcatgatgtctatacttggtgagaattggctgtcagaagaatacaaagtccctgatgaccagaatatgatgcctgttgataaatttgtattgcttgtcctagaatctgcaagaatcgaagtttctgtccttctaaatgagcttgcttatttgaagtatgaatcttcaaaaaattcccagagagatgatgccatcagtcagaaagagagaaacctggctatattattttcactaatagaaagaataataaaaatgatatcaaatgccagtagtggggaaggtgctgtatgtcagaccatccgtgagagcaccatcatgaaagcaattacaggattaaatgagacagttggcttagttttagactttctgcaggacgcaaaggatcatgggcaaaggaaaggcgatgatcttttggcggctgtgagaatagtaggaagttatctggcagaggcaccatatgcctgcaaggagaagattagacatctgctggaatttatcttctctgttgaagggcaagatgaatcaagctcattccattctatttgttttatgcttcccatgctatcacaaataacaatggaggctgatggatgtagaattttggcatcatttggaggctataaaatggttatagactgccttattaaaatgatcgaacagaatggaatgatgattgacactggtaacatgtttttagcatgtgataccatcataaactttttgtcaaatatgaaaaatgctcatattcaaatggggtcttgttttgtcggccttctaaaagcacttgtttcatggactggaaccgccgatgattcatcagttatcataacagcctcctgcttatgcacgttggtgttggacttaacaacagaagagtttttattgagcagctctgattttgattccaagacacttgagaagttgtcaaagctcattgccagaagtttgcatcagggcattcctgacgacgacatagaacaatccaaccaaaagcaaatcatactatcaggttacaggaggtggtctgatagatatccacgtgttaaaaacatcctgcagcagcatgtttctgtgtgattttctgcttatgattgccgtcaatctcttgtcaaaagagaacccacccccccagatacaaaccttaagttaaagtatacccgtgcctgatattcttcaatcttaaggggtttgccaaatgccaatgcattctttgtgggtgcaagcaattataggttacggtagttcctccatgtaacagctagatagtactacacctaaacggatgagcaagatgccattgtatacagtgtcgcgttgcttggcagtgcaccatattggaaggagtagatgcgaagggaaaatgtacatattcaccttttgtctgttgtatcgacgagtattttttgtaatggaaggctttaatgtagtgcaaataactcgcttg

SEQ ID NO: 27638 - DNA, 2458 bp, Oryza sativa
  ref <308>: DATABASE ACCESSION NUMBER: AK103080
  ref <309>: DATABASE ENTRY DATE: 2002-08-28
gggaggcgcagatacattcgccgccgtcgcgccaccaccggcggcggcggtatggcggccgcaccgccgccacggaggcttggcgcgctcgccagcgccggcctcctccacgggatcgacgcccagctccgacgcgtagctgattcactagatcgaatccctctaagctggagattcctggtatcaagctgggcgaggatgaagatgtcacagaagaagcggtgctgacctctttgaaaagggcgattcggcgttattctactcttcaggcacatgatggacactggcctggggattatgctggtcccatgttccttcttccaggcttggttatagtactgcatgtgactggtgcactaaatactgtgctatcaacagaacatcaaaaggagattcgccggtatctctataatcatcagaatgaagatggaggctgggggctgcacattgagggcacaagcaccatgttctgtactgtcttgacttatgttaccttgagattacttggagacgaatcagatggtggagatggagccatggtgatagctcgaaattggattttagatcatggaggagcaactttcacaacatcatggggaaaattttggctttcagtacttggtgtctttgactggtctggtaacaacccattgcttccagaattgtggatgctaccttatttcctcccatttcatccaggacggatatggtcccactgccgaatggtatacttgcctatgtcttatatttacggaaagaagtttgtcggcccaattacaccaatagtactgaccctacgaaaggagctctacaatataccctatgatgatattaattgggacaaggctcgtaaccaatgcgctaaggaggatctgtactaccgtcatccattagggcaagatatcctatgggccactctttacaaatttgttgaaccagttctatcgcattggcctggcagcaaattgagagagaaagctctgaagaatgccatgcagcatattcattacgaagatgagaatactcgatacatttgcagcggtgctgtacagaaggtattaaatatgctttcttgctggatagaaaatcctaactcagaggcattcagatttcatattccaagggttcatgattacttgtgggtcgctgaagatggcatgaagatgcaagtgcttatttcatatttgggactaatggctatcttttgaatccattttatttgctttcagttgaggtggttgtgtcaacaggttacaatggcagccagctctgggacacagctttcacagttcaagctatactggctaccaaccttatagaagattttggtcctactattaaattagcccatggctacataaaaaactcacagcttcttcatgactgccccggagatttgagttaccggtatcgccatatatataaaggtgcatggaccttttctactgctgatcaaggttgggctgtatcagatagcactgcagaaggattaaaggcctcattgttgttatcaaaaatttctctggaaattgttggtgaaccattaaaagtcaatagactttatgatgctgtcaattgtctgctgtcttggatgaataacaatggtggttttgcaacatatgaactcacaaggtcttatgcctggctggagattctcaatccttctgagacctttggggacataatgattgattacccttacgtggaatgtacttcgggggtgatccagggtttgacagcatttaggaagcactatcctggacaccgcagggaagaaatagacaattgtatccaaaaggctgatagtttcattcagagtattcagagaagtgatggttcatggtacggctcctgggctgtttgtttcacttctcggacatggttcggagcgaagggattaattgctgctggaagaacgtacgagaactgtcctgcaatcagaaaggcatgcaacttcttgttgtcaaaagagcttccttgtggtggttggggagaaagccatttgtcttgcaaaggtttacaccaatcttgaaggagaacgtccccacggagtaaacaccagttgggccatgcttgcgctaattgatgccggacagggtgagagagatccagcgccgttgcaccgagcagctaggattcttatcaacctacaattagaggatggggagttccctcagcaagagatcatcggagcattcagcaaaaactgcgccatcagctactctcagtacaggaacatattccctatttgggctctcggagagtaccgctgccgagtcttgttaggcaggcaggatgcatcggtgaccggcaacactgctagctgatgatactgatgaagttattttctttttaaaaacaaaaaaaaaaagaagtcaagagtgcaggtgttgcgtggctttctgtacctgaaacttactattaccataatagcagcattatggtttatttacagctg

SEQ ID NO: 27639 - DNA, 903 bp, Oryza sativa
  ref <308>: DATABASE ACCESSION NUMBER: AK103081
  ref <309>: DATABASE ENTRY DATE: 2002-08-28
gtggaggtgaaggagcgcactgcgaagcgaacccttctccgccgcctccgctcttcgctgcacggtgctagctcgccgccgtccgtctcgcgcgcctcaagggttatcacaagatgtatacagcaaggaggaagatccagaaggacaagggtctggagccaactgagtttgaggacactgttgctcaggcattttttgaccttgagaatgggaatcaggagctgaagagtgacttgaaggacctttacatcaatggagcagttcagatggatttacctggcaacaggaaggctgttattatttatgttccatacaggctgcggaaggcatataagaagatccatgtgaggcttgttagggaacttgagaagaaattcagtgggaaggatgtggttctggttgcaactagaagaatagtgaggcccccaaagaaaggctcagctgttgttcgccctcgtacccgcacacttactgctgttcatgatggcatcttggaggatgttgtgtatccagcagagattgttgggaagcgtgtcagataccacttgggtggtagaaaaatcatgaagatcttcctggacccaaaggagcgcaacaacaccgagtacaagctcgacactttcagctctgtctacaggaggctctgtgggaaggacgtcgtgttcgactaccccatgaccgagactgcgtaaaccatgtcatagttagtcgacggctatctttggccgcaaatgctgctactcttcctaaaatagactataactgtggtttcctatatgcgaaaagttttgacagtcctgtgatctgcatatctgattgctagaactggtttaaattgttcaggtgttttccaactgcagttgtagaacttgttgctttgttcaatggtagtattttcaacgt

SEQ ID NO: 27640 - DNA, 1026 bp, Oryza sativa
  ref <308>: DATABASE ACCESSION NUMBER: AK103082
  ref <309>: DATABASE ENTRY DATE: 2002-08-28
gaatagctaaatatatatcttcctcgactccgacaagaatagggttccaccgccgccgccgccgctcgccggagagagagagatgaagagcttcccggttgccggaggccgcagcgtctccctcggcctcttctccgacgtctccaacagctgggagctcctcgagctgatgcagtcagggaagctggagccggaggtcgcattcctcaacgcatcactggtgccggatgtgttcccggttctcgcggcggcgcacaaggcggtggtgtcgcaggggagggagtctctgaccacaagaactctgcattcggagctcgtctataactactccgggtctaagcatataacggagtctttgaaacgatgcggaatctccgacgacacgagttatatccttgcagctcgttttgatgcttcgaatgaggagataaaagctgtggagaagctcatctgtggcactgagattgatctagcggaactggaaacaagagcaaaccagccacagatcctgaagcattataaaataactccccaggaactatcaatatctacactgcccgatgcaattgtatgcaggattgctgctcgagatgccctttgagtgacatcacggatcaagattgaaatctgggaggcctggtggttttttgcacatgatgatgtggtaccggtatgtttgttactgtatgatgatggttgctagtactactggactactggtgctttgggttcacgtgctgctgggacagcgttgcagctgtcgtttctgtccaagagaaaaacatggacagaggagctggtaacctgcccgccattgcagctgttactgcaaattccagttcaatgttttcttttgcatgatccatcaatctatcatgcatgtaatttgaaattcaagaaccccactggttttgttttttgtttttttggccaaaacactctgctgtgttctgtttgtttttggagtctgtatgatggtatctgtcagtatcattatcttgctcatcagttcgtctatcaattggg

SEQ ID NO: 27641 - DNA, 1898 bp, Oryza sativa
  ref <308>: DATABASE ACCESSION NUMBER: AK103083
  ref <309>: DATABASE ENTRY DATE: 2002-08-28
gacatcagatggcggcctccaacaccaccaagaagggcggcggcggcggcggcccggcgatcggcatcgacctcgggacgacctactcgtgcgtggccgtgaggcggcgctaccgcagcgaggccatcaccaacgaccagggcaaccgcatcaccccctcctgcgtcgccttcaccgccgccgaccggttcgtcggcgacgccgccgagaatcaggccgcgctcaaccccaccaacaccatcttcgaagtgaagcgactgatcggccgccggttcagcgataagtctgtacaagaggacatcaagctttggcctttcaaagtcattgctggccgtgacgaccggccaacgatcgtggtccgccatgagggcaaggagaagcagttcgtccccgaggagatctccgccatggtgctctccaagctgagggacgccgccgtggcctacctcggcgagccggtcacggacgccgtcatcaccgtccccgtctacttcaacaacgcccagcgcgaggccaccctcgacgccgccaccatcgctggcctcaacgtcatgcgcatcatcaacgagccctccgccgccgccctcgcctatggcctcgacaagatgccgccggccagcggcggtgcagggaggatggtgctcatctttgatcttggtggcggcaccctggatgtctccctccttaacattggtcgtccgggcaacaacaacagcagcggcagcggcagcttcgagttcgaggtgaaggccgtcgccggcgacactcacctcggcggcgccgacttcaacaacgcggttgtgaagcactgcatcaacgagttcatcaggaagcacggcgtggcagcagaaggcatctggagcaaccagaaggcgatcaggaggctgaggaccgcgtgcgagagagccaagaggatgctgtctttcacgacgcttgccagcatcgaggtcgactcgcttcacgacggcatcgacttctgcggcaagatgagccggtcccggttcgaggagctgaacaaggagctcttcggcaagtgcgtcaaggccgtgaagaagtgcctcgaggacgccaagatggacaagaacgccgtggacgacgtcgtgctcgtgggcggctccagccgcatccccaagctgcagagcatgatccacgacttcttcgacgagaaaaagctccgcaggaacgtcaaccccgacgaggccgtcgcgtacggcgccgccatccaggcctccgtcctcaacggcgacgccgacgaagccgacgacaagaagcaggtgatgatcctgcgcgacatcacgcccctctcgctggggatcgaggtcggtctcgatcacacgatgagcgtcgtgatcccgaggaacaccttcatcccgaccaagaaagtgcggcgttactccaccatattcgacaatcagatcgccgtgagcatcaatgtgttcgaaggagagagcgcgagcatcctccgcaacaacctgctcggcaagtttgtgctgtccggcatcctcccggcgcccaggggagtgccccagatcgacgtcacgttcgagttcgacgccaatggcgtcctgcacgtgtccgcgaaggacatgggcactgggagcaagaacaacatcgccattaccaaccacagcggccggctgaagaaggaggacgtcgaacgcatgacgcgggaggccaggagctacaacaggaccagatcatctctagcgataacttctgggaacctggtgatctttcaatgatgttctgcttctgcacctgcttgctggatgtcttacatctgcccatcgaactgatttcaatgacggggaaaagtttgtgctactaaatttttttgctaaaactaatctaggtctagtgactacttatctaaatgagctaatgcggaagatgatgcc

SEQ ID NO: 27642 - DNA, 1266 bp, Oryza sativa
  ref <308>: DATABASE ACCESSION NUMBER: AK103084
  ref <309>: DATABASE ENTRY DATE: 2002-08-28
gagggaaacggccaaagaaggcgacggcggcggcgcaggaggggcgcgcacgcggcgcagatgggcaagtacatgaggaagttcaggggggccacgggggaggagttggccgccatggaggtcacgcaggtggttggcgtccggacgaggtcgaggtcggcagcggcggcgggcgcgacgacgacgaaggtgaaggcggcgtcggcggcgtccaccaggaggaggaaggcgctgctgccgacggcggtcgtggggactactcgccgtgacggcgggagctgctacctccagctgaggagccgcatgctgttcatggccccgccgaggccggcgccggccgcgagggctccggttgtagcggaggcggcgggttccgggaacggagcggcggcgcatgcggcggctggcctctcgcgttgctccagcacggcgtcgtccgtggacgcggcggctcaggacaggagcctcgcgtgccgctccgacgtcgcggaggcaggcagcgagcatgtcccggagggctccgcgagcgactcggcgagcggccgtgaccgcgagaggagagaaacaactccatcaagctttctccccggagaggtgagcgatctggagtcggatctggctggaggacagaagcgcagccgtccactaccttctgcggcaacagcctcagcacagcaagccacgcggccgaagattccgccggccgccgagatcgaggcgttcttcgcggcggccgaggaggctgaggccaagcgcttcgccgccaagtacaacttcgacgtcgttcgcggcgtgcccctcgacgccggtcggttcgagtggactccggtggtcagcagccgaagctgaagcgagcgtgcagattaagcggaagctagaaaggaaggtacaggggggcgccgtgtagaaagggaaggcgagctagagagaggagaagaagaagaagaaaagatgctcatccaaagggaataaactggaaaagtgggagactacaaaaaaagaagcattatagcctaacaaccaccgattcgactcttttttctttcacattttctttgcatttttactcttactgtgtactagaaagtagtagcagtagtaaactagtaattcgtcccagtatttatcagaggtttatctcgataggaatagatatattatccccttactgtaattgcctccatcttgtatttggatggaaattaaatttactgtacagcagcagcagctgttctgcaagtttaagttaaccatcaccgttttatt

SEQ ID NO: 27643 - DNA, 1229 bp, Oryza sativa
  ref <308>: DATABASE ACCESSION NUMBER: AK103085
  ref <309>: DATABASE ENTRY DATE: 2002-08-28
ggtagatgcacccctggaaaacccaggtaattacgaactagtccttctccagcccggcgacgcgggggaattttacagataagccctcggattccttccccctattctccgctcctcgcgtcgtcgtcctccgagagggggaggagaaggcgagaaggggctccggtggtgggagagggagaccgccattgccgctacttccgagttcagattggggaagatggttgtccaggagttcaccgttgatctgaacaagcctctcgttttccaggttggccatcatgaggaacgttatcaggaatgggttcatcaacctatcgtgagcaaggaaggtccacgctttttcggaaatgatgtcctggagttcttgacgcgcacaaagtggtttgctgtgccaaccatatggctgcctgtcgtctgctggttgcttgtgaaatctattcggatgggtcatactattcaggaagtaggtctaatggccctatttggaatattcatttggacattgatcgagtatactttgcaccgcttcctattccacattgggaccaaaacctattgggcaaacacagcacattaccttcttcatggatgccaccataagcatcctatggactcactcaggcttgtattcccccctactgcaacagcaattttgtgtgtgccgttctggaagctggtagcgttcttcgcaactccaactatcactcctgcgctatttggtggtggcctgttgggatatgtgatgtatgactgcactcactattacttgcaccatggacaaccatccaaagagccagcgaaaaatctcaagcggtatcacctcaaccaccacttcagaatccaaaacaaaggctttggcatcacctcatcactctgggattacgtttttgggacattgcctccgtcgaagaccaccggaaagaacaactgagccactgacagaaatgtattgttttgcatgagaaattttagaggatatgtaatatatatattaagtctaggcacaactgcttgttttgtctttctgggacaacaggttcacatgcccattcagttcgaattcctgtggcttactgatgactgccttgatgtgggtgaagaagacatttcattgccttgacatccaatgttctgaattcagataataggcagttcttgatgtgatccatatgccatgttaagcttagcaattctattggcatgtccaattacaaaatgtttgtctt

SEQ ID NO: 27644 - DNA, 1873 bp, Oryza sativa
  ref <308>: DATABASE ACCESSION NUMBER: AK103086
  ref <309>: DATABASE ENTRY DATE: 2002-08-28
ggttggtgagagcgctgcacggagagatcgagcggcggcggccatgacgaaggccctgcaggccgccggcggcaagccgtggcgcccggggaagatgagcacggtgctcgtcgctgtcctgatgaccatgccgccgctcgtcgtcatcttcagcgggcgaattggcgatcaagcgatgtggatcaagacggcggtggatggcattcggggaggtacagatgatgatgtctccttcatgaagcacccgacgacgtcacacgacaagcttctcggcggcctccttgtcgacggcttcgaccaagaatcctgccacagccggtaccaatccgccgcgtaccggcgaaacgccggccggcgaccatcggagcacctcgtctccaaactgcggcgccacgaagacctgcagaggcggtgcggccctggcaccgccgcctacagcgccgcagtggagcagctcaagtccggcaagagcccggcggcggccgaggcctcgccggaggcgtgcaggtacctcgtctccatctcctaccgcggcctcggcaaccggatcctcgccgccgcgtcggcgttcctgtacgcgatgctcaccgaccgcgtgctcctcgtcgaccccagcaacgagatgggcgagctgttctgcgagcccttcgccggcacgacgtggctgctgccgccggagttcccgctcgtgggctaccagggcttctacctccacaccgccgagcggtacgggaagatgcgcgaggacagagtgctcagaccagacggcggcgaagcggcggcggcggcgccgccgccggcgttcgcgtacatccacctcgattacaaccagaccgactacgacaagctcttcttctgtgacgaggaccagcggctgctgtcgagcatccagtggctggtgatgaggacggacagctacatcgtgccggggctgttcctcgtcgacgcgttccaggacgagctcgccgcgctgttcccggagcgcgacgccgtgttccaccacctcggccgctacctgttccacccggccaaccacgtctggggcctcgtcacccgctactaccgcggccacctcgcgtgggcgcgccgccgcgtcggcatccaggtgcgcgtctcctcgtgggagtgggagtcgccggagatcctcaggacgatcacgtcgtgcacgcaggacgaagggctgctcccgcgggtgctcgacgacacggaccaagaaccaccggcgacggcgccggcgagcgcgcgccgcggtctcaggccgagcgccgtggtgatcacctcgctcaagtcgtggtactacgagaagatgaaggggatgtactgggagagggcgacggagtccggcgaggtggtggtgttcgaccagccgagccacgaggagcagcagatgtacggcgtgagggcgcacgagcggaaggcgtgggcggagatgtacctgctgagcacgacggacgtgctggtgacgacggggacgtcgacgttcgggtacgtggcgcaggggctcggcgggctgacgccgtgggtgctgccgcgccgggaggtgaacggcacggcgccgccgtgccgccgggacatgtccatggagccgtgcttccacgtcgcgccgctgtacgactgcaagcggtgggaggacgccggcaagatcgtgccgcacgttcggcactgccacgacatgcccgcggggctcaagcttgtcgaccgaacggagtggtgaagcaaagagaagtgcttgagaaagtatatcgagatacataaattttaaactgacattattgatatcgtgagttactatttagtaggtattaaaatactaaattttatagtagaaaatatttccagtaccttctcaaagataataaaggccccgtttagc

SEQ ID NO: 27645 - DNA, 2654 bp, Oryza sativa
  ref <308>: DATABASE ACCESSION NUMBER: AK103087
  ref <309>: DATABASE ENTRY DATE: 2002-08-28
gacgcatccaaaccctcgccctcctcctcgccgccgccgccgccgccgacgacgaccatcccaccgaccgcgcgcgcgcgagggggctctactaccaccggcgatgcggcgggacgacgccgctggcggaggcggcggggggttccaggagctgttcgactcggtgcgccgctccatctccttccgccccgggggcagcgccgccgccgcggccgccgccctcgacgagcccgcctcggcttccggcggtggggggttcagggggcggatcagcacgtgcctccgcaagtccagggggatggggctgctcgggatggtggcctccaagagcccctcacccccgcgccgccgcctccttcccccgccgcgttcgccgccgcccgcgccaacgaagtctctctcgccacagcctgcggtggtgtcccaagggggaggcggtgcgggtggagtcggaggaggggaggaggaggaggcgaacccgccgatccggtggcggaagggcgatctcctcgggagcggcgcgttcgggtcggtgttcctcggcatggatcttgattccggcgagctcctcgccgtaaagcaggttttgatcgggagcagcaacgcaacgagggagaaggcccaggggcacataagggagcttgaggacgaagtgaagctactcaagaacctctcacaccccaacattgttcgatatattggaacggtgcgggaggagaactcgttaaatattctgctggagtttgtgccaggaggatcgatccagtcactcctcgggaggctcggatcattccctgaggctgtcatcaggaaatacacgaaacagattttgcatggcctggagtatttacatcgcaatggaatcatacacagggacataaagggagcaaatatacttgttgataataaaggatgcattaagttagcagactttggggcctccaagcaagtggagaagttggcgaccactgccaagacaatgaaagggacaccatattggatggccccagaagtaattgttgggagtgggcatgacttttcagctgatatctggagtgtcggatgcactgtaattgaaatggcaactggtaaaactccatggaatcaggaaattcaagaggtttctcttctgtattatgttgggacaacaaagtcacacccaccgataccagagcatctttccccagaagccaaggattttctgttgaaatgcttacagaaggaaccagaactgagatctactgcatcagacttattgctgcacccatttgttacaggaggattggaagatcttcaccaggttaatcatgcaacacacaaggaaacctctgagcttccggcatacgatatgccaactggtgacctgggcttgaatcattctggcaacccaagtaacttgaattcctataagtcatcagacatgagaccaatatgggatgggcacagcagtgatgacatgtgtcagtttgctgaaaatgacgtggtaatggttggatcgagcttcaaccctatgtctgaaccatttgatgactgggaaagcccagaacaaagatctagtcaatcaagggaatttggaggattagccaaacatgttgaaaataacatgtctgaaaatgattttactttcccatgtgagggaggctgtgaagaggatgatgaactcacagaatcaaaaataaaggaatttctggatgaaaaggccatagatctaaagaaactacagacacctttgtatgagttctacaacacagtaaatgctggactttctcaaggagttggtgaaacttgccaagtagacaacattactgatttgcaattgccccttcaaggaagatcacctccaattcagatggagggagttgcagcagtaggaccaaccagcgatattctgaagagtgccagtccaaagagctgcactaggcgtttctcaagaagcggtgtggagaatggtcgaattttaagagaaattgcttcgcctcaactcaataagtttgaggacaaggtccacgatattcaagacaatcccagcattagcttttctgaaagacagaagaagtggaaagaagagttagaccaagaacttgagatcgggagagtgatgaggttgggtagcttcggtaaagcgccatcaccaaagagccgaggcatgaccaggaaacgggatcgcgtctactgaatggaaacgagaattgtcatctggcaggactaatggtgacttgactacaactgtacaatgtcagcgattggtggccataccagtacagtgcactgcctcgccactcgtgtgacctaacaaaaattttcatagctgccaaatccttttggtgctcatttgagtttgatatgaaggctattccaggtgggcatttggatttgaagccaggctgtcacgatttgcccacaggggaacagtttactggctgtttcgcctacaatatgcagctttatgttaacgatgccttggcgattttgggagccctccaagtgtggcaggatggcttatgcgcagaaggaatagttgtacttttattttttttccctttctcttcgttgtttttgtaagaaagatactccaagagcttgccgtttgcgagcatgtaataagcaatgtaatgctgagtgtgttatcatcgagaatgtagtatgcgttttgc

SEQ ID NO: 27646 - DNA, 1518 bp, Oryza sativa
  ref <308>: DATABASE ACCESSION NUMBER: AK103088
  ref <309>: DATABASE ENTRY DATE: 2002-08-28
ggctcacagcatttattctcatctctttcctgcagccaagtcagtttgcattcgcacaaagccagttgcaagcatgcagcaagaacaggcagacggccgggagatcgtcatcgccggcgccggcctcgccgggctcgcagtggccctcggactgcacaggaaaggactgaggagcgtggtgctggagtcgtcgccgacgctgcggacgtccgggttggcgttcatcacatggacgaacgccttccgcgcgcttgatgcccttggggtaggcgacaagatgaggagccagcaccagcagatccagaggttgaatgtcatgtcttcagctactggagaaatagtgcaagaaattgatctgagggcgcaaggcaaacggggaacccatgaggcacgctgcgtgagccgcaccgcgctgctactggcgttggaggaagagctcccaagaggcaccatccgctactcctccaagatcgtctcgatcgaggaagacggcaacgccaagatcctccatctgtctgacggatcgactctcagagcaaaggtgctgatcgggtgcgacgggatcaactcggtggtggcgagatggctggggctcgcgaagccgtcggactcggggcacacggccacgcgcggacgcgccaagtacccggacggccatggcttcgagcccaggtttctgcagttggtcggccagggattccgtgcaggcatggtgccctgcaacgacaccgacgtctactggttcttcacgtggtctccttccccagatgataaggatgtcgacaagagttcagccgcgacgaagcagttcgtgctgacaaagctccggagcacgaacgtgccaccacaggtgctcgaggcggtcgagcggagcgagatgaacgacgtgctcgcggcgccgctgcggttccgatcgccgctgtcgctcccgttcgcgagcatcagcaaggggaacgtgtgcgtcgccggcgacgcgctccacccgacgacgccggacctggcgcagggcgcgtgcacggcgctggaggacgccgtcgtcctggcgaggtgcctcggcgaggcgctgctgctccgtaccggcgactgcgccgccgaggagagtcaccgggtcgtcgaggccgcgctgcgccggtacgcggacgcccggcggtggaggagtgcgcagctgaccggtgcgtcgtacgcggtggggttcgtgcagcagagcgaccaccccgccgtgggcttcctgcgtgacaagctgttgtccggggtgctcgccaagacgctgctcatgatgcccgactacgattgcggcacgctctcgagttccggtgcttgttgacgtgatttgggttttggccgccgcccagctgcaagtctgcaacctgtaatcatatcgtcgtgctgtttgtgatgtttgtctgtatgtgctccgtctgttttactgttccgtcacgtgtcaatgatcccaaacctgtgaaacgcccctttttgtgtgcagaaaaataaagtcgagtgcatttgggtttttggtcg

SEQ ID NO: 27647 - DNA, 2827 bp, Oryza sativa
  ref <308>: DATABASE ACCESSION NUMBER: AK103089
  ref <309>: DATABASE ENTRY DATE: 2002-08-28
gtgctgagcagcacacaacacatatgtatacttcctctctgctttctccatcccattttcttcgccatgaccaccctgctttacatatcgcttggctttcttctcttctccctgcacgttactccgccatgctctgccgccacgaatgatactctcgcggcaggcgaagtgctcgccgttggtgacaagcttgtgtcaagaaacggcaggttcacgctcggcttcttccagccaagcgtcgtcgttaagtctggcaacatcacctctcccaattggtatgttggaatatggttcagtaacatctcagtttttactactgtctgggttgctaatagggatagtccagtcactgaactccagctcaatcaaacgcagctgaaactatcaaaagatggcaaccttgtcatctcaagcaatgcatccataatctggtccagtactgtcaataggacatcagccaccaccatgaacagcagtaccagtgtcgttctctcaaacgatggaaaccttgtgataggaagctcacccaatgtgttgtggcagagctttgactatccgtcagatgttttgcttcctggagccaagtttggctggaataaggtcactggctttactcgtcggttcacatcaaagaagaacctgattgatccaggtcttggcttgtactatgttgagcttgacaacacagggattgaccttagccgtagtaaccccccaaatatgtattggtcttggtcatctgaaaagtcatcaagtgcacttatatcattacttaatcagctgataaacataaatccagagactaaaggtcggattaacatgacatatgtcaacaacaatgaagaagagtactatgaatacattttattggatgaatcatattatgcatatgtcttgctagacatctctgggcagatcgagataaatgtttggtcacaagatacacaatcctggaagcaggtttatgcccaaccagctgatccctgcacggcgtatgctacttgtggacctttcacaatctgcaatggcattgcacatccattctgtgactgtatggagagcttctctcaaaagtcgcctcgagattgggagcttgataatagaacagcaggttgctctagaaacactccgttagattgcagtaacacgacaagctccacagacgtgttccacaccatagctcgtgttagattgccctacaacccccaaattgtagacaatgctaccactcagagcaaatgtgcacaggcttgtctcagttactgctcctgcaatgcctattcctacgaaaatagtaaatgctctatttggcatggagatttgcttagtgtaaataggaatgatggcattgataatagttctgaagatgttctctaccttcggcttgccgccaaagatgtgccaagttcgagaaaaaacaaaataaagccaatcgttgcagttgttgctgcaagcattgtcagtttgttggtaatgctcatgctgatcttactggtattaaggaagaaactaaggttctgtggcgcacaattacacgacagtcaatgtagtggtggaattgtggcctttagatacaatgatttatgtcatgctactaaaaatttctctgaaaagctgggaggaggtggttttggttctgtattcaagggagtgctaagtgactcgactattatagcagtgaaaaagcttgacggtgctcgtcagggagagaagcaattcagggctgaggtgagctcaattggattgatccaacatatcaaccttgtcaaattgattggtttctgttgcgaaggtgatgagagactacttgtgtatgaacacatggtaaatggttctcttgatgcccatctgtttcagagcaaggctactgtcctgaattggaccaccaggtataacctagccataggagttgctagaggattgtcctacttgcatcagagctgcaacgaatgcatcatacattgtgatattaagccagaaaacatacttctcgatgcatcgtttgcccctaaaattgcagactttgggatggcagcatttgtaggaaggaactttagccgagttttgactacattcagaggcacagtaggatatcttgctccagagtggattagtggagttgctattacaccaaaagttgatgtttatagcttcggtatggtacttttggaaatcttatcaggaagaaggaattcatataaagttcatactgatgacaatagtgatcaagttgcctttttccctgtgcaagccattagcaagcttcatgagggagatgtccagagtttggtagacccgcagttaaatggtgacttcagtctagtagaggttgaaagagtttgcaaagttgcatgttggtgcatccaagagaatgagattgatcggccaacaatgaatgaagtggtccgggttcttgagggtttacaggagcttgatatgcctccaatgccacggctacttgcagctttagcagaatgcactgttgtggctcactgtgatgatgattcataagtacttcctagttgatgttaataatatttgtcttagaaaattttgaggttctaacatgagtggaagaaaaggaatgtaagctgggtagtgctaaattgtaacgcattttttcaataaccaattgttgtaagcaggcattacagcaaagatttggcagaaatagagttacatgcccgatgcctatgttttgttgatggtctagttggcatatattgttaaactcaacaagttaatctatgccactacttgctgcatgcttgcttcagagatgtcagttctaaaaaaataaaaaatttactgcatgcttgcttcagag

SEQ ID NO: 27648 - DNA, 1221 bp, Oryza sativa
  ref <308>: DATABASE ACCESSION NUMBER: AK103090
  ref <309>: DATABASE ENTRY DATE: 2002-08-28
gggcggcacactcccacgtcatccccttcctctccccggcggcgacgtccgcgcgctgctccccctacggcggcggggcaggcggggttcttcacccgcctgggacgcctcatccaggagaaggccaagagcgacgtcgagaagctcttctccggcttctccaagacccgcgagagcctctccgtcgtcgacgagctcctcacctactggaacctcgccgacaccgaccgcgtcctcgacgagctcgaggaggctctgctggtgtcggattttggccccaagatttcgttccggatcgtggacactctacgcgaggaaatccgcgatggcaagctcaagtctggggctgagataaaggaagcgctgaaaaggtgtattcttgaactgctgacgagcaaaggcggcaatccggagctgcagctcggtttcagaaagccggcagttatcatgattgtgggagtgaatggaggtggaaagactacctcattaggaaaacttgcttacagattcaagaatgaaggagtgaaggtattgatggcagcaggtgataccttcagagcagcagctcgtgaccagctagaagtttgggcagagagaacaggttcagagattgttatcgataatgataagaaagcaaaacctgcatcagttctctcgcaggcagtgaagcgcgggaagcgtgaaggatttgatcttgttctttgcgacacgtcaggacgacttcatacaaattatggtctgatggaagaattggtttcctgcaagaaagtcatagctaaagcccttccgggtgctcctaatgagatcttgctggttctggatggcacgactggcttgaatatgctacaacaagcgagggagttcaatgatgttgttggagtcacaggattcgtcctaacaaagcttgatggaactgctcgtggtggttgtgtggttagcgttgtagatgaacttggaattccagtaaagtttattggtgttggtgaagggatggaggatcttcagccttttgatgctgaggcatttgttgaagccatttttccttgagctaggacgctttgttttttgagatggagaatttgaagtttcggagagagcatgtttgcttacttgtacatcattctggtttttcactcctgtgacaatttcactatgtgtccatcctttcatgtaatatatatttgctaacatgctaggaaattagaagcaaaattttggacc

SEQ ID NO: 27649 - DNA, 1096 bp, Oryza sativa
  ref <308>: DATABASE ACCESSION NUMBER: AK103091
  ref <309>: DATABASE ENTRY DATE: 2002-08-28
ggcttgcgcaatcgcgtgcgcccatgccctccccctctcctcgcacacgtcgccgccgccgtaatcgcatctgcccatggcgaccccggtctcctccgcgatggaacttcccactcggaggagaggggtgcaagccgctgccgcctcttctcctcttttatctctgcctcgccaccgcctccccgcttcttccctcacgtgtgctgccgccgtaatctcgccctcctaaccgtcaacggagcgcttccgccactgccgctctttccaatcaagccaccgcatctgcaatcgaagatccatccgcctggagaagaagaacatgagccgccaccatcctcatctgcccgtgaggacggttgcatcttggtgaggacgggggcaaggcactggcacgcgaatcccccaacgacgccctccacctttttttttcctctgtggcacagtggaagcaagctatctaatggcaatagatctgctggtactccactacataggttgcttggatcttatttctaccagatgcagttggagttagcacatatatcttaatccactcaggaaacttctcccaaccctgtttacagatggagaagaatgagctacttaggagcccatacgaatgtgctgttctccaagaggcatgtgtggcgcaaatgcagccttcgacagagtgcccacagcaagctctgttaaactgctttgcttggccatccatccgattgctaccagcccatgtatacgatggagtatttcacatgataacaagctatattattatctcagtacatcttatttcactccacatgattattaaatgtttagcttctatatattcaaggtcgcttgcctacatcaaacctttgattcaaggtggtgttcaaaatcagcagatggttcatctctactacttgcagtctgattctacagaattggtgggcatctggactccagatattacactgatatctccgtgttcttccgcgaagcaagagaaatctgcagtatatctgaattgttaagctatgcaaaattatttatatgtacatgaaagatgcaattttcaatttatttagtttttatataacgtggtcagttt

SEQ ID NO: 27650 - DNA, 626 bp, Oryza sativa
  ref <308>: DATABASE ACCESSION NUMBER: AK103092
  ref <309>: DATABASE ENTRY DATE: 2002-08-28
ttttttgccgacttctcctcccccaacctctccggcgacgcatcgaaccccaaaattcttcctctctcgagagagagctaggttaggatcggatcaatctctcgcttccttcccgtgaagatgtcgtcgcccgcgggggaggatgagaagaagccggcggggggagagggcggcggcgcccacatcaacctcaaggtcaagggacaggatggcaacgaggtgttctttcgtatcaagagatcaacccaactgaagaagctgatgaacgcctactgtgatcgccagtccgtggatatcaaatctattgccttcctgtttgatggtcgtaggctcaatgctgagcagacccctgaccagctcgagatggaagacggcgacgagattgacgccatgcttcaccagactgggggctctctgcctgcctagagctcatatgaagctgttgcaacaatgcaaccgcattactattttctgccttgttagagtcagtcagtctagaggacatgaaactagtctaaagaacttgtgaatcgtttggtcctgtgccccagctgaaggacattagggtggctttgtttagcgagacttggtactttggtgtgttaatccatcgcctaatttatcct

SEQ ID NO: 27651 - DNA, 1395 bp, Oryza sativa
  ref <308>: DATABASE ACCESSION NUMBER: AK103093
  ref <309>: DATABASE ENTRY DATE: 2002-08-28
ctacctcctcaaccagcccactctgctattccatctgcgtgagagagagaaagaggggaggggagagagatttgtggcgtcgtgggtgctcggttgcggcggttaccgcggggaggaggagggagttgtgctgttgggggtttggatctagagcgagcataggatgggagctgctggctcctgagctgcgccgcgcgttgccctccgggagatgaaattcgataagaatcaaagcttcacaacatctactgcgaaattggataggaatcaaagcttcacaacatctactgtgaaattggataagaaccaaagcttgttattttctcgtggatagcagacatcatgggtactggatcagttaccgtgaaacaaaagaagcgagtaaagcacactaagaacaagtacttgaaacctggtgctctcgcccagattcgttatagcaggagcacaagcagggatataggaaagaaaaggattctgttgaatgtggataaggatgagttaccgcaggaggaggttgcattcgaaaacactgaacctatgatgtcgcctaaaaggctcaactttgagccatttagtggaactaaggggcaggtaatgccaataactccaaagactcctcagtcagatgaattatctgatggtcattcaagacttgaatcacttccacttgaattgctgatcaagatcatttgttgcttgcaccatgatcagctgaatattgttttccatgtttcaaaaaggatccggaaggcagttgaattggcgaggcagtaccattttaactacactaccccagatcgaagcagacaggaactactccagcacaccactcctcttccaacagaacattggcctttcatgagcaggattgatggcaaggatgtgcggatttctaccccaagaaccccaaaggctccaaaacatgctcctcggcttgcgcgccttgagctgcttgatttcaagccaatcactgctgttcttttcccagacacatttccttcaaaacgtctgcgccgttcaatgccaccaggattgccaaggcctgtgtccaaagctgcatcctcgactagagttttactgtatgaggaggagctttgcgaagcggtggcacagaataagcttctttgaagctgcaatgacctttaggcacaaccagcaatatgttattgcttccatctcataatgtacatgattatctatgtcaattccctagcatgagttttgtttggttaggcagttttagactagtatttttttgaagaacgttttagactagtcattagcatgttatatagtaagaagaatctagtttggtttattccctggtctgtatatagtaaatgtactggtaaactatttatagctaataatttgcttgcagaaatgatgttt

SEQ ID NO: 27652 - DNA, 2065 bp, Oryza sativa
  ref <308>: DATABASE ACCESSION NUMBER: AK103094
  ref <309>: DATABASE ENTRY DATE: 2002-08-28
ggaagcatcacttcatcacaaaacctaccaagctaattcagcatttcagcttggttctataggtaggagctggtaagatcaccatggagaagctctccatggtgacctctctcctctgcgccatcactgtcgcggttctcgccgtggcggtggtcagcggcgaggcggctgtggtggagcacaccttcgtggtgcacgagatgaacgcgacgcacctgtgcaacacgaccaagatctacgtggtgaacggacagttcccgggccccacggtggacgtgacggagggcgacacggtggttgtccatgtcatcaacaagctgccatttgggcttaccatccattggcatggtgtccgccagatgaggagctgctgggctgatggggctggttttgtcaccgagtgtcctatcccacccggaaacgagcacacctaccgcttcaacgtcaccggccaggtcggcacgctgtggtggcacgcccacgtcacctgcctccgggccaccatcaatggtgccttcatcgttcgccctcgtgatgggaagtaccccttcccgacaccggccaaggacgtgccgatcatcataggagaatggtgggagcttgacctcatcgagctagatagaaggatgatggatggcaacttcgacgacaacccgttgtctgcgacgatcaatgggaagctcggcgacctcagcaactgctctcgcatggtggaggaaagcttcatcctcgacgttaagcacggggagagctaccttctccgggtcatcaacactgcactcttctctgaatactacttcagggtcgccggccacacgttcacggtggtcggcgccgatggcaactacctgacgccatttaagacggacatggtcaccgtcgcccctggcgaggccatcgacgtgatcatggtcgccgacgcgccaccggcgcactaccacatgatcgcgctggctaaccaacctccggagccggacccgcagatcccggtgttcacctctcgtggccttgtccgctacgccggcaccaccgccacaacaacggcctcccggtaccgatgccgatcatgcccaaccaacacaacaccatgccgtcctactacttccacgccaacctcaccggccttgcccacccagagcgccatcgtgtccctatgcatgtcgacgagcgcctcttcgtcaccttggggctcggctccatatgccgtggccagaacaccacctgcaagcggcggcgcagcccggagaccatcgtggtggccaccatgaacaacgtctccttcgcccacccgaaaaccaccgcgctcctcgagcgctactacgacggcacatcgaagggcgtgtacacggaggacttccccatccggccgccgcggcctttcaactacaccaaccgtgatctcatccctcccggcccgctcgaggaggcgttggagccgacgttcaaggcgaccaagctgaagcggttcaagtacaacacatcggtggagatcatcttccagagcaccacgctgatgcagagcgactccaaccccatgcacctccatggctatgatgtcttcctccttgcacaggggctcggcaactttaacgccaagagggatgtcaggaagttcaactaccacaacccgcagctaaggaacaccgtgcaggttccacgtggcgggtgggccgccattcgcttcgtcacagacaatccagggatgtggtacctacactgtcactttgagttccacatcattatgggcatggcgacggcgttcatcgtggaggatgggccgacaccagagacgagcctgcctccaccaccaccggagttcaagagatgtggcaacaatggtctgagtcaaccatgagggttttgaagagaaagtccaaattttttactgctacgagtaataaaaaataaaaaatgcatggatttgtagtatgcattgtattggtgatgattattcttactgtaaaagagatttactattcttttttggtattcattgttgtaaggtggcaaagtgtaagtaaatccatttggatttaatttatgaagaagagaacaattatttatg

SEQ ID NO: 27653 - DNA, 1455 bp, Oryza sativa
  ref <308>: DATABASE ACCESSION NUMBER: AK103095
  ref <309>: DATABASE ENTRY DATE: 2002-08-28
gacacccactcgttcaggcgctcacacccccgcaatccattccgattcgagcaatgggcggcgccgcctccgtggagccgaaccgaaccccagcaccagcaccagcaccaccgtaagcctccctcaacgacgacatcctcctcgccctcccgtccctccatgccctctcgtccgcgcggtcctcgcctgcagctcgtgggctcccgcgccgcccggcttttcgccggggttccgccgcctgctccacccacccggaccctgccccctcgggctcttcaccgaccacggcggcctcaccatcctccccggcaccccggacttcggccgccgccgccgtcgccctccgtggagccacgagctggaggactacgcctcccacggttggcatgccgtggcgtggcgacctcctcctgctgaacccacaggaggctcgccatcctaaacccctttgatctgggacgtgtacttcatccccgctgttgctcggtggcatcgagctggaacaggaagagcatggagcttccgcgctgttccggtttacagggatgaattcaggctttgtgcttgcggtcttttcgtcctccgagacccatgggattggaattggatcatccatatcgccatccatgggttgagtttgctggagacagcaacatgaggcaatgctggcgtgctagtggatggctcgatttactggccttacgatggtgaatgacgctgaacaccgtggccatggaattctccagggtggaattaccatgggaattaatgacacaggggttgcagttttatggctggggagactaaggattgagggctttgcattgtgtatgcaatagacttcctcatcctcatctggatccctagagtcgtcaggaacggaattgcgagatgggcatcacagaagatattctctttgacacccatatctcagttacaagggcatgagagttgtgtgagttagggctggttatgtgtacttggcaacagtggaggtctcccctgatggccatgccccctacttaattcttctcactttgcctggagaacatgaagcttgagagactgtttcaggagagatttcaggagaccgtatatgtatggcctggcttcctttggtttgtgatgatgggagctttggacatgaagttgaaggctctcagtgacaatcatcggggtatgatttatccattctctaatactgtttttttttcagatgcataaaacaaatacctagttgacaaaggttgttctgaaatcatttgatacactgaatttactgatggatatattgaccatttgaatcctatagaatgttggatgccggtcggttccgtatttcctttgctgtacctgttattcggcatattgctcctagactccaccgacaatgtatttatgtcggcatttcttttgtcatttacggtggaaaataaaccagggattctagttctt

SEQ ID NO: 27654 - DNA, 688 bp, Oryza sativa
  ref <308>: DATABASE ACCESSION NUMBER: AK103096
  ref <309>: DATABASE ENTRY DATE: 2002-08-28
gtcacacgccggcgcgccggccagcggcggaactcgcgacacccgccggcgaaggagcagcagcacaggaggtggacggcgcgccagcgaggtcgcccatccagcctctgcgtttagttgtttgaccaatcgggaaagaaggcgaggaagggaggagaggagcggagaggaaaggaggaggggaggatgccgcaccacgcgcggccgatgacggggctgctgctgttcacgggagtcaacctggtgctcctcaacaccatcacccccgtctatgacttcgtctgcttccacccctactgggaacgcaggagagaacgtcgtcaaaaggagcgtaaagcactacaagccaatggttctctacaaactgctaaatgattttattcctagttgttttactacttggttagttggatgaaaccctggattcttcattgatatggagtgaagaaaattttataggcaggtaatattgtgatgctcttcagatatgagtagatctccgcactccaggtcttgctttcataatgctactcaactgcatcatcacatccttgtaaaattaccgaggaaactagatctgatgaatattgtttcttgaaactacctttatgtatctcttatcttctcatactcatctggctataacatagtaaatgaaaaccactgtttggctcaagccatttattcc

SEQ ID NO: 27655 - DNA, 1942 bp, Oryza sativa
  ref <308>: DATABASE ACCESSION NUMBER: AK103097
  ref <309>: DATABASE ENTRY DATE: 2002-08-28
gggcatcgctcgcctcctctgcttcgcttccttctccagcaagcacccgaccacaacacacacgcgagctcctcgacctcgagagagagagaaaacccaaccccgaattcggcggcggaggcggaggcagcggcgatggacccctcgtcggcgggcgccggcggcaactcgctggcgtcggcgtcgtgcggcgacgcgcagaagcggcgggtgtgctacttctacgatccggaggtgggcaactactactacgggcagggtcacccgatgaagccccaccgcgtgaggatgacccacgcgctgctcgcccactacggcctcctcgccccggccaagatgcaggtgctccgcccgctccccgcccgcgaccgcgacctctgccgcttccactccgacgactacgtcgccttcctccgcgccgtcaccccggagacccagttcgaccagatccgctccctccgccgcttcaacgtcggcgaggactgccccgtcttcgacggcctctacgcctactgccagacctacgcgggggcctccgtcggcgccgccgtcaagctcaaccacggcacccacgacatcgccatcaactggtccggcgggttgcaccacgccaagaagtccgaggcctccggcttctgctacgtcaacgacatcgtcctcgccatcctcgagctcctcaagctccatgagcgagttctgtatattgatattgatatccatcatggagatggagttgaggaggcattctacacaacaaacagggttatgacagtctcatttcacaagtttggggattatttcccgggaacaggggacatccgcgatattgggtattcagaagggaagtattactgcctgaatgtcccgctggatgatggaattgatgatgacagctaccagtccatcttcaagccgatcatcagcaaagtcatggagatgtatcgtcctggtgcagtcgtgcttcagtgcggcgctgattcgttgtccggtgataggttgggctgtttcaatctctcaggcaaaggtcatgctgaatgtgttaagttcatgaggtctttcaatgttccgttgcttcttcttggtggtggtggatataccataagaaatgttgcacgctgctggtgttacgagacaggagttgcacttggtgaagagctacgggagaagttgccttataacgagtattatgaatattttggtccagaatacagtctttacgttgcagcaagtaacatggagaacagaaatacaaacaagcaattggaggaaataaaatgcaacattctggacaatctctcaaaacttcaacatgctcctagtgtccaatttgaagagcgaattcctgaaacaaagctacctgagccagatgaagatcaagatgatccagatgaaaggcacgaccctgactctgatatgctgttggatgatcacaaacctatgggacactcagcaagaagccttattcacaacatcggagttaagagagaaattactgaaacagagaccaaagatcagcatggtaagagattaacaactgaacataaagtaccagaaccgatggcagacgatcttggttcctccaagcaagttcctactgcggatgcaaattcgatggccatcaacgcgccaggcaacgccaagaatgaaccgggaagctcactatgaactaacccacttcaggccaccagctcttatgccacggattcctgcatgctattagttacttactccgaggtgttgtatgactgtttcttctgtaggagtttacaaattacaactgtttcttttgttgaagaattccaaagtgtccaggcaatactggacgtggagacattagtctgatcaatgtactgcagagtacagaacatgtaacatgaaccaagttacagtgtatagtcttttagactgttagatggaactttcaggcgaaatgcctgtgcct

SEQ ID NO: 27656 - DNA, 2391 bp, Oryza sativa
  ref <308>: DATABASE ACCESSION NUMBER: AK103098
  ref <309>: DATABASE ENTRY DATE: 2002-08-28
gacttgagtctgaaactgaaggaaaccaaaccaaaaaaaactccaaccatcgtttgcctccctcgctctgacctcctctccctctcctccgcggccggccccgccgcgagcccgccaccctccggcctctgacggcgagcgaccacccaccacctcccgcttgcttcagatctcctcctccctccctcccgccggccgggccccgcgaccgcccgcccgctcgcttcccctcccgccaacgccgcatataacaccccctccctcccttaccgctcaccgaacgcgcggcgtgatcccctccctccctccctccctccgctgcgatcccggccggacccgtcgagctcccgggatctggtcgtggcacgctcaggggaggggctcccggcgggaatggaggtcttcggccccgtcaccgccggccaggtgtcatttttgcttagtctattccctgttctcattgcatggatctattcagaagtcctggagtacagaaaatcttcgtctatgaaagttcactccgattccaatttggagaatggaactgtcaaagaagatgataaaacggtattgctggaaggaggcctgtcaaagtcaccatctacaaagtttcggatcaattctacaaaagcaaacctcataaggtttataacaatggatgaatctttccttctggaaaatcgtgctgtactgagagcaatggcagaatttggcatcgttctggtttatttctacatttgtgatcggacaaacatatttccagaaagcaagaagagttacaaccgtgatctgtttctgtttttatacattcttctcatcatagcatcagcattaacatcacttaagaagcaccatgacaaatcagcattctcagggaaatctatactctatcttaatcgccatcaaacagaggaatggaaaggttggatgcaggtcctgtttttaatgtaccactattttgccgccactgaaatatacaatgcaattcgtgttttcattgctgcctatgtctggatgactggatttgggaacttctcatactattatattaagaaagactttagtcttgccagatttgctcagatgatgtggagacttaatttttttgtggctttctgctgcattgtccttgacaatgattacatgctctattacatatgcccaatgcacactttgtttactcttatggtatatgggtcccttggtctctttaataagtataatgagataccttcagtgatggcaatgaagattgtcagctgcttcttagcagtgatcttgatatgggaaattcctggtgtatttgaactgctgtggagtccatttacatttctgctaggctacaaggacccagagccttcaaaagcaaacttaccactgttgcatgagtggcatttccgatctggccttgatcgttatatatggattattggaatgatctatgcctacttccatccaaatgttgaaagatggatggaaaagcttgaagaatctgaaactaaggttaggttgtcaattaagggaaccatcattagtatttccttggtggctggctatttgtggtacgagtatatttacaaactagacaaaattacatacaacaagtaccatccgtacacatcatggattcctatcactgtttatatctccctaaggaattgcactcagcagcttagaaacgtctctttaactctttttgcgtggcttggcaagattactctggagacctatatctctcagatccacatttggctcaggtctaacatgcataacgggcagccaaaatggcttctctctttcattccgggttacccactgctcaactttatgcttgctacagcaatatatcttcttatatcatacagagtgtttgagctgacaggtgtgttgaagtcagcttttattcccagcagagataacaatcgtctatatcaaaattttgttgccgggattgccatctccgtatgtctgtatttcctctcaattgtacttcttaagattcccattgtataggtaaaagaacctcaacagacaacacaaatcaatgcatctattatatactagacaacagaaaggttttgtggcgcagttccaggaaaagaaaatgttcacggtagaagtttgcttgtgaattgttgttagaatgatccgtcgaccgtcggcgcctagttccaccttgcagatggagataagtgcactccaaataggaagaggatattgttttccaccactttggaaagtaatgtatacattcaggcagtccttgcgttcttttagaagtaatagttggttgcagacttttagccataaaaagtgtacaaggaatttctgtaaaatcaaagtcactgaaacacccagtggtagattcgtgcattggtcatatttcagagc

SEQ ID NO: 27657 - DNA, 2358 bp, Oryza sativa
  ref <308>: DATABASE ACCESSION NUMBER: AK103099
  ref <309>: DATABASE ENTRY DATE: 2002-08-28
ggatttcttctccgggcttctggtagagtacgatttgatactatctgcgattccgcctcccctccccctcgccgccgccgccgccgcggggaaatctgggcgagactccactactaccgcacgtgtcgtaatggctcggaacaagaagaaggtagccgtggcggcgcccaaagcccggaagccgaagcgtgatgcagaggagaagaagttcgcgaagaaggccgacatgacggagttccgggcgcagctggactcgctggggttgaagattatcgaagttagtgcggatggcaactgcttctttagtctgcagggcaatgggcgaccagctcgaaggcaacgaggaagagcacatgaagtaccgtgcaatgattgtgcaatacattaaggagcaccgtgtggattttgagccattcattgaggacgaggaaccgtttgagaaatattgtgactctatgcttgaggatgggacttgggctggtcatatggagttgcaagcagcttctattctcaagagaaaaaacatatgcatccacatgcttaactcaccacgatggtacataagaaacttttctgatcgtgaagctaccagtatgattcatttatcgtatcatcagggtgagcactacaatagtgtcagactgagggaagatccatgtcaaggtcctgcaatgccagttattatcaaggcagatgccaatgtagctagcacaagcaataatgctcaaacaaaagcaaaggacctgaagaaatcttcagacagatcaaagtatgatcatatatcggttaaattggtgatggctggaactggatgttctaatatcgctgcagttgaacaggttttgaaagacatggatggtgacattgatgctgctatagagtacatgttagctgagcaactaatactgggttctgatggtgcggatggagatccttatctggactatgcatgtgatgagtatgtacagaccatagaggatgagcttagcatgaagcaggatgagagtcaactggatgaacacgagaaagaagaaaaggactgttctagcaaaggcgaaacagctcagaaacacaacagttcacattctaaaaagggaaagtcaaaaaccaaggaatgctcttgtggatctgctaggaagcacaagccttcttgtaatttagccacaactgtagcatcgagagaacctccaaaaacaactgcaccatcgagagaacctccaaagtatggctttataatggttttgctaaaaatatggcgccacatttttgacttgatttcagtcatttttttcccattcggattgctaccattcttttatactcctatgtaagtatgtttcgctctactatctcctctttcaagtaggtaattaattgttttcatcctaattctcttatatagtgtgtgctgcaaaaaatatggtgtaagtattgagatttggttttaatttttttttgttttttggtggaaaatgtggtgtcttaaatatagctaatcccctttataatgtttctgtccttttgtttgtcttttaccatattctattctacaactgaacttatgtcctgctgttcgcattgtaagcattctttcaaatggaatttttggggggtgaaatcaatatttccagcgtatttgcatagtgcattgctgctgttgtatctggcctatgaaaccttaacagtattgctgcaaaatatgcacttatcccatatgccttaaagtcaccgacctgattactatttcctttttcactagggaggttagttgcattgcatgtttaacacaatgctggaagtgttatgtactaatactatctgcttaatgtgctttactatcaggaccaaaggtggccaagggaaaggccagaaggggaagaagcaaaagaagaaagaacaagatgaaacaccagccatccgggatcacgattctaaagttgcaccagatctaggagctctttgcatatgaacatggtcgacgagggtgatgttctcctcagtgtgtagccgccaggaatgtgcggggcatcagttttgaagagggatgtctgcggtctaccttgcttggacgccatgatctagatggtgatttttctcttgcccagttgacggcttcacgtcactgccttctgctgactgactgttgttaagcctgtccaagtttcaggatgggatcatgggactgacggtgaggtggtgatctcagtgggcacagaaacatgaatgagctgttgatacatagcttcttttcttcatacatactttacctgtggatcaatgccatgtaaaacaatgatcagtcgtgcaaagcatattaattttgtgagaattatatcataatagagtattccctgtcct

SEQ ID NO: 27658 - DNA, 769 bp, Oryza sativa
  ref <308>: DATABASE ACCESSION NUMBER: AK103100
  ref <309>: DATABASE ENTRY DATE: 2002-08-28
ggctacccactctcagcgccacacctcgatgtcgtcaaggcgagggggcgaatccgacggcggcgattctcctcgccggcgggaggaggccaagagcacgactcctcggctgcagccgggcgcagccggcgggcgcagtgtggcgccctccgctgagatgtcatcgaggggatggggtgaatctggcggcgacgattcgcttcggctgcagggggattccagctcgcgcaaaatggctaaaagccggccggacaacatcgctgcagccaggctcagccagcgagcatgttgcggcgtcctccgccgccgccgtggagacaggcttggagttcagcaaggttgacggcgaggcgcacgcacccgctcccctgtgcttggcaaggcaccaacagttgttctgtgttcatcaagcaaggatgcgctgaatcgcattgcagttgctggtggtcttgatttggatccaaaaaggtcaggcgtcgagatccaaaaaagcaaggtgatcatgtgttatttcgtatgtgttttgccgctgatttgctgattcaatcttattgctcttcttcttgatctgtgtatttgtttaatgtattaatgctccaaaaaaataggttgggggattagatctgttggttgggaatggatttttttttttctacacgaaggctgtctggatgttggttgacactggggacaagatcttgtgatgacagttctgtttttaggattattttcatgatttaactttgttaggttagcaattgttgacagc

SEQ ID NO: 27659 - DNA, 1846 bp, Oryza sativa
  ref <308>: DATABASE ACCESSION NUMBER: AK103101
  ref <309>: DATABASE ENTRY DATE: 2002-08-28
gctcgtctagcctttcctctctactcctcatcaccgccgctgccgccgccggtcgcacgcctcctcccaccgtcggcgcgagaagatgctcgacatcaacctcttccgcacggagaagggcggcgacccggagctgatccgcaagtcgcagcgcaaccgctccgcctccgtcgagctcgtcgacgaggtcatcgccctcgacgaccagtggcgccagaggcagttcgagctcgacaaaatccggcaggagctcaacaaaaccagcaaggaaatcggcaagctcaaggctaaaaaggaggatgcatcggctctgattcagagcacggaagaaattaagaagaggttggctgccaaggagacggaggtgcaggaggccaaaggcacgctggatgccaaactcgtgacgatcggaaacattgtgcacgaatccgtccctgtcagcgatgatgaggcaaacaatttaattgtacggacatggggagagaagaggatggaagggaatttgaagaatcacgtggatctttgcaagatgcttgacattgtagctttggagaaaggtgttgatgtagcaggtggaaggggttactatttaaaggatgaaggtgtgctactgaacttggcattgataaattttggacttgcttttctgagaaagcgaggcttcaagccaatgcaaactccttttttcatgagaaaggaaaccatgggaaaatgtgcccagttggcccaattcgacgaagagctttacaagctaacaggcgatggagaggaaaagtatctcatagctacatctgagcaaccgttgtgtgcgtatcatcttggtgatcgaatttatcctgctgaattgccaattagatatgctggatattccacctgtttccggaaagaagctggttcacatgggagggacacggctggtatcttcagagtccaccaatttgaaaagatcgaacaattctgtgtcacaagtccaaatgacaatgaatcttgggagatgcatgaagaaatgattaaaaattcagaagatttctacaaggagattggcctaccgtatcaacttgtctccatcgtgtctggtgctcttaatgatgctgcagctaagaagtatgatttagaagcatggttccctgcatcaaaaacctacagggaattagtgtcctgctcaaattgcacagattttcaagcaaggagacttggtataggttatggccagaaaaagaatgacgaacaatccaagcaatttgttcatatgttgaactcaacattgactgccactgagaggaccctttgctgtattttggagaacttccagagggagaatggtgttgaagttccaaaagcattgcaaccttacatgggtggaatcgatttccttcctttcaagctggatagcaaacaagttgctcaactccaaatcaaataagacagtcaaaggtctctacctctaacaatcccctttctctaacatgtgcgttttctttttcatttgggtataatcttgacagggaaatgctatctgagctagatgaggaatcaacaaagatttcttgctttcagacactactggatattattcatacttatagcaatgatcatgatgttacagttttgactctcattttggtgtcttgattagcccattgtctgaccatgtactggcacagtgatattgcatagaatgtctggcaatcttggatatctgcgttttgtttaccgtaaaagatgtattcattttcaaggcctttcgtgcctatactaatttgtggcatacagtgacgctattactacttgtctgaatatttgttataatcggcttgttatggccaataaagttttattctcgtcc

SEQ ID NO: 27660 - DNA, 1292 bp, Oryza sativa; identical to SEQ ID NO: 18283
  ref <308>: DATABASE ACCESSION NUMBER: AK103102
  ref <309>: DATABASE ENTRY DATE: 2002-08-28

SEQ ID NO: 27661 - DNA, 1261 bp, Oryza sativa
  ref <308>: DATABASE ACCESSION NUMBER: AK103103
  ref <309>: DATABASE ENTRY DATE: 2002-08-28
ggaaagagaaagaggatcgtctcggctcgtcgtcttctagctagggttcgtaagttctagggtttgcgatgatccccaactcctcctccctctagtatttcgagcgaattctccaacactttcacccagccgcgcgcgagaggagaaggaagatagatagatagatcgctccgcacatactatggtgctcaccccatcgccgtctccaccgccgatgctccccaagaagctccgcgcgctcggtccaggcttgaatccctttgctcccttcggcatgggtaactactattcctcctctcgctaatatatttctcctcgctcgatccatcttcccccacctccccccttctcaaacaattaatccccttcccgattcgattcgattcggttcggttcgctttcggactcggtttcaatttcgattctccctccgtcgtcgcggccctattctagccgccccctcccctccgctcgattgcctgcctccggatggtgcaattccgcagctctctcagcatgagccgggcacggacccgccacggcgatggcgacgaccgcggctggaaccagctccacgtcgcctcccgcaagggcgacctcaaccaggtgaggcgtctcctggatgatggcatggatgtcaatgcacctgcatgggggccaaaatcacctggcgctacccccctgcatttggctgctcagggtggacatgttaaaatcatggacgagctactggagcggggtgcaaatattgatgctcgcacaaaaggagcttgtggatggacccctctacatattgctgctaaggaaaggaacaaaagagctgtcaggtttctgattgagaatggtgcattcttgccacctgacatgaatgaccacaggttcaatcctcctctccattactgctctggattggaatgggcatatgagatgaagcgcatgcaagacgaaagtgattcgaccggtgaaacttctctgggctcggagagctagaggaaagcaatctcctcagtctggcaaagaggtcaatcttggatcaacagagtttgtaaacatcaagggtcacgtttactttgtgaaattggaacgaattaccatgtgaatcttacatgcgacatggtactagcatgcattgcgatgttgttgtggggttacttgtgttttcgataattgcattgtgttcttactacactggtagcatgtattctactacacattcttaatatcagaatcaatatccggtttgcgtcctatgacagtatgc

SEQ ID NO: 27662 - DNA, 1876 bp, Oryza sativa
  ref <308>: DATABASE ACCESSION NUMBER: AK103104
  ref <309>: DATABASE ENTRY DATE: 2002-08-28
ggcggggacctgtctccgccgttcgtcctccccacgatgccgtcgtccgctctccccccgccgccaccttccgccctccccctgccgcctccgtgcgccatcccaccgccgccgccgtcgacgacgaccctcctcccctccctctccctcctgcccgtcggagctcggcgccccctcccccttgtactctctcccttgtggcggcgtctgtgcctgcggcggtgtcggagtcggcgccggttcacccctattctcactcatctcgttgcgtagttcgacccggcgctagccttcctccctcttcagatctggagcagcaccggtggtgacggcggctaagaaggaggtgttacgggcgggacgagtaggacaggcggtggggagtgggacatgggacgggcagatggcccggtgcctcctcccccttcatatccccctaccttggcggcagagccggcgtcggtgctcccttcccctttcttctcccgcatcctggccgcctgctcctcctcccgtcctcacctctccacaacgccgccctccccctgcgtctcctccaactcctgccgctccgcctccctcgcacacggctcctctttctcctttcgagtctacgtcaaccacccgctcctcccctttccattcttgtcgttgtagccccgtggctggcgccacttctccctctggatccggcggcatccccttcgccatctacccatccctcctccccaccgcacacccttttcccctttcatccaacactaggtctcaggcggtgccttgatccctccacgaggtggtgtgttggcgaacctgctctacgtcgccgtgtcttcttgagccttcaacgaggaggacacaaatccatggcacatccatcaacgagggtccggtccatcttctcctcgtcgtctcagactatcgactgggatgactggtgctgcagccatccgaggcacaactgaagagaaaattgtagtccgtgtggattgatgccaattgtatcgcttgcctcaaagaaaatgttcgattgtgtctggtgtgccaggacctctgtttatcttggataaagtaaagtactaggaaattgtaaacatccgattgggagatggaaccactcggtgtggccaaattctggaagttgatggtgaaagaggctgttgtgcaggtcatcacttctctattcttatgaaaatattgttttcttgggattgtattttgatttgcattaaccctatggttgttgcattattcagaacacttgaagttttattattgggttacttgattttcaggtctttgaagacacttcaggagtggacaacaaatacaccattgtgcaattcacagtacaagggtggtgcagctgagggtggcagaagaccaatcatctggaacatctttgaacaacgaagcacgcccgccccgtgtgcgtctttcacgacatgctctggtcccgggtttcttcctgtggtcttctagcgttagaagaagtcgtgtccgtcccggacatctgcaacgtcctctcacgcctttttttggggggacaaacaaagatcaggaaaagacggaccgaacccattcggtgactttcgcggttgccctcactgaaccgacttggatctgaactacgattcagatcaagtcttaccgaaattggatttccttttcgtgccatatgtcgcttagactttactttttcccctttctgtcctttcctctatttgttcgatagggtcttcaatctggacccaggcatgttaattacatctctgtttggctctgccttctagctgtgctatactttcaacgcaaatcaagttcaattaggtgtatttcatatatatctacaagcataaaatttgtcctatttagc

SEQ ID NO: 27663 - DNA, 2602 bp, Oryza sativa
  ref <308>: DATABASE ACCESSION NUMBER: AK103105
  ref <309>: DATABASE ENTRY DATE: 2002-08-28
gattgccatctactgcccccatcctactactactcctacacccgtctactccactccacaacctcttcttcttcctcctcgcgtgcgtccgggcctagctgtagcacgagctcgcctgcccatctctctctcttcaccgctttgcctttgctggcgttgcgcgttttgccacactcgctgcttcttttttatacttcgggtttgggcgggtgccactggagacattcgtggggtgccattgcggcgtcttctcctctctcaggaggcatttgtgacatttggtcgatggtgaagtgtggctaagctgctcgcttggcttagtactctggaattgaggttttatcagaatcttggcattcagattgcagctgttcttgggtttcttggagacatatggcgtcctcgcaggagaaggccaagacgggtgttctgagaaatgccgcagcgctgctcgacgaaatgcagctcatgggagaaacacagggtgccaagaaggtgatcaactcggagctctggcacgcttgtgccgggccgcttgtgtgcttgccgcagcgggggagcctcgtgtactacttccctcaggggcacagtgaacaggttgcagcgacaactagaaagattccaaattcccgcattccgaactacccaaacctgccatctcagttgctgtgtcaagttcacaacatcaccttgcatgccgacaaggacactgatgaagtttatgcacagatgacccttcagccagtaaactctgaaacggatgtattccctattccaactcttggtgcttataccaaaagcaagcaccccactgaatatttctgcaagaatttaaccgcaagtgatacgagtacacatggtggtttctcggtgccacgaagggctgcagagaagttgttcccacaactggattactcaatgcaacctcctaaccaggagcttattgttcgagatttgcatgataacatgtggacattccgtcacatttatcgtggacagccaaaacgacatcttctaacaactggatggagtctctttgttggggcaaagcgtctaaaagcaggggactctgtcttatttataagggatgagaagtcacaacttcttttgggtgttaggcgagccacgcgacaacaaacaatgttgtcatcttctgttctatctactgatagcatgcacattggcgttcttgctgctgcagctcatgccgcatcaagtggtagttcatttactatctactacaatcctaggacaagtccttcgccatttgtaattcctgtagcaaggtacaacaaggcaacatatatgcaaccatcagttggaatgagatttgcgatgatgtttgagacagaggagtcaagcaagcgcagatacacaggtacagttgtgggaataagtgactacgaccccatgagatggcccaattctaaatggcgcaacttacaggtcgaatgggatgaacatgggtatggagaaagacctgagcgtgtgagcatatgggatattgaaactccagaaaacactcttgtgttcccttcgtcgaccttgaattcaaagcggcaatgtcttcctggttatggagtttcagtgcctgggatggaaattggatcagcaaatatgtcatcatttccaagggctcagggtaatccctatggcagtttgcagcacattccagctgttggatcagaattggctatcatgcttctcaaccaatctggtcaaacccttgggagtccccttagttttcaccagtcctcatattctagtattatccaaaatgtgaagcaaaattatatccctcctctaacagttagcacttcagcttgtttgacaaagcaagaaagcctgccttcagatgatgcccagcaccagttccatatggcaaatatgcagaatggtgatcttgaaggctctgaagtccagcctgtcattgattcgatttctgagtcaaagttgaatgctacatcaagagatccaagaaacacagattcatacacaagtcgaagtacttcggagcaaaacagtaagggtgagcctagaggcaagactcgtaggagtaagaagggcttgcctcacaaaaccgtttcagagaaatctgacctttcttcagccccttcttggatctgtgacaatcagcaggttggtttagaatcgaaactggttggttgtgatgaacaagtaaactgtggaaatattgaagattcatcaggtgcacttactcaaggtaattttgttggacagccgcatggccatcaggttgaacaaaagggagtgctgtcgccaccaaaggtagaatcatcaaaatcacctgatggaggaaagtctgtcaattcgtttccaaaccaagggtgtttttcgcagttcattgatggtcttgattggatgactcagccttcctactaccaagactccaatgtaattcaaccagccggtgtgtcagagaacattttcagttcttctgcagatatacctccctcaatgattgctgatactatggagacttttcaggcttcatgtctttctgattgccttcctaattccatacaagaattcatctccagcccagatctgaattcactaacctttctttcacctgacatgc

SEQ ID NO: 27664 - DNA, 1594 bp, Oryza sativa
  ref <308>: DATABASE ACCESSION NUMBER: AK103106
  ref <309>: DATABASE ENTRY DATE: 2002-08-28
gtatgtcagtagctagcagcgatccgataagtgataatttagtggtgttttcacgcatggctcggtgcagcgtctcccgtgttgtcttgttgctcttgtgttgcatgcatctgtcggctgcagctgcaggagcagcagtgtacaacgtcgagagttacgacgcgagacctgacggccggacggacgcgtccagggcattggcgtccgcctggtccgccgcatgccggtcgccggagccggccaccgtgtacgtgccagacggcgagttctttgtcagccactcggccttcgctggcccgtgttccggcggcaggatgacggtccagatcgacggcacgctggtcgcaccgtccggttacaccggcagtgccagctctggcggggagtggattgtgttcgaccacgtcgacggcctcaccgtgtccggcggcaccctcgacggccgcggtgagtcgctgtgggcgtgcaaggcggccggccacggcggctgcccggacggcgcaacatcgatgaaggtgctgaactcgagggacgtggtgataagcggggtcaagtcggtgaacagcgagctgtaccacgtcgtgatcgacgggtgcgagggcgtggcggtgcaggacgcccggatcgtggcgcccgggagcagccccaacacggacggcatccacgtgcagtcgtcgtccgcggtcaccatcaccggcgccagcatccagaccggcgacgactgcatctccgtcggccccggcacctccaacctccgcgtcgagcacgtcagctgcggccccggccacggcataagcatcgggagcctggggaaggagagcgaggagggcggggtggagaacgtgacggtgagcggcgcggcgttcgtgggcacggagaacgggctgcggatcaagacgtgggggcgggcggcgcgctcgggggcgtacgtgcgcggcgtcgtcttcgagcacgcgctcatgcgcgacgtgagcaaccccatcatcatcgaccagagctactgccccaacgacggcggccaaggctgcccccatcagagctccgacgtgcagatcagcggggtgacgtacaccgacatccagggttcgtcggcgtcgcaggtggcggtcaagttcgactgcagcgcgagcaaaccctgcagcgggctcggcctgcaggacatcaagctcacgttcgacggcggcaagccggcggaggcgacctgccaacacgccgacggcacggcctccggtgtcctcatgcctcccagttgcctgtaacgctttaccgccaaattggagaaacaattcttgtaaaccgagtactcactatttacacatggacgaagatacaacggatagtatagtgaattagtgatattaacaagatatttgattcggtccaacaaaaaacggatagtatagtgaattagtgatattaacaagatatttgattcggtccaataaaaagtacctcgacgtaccggtagtccggtaactcacagtactagatccaacgatcggaaataatttggtaccgtgaggtcctgtacctcgaggtactttttgttggaccggagcaaatctctattaagaaacttcaacgattccagctc

SEQ ID NO: 27665 - DNA, 2285 bp, Oryza sativa
  ref <308>: DATABASE ACCESSION NUMBER: AK103107
  ref <309>: DATABASE ENTRY DATE: 2002-08-28
ggggcggcggcgctggttcggctccttcgctcggctcggctccgccaccgcgccggaggctagggttctgcgaggcgggaggcgtacgcggcggcggcgacagtcgacggagcttccggagcaggagagctccgacggcgcacgctcctgcggctcctcctgcttcccgtccaatctcgcgacgccccccgggcagattcgaggacgaccggaggcggcgaacggcgacccccccgccggataccggcagactaggttttctttgttagcataagcttgtgaaaatttagcttgtttcttacttatggataactcacacgaacagccattaccccctggtgtcggggcatggccgccgccaccttccattcatcctgcaaaatttcaacctaatccacagccttatgcaacaccttatggcgctacacccaacaatggcagcaatcacaatgcagcgagctactctgctgctgcacaacccaccatgcctttccctaacatggatgctgggggtgcacaatcaaatcagacagctcatgaagtttccaaccataatgatagtgcagcagacattgaatctgctgtccaagaggctgttcttcgtgaacaggacattgagactcagcaagtcatacaaaatcaaagacaagcaaaagcaacaattgagcctacgcagtatggagaagacctcctttcaaaccgccgcaaccctaatgcattgaaggagcacttactaaaaatgacagccgagcatcgtgcagagatggcaaacaaaagggggaagccgcttcatgcagataatggcaatgttgaaattggcaatggctatggtgtaccaggagggggtgcttattatgctgcaaacatgtcaagtggtcaaatgaataaacccaaggatatagctgataaagcaaaaggtgccgatgatctccctgaatttttgaggcagagattaagagcaaggggtattcttaaagatgaggcgacaaataatagattcacgattaaacaaaatgtcgattctccagtagggcagataaaagctgcccaagagttgcctcctggttgggttgaagcaaaagatccaacaagtggtgcttcttatttctataatcagagcactggaacgacccaatgggatcgccctggtgctcctttgaacaccatgcaacatcaagctcctccatcctcgtccttgccagagaattgggaggaggcacttgatcaatcaacaggccagaaatactattacaatacaaatacacaagcaacacagtgggagccgcctactgctgtgaacccaggtgttgcgcctcatgctcccaccaatgctgctgttgagatggctgctcaaaatacagatatttggaactctcaaatgcagagatgtttaggctgtggtggatggggtgtaggtcttgtccagccatggggttattgcaatcactgcacaagggttcaaaatcttccttttcaacagtatccatcctacccaaacaatactacacactcaagcagtaacaaaaatccagggaatgtagcagccaaggacagatcaagcgcaaaacctccatttggcaaagcaaacagaaaagatcaccgcaaaagaaatcgccctgaggatgatgagcttgacccgatggacccaagctcttactcagatgctccacggggtggctgggttgttggcttgaagggtgtgcagccacgggcagcagatactactgcagctggacctttattccaacaaagaccatatccgtcacctggtgctgtgctgagaaaaaatgcagaggttgcatctcatggcaagaaacgtggtatggctccgatcaccaaaagaggggatggcagtgacggtctcggggaggcggattagatcaatcgtcgtaaattttccttgcaacccagtggactagcggtcattttggctttggcaatgactgaaacatcggtgcactgtcgtccaaaaagaagcaaactgtcagcagtaaatcactccagtgcaggagaacccagagctgagtgcattgtgagactgagcttaataagattcacatcctaaatgtgcccatggtgtaattctcgtgaaatctgcagaagttttcggtgtaaatttttgacagggtgaaagaattcgcaacaggaatagtgatgtagagctaatgtgtaatttttggtattaaccgaaacagttctgttgaatactagaatctaggggttgttttgtggataattcgacctgttaatgctaccatcttaatggaatttaacgtattaatgcg

SEQ ID NO: 27666 - DNA, 2286 bp, Oryza sativa
  ref <308>: DATABASE ACCESSION NUMBER: AK103108
  ref <309>: DATABASE ENTRY DATE: 2002-08-28
gggtgttccaatttacttgacaaaaagaaaaaaaattctccccttcccccctttgctgcgatgatgctcgccggctatggcatcctcgccgttgtcctcgtcctcctgccgccgtcggccacgccggctgggatcgctgactgcgacctcggcgtcggcaacacgtacgtgggcaacagcacgttcgaggcgaacctgaaccacctcgccgcggagctccccggcaacgtctccacggcgcataccggcggcttcgcggtcgccaccgtcggcgcggatcccgaccaggtgttcgcgctggcgctctgccgcggcgacgtgaacgccacagcctgccgcgcgtgcgtcgcggcggcgttcgtcgacgggaagaatgcttgccccggcatcaatggcgtcaccgtgtacgaggacgcctgcgtagttcgcttctccggccagaggttcatggatttcctcagtccggatcagtggcaggtcaccgagatgatttgggttcccgagcaagcctcggagagcgtcaatgcgccggcggttggctggttcaacgccgccatcgcgaagatcctcgccgccctggtcgaccacgccgtggccacggcgacgggcaacaactcgaccaccaagaagtatttcgccacgggtgaggaggacttcgaccccaacatctacgggttcgcgcagtgcgtgccggacctgacgcaggagcagtgcaaggaatgcctcaacaccttcctttttcaagcaaaacaagtgtactttggcaagagccttagctgggttggtatgaattcggtgtggtgcagactgatgtatagtgtgcggccgttctacggaggccgggcgatgctgcagctgtcggcgccaccaccaccagcagccgaggctccggttctatctctagagcctggagcagggaagaaaaagagtgcagctggaatcgctgccgtcgtcgcttcttcagttgtggtattgttgatcctttcattttttgcagttgttctcttcaggagaaggtccaaggttactgagactgaccaccagttgaggaagataacaagagcacaatgcttgatttttgacctgccagctctgcaagaggcaacggataacttctcggacaataataagctcggagaaggtggttatggtattgtatacaagggagtactctcagatggacaagaagtagcagtgaagaaacttttgggaacaagtgagcatggattggatcagctacaaaatgaggtgttgttattggcagagcttcaacacaagaaccttgttaagctacaagggttttgcttgcatcagggggaaacactgcttgtttatgaatacgtcaagaacgggagcctggataactttctattcgataccagtaggggaaacacaccaaactgggagcaactgtacaacatcatttttggaattgccaagggaatattgtatcttcacgaggactcaagcttgaggatcattcaccgagacctgaaatcaaacaacatcctacttggggaggacatggaaccaaaaattgcagattttggattggcaaggctactagaagaaggtcatactaatactcggacaactagaattgttggaacattcggttatatggcacctgagtacgcaatacacggaaatgtgtcaaccaagatcgatgttttaagttttggtgtgttggtccttgaaattgtaacagggagaaggaacctcaattctgacgatcatgatcgcgggaatctccttagtgatgtctggaattgctggacaaaagggacggttacacaactaattgaccaatcacttgaagagcaattccgaagacaagcactgcgatgcattcatatcgggctgctgtgtgtccagtcagatcctgatgacaggcctcacatgtcatctgtcattttcatgttgagtagggaaaacatgaatcttcagccaccggcacaacctgcattcttctttgatggagactcaaactcatgttctcaaccctttgagcaacccgtgtataatcggcctaatgcaatctatgaagaggatatctccgtgaataggatgacagttactgacatataccccagataacccttccccctccccattcctaatcccccctttcccagtggcgcaattgtcaccattgtttgtcaacttcattgaaccatctgcgtatggtttgatctgcaccttagaaggcacatttaaatattctagttgttgtcattacattatattcttatatggccagttatcttatgttctttgcacactccg

SEQ ID NO: 27667 - DNA, 757 bp, Oryza sativa
  ref <308>: DATABASE ACCESSION NUMBER: AK103109
  ref <309>: DATABASE ENTRY DATE: 2002-08-28
gctcctcatcagattgtttccgccgccgacgcgccgatctcctccttccagttccaggctaagccatggcgagcaagaaccccaaggtgttcttcgacatcctcatcggcaaggccagggccggccgcgtcgtcatggagctcttcgccgacaccgtccccaagacggccgagaactttcgctgcctctgcaccggcgagaagggcctcggcgcctccggcaagccgctgcattacaagggttctgccttccaccgtatcatacccaacttcatgtgccagggcggcgacttcacccgcggcaacggcaccggcggcgagtccatctacggcgacaggtttgccgacgagaacttcaagctgcgccacaccggcccaggcgtgctctccatggccaacgcagggccaaacaccaacggctcccaattcttcatctgcaccacgcgtaccacctggctcgacggcaagcacgtcgttttcggcaaggtcgtcgacggatacaccgtcgtcgagaagatggagcaagtcggctccggctctggcggcacggccgagcgcgtcctcatcgaggactgcggccagctcgccgacgaccacgccaactgattatattagattacttacttactagagtatattttcttccttttacaaggaattttgtgacattgttccgttcttcttcttgtatcaataacaatccaatgttagaaaacatttatttataactatgctcttagccctcaatgttatatagc

SEQ ID NO: 27668 - DNA, 2683 bp, Oryza sativa
  ref <308>: DATABASE ACCESSION NUMBER: AK103110
  ref <309>: DATABASE ENTRY DATE: 2002-08-28
gccagcgccgccgcaattcgctcgccgccgccgccgccgccggtgggcggtggcttgccacctccctctccgcctccggcagccttctacgctgcccgtctccgtctcttctcccttcacccaaatccctagacattcggccatggccccccctgactcttctctcttcttggccgcccgccgcggcgctgcctgacgaggatcggcggctcggggcggaggaaccccgagcttccggcgcgagggggtggcctcctcctcctcctcatcctcatcgtcgccgccgcccacgtcgtctcgccctcggccaacgcccgagctcgaccacaaactaaaaatcaagaacaagaaagttttatgttctgacaaactgaatgtgaagatgcaaagcttttacaggtaacaggggatatctcttacaatggctatcagcttgatgaatttgtgcctgagaaaacagccgcgtatatcagccaatacgatttacacattcctgagatgactgtgagggagactttggacttctcatcacggtgccaaggtgttggaagaagaccaaaaatactcaaggaggtgagcgcgagggagagcgcggcggggatcatacctgatgcggacatagatatatacatgaaggctatatcagttgaagcttcaaagagaagcctacagacagactatattttgaagatcatggggctagagatatgcgcagacacgatggttggggatgcaatgataagaggactatcaggggggcagaagaaaagattaaccacagctgagatgattgtggggcctgcaagagcatactttatggatgaaatatcaaatggtctggatagctctaccacttttcaaataataagttgtttccagcaactgacgaacatcagcgagtacaccatggttatttcacttcttcaaccaacacctgaggtatttgatctttttgatgacctgatattaatggcagaagggaaaattatataccatggccctcgaaatgaagctctgaatttttttgaggagtgtgggttcatatgcccagaaagaaaagaggtagctgactttctccaagagatcttgtcctgcaaggaccaacaacagtactggtctggtccaaatgaatcttacagatatatatcaccccatgaattatcaagcatgttcaaggaaaatcacagagggagaaaactagaagaaccaattgtttctccgaaaagcgagttgggcaaggaagctttagcattcaataaatattctctgcaaaaactggaaatgttcaaagcctgtggagcaagggaagcactcctaatgaaaaggagtatgtttgtttatgtcttcaaaacaggccagcttgccattattgcactcgtaacaatgtctgtgttccttcgaactcgcatgacaacagatttcactcacgcaacttactatatgggagcattgtttttttccatcttaatgatcatgctaaatggcacaccagagataagcatgcagattaggagactcccaagtttttacaagcaaaagagctattatttctattcttcatgggcatatgcaataccagcttcagtcctaaaggtccctgtttccatattagattcacttgtatggatatgtatcacatattacggtattggttatacagctagtgtttcgaggttcttctgccaatttctgatgctttgttttgtccatcaatcagtcacttcgctgtatcgatttattgcttcatacttccaaacacctactgcgtctttcttctacctttttctggctctaacattcttcctcatgtttggaggcttcactcttcccaagccctccatgccaggatggttaaactggggattttggatttctccaatgacatatgcagaaatcggcacagttattaatgaattccaagcgccaagatggcagaaggaaactattcaaaacataacaattgggaaccgaatcctgattaatcatggcctatattacagttggcacttttattggatatccattggagcattgttcggatccatcattttattttatatcgcttttggattggcgctagattatattacatctatagaagaatatcatggaagtaggcctataaagaggttatgtcaagaacaggaaaaagattctaatatacgaaaagaatctgatggtcattcaaatatttccagagcaaagatgactatacctgttatggaacttccaattacgttccacaatctgaactactacattgataccccaccggaaatgctgaaacaaggctatccaacaaaaagacttcaactacttaacaacataactggtgcattgcgtcccggtgttctttctgcactaatgggtgtcagtggagccgggaagacaactctgctagatgtattagcaggaaggaaaacaggaggatatattgaaggggacataagaataggtggatatcccaaggtgcaagaaacatttgttagaatcttaggttactgtgagcaagccgacatacattccccacagctcacagttgaagagtctgtaacttattctgcttggcttcgtctaccttctcatgtcgacaaaaaaacaagatctgtatgtcccttggaagttggaacaacacagacatatactgattttaataacagatagataaacaagaagcttacct

SEQ ID NO: 27669 - DNA, 1525 bp, Oryza sativa
  ref <308>: DATABASE ACCESSION NUMBER: AK103111
  ref <309>: DATABASE ENTRY DATE: 2002-08-28
tttttttattcggaatcatttgcatgaatatgacagtgtgttgccatgctttttgcgttcgaacaaacaaggggacatactgaataaatagactaacgtgtagacatatggttgataaattgcgagtgccgtataagattgaataagtagatagacttaggtgagataatggtaatgtcatataaattattaattgtagaacccacttaagtgagcaggtgatatctcaactctttcttaatattattttccttgaaaatgcacaagaggaacttcatgggactaaaatttccaattccaaggcaaatggatggagtagtttgtaagggttactagggttaaatggccatgcaactcgctatatactagtttctttagtctttactccaatttatgtccactgattgtaattttatttatgtgaagtataatattaattcattaggagatctattttcatccatgaattagtactggctagattagacactaagcatactatttgtgtttgctccattttgaacagtccttatgttttttcttttcgcagctttcgaatcaagaatatggttttttttttttactgtgcgagtatcaatctgcagttactgcagtccactaatggagtaaacgatgctactccaatcctctcaagcttagcatttcttcgagaagcttagcaatttgcttttacatgatttgttgaatgaattactatctacttgtgctgttatagttctgcaaatgcttatgcttggtgcaggttacatcaccatatgggaacaccttacatcacaatgaaaatgctacggttggtcagttcgcattcacaacttcagaagcaggaaactatcttgcatgcttctggatagatagcgcagagaaagggtcaggaatatctattaatcttgattggaagattggaattgcagcaaaggattgggatgttatcgctaagaaggaaaaaattgaggtaggagtaggcttagccaaactgctgacggtccatatgaccatatttcactgatgtccagtttaattcactgcttctctaattgctgcaatctaattccttttgtagggtgtagaactagagcttagaaaacttgaagtggcagtacaatccatccatcagaacatgatatatctcaaagcaagggaagcagagatgcgaacagtgagcgagaaaacaaacgctagggtagcctggttcagtattttgtcactaagcgtctgcattgtggtttcaattttgcaattgtggcaccttcaagggtacttccagaagaagaagctcatctaggttagctcgcttgagctgtaccgtgactccaaaattgcaaatgttgttacattggggaaaacagttttgtcatgttagttcgaacttcacgctagcgaggagctgcttgtactttatgtaatttaaccatggttcagtttagatgtgttgtgcattatgattgcaaataggtgataacttaaatctccctggaatatttgatgccttcaggacatagattac

SEQ ID NO: 27670 - DNA, 3116 bp, Oryza sativa
  ref <308>: DATABASE ACCESSION NUMBER: AK103112
  ref <309>: DATABASE ENTRY DATE: 2002-08-28
gagcggcagttcattcttggtgagctgcagcagagccaccacctgttgtcactggagggagtttagaacggcgttgaatattgatagatatttagcatctcactaatggataataaaacatggctttggagaaaaaaatcctcagaaaggacaatttcaacgaagaacaaagccaatatatcagagagggaacaggagaaagagaagattgcacggttagagagatccttgcaatgcttaaatgaacagatttcatttgctcaagctgaatgcgtggagaaggatgctattttagctaagcaagcaaaagtggcagaagaagcaatattaggttgggagaaagctgaaggtgaagcaatagctattaagacacaacttgatgatactctagatcagaaagccgcaattgagcaaaggatttgccatcttgatgaggctctaaatgttgccatggtagagagggagttattgataaaggacactgctaaactgatttctcatgagcaagttaaagttgagaggctggaaggagatgtagtagagaaaataaacataattgctagcttggatgccgagaataggaaactttctgaaatgctctcaatgaaagagaaaatgatctcagagttaactgaagcaaagggtgtgatagagtcaaatttcaagaaccttgaggtaaaactagagtcagcggacaaattgaattcttctcttagatatgaggtttgcatgctgcagaagcaacttgatattcgaagtgaggaaaggaaatttaacctgaaatctgctgatgctgcacataaacaacatcttgagaatgtaaaaaagattacaaaacttgaagcagaatgccagagattgcgttcaatggtacgtaaaaggctaccaggccctgctgccattgctaaaatgagaaatgaagttgaaacactgggtaacaatgcagtaataacaaggacgagaaggttcaattctacaacatcattcaactcaggcaatctagtgcagaactcctatgatgcatcacatgaaagttcttcattgcttgcaaggctgcatgcgatggaagacgaaaataagactatgaaggaatctctttctagtaaggatggtgagctccagtattcgcggaccatgcttgctcgcacaacctctaaactttcccaagttgaagctcagcttgaggagttatcaagaggtcgggttgcaacagatttagtaaaatgcagtcctacagtggtcgagaaccctctatcatcaatctccgaggacggttgcaatgaagataatgtcagctgttcaagctcatgggcgtctgccttgatttctgaactggaacacttcaagaaggggaagctgactacaccctcttgtaagagtaccggagtatcagacttgagtttcatggacgactttgaagagatagaaaagttagcattggcatgtgatgcgaaacctacagaatcgtatgattcaaggagggagtctagagaatcatcagggaaagagctagtaacagttgatggtcctattgaaacatctgaccaactccgtcagcacaagattgagaaggcagtcctgaagttgatagaacttattgagggtgttgtccagagatcatcaaaagattatagtagcactgttgtgctctctggtggcagtgagggcgaccgctctaacacattgactggctacgttgcacgtgcattcctgtggaaaacgtctgaacttacttctgtactacaaaatttcgtccttgggtgtaacgagcttttgtatgggagtacagatgttgaaagatttgtgcttgaaatcaatatcacactagactggataatcagccactgcttttcactccaagatgtatcagacatgagggagactatcataaagaacttggagataaatagcagttccggactagaagttgttccagtaattaagcacaccggaatccaaacaacagatggcatgtgtgaacccaggacgcctaacaagatgcagatggcgatagtatctgtatcaagcttaatggatattggatataaagctgatgatgactcagaaattttcaggaataaaataccagtctctaaatgtgaggaatcagaaggaaaagcttcaagcctgcgagcagagcttaatgcattgaaagaaacaggaaaaatgatggcacatggtgtcgatggtgaatccacaatcaatgaacttgggaaaccatccaactctgacataaacaagggcaatcaacacggagtgtcttctcttgaatccaagcttcagctagaacgtttccctgctaaagaaggtccaaaatgtgtttctaggaatgaagatcagcatgtacagatgcggctggagatctcaacagcatcagagaagcttatcgagtgtcaggagacaatcctaaacctgggaaagcaactgaaagcacttgcatctccaaaggatgcgatccttttcgacaaagtggttcatacaaaaattcagtctgagcgaaaaccccggtctcagtcgctaaacgagatgctagccatggatgatggaggattcgattacctcagctcccccaaaaccaaggagatcatatgcgcggaactaagatcgcggcatgaaagaagttgctctgtcgacaacggaggcgatgattcagtaacatgcagttcccacccaatgccggtggcaccaccaatgaggccctacgatgtgaatggaacttgcaaggatgaggctgctctcaaggtagtagcacttatgccgagcaagcagaaggggaacaccaacttgctgaaaaggattctggcaggaaggagaaaggaagccatgaccaggccaaatgtcgttgcgactgcttagcctccatggatgatagattgccccttctccggtgtaaattaagtgtggccgtggatgatggattgccctcttcaggtgtaaattaagtgtggccgattggcacttgagctgtgtcgttttgatcacgttggtagtaagaactaagaacagtgcaatgtatatgtaacatgcggtatgtattagcgtgatttgcaatgtttccgcaaccattacactgttgcttgagcttatgaatctatctctgctttggtttaccgtgc

SEQ ID NO: 27671 - DNA, 1169 bp, Oryza sativa
  ref <308>: DATABASE ACCESSION NUMBER: AK103113
  ref <309>: DATABASE ENTRY DATE: 2002-08-28
gctaatctaagccgcggccgccgcctccgacctgtgctgcttctcgacgagccgccgcctccggggaacctcgtacagggcggcgccgggccaccgctccagattccggtcgaccgcgagtccacgaagcatcggacgcacggcgacgacactgcaatccggcgttcctgggtcctggcagcaggtgaaaggtcctatttggtgtaagaatttatatacctgaccaatcatttagtcatctgcatcttctaagttgttgaaaaaatatggatgacggggagatagaactttccagccaaatgatgtttccaaatccagagactccaaccagccttgatgatttcctgccaagcatcaggacaacacgcacacacactcatacttgcaacccgcctggtccatcggcaacagcgcacacgcatacatgctaccacacccacacccatgtcttcagctcagatgatgatagttgtggaggtgacaaagccaagccaaagaagggccgcaagccattgggcaaccgtgaggctgtccgcaaataccggcagaagaagaaggctcatacagcacacttggaagaggaagtgaagaggcttcgtgccattaaccagcagctggtgaagaggctgcaagggcaggctgcacttgaggcggaggtggtatggttgaggtcgttactggtggatgtgcgatcaaggatcaatggtgcattgggtagttgcccgttccaagcacaatgtggagttaataatgttttgggttgtgatggaatggctcagtgctttgctggaaagccggagttgggtgagagacggatttgtacaccttctgtaatgaattgccatatcagcccggattcctagcgatgttatcggaagcttcatggtctcatctacctcaaaggatgagtagatattgtttattttgtttctagcctttttatcagaagataagacagtagtattacagtgccgtggagcctggagggttgatgcgttgtttcttaggtggcattttacccctggaatctagtggaagttagtaattagttttcaggttcgttatcaaatacaaatttttggtttctagtgttaaaatatctttggtttctatgcagtgtaaaatacacatttcccccctattttccagagataatgttcagttttagg

SEQ ID NO: 27672 - DNA, 1648 bp, Oryza sativa
  ref <308>: DATABASE ACCESSION NUMBER: AK103114
  ref <309>: DATABASE ENTRY DATE: 2002-08-28
gacgagcccagcttgggcgaagccaagcaggcaagcatccatcatccatggcgcgccgttcaaaaccctaaaccctgaggcgaacctcgaggaatcgcagcggcgcgtcgtgtcggcacccatggcggcgtccccgtccgctcctcctccccccgccgccgccgctggagtcggagtctggagccctgctccgcaatcgccgtcgcccaacctcgctaacttcttcgtatggagggaatttgtatggggagcaattgcaggcgcattcggtgaaggcatgatgcatccagtcgatactctgaaaacacggcttcagagtcaggctataatcacaggggctaaggctcagaaaaatatattccagatgatcaggacagtctgggtctctgatggtctgaaaggtttttacagaggaatcagtccaggtgttactggatcacttgctacaggggcaacatattttggtgttattgaatcaaccaagacatggctggagcattctaatcctaatctaagtggccattggtctcactttattgctggaggaattggagatacacttgggtcttttatctatgtgccatgtgaagtcatgaaacagcgaatgcaagtccaaggcaccaagaaatcttgggccttaactgccacaaaaggaaatatttctcaaactccaggggctccgatgtataactactataatggaatgttccatgctggttgttctatctggagagatcatggtctgaagggactttatgcaggatactggtctacacttgccagggatgtaccttttgctggtcttatggtcactttctatgaggcaatgaaagaactgactgagtatgggaagaggaagtatttgccagagagtaatttgcatgctagcagctccttcgaaggtcttcttctaggaggcttggcaggcggttttagtgcatacttgacaacccccttggatgtgatcaagacaaggctgcaagtacagggatcaacaactagttacaatgggtggctggatgctattacgaagacatgggctaatgagggaatgagtggcttgttcaaggggagcattcctagaataatatggtacatacctgcatctgcattcacgttcatggcagtggagttcctcagggatcatttcaacgaaaagatcgatacagatgcccgtgaactaaccggcctgtcaatggacacaagatcagaagttgaggaagctgcatgaagccctgaaggcctgaagtagttccctgttttgtaggactgatccagaggaatttctgatttctccgtcaagtaaagttcatttcacgaatataagtgtgaaaaatgcaatgtcagccaagtttcaacgtttacaagcgtagaagagataaggaaactgatcatccttcatctactcagtatttttttgggggtgttggaaaccaggattgttggtgggcagtagttcttctgggtcttcaaagcccatgtttggacctaactgatgcaccccaaattccataccatatgtaccttccaacattttgttctatccaaatgcaattacaacgtagttcttttttttattattatttttaatgaacgagccggcactagaatgtatcaattccattgaatagagcacgagtacaacgcg

SEQ ID NO: 27673 - DNA, 2280 bp, Oryza sativa
  ref <308>: DATABASE ACCESSION NUMBER: AK103115
  ref <309>: DATABASE ENTRY DATE: 2002-08-28
gggctccgagcaaaaaccctcgtcttcctactccgatcgagaccgcgtcgccgtctccgagatcgccatggccggcggcggcgacctccagagcccgaagaagcggaagcgtgatgcggcggggaagcccaagacgctggcgaaggggggagacgacgggaagaagcggaagaggccctcagatgccaacatggcgcaaggcggcggcggcggcgaggtcaaggtgaagaaggagccggttactgccaaggagaagcgcctggctgctaaggaaatggcagagtcaaggaagaagaagaggaaacggaattacagcctcgagaaggagcttactgtactatgggaaaagatgcgatgccacaatgtgagcagcacggagagatctaagctggtaagtgaggctctccgtaaaatggatgggaaatattcagaaattgctggttcccacgtaactgcacgtgttttacaaacatgcgtgaagttgtgctcacaatcagaaagggatgcgatttttgaagccctacagccagatttgctaactctctctctcaagaaatatgctgttttccttgtaaagaagctcattaagcgagccactaaaaagcagtttgaatggttcatctcttctcttcacggtcgtgttgctaaacttcttcgtcatactataggagcttcagtcgttgactttgcatatcaactggcaacaccgcctcagaaaagaaggttgctattggaattgtattctactgagctccagctgttcactgacctgactggacagaaaacccacagtttgttagagacaatttccaaccttggattacaaaaatcatctgtactgcagcatatgactaccgtgatttatccgatcttggagaaaggtatcgttgaatatcctatagtgcacacggctgtattggagtattttacaatcgctgacaagacctcggccactgatgtgattcgacaatttatcccccttcttacacaaggatcatctgccattgatggagatgagccatcggttgcccctgaattacaaaagaaactgaaagctaagaaaaaaaggttgacagagccacttcttgttcggattatgaacaccagagaaggattaaaaataggagttagttgcctcaagcatggaagtgcaaaggataggaagaagatcattaaaagtttgaaggggcacattatgaagcttgctcttagtgattatggatgcattttacttgttgccattctttccgttgttgatgacacaaagcttgttaccaagatcgtaattcaagagctcgccaaacatttgaagcaacttatttttgacaagaatggaagacgtccattgctgcaactacttcaccctaattgttcacgctatctgcctccagctgatctggcttgtctgaactatcgtgtgccttctcttatttcaaaggatgaagcttccgagagtgctgcagaagatatcccagagaataaggtggatgttgcaactaataaggagcaagatggttcagaaagcatgcagagtgcgtctgacagcaaaaaggacccatttcaacggcgacatgaattgttgatcaaaagtgaacttgccgaggtgctcatccagactctcattgagaatgtcggggagttacttcgaacaaattttggcaaagatgtattgcatgaggttgcggttggtggagaagataatattctggagggcatcactgacaggatccacagcttgcacaatgcaatagcttctgatgcagcacgtccaaaggcagaagatactgaacatgcctttgataactatcattccagccgtctaatcagaagacttatacttgaatctccagcatttgctgccatcctatggaaaaaagctcttgaaggcaaatgcaagacatgggctgatgggcacagttccaaggtggtcgcagcattccttgaatcgccctattccaaggtaagggatcttgcaaaagctgagctgcagccgctggttgatcgtggcattctgaaaatctcagaccataaagcagtcgaaaaatgagttttgcacctgacttccaagcatctacagcaatacgagaaatcgacagacgaacatccgtgcttctgtgttggatgttttttttgtaacatgagtatgttctgcggagcaattttgtcacctgttaaaagagtgtagctactgctgtcaccagtgagtgagtattaactctccgtaatgttatgtacctttacagtaaaattgcatttattttggtatgactgcaagatacg

SEQ ID NO: 27674 - DNA, 3325 bp, Oryza sativa
  ref <308>: DATABASE ACCESSION NUMBER: AK103116
  ref <309>: DATABASE ENTRY DATE: 2002-08-28
gtggtggagttcacttcgaggatttcgcgtccgatccgaatccagtccgatccaatccaatccgacccagcgatcgagccgcacgcccctcctccgccggtcgccgccgccgccgcagcgatccctcgccggagaaaggccttccgccctccctccggcgggctccccctctctctctctgctcgggcagcggggatgtaccagtggcgcaagttcgagttcttcgaggagaaggcggccgggcggggcgtgcccggcgagatcgcctcccgcgtcagctgctgctccggcggccgcggccgcgtcgccgtcggctgcgacgacggcacggtggggctccttgaccgcgggttccgcctctcctacggcttccaggcctacgcctcctccgtcctcttcctccagcagctcaagcaaaggaatgttcttatcacggttggcgatgatgatcagccatcttcactatcgtcagcaatctgtctaaaagttttcgatcttgataaagtacaagaagaaggttcaagtacaacaagtcctttctgtgttcaaattttgcgcatcttcactaagcaatttcctcaggcaaagattacatcttttgtggttctagaagaagcacctcctatactgctaattgcgattggactggacaatggttccatttattgcatcaaaggtgacatcgcacgtgagcgtatcacgcgattcatgttgcaagtcgaggatggcaccagtttacctattactggtcttggtttccgagttgaggggcaagcacaccagttatttgctgtaactactagttcaataagcttgtttagcttgcatgatcatccaccgaggaggcaaacgcttgatcagattggttgtgagaccaatgctgtggcgatgagtgaccgcatggatctgattattggtagacctgaagctgtgtatttctatgaaattgatggtagaggtccttgctgggcctttgatggtgagaaaaagtttgttggatggtttcggggctatttactatgcattattgaagatcagaggagccggaagaatactcttaatgtatatgatcttaagaatcggttgattgcacatagcatgccagtgggggatgtttcacacttggtctctgagtggggatatattattctgataatgagcgataaaaagattctttgcattggagagaaagatatggagagtaagcttgatatgttgtttaagaaaaatctgtatacagtcgcaatcaatcttgtacaaagtcaacaggccgatcctgcttcaactgctgaggttctaaggaagtatggtgaccatctctatggaaaacaggaatatgatgaggccatgtcccaatatatccacaccattggccatcttgaaccatcatatgttatacagaagttccttgatgcaaaacgcatctacaatctcacaaactatttagagaagttacatgatcgagggttagcatccaaagaccgcaccacccttctgttgaattgctatactaaactgaaagatgtggagaagcttaaccatttcatcaaagatgaagatggggtaggtgaaatcaagtttgatgtggaaactgccataagagtatgtcgtgcagctggatatcatgagcatgctatgtttgttgccaaaaaggctgggaggcatgagttgtatttgaaaattttactggaggatcttggtagatatgatgaggcactgcagtatatatctagccttgaggcgaatcaagcaggtcttactgtaaaagagtatgggaaaattcttgtggagcatagacctgctgaaacagttgaaatactgttgagactctgtacagatggtggagatcctatgacaagaagaggttcaaatagcatgcatttgcttatgataccttctccaatggactttgtaaacatatttgtacacagcccgaaacatctcatggaatttctagagaattataccaaagcagtaaaggactcacctgctcaaacagaaattcataacacccttctggagttatatatatcaaaagatttaagtttcccttctatgtcacaagaaaatggctttgaggagcagaatagtaaggaaagaaaaggtaaagaagttgcaaatggctataaatctggcccaagggagaaaggaaatctgggaaaggaagatatgaatgtcgcaaaggatattgttgataggcaaaggaaagggcttgcattgctcaagtctgcatggacatctgagatggatgatcctctgtatgatgttgatcttgctcttatcatctgtaatgcaaatgcattcaaagatgggctattgtttctgtatgagaaactaaaactattcaaagaagttattagttgctacaagcaagctcatgatcacgagggtctaattgcctgctgtaagaagctaggagattcatctcaaggtggggatccatctctttggggtgatctgttgaaatattttagtgagcttggggaagattgctctaaagaggtcaaggaggtattgacctatattgaaaaggaggatgttttgcctcctattgttgtgctagagacattgtcgaaaaacccatgcttgacactgtcagttgtcaaggattacattgcccgcaaacttgagcaagaatcaaagctaatcgaagaagataggaaatctattgacaagtaccaggatgagacagaactgatgaaaagggagatagaagacctcaagacaaacgcaaaggtctttcagcttagcaagtgtacgacgtgcacctttacgcttgaccttcctgcggtccacttcatgtgcatgcactccttccaccttcgctgccttggggacaatgagaaagaatgcccagaatgtgctcccgaatatagatctgtcatggaggcaaagcagaagctagaacataacgctagagaccatgatctcttcttcaggcagctgaggggttcaaaggatggcttctctgtcgtcgcagactattttagcaagggcattgtgagtaaaacagccattcctcctgaaaatggccgataaggagtggaagaaaaccagctctattactccccatgtacaggatttgacgatgttttatctcctttcccatggtgttttgtcatcatgtgagtttcagggtccatcacacagcatgtgcaggcctttaatagcgagttcctctagtgtaccaacttatgtatgctttctggcctattttttgtggccgtgctatggagttctgttgtgcttgacattgtaaatccttctgttggcaaacgctgcctagtttttggcatttagttttgatggaagaagattcacggcc

SEQ ID NO: 27675 - DNA, 2049 bp, Oryza sativa
  ref <308>: DATABASE ACCESSION NUMBER: AK103117
  ref <309>: DATABASE ENTRY DATE: 2002-08-28
gacttcgcccgccacgccgcctccccctgcgccgatttccatccgtatccctcgaggttgggtgcccgtcgtcctgctgctttccgcctccgaaaaaaaaaagaacgaaaaatgtcaaaaagaagaaaaaagaacgaaagggtggagttgagatttaaggcacccgattatgctacgtggaaaaaggaggcagctgcatgcgacaaagctaatggcaatggtaaagatggatcgattacagtaagaagtgattatccatggcaccctccccatcgtttttaacttaccgagggattagatttggaaaagattgacgagtttatggatgaaaggaatatttcgattgccaagaccatagcaaatgacataatcatcccagaccctgctcccgagtggatgtgttataccttcttggacaaatatgaccaattggagcccatctttataaaggatagtgcacgttgcttcctccgattattcaagaactggaagggctataccatgtcatggaatctcaccatcaccgcacaaaccttaacctgcatggtcagtttcaattccctgcgatgcgcgaaagttgtattggagggcagggcacctgagctccttggggtgcatgccaatcccaactgcgtaaccaaatatggatacttcccgctccatgaagctgctgaaaggttctctattgagatgatcaagctgctcttacgccatggtgcatcagccaacgtacgcacggttggcgacgatgtcatcgatggcctactcctgctccatatcgcgattgagaacacttgcctgcataagtatcttgaggacaatctttctcccggccaggatcatctggattatatctacaagcttttccatctgctgtgtttacctgaaatgaagatcttcctggatacaactagactacttgcaggaaaaacaaataatctccttgaagagctctggaattatattgagaatggaaaacttatccagaccgcaattctactactggctgctcaggagcagatccgagggggatgttcctccaagataaatggcagtagaaagaaaaatgggtatgacattatgtacaagcgtatactgaggctttcatttgccttgagatgggggaaagtttcaaatggaatgacacagaagcttatgaaggaaaagagggcactcattgattgcatggggctgcttgttgatgcaatttcccatgctggtgaacctctttctgcatacattcaggctcattcagaggcgccacatgtggaggtcttggaacatgtttcaactatcctcaaggagtatggattttgccctactgaagaagtcatggacaccataaacctccaaccttatgactgcaaaatgtcagaaacaaaatcatgtagcaaagggtttacagatgcaaacacggcagttgcggaaatggctaatctgcatgctgcagacaaaaaggctgggagaaaggaagtaggcagaggatgggatcccacatatacaaggagaaattttttcccatattggagatcaattttacgaacccggtgccctgtgaaggtgtatccaacctatgcacgagcagatgctaggtccgggcgtgatcttgaacagatccgtgcctttgagagcaactcatcaatggccaaaaatcgtatacttggttcagtgggaaggatcccatcactacttgcaagcaatcatcaatccaaaaggagctttagcactgctgctactggtgcattcaggctcttgaagctgttgaagtaaagcacgagtacaaaaggttctatagttgagagaccaaatattgacttttctctgaaaattaattcacctgtgacagatctagcatgggggctccaatacccttgcccgctggatcttgagggaaggaggaagaagagggatttgagcaagaaggcaatgaccctccttcaatctcaagctgcatcagcccctgtaattcacaataaatatgattcattttatatctgtacgtagcaaattaatttataaaaagggtcaaaaaggaaatatttttttctt

SEQ ID NO: 27676 - DNA, 2035 bp, Oryza sativa
  ref <308>: DATABASE ACCESSION NUMBER: AK103118
  ref <309>: DATABASE ENTRY DATE: 2002-08-28
gactctcgctctccgtacggtacaaacaaaccagaaaccaccacaactgaacaagaagagagtattttctcctctgttccttctcttttgcccttctggttgggaaacaagtaacgacgccggcggcggagagacgatggttcatctgccgcaccaggggaagctgcggcgggatgtcaaggaggaggcgctggacgacggcgacgcggcggcacaggcagaggcgtcgccgttccacaagaggtcccgccttgctctacagcactggagcacagacggtggtagtgtgtccaatcaacagtcatcccaacatggtttccttgatgagcctagcccattgggcttgcggctgaagaagagcccctctctggtggatttgatccaaatgaagcttgtgcaggctggtaaggccaaagatgtccagcatagtggaaccgctagtgcctcagagaaattgaaggcttccaatttccctggttctgttctaagaattggatcttgggagtgggtgtcaaggtatgaaggcgatctggttgcaaaatgctattttgctaagcataaacttgtgtgggaagtactggatggtggtctgaagagcaagattgagatacagtggtctgacatctgtgccatgaaggtggtttctccagaaaatgaacctgggatcttggagatcgcattgtcccggcagccacttttctttcgagaaactaatccacagccaaggaaacacactttatggcaggcaacatctgatttcactggtggacaagcaagcattcacagtgcccgccaggaatgatgaataagcatgttgagaagcttgttcattgtgacccacgtctatattcactaagccagcagaacgacatcaatttggataatccgtactttgaatcaaagtcttctatatttgaagatgcagagggcataaaaggccaagattttgagcataaagatgatggcgatcagttagctccccaaagatttacagaactgttaccgcctcattctgcatcaggtaggatagatactgaagccagacagctctcaggaacaccggacaagttacttcaacatttcccttgttcagttagtggtactcaagtgattaaacaagatgctgcttctggtgattgtgaacggcaagaaagcatctataattggaacggtatcaaggtaccggggataaggcgctccatgtccaaaagtgagattgcaaatcacattgggaatcatatctacagacagatgtattcagggaacctacctgcagttcatcgtggggattccacgtcaagtaaagtaacattagatggaataacccgattcctcttgggcagcacccagatcatcggcgatggcgatggcgatggctcaatgggtaaactgacatttgatgagcttaccagacaactcctcaatgattcccagataaccaacgcagctgatgaaaggatgctcatgtcaagggtcaactccctctgcagcctgattcagagagattcaggttcaggccagacaaaccccagcagcagcattcatggtgacaatgagatgcaagaaaggaagccccaaccttatgcgcttccggtgtcagcagacagtggaagcaacacctcattgccgccgaggcaagaatcgtttggggatctcctgacgcacctgcctcgcatctcatcatttcctcacttcttgtgagtgatctgacggagcaactctggagttggagtgttattctattggggtacatattggcttgagaactcttgcttgtagaaatttttgccgggaaatgtcttgaccccttttcttcttacttttttttgtacataaatagataggataactgtagattgtatagtaagcttctttagttcgatagggcaaatgcatccggtacatattctcgtcgatatagtcctttctaatttatacatttcttactcttagaaaaagtatacgtttatttcagaaacagggaaatggataaactttttgccgaaaaataaaagtaatacttcctccgttcatg

SEQ ID NO: 27677 - DNA, 1743 bp, Oryza sativa
  ref <308>: DATABASE ACCESSION NUMBER: AK103119
  ref <309>: DATABASE ENTRY DATE: 2002-08-28
gacaattcggtggtcactcgtcagtcgtgtcgtctgctcacgctcgccaagaaagattggccatggagaagccggcggcgagcgtggaggagccgctgcttgttggcgctggcgagaagaagggcgagagcgcggccgcggcggagctgaagcggctgctccggctggcggggccgctggtggcgagcggcgtgctgcggaacgtggtgcagatggtgtccgtcatgttcgtcggccacctcggcgagctccccctcgccggcgcctccctcgccacctccctcgccaacgtcaccggcttcagcctgctcttcggcatggcgagcgcgctggacacgctgtgcgggcaggcgtacggcgcgcgccagcaccacctcctcggcgtctacaagcagcgcgccatgctggtgctcgccgtggccgccgtgcccatcgcgctcgtctgggccagcgccggcgagatcctcctcctgttcggccaggacccggccatcgccgccgaggccggcgcgtacgcgcggtggctgatcccgtcgctcgtcccgttcgtgccgctggtgtgccacatccggttcctgcaggcgcagagcgccgtgctgccggtgatggcgagctgcggcgtcacggcggcgagccacgtggccgtgtgctgggcgctggtgcgcaaggccggcatgggcagcaggggcgccgcgctggcgaacgccgtctcctatggcgtcaacctcaccataatgtctctctatgtcaggctgtcgcgctcctgcgagaagacatggactggcttctccatggaggccttcagggagctccgccagtatgcggagctcgccatccccgcggcaatgatggtctgtttggagtggtggtcatttgaatttcttgtgatgctctctggtcttctgcccaatcctaaacttgaaacctcagtgttgtcgatatgtctcaacactggtgctctgctggtcatggttccaattggtctcagcacagctataagcacgcgtgtttggaacgaactaggtgccggcaatccccaggcagcgaagctggcaactcgagtggtcatatgtatggccatgaccgaaggctcggtggttgcgtttacgatgattctgttgcgcaattcctggggtcacatgtacagtgatgaggctgaagttgtcacctacattgctcgtatgatacctgttctagccatatcattcttcattgatgggatgcacagcgctctttcaggagtgctcactggatgtggcaagcagaagatcggcgcacgggtaaatcttggcgcattttacttggcaggcattcctatggccgtctttcttgcatttgtgctacatctgaatggaatgggcctttggcttggcatcgtttgcgggagcctcagcaagcttatcttgctcttttggatcacaatgagtataaactgggagaaggaatcaaccagggcgaaagaattggtgttcagttcatctcttcctgtagcatgaagaaaaacaatgcatcagaatttcatgatatggtgcaattgttattgtgaaagcaacacagaaccaaatgttatgaagctcgcctttcatctttaagcacccagtttattaacatttgtaacatgaatttttgttcttgtgataacacctatttaatattttttttcttgttcagattgtactctgtaaactaaggatatatcttatatgcatcgattaattgaaaatctaagaagcatattatagg

SEQ ID NO: 27678 - DNA, 1771 bp, Oryza sativa
  ref <308>: DATABASE ACCESSION NUMBER: AK103120
  ref <309>: DATABASE ENTRY DATE: 2002-08-28
gagagcccactagcccccctcgatcccaccggcgacctcccgccgcctccgccggggacaagcccccctgcgcgccgcgctgcaatggcgttctccttcgcctcaccggcgccgcagaatccgttccagacgccggcgcaggccccgtccctgtctccttcgccgtttcagttcaacctgcagcagccgcagcagcagcagcagcagccgccgccacagcaacaggcggcgccggccgcgcaaccgcagcagcagcagctgatgctatatacgacggacgggaagcccgcggggtacaacacgaagtgggaggagcttcacgccgagtcgcagaaggcgctgctccagatcgaggataaaataagggagtacagggacgagagcgagaggttggatcagtgttctcgccttcatgactcttcaatctcaactgtcaattttgagaatgatgcaagtgaaattgctcaggaacttggagggacaaccaccatgatggaaagagagaaggcttccgttcaagagttaatgactgttgtgaatgaaatgatgcgaaacacagaatttgctattaggtcatatatgatgctgagaccaagatttatccgtccaggtgctggagcaaatggtggtggctcaaatccttctggtcctgctggagctcagtccaatcagccagtagcattggctccaaccattgatttctatagtggtatcccaaagcggccttcccattttatgcaacagactatcaacaggtttgagaaatatcttggagaatgctgcaagtggatcgcggagctagagcagcttgttcaaatggagaacaataaaaggcaatcagcctcattagaatctctaccgaaggttatgtcgaatgtgcatgattatttcatctatgttgcttctaaggtggaaaatcttcatcaatatgttgagtcattgaaaactgaatatctacatgagcagcggcgattgggtaatgccaatgatccatttttagaggcaaatagacgagaagcggctaaacaagaagcagctgccagaagggtacatccaacattgcatttgcctgctcctgtacagcccacaactcaaattgctggaacagtgacgagtcaaccacagcaatcattgattccttctggagcgacttcttcaagtgcttttccatcattcagcactccagcttccgctccatcttcttcaagtctcttttcaactccaacaactccaactctatccagcaacctttttggtacatctggatcagcccagctgtccacaccatttgggacagtctctactccaacgcttggatcaacgccggctccatctggatttgggaatacaactccatcttttgcttcaacgcccgctttaggtggaacctcactgttttctacgccgttcggaggtggagctacagcttcaggatccagctttggtggtacatctaaagtgcggtcaaaacctcggggccgacgctaggtgtagctgatgagcgtgaaatgtgggtgcctcttgtatctctttttcctcgtctttcatttttccaagaatgcgcaaaatatttgcgtcttttcattaagacagagggaaaggttctcaccagtggttacaaattggtctgaactatggaaacatatttcagactcatattcctcctgtcttatggaaagaacttgtaattaatttatcggtgattgtagtggagcatgattggttttgtgacacttaatagattctaatgtatgtgccccatttcagtact

SEQ ID NO: 27679 - DNA, 1217 bp, Oryza sativa
  ref <308>: DATABASE ACCESSION NUMBER: AK103121
  ref <309>: DATABASE ENTRY DATE: 2002-08-28
gggcggcggcgagccctcttcttcccggcaaccgcggcggcggagacgagcgcgacgcggcgattccccccaattgctcctcccgcttccgctccatctggacgggctcgtactaccgatgcgccgttgatttctgcagggcgcagcacttgaggttgtttagatcggcctgcggcgcgagctcgggagctgtatacatggagaaagcgaggttgagagctttccagagggagcaagccacggccaagacatctttgcgacggattttctcgagataagggccaaagagccgtctgttcatgttctggttattcccggaaatccaggtatcgttgcattctacaaggactttgttgaagagctctatgagaacctcggtgggcaagcatctattacagcgattgggcatatttcacatagcaaaaaggatgcagagcgtggacgattgttttcgttgcatgaacaaattgatcacaaggtcgatttcattgagcaagaatttcaacattcggaacaatcattagttctggttggtcattcaattggtgcctacatatgcctggaaatcttcaaaagacttcagaagaaggtgaaactttgtgtaggactctatccatttttaacactcaacaagaagtccatggagcaatcagctattggatatattgcaaggtcatctctcctaagtaaaggggttagctcatttgtttcttttatcggatcactccaagcttcagtaactaggggcatcatgagaaggttacttggaccttcatggtctgtaacggctgtcgaagctacatgcggccatctcttatggtaccatacgatgcgtaatgttctcttcatggcaatgacagagttcacgaagctctctgaagaaccggactggaatttcatcagtgcaaaacaggaccagattgcatttctgtttgatgtggacgatcactggggtccgcttgcacacttggaagagatctcaaagcgtgctcctggggttgccttgtctgtcgaaactgaaggccatacacacggctattgctgcacggaagctggatcgttttgggctgcagactacgtggctaatttgattaaaactaaattctgattggaaattcaagatgaaaattgtaccgtagtcagactcagtatttttatcctccaaagggagatagtaagaataatgaaataaaccggttggatcaacctcatcaatc

SEQ ID NO: 27680 - DNA, 1756 bp, Oryza sativa
  ref <308>: DATABASE ACCESSION NUMBER: AK103122
  ref <309>: DATABASE ENTRY DATE: 2002-08-28
gaaaagaaacagaaatctcccgtctcgttgtctcctccgctccttgcgccgccgccaagaggagtcgcggctgaacaggggaggggcggcgatcgagcagagcaggggagggaatcctggtgatgtaacaaaagtggtcaccagtgcctgcgcaaaatctcgtctgtttgtatatggtattaataagcagcttcagtgcctggctgatccttggggtgaatggaaggcaacaacctaccctctggaagcttgatgcgttctaactctgggcaaatgcatgctccaaatcctggaaagcagggctttgaccatactcagatgcctggcaatttatcgatgcatgtaaaccagtctacagattctgatcacttgtcagaatttcaattcggagagcttggaaaggttgaccaccaccaccaccatcaccatcgtcaacacgccaagaacggcatgagtgatgatgaggaacatggtgtcaacgaggatgccactgatagccagagcggcaagggaaagaagggcgctgcatggcagcggatgaagtggactgattcaatggtcaagcttttaattactgcagtatcttacactggggaggatccaggagctgattcaggagctgggaagagaaactctgcaataatgcagaaaaagggcaagtggaaggcaatatcaaaggtcatgggtgagcgaggctgcagtgtatcaccgcagcaatgtgaagataaattcaatgatctcaataagagatacaaaagacttacagatatccttggccggggtacagcttgcaagattgtggagaatcatgctctgctggattgcatgagtaatctgtctgacaagatgaaagatgatgcgaggaagatactgagttcaaagcacttgttctacgaggagatgtgctcctaccataataacaatcgagtgagtttgcctgaagatcctgcccttcagcgttcactgcagcttgcccttagatgtaaagatgagcatgatctgaggaggggaacaagcggagatgccgatgaagatgatcaaagtgtagactctgattccgaggaggagaatgatgaggaaaattacacattacaaggtgataagagtgccctgcccatgcataaaagattgaggcttatgacagatcaggaggatgtgggttttggcaactcttccagctcacatggatgtagcaggaggtctgattcccatggcatatcactggatatcaacaaagcatttcctgatggaaccaacttggctttggcgcaaaaggatttggctacacaatctgcagatcttgaggaacaaaggttgcagattgaagtccaggcagtctatcttgcaaaacaacggctcaaatgggagcgcttcagtaaaaataaggatagagaactggaacagatgaggttagagaatgaaaaaatgaggcttgagaataagcgcttggagctggaggtaaggcacaaagagttagagcttgaactcaagcaaaaaggcagtggcaatcatgcatgacatatttttaaccaatcaaggctgacttgtaagatggtcgctgatggcttctgttgttcgagtagactgacgcaagaaggttaaggttcagcatactttttttgttctgctttttttccctacattatttgtgctagtgagcttgatttgtaccataactcttattcttcagtgagcttgctaaccacacatactcagaagatcatgttatatgctgttaatgttgtcaattgtcatc

SEQ ID NO: 27681 - DNA, 1168 bp, Oryza sativa
  ref <308>: DATABASE ACCESSION NUMBER: AK103123
  ref <309>: DATABASE ENTRY DATE: 2002-08-28
ggattacgagtggtaactccgatttcctcgccggcgcagcgccgcaggttgggtttcttcctgcgcaagttggtgtcgccgcgagctgaagccgagccgtccgctcgttctctcgcttcgctcgctcgctcgcgtccctcccaaattcccccaaaataattggaaccccactccgccaccggtgcggccgcggcggcgccgagatcggagagagagagagatggtggtgcggcggctgggcggcgccggccgcgcgctgctgtcccgccaggcgctctcgctgcccaacctccgccgccgcgcgtccaactcctgggccgccgtgcgcgacaccttcttctccaccaaggaagtgttcgagagccaccgcgtcgtgttcaccgtcggcacatccatcgcctccgtcctcaccgcatgggccggttattctttgcggcacatgcaacaatcaaggattgataagagacttaactcaattgaacaatctctgaaggatactcacaaagtcgaacatgaagagattaaaaagattgtcacttccagtaatatcagcactccagcctgtgtagccactgcattgacaacttcagttgtcgggtatgcgctagggtggcggggtggagcctggtacgctcggagaggcttccgaagagagcaacagaagctgatgggccaaatcaattcacaccacagatggcactggcggcctttcagtaaactcaaaaacagactcagaaggaaccgaccagcggccaagactgtcgaggcccctcggttgacaggcgaaagcaccatctgaaaatgttaacagtaactctcaggcagcaggatgtgcatgattcctctgaaatacagatgaacatcgatgcccatgtgcctgagaatagaaaccaaagaagcctgttcatatgactggcagacgttccaaattttgcaggattggaacatccttttcaataagattaggatcggaactagggagattatcttcctaattctcataggaaaatgccttgcgctgatgttaccgtttactactagccaggctgatatttgtcatttttgtcatgctgttttccctttcaaaatgtgcctgcctcgtcgaggcattgcacctgtaattcgtcgatggacacatgagaatgcacaagcatttgttggtgaccgg

SEQ ID NO: 27682 - DNA, 3311 bp, Oryza sativa
  ref <308>: DATABASE ACCESSION NUMBER: AK103124
  ref <309>: DATABASE ENTRY DATE: 2002-08-28
ggctccactgattcgattggcgtcaccttcatcaatcgatcgctgcagactgcagttggttccctcctctcctgccaacgaccacgagccctagtttaggccgcccccaaatctactgccatccccgactagtatcccatttctcttgattttaagggatcctgagggggatgcttcctctactctgctgcagcaacgcttgacaaggctatcacatccaatccaatggtgcactgctgaccaacttcagtgtcgggatatccatgtctgaccatcaatttgccggccaaccagatgtgcagtgcctagtttgcacaaggccgtttactttggatgctcaggtgactgatacctttgaagctttagccatatgcagggactgcaaggccacagtacttaacgatgtcgaaagagatgaaataaccagcacttctcatcacacaagacggagaaggcagagatccaggactgcaagtattgattccctggaggacgcattctcgcaggagttctctcagctgatcgacttagcaagaagacaaggtcgtgaaacggatattgattcttcgtcagtcctgccgcaacatgcgtcgtacaatgcgacaccaagccactctcaaagatggcatgcttcagatgacgagagcgacggccttaattatgttgattctgtgtttggtgaaattgaatcaaccatcagttttggtgactatggtgcggattcagacacctccatagaggaacatagtgtatcggcaaggaggaggatttccattcaacttgacaatggaagttacatgaacacagataccgatattgatcccatgaatgctaggctggatcagtgggattcagatgaccaggaagatgtggaagagtctggttttgatgaaacaataaacaccatgacccagcaccagcagcaatcacatgatattcagctaagtggattgagtgaggacgaatctgaagatggtgtatggaattggagcgtggctgtacgtcaaagagcaaacgtgacaaacttgctagaggacatggaagggccagaaatgaggacaacttttgtcgggaatccagatgattatgttgatgcaaggcagttcgagatgctccttgagcaatttgctgaggacaacagttccagaagaggagctccaccagctgctacatcctttattgaaaatctcccctctgtgattatctccacaagtcatcagataaatgatgatgtgatctgtccggtctgcaaagatccaattcctaccagagctagagcaaaacagctaccatgcatgcatctttatcattcatcgtgcatcttgccatggtttagttctagaaatacatgtcctgtctgccgatatgagcttcctacagatgatgcagagtatgaaaggtccaagcaagccacaaccaatgtaagagacattcaggttgtggaagaaaattctgatgaacaagaggtccaggtaactcgtcagatggctgttggtgctatcgaagagactaatacaagtgaacacaatgttcgtgttgatgagcaaccaagcagtgcacgcaggcgcagtggatggctttttattgctgctgctccagtcgtaagccttatcggtttcgctctagttttatgctttacaaatcctgctaggagtggtagaaggcaactgtactgtagatccccaagtgccactgaagtacatgtgggtaccaaaaagagttggtggtctatgttctagaatgttccggcggtacatctgataacaaaatgactatatatggtggtgcgtgattgtttctttagaatagttttattttaaaattttcaaatgttgtagttgctgcagtgaccggtcggagtgttgtaaaagaattcacatgcctagtttcttctgctactttgctcagtcaagaaaagtgtgtattgatacttgctatttgtttaacatatatgtgccattggatatcctatgcttccttgattccttctgttgttgcctcatttaaaaatcaccatggaagagaagactccatttgcattcagtgcttttcagaattctacccagtgtccagttgagaagtaattcgtctcctattgtttgaagctcgcgtctaggcttcattggtttgtgcctcacaaattttttctgtatgttaattcttggtatattgtttctctcatgaaatgcttctggtagctaaagtaggttgtgcataatgcagtatgctagcacagaacttaaggctggttttagattgtcatcaggtaaaacagggggatcaaaatgattttcttgcagtaatttagtctgttgaattcacatcgtcatgaactggaaggtctaactgattgtaaattgatcccaagatgtgaaagcaacctacaaaacaatcagttgttgaagaaaaggtcaaacaaaagaattcacatgcttgaggtgttaaacaaatatataaagctagtgcacgaaagacctaatgtactgaagatttgacagaaataatttgcttctctggttccctatgctcatggagaaattgcttgcactcattgttgttcttgtcatacttcttagcttagctctgttctacttgtgcaacatcctatggctgagggctgtgaagataaggaagaagttgaggaggcaaggcataaggggtcccaagcctacttttctctatggcaacaccaaggagatcaaaagaatccgacaagaactcaaactttcacagaagcaaggcaccaacaacttcatctccaccctcttcccacacttcctcctttggcgggaaacttatggcccagtgttcctatactcaacaggagctatggagatactacaagtttctcacccagatatggtgaaggatataggccggtggacaccatcagagcttggtaagcctaattatctaaagaaatctcgcaaggccctctttggaggaggtttatttacagagaatggtgatgaatgggcctatcagaggaagataattgcaccagagttcttcatggataagattaagggtatgatacagctaattgaggatgcaaccgttccagtgttagaagcatgggaggatatgattgacgatgagggagggtgtagggaaatagttgtcgatgattacttgcggaacttgtcagcagatgtaattgccagggcttgctttgggagtagcttcacaaaaggagaagaaatattttgcaagcttaggcagctccaaaaagcaattgctcggcaagattcgtttgttggtctgtctgcactgtggtaagtcaatgaaattagtggcaataaaatgaaatt

SEQ ID NO: 27683 - DNA, 1238 bp, Oryza sativa
  ref <308>: DATABASE ACCESSION NUMBER: AK103125
  ref <309>: DATABASE ENTRY DATE: 2002-08-28
gattcgcgtcgcgtgcgtattctttgcttccgctctcgatagatcgcgaggaaaggagtagtacggcggcggcggcggcatcgtcggcggcgatgaggtcggccatgacccgcctgatccgttcctcgtcccccgtagtctcgccctcccgtctcagcgccgcaaacttgttaaagaacaataatgggaaggctttcttgagcgaggatgcttccaagcgtgtggaggagcctttcaaggtggaggaagcagaaaccgtgaaggtgccaccgccttccccggacaagcttcttgtgctaggtggaaatggttttgttggttcacatgtttgcaaggaggctttggacaaaggatttactgttgctagtcttaatagatctggaaagccatcaataagtgaatcttgggctgacaaagttatatggaacaaaggcaatctacttgaacctgattccctgaaggatattatggaaggtgtttctgctgtggtatcatgtgttggaggctttggctcaaattcttacatgtacaaaattaatggaactgcaaacatcaatgccatcagtgttgcagctgagaaaggtattaagagatttgtgtatgtgtcagcagcggactttggttttgtgaactacttgttgcaaggttattatgagggcaagagggcaactgaagctgaactgctatcaaaatttacctatggcggagtgattttgaggcctggttttattcatggaactcgccgtgtcggtagcgtaaaaatacctcttggacttgttggttctcctatgcaaatggttctccaaagtgcgaagccgttgacgagattgccgctggttggcccactgttgacccctccagtgagtgttgcctccgtggcgaaggtcgctgtaagagcagcaactgatccagtgtttcctccgggtattgttgatgtgtacggcatcatgcgatacagtgaccagaagtagaagtaataaatattacaccggatcatacaaattctatctccgaatgaataagcagatgtggctggcacgttagacttttgcgcttgtttcgttttcatagatttttacagttagtaggggaaccttatttaactgatccatgtcaatcagtggtgaagatgtatatagtaaataaatcgtatcatgctcaccatgtttgattgcagtcaatgatctgctctcgtccatgttgcatctgaagttttttaagtggctacattttaaagc

SEQ ID NO: 27684 - DNA, 1195 bp, Oryza sativa
  ref <308>: DATABASE ACCESSION NUMBER: AK103126
  ref <309>: DATABASE ENTRY DATE: 2002-08-28
ggatttcagtgtgttttgagacttgggcccttatacaaaggcccgtagtacactaggcctccgactctcgccttccccttccttgttgcccccttacccaagttgatccgtcgccgagttcgcctgagccccaatctccgatcccccaccatcgccggcgccgccgccgctccaccctgccgcttttcctcccgccgccgcatcctcgccgcgcgggatggccggagcgacggatctccccccgaagggcgggttcagctacgacaattgcgcgaggaacgccatgcttgtggagaagggcttgaagatgcctgggttcctcaagaccgggactaccatcgtcggtttggtctttcaggatggtgttgttcttggggcagacacgagggccaccgagggtcctatagttgctgataagaactgcgagaaaattcattatatggcgccaaacatatattgctgtggagcaggaactgccgctgacactgaggctgtaacagatatggtcagttcccagcttcaacttcaccgttatgcaactggtcgtgagtccagagttgtaacctctcttacattactgaagtcgcacctttttagctaccaaggtcatgtcagtgctgcccttgttcttggtggagtagatgttactgggccacacctgcacactgtttatccacatggctccacggacactcttccttttgccacaatgggttctggatcccttgcggcaatgtcagtgtttgaatcgaagtacaaagaaggcctcacaagggaggagggaatacaacttgttgctgaggcaattcgtggtggtatcttcaatgacttgggcagtggcagcaatgtggatgtttgcgtaatcaccaaggggaagacagagtacttgagaaaccaccagttaccaaatccaaggacttacgttagttcgaaggggtacaacttcaccaaggggcagactgtggtgttgtccacaaagataacacaactgaagccgaaggtagaggtgacagagggtgatgcaatggaggagtgattttgtgtgcttacattcagacaagcagtcacgttgagaacatatgctttcatttcagtggaaatgcttgaacaaaaaaagatgactcttgttgtacttccttgggcttaatgcacatctttaagttgattttcgacacatttatggaggaccgatctt

SEQ ID NO: 27685 - DNA, 1867 bp, Oryza sativa
  ref <308>: DATABASE ACCESSION NUMBER: AK103127
  ref <309>: DATABASE ENTRY DATE: 2002-08-28
gtatcgtttactcctccgtcgatttccactttcgccaaacctcgcggccgtcgagctccgccgccggagaaaaagatggccgacgacagcgcctccccgtcgccgtcctcggcctcgccgctccagcaccaccgcgaagccctcaagtcgtcagtgcgcaacacggcagctagccggaggcgggaacaagctattgcgattgggaaggaaagacgggaagccttgatccgtgcaaagcgtgtgtgtcgagctccaatttctggcagtgatgaagctgaaatggaagagggtgatatggtggtcgatgaggagaaagcatgtcttgaggcaaagactgctcatgctgttgaagaattgaaatctgctttgtcaatccaggggaaaggcgttcagaagaagaagatagaggcgcttcgtgatttgagacgcttgttgtcacagcctgaagtacctctagttgatactgcaattaaagctggagcagtccctcttttagtgcaatatctatcctttggatcatcagatgagcagttgctagaggcagcttggtgccttacaaacatagcagctggggaaccagaagaaacaaaatccttgctgcctgctctaccattgcttattgctcaccttggtgaaaagagctccacacttgttgccgagcaatgtgcatgggccattggtaatgttgctggtgaaggagcagagctgagaagcacattacttgcacaaggtgctttgcggcctcttacccgtttaatgttctccagtaaaggttctacagcaagaactgctgcttgggctatgtcaaatctcatcaaggggcctgatccaaaggctgcaaatgagcttattaccattgatggcgtgctaaatgcaattatagcgagcttggaaaaggaggacgaagagttagcaactgaggtggcatgggttgtggtctatctttcagcactttcagacagaggtattagcttaatagtaagaagttctgtgcctcagctgctgataggacgactgttctcatctgagaacttgcagttgctgatcccagtgcttcgtggtttgggaaatcttattgccgctgatgactacatggttgattcagtcctaactgttggacacaatatcattgatcaagcattgtcaggtcttataaaatgtttgaagagtgataacagggttctcagaaaggagtcatcatgggcattgtcaaatatagcagcaggcagttttgagcacaagaaactgatttttgccagtgaggccacgcctgtgctgatacgccttgtcaccagcatgcaatttgatattcgcagggaagcagcatacaccctaggaaatctgtgtgttgtccctactggaaattgcgaactcccaaagataatcgtggaacatctagtcgctatcgtagatggtggagcccttccaggatttatacacttggtcaggtctgctgatgtagataccgcagggcttggtcttcagttcctagaactggtgatgagggggtatcccaataagcaaggcccaaagcttgtggaaatggaggacggcattgaggccatggagaggtttcaattccacgagaacgagcagatgaggaacatggccaatggtttggtcgacgaatacttcggtgaggattatggcctcgacgagtgactcaactaattaccattcgtacatcaggttaaattgtaatggcagcagctgttcatgtgttcgtactgtaaaaatgcattctcagtttctaacagcactggaactttagaatgagaaaatcatttgcttgttactgttcgtcttactgccacttgttgacgtaatttggaaagaaaaaaaaggttgcattagcatcttgttatgt

SEQ ID NO: 27686 - DNA, 679 bp, Oryza sativa
  ref <308>: DATABASE ACCESSION NUMBER: AK103128
  ref <309>: DATABASE ENTRY DATE: 2002-08-28
gacctcggtagctaatactactttactttattactgtcgttttggtttgcttagcagaatatggttggcgtgagcgagttcgtcggcggcctgctcaactccgccaagagcgcggtggcggccgtggcctccaccgtggcggcggcggccaagccgggcctcgccgcgggggtcggcttcgtgaaggagcagggcgtggggaagtcggcgctggccgtcggcggggccgccgtggccgcctacttcctctggcccacggcggcagtcggcggcgccatcatgaacgcgccgggcgccgccggctacgtcatctcccgcgcggcgttcctggcgaaccccaagctctacttccacctcctgcgcacggtgggcgccaaggcggccgccgccgctttcctgtagggaagaaatggtatccgccgccgccgacgtccgccgctcgctggcgttggcttgctggttcgtgtgtggcgtttggttgagtgagtaatcgccttgctaattaaggagggatttgtgatggagttcatgcttagattactcttgtttggctgtgaatctgtgtgggctagtaattcacggtgtttaggcgacgtggttatatgctagtacatccatggtcatgtgtaataaggtgccgtgtaataagtttttgtggtaattaagtatgttgccgttt

SEQ ID NO: 27687 - DNA, 1831 bp, Oryza sativa
  ref <308>: DATABASE ACCESSION NUMBER: AK103129
  ref <309>: DATABASE ENTRY DATE: 2002-08-28
gattggcagtttggcactcgaatctccgccacaccacatcccggccgcgcccccggcctcgcgggcgtgtcacccggagactgagcgcgcggcgccgcgttggagtcacgccacgccatggagagaaccgtggtgctgtatcccggcctcggcgtcggccacctggtgccgatggttgagctggccaaggtgttcctccgccacggcctcgcggtcaccgtggcagccgtcaagccgccactcgactctcccgatttctccgccgctgtcgcgcgcttcgcggagtgcaaccccgccatcaacttccacgtgctgccgccgccgccgccaccgcccgcgcccgtgggctccggctccgacggcaagtccgcgtccccgatcgtcggtatgctcgggttcctcaacgccatgaacgcgccgctccgcgacttcctctgctcgctgccctccgtggacgcgctcatcgtcgacatgttctgcacggacgctctcgacgtcgcctccgagctcaggttaccggtctacgttttcttcacctcggccgccagcgacctcgccgtcttcctccacctaaccagcatgcgagatagcatcaacacaagcttcggggagctcggtgactccatgatccacatcccgggctgtcctccgttcaaagcttcagagttaccatcagatattctcagtgacaacgaagcatccaggcttatcttactgatgttccgtcggcatccagagtcgagaggaattcttgtcaatacattcgagtcgctggagacgcgcgcgttgcgcgctctggaggacgggctctgcgtccccggccgtgccacgccgacggtctactccatcgggccaatcgtctcgggtggcggtggcagcgacaaggatcacgactgcctccggtggctggacgcgcagccggacaacagcgtggtgttcctctcgttcgggagcttgggaaggttctgcaagaagcagctcgaggagatcgccattggcctgcagaagtcggagaagaggttcctctgggtcgtgcggagcccgcgcatcgacgaaaagaacgtgttcgagccgctggcggagccagacctcgacgcgctcctgccggccgggttcatggaggcgacaagggggagagggctcgtggtgaagctatgggcgccgcaggtggaggtgctccgccacagggcgaccggcgcgttcgtgacgcattgcgggtggaactcgacgcttgaggggatcacggcggggctgccgctgctgtgctggccgctgtacgcggagcagaggctgaacaaggtgttcgtcgtggaggagatgaagcttggcgtggagatgaggggctacgacgaggaggtggtggtggcggaggaggtggaggcgaaggtcaggtgggtgatggagtccgagggcggccaggcgctcaggcagcgcgcggccgcggtgaaggatgcggcggcccaggcgatcaaggaagggggctcgtctcatgccgcgtttttcaagttcctcgaggacctgccgctgcaggtctccagaggcatggttagtgcatgatttcgagccatggtaatttgtcgggcactgtgtttacctgcgactgtgagcaacataatttgagtactgtatggttctcttaggattggataatggatgttctttctgataacacgagatatcggtgggcactgagcatggtcatccatgtaagagtacactgttatcggtggacattcggcatagtcatccatgtaagtgtgtgtactgtgtagtgtctattgtttactctctccatttcaaaatataaatatttttagcatagtgataagtt

SEQ ID NO: 27688 - DNA, 1513 bp, Oryza sativa
  ref <308>: DATABASE ACCESSION NUMBER: AK103130
  ref <309>: DATABASE ENTRY DATE: 2002-08-28
gattccctcccctctccactctccgccctagagctcgacggcggcggcaacaagggctgggggatgaagatatccgtgaagacactcaagggatccaccttccagatcgaggtggactccgcgcagaaggttgctgatgtgaaaaggataatcgagactactcaaggacagcacatttacccagctgagcaacagatgctcattcatcaggggaaggtgctcaaggatgacaccacattggatgaaaacaaagttcttgaaaacagcttccttgttataatgcttagacagggtaagggctcatcaagttcagctcctgctacatctaaggcaccctcaaatcaggctccccctactcaaacagtgcctgcagctcctgcatctcaagcaccagttgcaccagcaactactgtacctgtcactgtcagtgctcctaccccaactgccacagcttccccagctcctgctgttgctgtatcctctgaagctgataactacggtcaggccacctcaaaccttgttgctggcagcaatctagaggcaacaattcaatcaattcttgaaatgggtggtggaatatgggatagagacattgtgctgcatgctctaagcgctgcattcaacaacccggggagggctgttgaatatctgtactctggtgttcctgagcagatggacattccagttccacctccgagtatacagccagccaatcctacccaggcttcacaggcaactcaaccagcagctccatcaattctttcgtctggaccaaacgctagtcccttggacctctttcctcaagcccttccaaatgcttccaccgatgctgctggtctaggaaatcttgatgctttgcgcaataatgcacaattccgaaccttgctttctttagtgcaagccaatcctcaaattttacagccattgcttcaagaattggggaaacaaaatccccagattttgcagctgattcaggaaaaccaagctgagttcctccacttaatcaatgaaccagctgagggtgatgatgaagagaatttgctagaccagtttccagaggcaatgccacagaccatagcagttactccagaggagaatgaagccatacttcgtcttgaagcaatgggctttgaccgcgcgcttgttctggacgtgttcttcgcttgcaacaaggacgagcagctggcggcaaactatctcctagatcacatgaacgagttcgacgacgaggggccaccataagacacgcggatggaatacttgtcaagctcaaacctggtatcattggagcaaagggtttgtgacccgtagtccgtagagcaaaaggcttagtaaaacctttttattttattttatttttttgtggattcgtctccttctgttccttcttttctttcattagtctgtaattcttttcagtttggcttttactttcttgcgtacatactctagattaccttttttacagacttgataacggaggtataaaaaggttcagagcccgtctgcattc

SEQ ID NO: 27689 - DNA, 655 bp, Oryza sativa
  ref <308>: DATABASE ACCESSION NUMBER: AK103131
  ref <309>: DATABASE ENTRY DATE: 2002-08-28
gatcctcctcgattccggcggccgactcaaatccgaatcgccccaagagagagagaatggcggcggcggcgctccgaccggcgatcctccgccgcatccgcctctccccctcccctgcggcggctgcgggggccgcggcggcgtcccagccccacgccctggcgcggtggctcgcgcggcccatgtcctcccacgacgcccacctcacccgcgacgaggtcgtcgaccgcctcctcgacgtcctcaagtgccaccccaaggttgacccctccaaggtgagtcccgaggcgcacttcgagaaggatctggggctggacagcctggacacggtggaggtggtgatggcgatcgaggaggagttcaagctcgagatccccgaccaggaggccgacaagatcgactccctcccgctcgccatcgagtacgtcgccaaccaccccatggccgcctgacctcaccgatccgtcgtgccgtggtgaggcttttcttgatttactatttttgttctgcgggggatgaataattttgctggagtggttcaggaaaacttgtccctggtactctagattatgtgttatgttgccatcgatgtcgatctctaatgtaacatccacaatttcggttttgtgacaatatgatgctagattcttgctcg

SEQ ID NO: 27690 - DNA, 2418 bp, Oryza sativa
  ref <308>: DATABASE ACCESSION NUMBER: AK103132
  ref <309>: DATABASE ENTRY DATE: 2002-08-28
cagggcagccgtcgtctcgactcaaccagtagcacgccagccttcagccttctccttccttcggccgcccgcctctccactcctccacccaccgccatggccaacctccatctcctccccctcctcctcctcgccctcctctcccccgccggcgcggcctccggcgaggcgcacgcctccgcggtggtggcagagaagggcctggacttcgccaagggcgtgctgatcggggaggcggtgcggtcgctgaccccgctgcgcctccccggcgtggagaaggccgtgcgggtgcccttcctgggcgccatccgcgtcgccgccaccaacatcacgctcttccacctcgacgtcggcgacgactccgccatccaccccggggacaccgccctcgtcgtcgtcgcctccggcgtcagcgccaacctcagcatggcatggagctactactacgattcctggctcttccccatcgagatctccgacagaggcaccgcttctatcctggtagtactaaccttttgcctagttctcgtgttgattgttgcctaagaaaggattcaattcgatgtggattgggctagatttggtttgggcatcatggtagaaaattagattatggtgcatttgctgcaaatgctgctagttttgttgcttttgtaggaaaaattgctcacgatgaatgttttttccccttaaaaaagaactgtggcactagttcgatgaattgtgcgggagtttgataagcaacttgttttattaaacttttaggtgggcatttgtatgttggtatagtaccttataaatttagctaggtattaggtccatggtaatactgaactattgattataattcttgaagcaatctcatatttgtaatgtcttaagtaataagggtcagaagtgaaaaaattgcatagttaattgcaatttcatgggggacaacatcttcgtggcttccctgtccactctttcctgcatggatcaccctccagattcagacatctatcacattttgctcaacttgatggggctgttgatcccattggcaaatgatgcctatagctgtgacttatgaaatgtgatgttgtatcattcatgtttcatgtaaatatcatagggtgaacaagctgttttaggtaattttctgctttatcttttacttttgttctttgttagtaactcataagtgctttctgtgtctaaggttcaaggaatggaagttggtataaccatgcaaattaagaattataacgggagtttgtctctctctgtgttgcaatgtggatgtaatgtcaaggacctagtgatatccctggatggtggagcatcttggttttatcaggggttaataaatgctttcgaggaccatattggagctgcagttgagaaggcaataccagaaaatattattgacggcacatccaaacttgactcgttgcttcaaagccttcctaggagtgtcaatctggacaatatttctgctttgaacatgacttttgttaacgatccgcagtatggaaattcctcaattgagtttgatatcaatggattattctcttctgcaactgctaagcttagcaattcgcagaagcatccccaactttcattatcatgtggtggggcatccaaaatgcttctgctttcacttgatgaagctgttttcaattctgcattagaggtttacttcaaggcaggttcaatgcattgggtagttgacaaaattcccgatcaatctctactaaatacagctagttggaaatttatcattcctcgcttgtactggagctatcccaatgatgacatgctgttaaacatttcaatggcttcacccccggtgatgaggattacgtctgaaaagattggtgctactatatatgcggacatgataattgatgttttacatgacaaagagacaattccagttgcatgcatctctgtagtagtaagtgcctcaggtgtcgcagaggcagcaggcaataaagtatatggtaaggttgaattgggcaatttctcccttgccttgaagtggagcaaaattggtaacttccacatgtcattgattcagggagtgattcgtgttttcttgaacacggtttgcatgccctatttgaactcacggctggggcatggagttatcttacctgtggtccatggtttcacactcaaagacatctacgttcttacttctcctgagaagttgacactttgttctgatgttgccttcgctaatgcaagcagcctggcaactttaccaattttgagatcccctcgggttttatagggtatatgtgtacctcacgtttgggccaaaaagggccttgggcataatagtaagtgcacacttgtacatatacatctgtacattaagataaatgtacatagtttctccttcattgatatattcacattcatgattcattt

SEQ ID NO: 27691 - DNA, 1525 bp, Oryza sativa
  ref <308>: DATABASE ACCESSION NUMBER: AK103133
  ref <309>: DATABASE ENTRY DATE: 2002-08-28
gtccgcacgaacaacaaccaccaccagcacctcctcctccgccgccgacgccgactcctccctccaagctttccccaccgtggcgtcgtcgtccgtcttcgctggcctcgcgcaggcgccggaggaccccatcctcggggtgacggtcgcgtacaacaaggatcccagccccgtgaaggtcaatctcggcgtcggcgcctaccggaccgaggaagggaagcccctggtgctgaatgtggtcaggcgcgctgagcagatgctgatcaacaacccgtcacgtgttaaggagtatttgccgatcactggactggccgatttcaataagctgagtgctaagcttatttttggtgctgacagtcctgccattcaagagaatagggtggctacagttcagtgcttgtcaggaactggttctttaagggtgggaggtgaatttcttgcaaggcattatcatgaacgcactatatacatcccacagccaacctgggggaatcaccccaaagtgttcactttagctggcctgactgttaggagttaccgctactatgatcctgcaacccgtggactggatttccaagggctgttagaagatctcggttcagctccttcaggtgcaattgtactgcttcatgcttgtgcccacaaccctactggagtagacccaactttggaccagtgggaacagatcaggcagttgatgagatcaaaagcattgctgccattctttgatagcgcttatcagggatttgcaagtggaagtcttgaccaagatgctcaatcagtgcgcatgtttgttgctgatggtggtgaattgctcatggctcagagctacgctaagaacatgggattgtatggagagcgtgtcggtgctttaagcatagtttgtggaagtgctgatgtagctgtcagggttgaaagtcaacttaagcttgtaattaggcctatgtattcaaaccctcctattcatggtgcatctatcgtggctaccatacttaaggacagtgcaatgttcaatgaatggactgtggagctgaagggcatggctgataggattattagcatgaggcaacagctttttgatgctctgaaaacgagagaaactcctggagactggagtcacatcattaagcagatcggaatgttcactttcactgggctcaacagtgatcaagtggctttcatgaggcaggaataccacatttacatgacatctgatgggaggatcagtatggctggtttgagcgggaggaccattccgcatcttgcagatgcaatccatgccgcagtcacaaaactgaagtgaatgatggtagcatagcagctccctccaagaataacatcttaaaaccatccgcagcagtgttctgaggattcagacagtgatgtttgctggctgagcacatcctggaagtttccttgtaatagactcgtgtgacttgcttttgggagcagttttgtaccagtggattcagaaaaagtggtgatttcgaatcacctaataagctccatcggtgatgcttttacc

SEQ ID NO: 27692 - DNA, 1606 bp, Oryza sativa
  ref <308>: DATABASE ACCESSION NUMBER: AK103134
  ref <309>: DATABASE ENTRY DATE: 2002-08-28
ggtaggcaaggcacgcgagccctagccgccagccgactcgaccagcgcccggaggcggagcacccgccgccgccgccctcgccatcgtcggcttcacccctcatcggcaacctagtgcaggttgttttctgaagatggctgacgatttgggccctcccactgtgctccagaagatacatgggcagtccatgatgttcagcaagatctcaccttattctttgatgaagaatcccgcactctacaatgccaacacttcttacagtgtgcctctgaagtcatacaatgggatggatgggaacaatgggttctcatctgtcacatctgtatccccagtctttgcttctgccccaaaggagaaaggtctttctgggtttatgattgacttcatgatgggtggagtttcagctgctgtctccaagactgctgctgctcccattgagcgaatcaagcttctcattcaaaaccaggatgaaatgatcaagagtggtaggctctctcacccatacaaaggtattgcggactgctttggccgcacaattaaggatgaaggtgtgattgcactgtggagagggaacactgctaatgtcatccgttactttcctacccaggccttgaactttgccttcaaagaccatttcaagcgcatgttcaactttaagaaggacaaggatggttactggaagtggtttgctggaaacctggcttctggaggagctgctggtgcttgctctctcttgtttgtgtattctctggattatgctcgtactcgtctggctaatgatgccaaggctgcaaagaagggtggtgggaggcaattcaatggacttgttgatgtttaccgcaagacccttgcgtctgatggtattgctggtctgtaccgtggattcaacatctcctgtgttggtatcattgtctatcgtgggctgtactttggaatgtatgattctctcaagccagtcgttcttgttggcaaccttcaggataacttccttgccagcttcttacttggttggggcattaccattggtgctggccttgcttcatacccaatcgacactgttcgtcgtcggatgatgatgacatctggtgaggctgtcaagtacaacagctccttggatgcgttcaagcagattgttgcgaaggagggtgcgaagtcactcttcaagggcgctggtgctaacattctgcgtgctgttgctggtgctggtgtgcttgctggatatgacaagctgcaggtggtcgtctttggtaagaagtacggttctggtggtggctaagactagatgatgatgataagcagtggggaactatggacatattaggtgctttcggatgctgttgcgtttaaataaatttaacgtatggacaccgtttacatgttattaggcgtcaggtgaggtttctgagtgtgtaaatcggtggcagatgcttatgccttttttgttgggggatcgagcaagacgagttttcctagttgaaaacatgccaaattattgtctgtgaaagcgtttcttgagattgttattgatgtggttcctagtcgattatatagattatcactccattgtagcatcttcgggattttgtcttatctaaccacatatgc

SEQ ID NO: 27693 - DNA, 2333 bp, Oryza sativa
  ref <308>: DATABASE ACCESSION NUMBER: AK103135
  ref <309>: DATABASE ENTRY DATE: 2002-08-28
gaatgcgacgcgcgcggcgcacgggacgggggagcgctcggctctgccgcggtatgtacgagcgagagaagcaagcaagcacgggacgggggctccttcgccgggaggagggaaaggcagaggcgggacgggaatgcggtccgcccaagaactcgccagcgcttgcacgggcgcggccgtggaggaagtagaactgcttcgcgtcgtcgaggcgaacgcaagggacggcatgggaggcagccgcggggagagctcttccgcgcctccaccgcctcctcggtcaagagtgctcaggcagggagggctcgaggaagaatacgccaagaactccccctcccctctcggattcgcaccaagactcatccgccacgacagacagacatcgtacgaacttgcaagcacgtcaagaccaccagcacctgagatgggagaaccacttcgtatcatcacaaagaaagcaatgagcgagaaaaacagggcttacacaggaggcaatcaaggtagatcctcctctgccctgctaccacaatcaagattctggcaagggatgtgcgaggaagccaagaaggttcttggcatcgctaagtactcttcctccccctcaagattggctgcaagaatcctttgtgacaagcaggtgttgcctgaatctgcaggcacatcaaggccagtgctagagtttgtggatgaatcataccagcagtggttatgttctcaaaaaagcactagcttagtcgctgacgtgattgctgcagtgtaccatgatcagtctgtcctttctccatctgcctctactggaacactgtccagcctgttggtaccttcagaggaaaaaattcaagctatcctaggaaacttagggaaatcggtgttgtgtacagaggctttgcaccagattcggatactctgcgattccagtaagggagcacaatctttcctcaacaagtgcccagacatgatacaagtgttgatagatctaactacggaatggaaatcgatatggacatgggctcttgaggaagagaggctgagcattgtccttagtttgtcaattcacaggccaaacagggagaggatagctgcgcagaaaaaattgccatgtttcctcaaacagactgttgaagtggcaattgagtctggtgctagtgcagcagcatctttggtgaaggtagcttctatagtttccatcctgtcagagtttgacatgttcaggaaaagtgtgctggatattggtgtagtgacactgttgtgtaatctgctcaactttgagaacgacgctgtaagaaaagaagctgccattgctgttcttgcactctgcggatatattggaaacaacatggtcactgatgatgtcctgcttctccttgactatctgccaaaaggtccatgtgtgctggaggtgatctgcaatcagactgtagttgagcagttggttaacattgttatggctgaacatgaaagtgggctggtaacatctcaaggcatttactctgcactttccttgattctggtcattactcagaatgatgtgagtaaaatgaaggtggagcacatggagaattttatgaagtggttgcgagagctgtcctcaaatgaattgccaatgcagacaatgtttcagctgattgaaataataagccttttgtcacaaaggttgtattctcataagcctaaggaatttgttgttaagtggcgggatgatgatgatcagatttggtaccctttatatgccgaagttaccattggtcggcctatctcaacaagcaaagtggcaaggagaagagaatggactgacataaggatagttcgtaggttgaggcctctcagagctcaagagaaaatgctgacaaagctcgagttttgtgaccggtatcaaaactacatacaagggaaaaatacatacaagcaactgtacagggttgccatggactgcaatggttccaaaattgctccgctgtcctttgtcaggaaaaatcatgcagtacccggtgataattgcaaccggccagacttttgaacgagtctacatcaaagagtggtttaccctgcatgggcatgtctgtccaatcactcaagagcctgtttatcaattgttctaaggaatcacagattacgtgattatttggaatattggcgggattcagtccaaatggtaacatccaaggtcacgacatgatgaagggtgtcttgactttccaaaggctactattacttgtgcagagtgttgctgctatgtaaaaagacaagaatgtaattgaattcatattttcagtgttgatttttttcccattgacatgtccagttgaccatggtgtttttttaatatttttttt

SEQ ID NO: 27694 - DNA, 1039 bp, Oryza sativa
  ref <308>: DATABASE ACCESSION NUMBER: AK103136
  ref <309>: DATABASE ENTRY DATE: 2002-08-28
gatactctctctcctcctcctcctccactccggcgactcctccgccgcatcccgagcaagcaagccgcgccgccgacgacctagctccccgatcgcggccatgtcgaggcgcggcgactgggtctacgagaacaacggcgggacgtgcgtggccatcgccggcgcggactactgcgtggtggccgccgatacccgcctttccgtcggatacaacatcctcacgcgcgaccactccaagatctgcgagctagcggacaaatgcgcactagcatcttccggcttccaaggtgatatcaaagctctgcacaagaacttggctgccagagaattgctgtaccagcaccagcacaataaaaggatgagctgccctgccatggcacaactgctctccaacactctgtactacaagcgattcttcccatattatgctttcaatgtacttggtgggcttgatagtgaagggaaaggatgtgttttcacctatgatgcagttgggtcctatgagaggactggctacagtgcacagggaacaggatctgctttgatcatgccagtgctggacaaccaactaaaatcacctagtccactattactccctgcaagagatgccgtcacacctttgtcggagacagaggcggtcgatttagtgaaggatgtgtttgcatcggcaactgagagggacatctacactggtgataagctggagatagttgtcatcaacaaagctgggacgaagcgagagtacatcgacctgaggaaggactagatcgacgattatgttcttcagttaccgcaaatttgcatcaacaaatttgcttcgaacattctccctgatacgccagggaatcatgccctgaacttgatagaaacgcctgtgctttcttgcttctattctgtaccaggattctcccaacctgctttgttgaactaatcgctgccttgatgcaaatgagaccgaacatatttattgtcagaaatatcacaatggtcgatatgttgaactgtgcttgtgtttgctcgatattcgatatgtttattg

SEQ ID NO: 27695 - DNA, 1085 bp, Oryza sativa
  ref <308>: DATABASE ACCESSION NUMBER: AK103137
  ref <309>: DATABASE ENTRY DATE: 2002-08-28
gtaagagttgggcgcgagagcaccgacgacccaacaacacaagacgaagcgagcgacgagacgacctaaccccaaagcgaaaaaagttgctgcatccttagcgcgcaagcgaaagcgagagggagctcgcgcgcgcgcgagggatcgatggatcgaccccaggtagttaccgagaactatgccaatcctgtgacgtgcctctttcatgtgctcttcaaggctggggcgctggtgttctacatcttgttttcgctcttcgtgaagagcttcgtcatcatattcgtcatcaccgtgttcctggcggcgctcgacttctgggtggtgaagaatgtgagtggcaggatattggtcgggatgcggtggtggaatgagatcgacgacgagggcaacagcgtgtggaagtttgagtgcctcgatggggaggctcttgctcggatgaacaaaaaggactcgtggctgttctggtggactctttacttgactgctgctgcatggatcattcttgggatattttcacttatcagacttgaagctgactaccttcttgttgttggagtttgcttgactctaagccttgcaaacattgttgggttcaccagatgcaacaaagatgccaagaagaatatccggggttactttgaaggtcatgctcaaaatgcgatcacatcccgcatcacatccaccctgcaatcagcatttggagtaatctaaaatccgagctccaaacagcaaggcccttttcgaatacaaccatgtaaaatctgtcaaaaggattagcgtgcattatcccatttccatacatttttgttgacccaatacacccagtaggttgattttgattggaaagacagagaacaccttgttagtactactgccttccaaaggagtaaaaaagaagtttttagccgagaatatgtcttgagtctgagtgtaccctttagggattttgaccctggaacctgtcttccaatgcagcttcttgttaattccatatattattaatcatttgctgtgctgtatcttaacgacaattttctgtaattttatgcattctcgcaaaatgcccgtacatggttacgtgattg

SEQ ID NO: 27696 - DNA, 2075 bp, Oryza sativa
  ref <308>: DATABASE ACCESSION NUMBER: AK103138
  ref <309>: DATABASE ENTRY DATE: 2002-08-28
ggtatcccatcaacttgcaactcttcattccagttcgcttcctccctcccacctcttctccacttcttcttcctcctcccctttcacactccacttctttggtctgctcttcttggtatccttctcctacgcatagttaagctccgagctcaggaggtaggttggtaggtttctattgcttcttctcagctgggagagtgaaaataccgaggagaaaaggcacatcaagattgtttctttcggtttcttgggcttctcttgcggcaacatgaagaagctcttcttcttcctcttcctgctgatactggccgcctcggttgttcacggcgaggacggggcgtacatcggcgtcaacattggcacggccatgacgtcggtaccggcgccgacacagatcacgacgctgctccgctcgcagaacatccgccacgtgcggctgtacgacgccgacccggcgatgctcgcggcgctcgccaacaccggcatccgcgtcatcgtctccgtgccgaacgagcagctcctcgccatcggcaactccaacgccacggcggccaactgggtggcgcgcaacgtggccgcgcactacccttccgtgaacatcacggccatcgcggtcggctccgaggtgctctccacgctgcccaacgcggcgccgctcctcatgccggccatccgctacctccagaacgcgctggtggccgcggcgctcgaccggtacatcaagatctcgacgccgcactcctcgtccatcatcctcgactcgttcccgccgtcgcaggccttcttcaaccgctccctggacccggtgctggtgccgctgctcaagttcttgcagtccacgggctcgccgctgatgctcaacgtgtacccgtactacgactacatgcgctccaacggcgtcatcccgctggactacgcgctgttccggccgctgccgccgaacaaggaggcggtggacgccaacaccctgctgcactacaccaacgtgttcgacgcggtcgtggacgctgcctacttcgccatggcgtacctcaacgtcaccaacgtgccggtgatggtgacggagaccgggtggccgcacaagggcgacccgtccaacgagcccgacgccacctccgacaacgccgacacctacaacagtaacctcatccggcacgtgatgaacaccacgggcacgccgaagcaccccggcgtcgccgtgccgacgtacatctacgagctctacgacgaggacacccgccccggctcgacgtcggagaagtactggggcctgttcgacatgaacggcatcccggcgtacaccctgcacctgacaggctccggcgtgctgctcgccaacgacacgacgaaccagacctactgcgtggcgcgggagggcgctgacgagaagatgctgcaggcggcgctcgactgggcttgcggcccgggcaaggtggactgctccgcgctgatgcaggggcagccgtgctacgacccggacaacgtcgaggcgcacgccacctacgccttcaacgcctactaccatggcatgggcatgggctccgggacgtgctacttcagcggtgtcgccgtgatcaccaccaccgatcccagccacgggtcttgcgtttacgctggaagtggtgggaagaacgggacgtcgttgctgaacggcacatcgctggcgccgtcgtcgaactccacggcgggggactccggcgcgcaccgggcgatcggggacgtctcgtcgttcgtccgcgccgtcgtcgcggcgctgctgttgagcgtcgtcctcctgttgtaggcagtgagacgagagtggttagtttagtaggcaaggcagcagagtccgtaggaattcatggggggattctttttttggtgtcgagtgggattggcctcggtgttatgggtgggtggtgatcattgagaacgaacaagatgatgtgcctgtgttcatctgttgctctaagatgttgtctgggaacttggtattgggtggtacgttgcctggaaaaggaaattggtactaggttgtatttgcagaaggtgtcagtgtttgtgcgctgaccacaatcaaaatcttcttctgagcc

SEQ ID NO: 27697 - DNA, 1162 bp, Oryza sativa
  ref <308>: DATABASE ACCESSION NUMBER: AK103139
  ref <309>: DATABASE ENTRY DATE: 2002-08-28
gatagtcgacccaacacagcgacaccaccagcgcccacctccatcgccgccgctcccctcgcctcccgcggtttacgctcgcgcgcaggagttcttggttggctgactgcgagtaagcgaatcatccggcaatcatggcgtcccgcgtcaggtttgagaattccagcgagattggagtgttcgcgaggctcaccaacgcctactgcgtgctccccgacggcggagcagagaacttcttcagcgtgttcgaatccgagctcgccgacgtcgtgccggtggtcaggacgtccatcggcggcacgaggatcatcgggaggatgtgcgtcggcaacaagaacggcctcctcctgccgcataccaccacagaccaagagctccagcatctgaagaacagcctgcctgatcaggtggtcgtccagcgcatcgaggagcgcctctccgccctgggcaattgcgttgcctgcaacgaccatgtcgccctcacacacccagacctggaccagggaaccgaggagatcatctcagatgttcttggtgtggaggtgttcaggcaaaccattgcaggaaacatcctggtggggagtttctgcgccttttccaataaagggggccttgttcacccgcagacgtcggtggaggaccaggcggagctgtcgacgctgctggaggtgccactggccgccgggtccatcaaccggggcagcgaggtggtggccgccggcatggcggtgaacgactgggcggcgttctgcggcgccgacacgacggcgacggagctgtccgtggtggagagcgtgttccggctgagggacggacggccgggggcgctcggcgccgacatgagcaggtcgctcgtcgtcagcagctacctatagagagaggaggagggaccggtttttgctttgggggattttcggtcagaattcaagaatgcttaaagccaaaaatatcccttgctgtatcttgagtagtgacagtaaatgttcgcgtggatcgatgcagttttgatcctgtgtcaaagatgaattttgtatctttgcaaatctggaacgatggaagtgcttttttgaagtcaaaatataatttagtattatgctcagctcaggaaagaatgttgtcttaaaccagaatattaaacaaagtgaaggtagccaacatatgt

SEQ ID NO: 27698 - DNA, 2191 bp, Oryza sativa
  ref <308>: DATABASE ACCESSION NUMBER: AK103140
  ref <309>: DATABASE ENTRY DATE: 2002-08-28
gagcgctgcgcctgcgccgctgccctcctagcccgaaacagcgcagccacgcacgcgtggaatttctagggttcaaatcaaatccaacctcaccttgtcctcctctcctagtctcctcccctccccgttccccaacaagcaaccctaatccatccatggcggttaatacttcgcgcgcatagatactaatcccatccgcgcgcggcctcaacatctcaacctccggccagcctcgcaatcctgctgctatctcggcggcggggaggaggtgatgagatcttcgggagcgcgtctcgcccggtcctaagatgcttgccggcggaggaagcagagttagcggcggcggcggcggcttcaacctcgcctcctacaagtacaaggaccccctcctcggacgcggcggccggagcttcctgttcggcaacacctggttcctcctctccacctacccggcgcgcctcctccacacagcggaccgccgcgcccccgccgccttcttcgcagccatcaaccggactccctgcgtgcgcacgcactgcacggggcagagcttgctgcagaggggcattgttatggctgcctgcggctatgcgtttcgacgagctgagctgggcgccgccaagcgccaacctgagaaggattcatctgtagggacccgaatctcatgcgtcgtggccatggggtcggctggcagcacgccgaggccagaggtctcgtttaggcatagaggggtggagtactgcaagaaggtcggcgtgagcttgaagtgccgcgagccgtggggacctagcagagcattttggaccaatgcgattgggccaagttacaagttgagcttctcggttgaaccatggcttcgggatttcagcacgtcttgtgtggcgccatactctgctggagccacagagcatcagttgtcacttgatgaggcagtacaggataagcagatggacaactccacagtcgggcctgatggaaaaccacgtgctcctggaccgctgaagctggtctcaggttcttgctatctgcctcaccctgctaaggaggcaactggcggtgaagatggccattttatttgcgtcgatgaacaggcaattggcgtggcagatggtgttggtggctgggcagatcatggtgttgatgctggactatatgctaaggagctaatgagtaactcaatgagtgccatcaaggatgaaccacaagggaccattgatccatcaaggtttttagagaaggcttatacatgcaccaaagctaggggatcgtcaactgcatgcatcgtcgctcttaaagagcagggtatccatgctgtaaaccttggagatagtggcttcatcatagtcagagatggtcgaactgttctcagatcacctgtacaacagcatgattttaatttcacttatcagctagagagtgggggtggcagtgatcttcctagttctgctcagacattccactttccagttgctcctggcgacgttattattgctggcacagatgggcttttcgacaatttgtacagcaatgagatcagtgctatagttgttgaggctctcaggactgggctagaacctgaagccacagcaaagaaaatcgctgcccttgcccagcaaaaggcaatggataggaacaggcaatcaccctttgcagctgctgctcaagaagctgggtaccgatactttggtgggaagctggacgatatcacagttatcgtatcatacgtgacaagcgcctcagctacatgatgcgagagcctttcctttttgatgtaatgtacataaccttgtcccagattaatggagctcgtatgcaccaggagtggatggctagagtgagctggcttgctggatggtgggcaatctcctgataccagactacttcctgtaactagatgagtaccaatccagagtaccgttgcattttagattctgaattggtggtggaaaaccatgcatatttttttcctcatgtagtactacaagtaaaagataattcttcgagaccatggtggttttctttggtaagaagaatcaccacttggtcgaaaacgagttttgttgtaagcactatgcaatgttgaatcctagttaacgtcgttcttgtcttcttgttctgcttgctgtgatgtcattctatcctttagccgtgaaacatattataataaacttacttgaattgagttttcagc

SEQ ID NO: 27699 - DNA, 1652 bp, Oryza sativa
  ref <308>: DATABASE ACCESSION NUMBER: AK103141
  ref <309>: DATABASE ENTRY DATE: 2002-08-28
gaccctcaaatctccaactccaacgaacacacagagggaggaatcggatcggattggatcccaacccaccccgcgccgccgctgccgcgtcccgtcccgaatcctccggcgagcctgacgtcggccgatgggcgcatcagtgactactggcttgcagatggcggcggcacgcccttgtatcccagcttgccaacgcctgctagggtcaagagcagcacttccttcatttggaagggcgcttagtacccaaactggcttcgcgagctgcagaaaaacagcatcagcagggccgtttgtttctctgaaccacaagaggtttgccgtgagggcgatgtctgcccagggactccccattgatctcagaggtaaaagagcatttattgctggagttgctgatgataatggctatggctgggcaatagcaaaagctcttgctgcagctggtgccgagattcttgttggtacatgggtacctgcactgaacatatttgagacaagcttgaggcgtgggaagtttgacgaatcacgaaagcttcctgatggatctcttatggagattacaaaagtctacccattggatgcagtttttgactctcctgaggatgttcctgatgatgttaaagcaaacaaaaggtatgctggatcttcaaactggactgttaaggaagttgctgaaactgtgaagaatgactttggtaccattgacatcctcgtacactctcttgcaaatggtcctgaggtaaaaaactctttgctggagacatcaagaaaagggtatcttgctgcagtttcagcatctagttactctttcatctctttactccaacacttccttcctataatgaatccagggggtgctactatatccttgacctacatagcttccgaaaggacaattcctggatacggtggcggcatgagctcagcaaaagcagcacttgagagtgatacaagagttctagcttacgaagcaggtcgaaaaggcaagatcagagtgaataccatatcagcaggtccattgggaagtcgagcagccaaagctattggtttcatcgagaagatgatagagtattcgtacgtgaacgcaccactgcagaaggagctcttggcagatgaagtggggaacacagcagcattcttagcatcgccgttggcatctgcaatcactggatcaactatctatgttgacaatgggctcaatacaatgggacttgcacttgacagccctacactatccacatagacgtgtaaactattctcctggatggttccgtttggtagcagatggtcattaggccccaactgaagctcaaaaccagatgctgatatgaaaatgaggaaagatggtagtttgaagatgcagactttctagaaagttgagttactgggttttcttcattttggtctatgctagcaatgagaattagcattgtaggagtacagtttgttgattgttcttatgttagtcctagcctcctaggatctgatctgaagaaagagaataatggaagttaaaaagaacaggaaatcgaagttctgcccattgcgttgtttgtttttcgtgtagtgttatctctcactcgggttttataaaagttgtaaaaatctataggtattataacgtgtggtacatgatcacacaggtttttatt

SEQ ID NO: 27700 - DNA, 1306 bp, Oryza sativa
  ref <308>: DATABASE ACCESSION NUMBER: AK103142
  ref <309>: DATABASE ENTRY DATE: 2002-08-28
gtgctggctactacagcagctgttggtatgatagctcaccgttttgcagtgctaccgggaccagcagcaattgttattgggagtgggttggctctgtcctcaacagctgttgttttgcaggtactacaagaacgtggggagagcacatcacgacatggacgtgctacattttctgtgttattattccaggatttggctgtggtggtcctgttgatattaatacctcttatatcacctaattcttcaaaaggaggggttggtttccaagcaatagcagaagctatgggaatggctgctgtaaaagcaatagctgctataacagccataatcgctggaggtcgtctgttgcttcgtccaatttacaagcaaattgctgaagataggaacgctgagatattttcagcaaatactctccttgttatttttggaacaagtcttctcacagctcgggctggattgtcgatggcactgggagcatttttggctggtctattgctagcagaaacagaattctccttacaggttgagtcggatattgctccttaccgtggtcttctgttaggtcttttctttatgacggttggaatgtctattgaccccaagttgcttctgtcaaacttcccagcaatctctgtgatattaggtcttttgattattggaaagacaatgttggttacatttattggtagagtatttggaatttccaccatagctgctgttcgggttggtctgttgcttgcacctggtggggagtttgcttttgttgccttcggagaagctgtcaatcagggtcttctatctcctcaattatcgtcattattatttctagtggttggcatttcaatggctcttacaccatggttagctgctggtggccagtttttggcatcaaaatttgagcagcatgatgtgagaagtttattacctgtggaaagtgagacggatgacttgcaagaccatattataatattgggatttgggcgtgttgggcagataatcgcacaactcctgtcagaaagattaattccatttgttgcacttgatgttcgaagtgatcgggtggcagttggacgcgcgcttgacctaccagtatatttcggggatgcaggaagtagagaggtactgcacaaagttggggctgagagggcctgcgcagctgctattactttagatacccctggtgcaaattatagagctgtctgggctttgagcaaatattttccaaatgtgaagacattcgtccgagcgcatgatgtggatcatggtgttaacttggagaaagctggtgcaacagcggttgtccctg

SEQ ID NO: 27701 - DNA, 3069 bp, Oryza sativa
  ref <308>: DATABASE ACCESSION NUMBER: AK103143
  ref <309>: DATABASE ENTRY DATE: 2002-08-28
ggaggaaaaatgaaaatttgtcacgtgcaatcctcgtgtcctaatccagccgccactgttcatgctcttctcctccgcccgcaacgcaaccgaaaccttctcctcctccgccgccgccaccaccccaccaccgctgctcgccggcgcgattttgcacactcgtcataccggagtgctcgctcgctcgctcgcggtagggataacccggccgggttaggattccgccatccaagggggtgggggaggggtgtgcttgaggcgcgtggcttcggtttttcgtgagaggaaaatccacggcctcgccgtgatcccggcggggattcgtggtctctgaggcactggtagagtggtaggtaggtaggtaggtaggtaggtagctgctgcgcgtgggagggggggagactccattaatctcgcgcgtctagggtttgtttgtgtgtttgtttgggtgggttccgtggtggtttcaatggcgggatctttcgtcgcggtcagggggaagcctcggtcgtccccgaagcggagcggcggcggcggcggcgcggatccgcccttgtctctggccatgccgaccgtcgccgatctccacaagacggctgagttggagaagttcttggttgaagccggcctttatgaaggggaggaggagtccgcgaaacgggaggaggttcttcgggagattgatcagatagtcaaggaatgggtgaagaaggtcactattcagaaaggatatagtgagcaaatggttaaagaggcaaatgcggtccttttcacttttggatcttacagactgggggttcatgggcctggagcagacattgatgcactatgtattggaccctcatatgtgaaacgagaggaggaattttttgtcatgctatatggcgcattatcagaaatggaagaagtgactgaactgcaacctgtacctgatgctcatgtaccagttatgaaattcaagtttcgtgggctaccaattgaccttctctatgccagtgtatctcttccagtaataccaccagattttgacatctctcaaggatctgtactttgtgatgttgatgaagcaactgttcgaagtctcaatgggtgcagggtggcagaccagattcttcgacttgttccaaatgcggagatcttccggaaaacactcagatgtttgaagtactgggcacagagaagaggagtttattctaatgttactggtttgctggggggtgtcagctgggccctattggttgctcgtgtctgccaactttatcccaatgctgtgccaagtatgctggtttcaagattcttcagagttttcacccagtggcagtggccaaatcctgtgatgctttgtgccattgagaacgatgataaccttggctttgctgtgtgggatccacgtaagaatcctcgtgatagatcacatgttatgcctatcatcacgccagcatatccatgcatgaactctagttacaatgtttcaactagcacattgagggttattatggagcaatttcagtttggtaataagatttgtcaggaaattgagcttaacaaggctagctggagttctttgtttgagcctttccaatttttcgaggcatatacaagatatctagtggttgacattgttgcagatgatgatgatgatcttcggctttggaagggatggattgaatctcgattgagacagctgactctaaagattgagcgggacactaaagggatgctgcaatgccatcctaacccatgtgaatatgcagatccttcaatacagtgtgctcactgtgccttctacatgggcttatcaaggaaagagggaatgaaaatacgtggtcaaaaatttgatatccgtggaacagtagacgagtttatgcatgaaattggaatgtatacacagtggaaatccgggatggatctagctgtcactcatgtccgtaagaaggagatccccctttatgtatttgaacagggctgccagaaaactcgtccaccaacgccaatatgtgcagagcagcaagaccagtctgataaaaatgactctgaagtttgcacaacgacagcatctctggtgggtcagctcaagcgaaagtatcattctgttggaggtgctgacgttgactcattcaaatctgttagaagggcttcagttagcccggcttgtgaggaagcatcaattcagttgcatgatgatgtgatgatgcaaattttggactgactaattgctccacttcaccacatggatctgaggggtccactgtatcaggcaacagctgtgcagcagttggcactattggtttggttgatgaaactagctgacctggctgcttgatgcccaatgttgaaaatgatccaattcaaacaattttagagcaggcgccttcagaaagtgtggttgagaaggatgaaagaaaactagaaggaattgaaagcttggcaagtagcaactgtactgaattcatggaggttgcagaagtggtcgctgggacgatccttactgagaatggtgatatacgcttaagtggacatgaagtgatctgaattggccttccagatggagatcttttcaggtgtggaaccggatgcatcccaggtttgaaagcattcttgagattttgtcaggagacggagacttgaacagatggcgcccaaatcttcatcaaatcatacgctgaaagaaaaaaaaggatgcctttcggttgctttcaggataagagaagctctgggattgagaaaccatggaagctcaaatatgaagttcttaggctaggctctggagttatggacttgtggttgtgggaggactgaggagactgagcgagcaccagtgtatcagttaaggtagtgcctttccttggctgctagttaggtctaggtcagtatatttggtagttttaaaagaaaaagaaatagaatgccattattcttggctatccattttcactgtgtccactttcctatacttgtttcagattcgttgatgaagtactggtggtacttcacagggtttgtgaaagattgatgggaaaaagtgatatctaattttgaatgaaggttgttttcatcctggattctacc

SEQ ID NO: 27702 - DNA, 2559 bp, Oryza sativa
  ref <308>: DATABASE ACCESSION NUMBER: AK103144
  ref <309>: DATABASE ENTRY DATE: 2002-08-28
gaaaggcccaaaacacccacacgcacgacttcttcgtcggcgtcgccgcgccgccgcgccgccgccgccgcctccggccggccggccgcacctccaccaccgcacagcacctctcagctctcacccgcggggagaagggaggaacacggagaaggctcagactcgccaatttcatggagattgcatctcggctgtgttgatgcgtcgcccatgcacccactcaccctctcctccaccgccctcctccgcctcatcaagtcgctctcgccggcggtgcgtagggcccacctgtcggcgtcctctatccactgcctcctcctcaaggccggcctcctccacgtcggcgcgcacctcccgacggcgctcctctccgcgtatgccgccctcggcagcccggatcacgcgcgcaggctgttcgacgaaatgcccgagcaaggccttgtcccgcgaaccgccatggcccgggcgcacgtcgcgtctgggcaggcggctcaagcgatcgccgtattcggggacatggtggcggatggtgtcttcccggacaatgtcgccctggcagtcgcgcttggggcatgccatggcgctggctcttggacggctaggaggaatccaggcaagaagatccatgctctcatcgtgaccagcggcattgagccagatgtgtttgtctccaccgagctgataagggtctacggtgagtgtggcaagctggcggtttctaggagggtgttcgatgacatgccgtcgaggagtaccattacatggaacgccatgttgcatcagtatgccaggcacgggaaagttgacacggcttatgagctgttcctcgcaatgccgaggagagatgttgtgtcctggaacacagtgatggccgggtactgtgttgctggccggtgcagggaggcacttggcttgttccgtcagatggtgtcgccgtcatcgtgtgcggtgcatcctaatgtgcctacgatgagcactatcctcggtgcttgtgccggcgcgggttgtttggagaccgggatttgggtccatgcatatattgagaggaacaggatgaatgatgatggctatctggatcggtgcctgatagacatgtactgcaaatgcggaagcatcgataatgccctacaggtgtttgagaaggcacctaggaagagggacctgttctcatggacaaccgtgatctgtgggctggcaatgcacggccgcgccactgatgctttgagaatgtttgacatgatgcaggataatggcatatgcccggatgatgtcacgcttgttggggtcctaaatgcttgtgcacatggaggtttggtagacgaaggtcttggctacttctactccatggaggcaaaatttagaatcacacccaagattgaacactatggttgcatgattgatcttcttggccgcgttgggcgactgcaggaagcatatagcatgataagaacaatgccaatggatcccaacacggttatttggggtgcattcttgagcgcgtgcaaagttcatggcaatatggaactcggcaagattgcggcagaagagctcaccaggttggatccagatgacccttgggggagagtgatgctgtccagcatgtacgcgaaagcacaggattggattggtcttgcccgggagaggagggagatgaacagcatgcaggtgaagaagactcctgggtgcagctcgatcgagctcaaaggcgaggtgcatgagtttgttgctggtggcagtcagcatcctcagtatgctgagatttgcagtgtactgcaagatgttgaagctcaaacaaatgtaggttgagacacacagccttctgttgagcttcttgtgctgccaggatttcagcacaggtgcaatttcctctgagccttcacgagaacgctccttgctttgcacgtcggcatgtggagaaccgaagagaagattagctaattagtcagttaaaatgcgaagaactgacaattttgctctgaatccaatataaacttcaatatgctgattttatgagctagggttcagagtttacacggcctagagggtggtgtcagcttgattggcataagaggagacaatctagtcggataaagacctttgagggagatggaatagattaatacatcttcatcgcttgattgctagtaatggatacatgacacccttttatagggcatggctttgactggacagctgatacatggaataataatctctgctcaacagctgatgaaatttcttttaacttcgtcaatttgaagcgacgaaagaatgttgaagctagtttacacatgcattcaaccttttcccgtgaaggcatactgagcattgcactcaggaacctctttcagatttttttagtgtattatttacccttttatgtgctttccgtgccttaatgtttgtcagagtgttgatggcatgggcacaagcacattctttatttgttttgttttcaagggttaatttgatccatgccactgcaaatgtggcaaatcaaaaaatatgccactactattgacgttatctattggtgccactataaattcctaaaattgg

SEQ ID NO: 27703 - DNA, 1182 bp, Oryza sativa
  ref <308>: DATABASE ACCESSION NUMBER: AK103145
  ref <309>: DATABASE ENTRY DATE: 2002-08-28
gagtctccccccctcgcctcgcatcccacgccttccccccccccattcgtcgcctcctgtcccgggggccgcgagcaaaacccccacccccaaatcgcagcctcgctcagctcgatctctctctcgtctcgccatggcccccagcgacgacctcgtctacatggccaagctcgccgagcaggccgagcgatacgacgagatggtggaggcaatgaatagtgtggcaaagttagacgaggggctgacaaaggaggagaggaacctcctctcagttggctacaagaatttgattggtgcaaagcgtgcggcaatgcgtatcattggatccattgagctaaaggaggagacaaagggcaaggagagtcatgtaaggcagactgctgagtatcgtcgcaaggtggaggctgagatggataaaatctgctgtgatgtcataaacattattgacaagtaccttatcccacattcctctggagctgagagctcagtcttctactacaaaatgaagggagattactaccggtaccttgcagagttcaagactgggactgagaagattgaagtgtctgaactgtcactcaatgcttatgagactgcttccaaaactgcgcagacagatctcactccaactgaccctatcagacttggtttagctctgaatatatctgtcttctactgtgagatcatgaactcacctgacaaagcttgccaacttgctaagaacgcctttgatgaagctgttgcggagcttccctccctcagtgaggagaattacaaagatagtacactgatcatgcaacttctgagggataatctagcactgtggaattctgatatggctgatgatgcagacgatattagggaacgaacagatacaactggtgctaaaggtgaccctgcagcgtgatggaggtgctaatagctggtagagtcgaagcataacaacaacaacaacaagggtgtggtggggtgcggaaggactaccatttactcactgttagtgttaggttctgtagtgtaggagttgagctgctgagtaaccctcgcttgtagtctgggcctgattcttcgacttcttgagcaacatcgtgtactaagcactcgctgatcgctcttttgcaagcattgtttttttttgggttactcttgatgatgattaggcaaaagttatctggttcatct

SEQ ID NO: 27704 - DNA, 2189 bp, Oryza sativa
  ref <308>: DATABASE ACCESSION NUMBER: AK103146
  ref <309>: DATABASE ENTRY DATE: 2002-08-28
gacccagtccaccgcgccgccatgccgcgccaccggagctcgacgcagaaagtggtgcgccgcgtccatcctccccaccaccaccacagtcctcctcctgtaacatcctgtgcccctttttcatcgtcatcggcctcctcctttcccccaccaaacccatctccagttctccaccatcacacgatcgagcatctcggggccgcgacttcttgcttttccgccctcgccaccacatcgacacgccgagatccgccgttgcatcgcctccaatcgagcccgctcacctcctgcatcaccagcaccactctccgcctccctggccgccgtcgcgccgggtcgagtgccgctcgcgtgcgcgcctccttccccaccgccgattggattcttgtgcagaaatccatcaattcctcaatcctcactagacacatcaacgctccaactccaggctagagaagagcagaaggcttgcggagaagaatggcttctgccgagcgcagcaagaagctgagggtcctgctcatgcccttcttcgccacaagccacatcggcccctgcaccgacctcgccgtccgcctcgccgcggccagaccggatgtcgtcgagcccactctcgccgtcaccccggccaacgtctcggtcgtccgatcagccctcaggctgcatggctctgcggcgagcaccgtggtcagcatcgccacgtatccgttcccggaagcggccggcctcccaccgggcgtcgagaacctctccaccgccggcgacgaaaggtggcgcgttgacgccgctgccttcgacgaggcgatgacatggccagcacaggaggcgctcatcaaggaccaatctcccgacgtcctcatcacagacttccacttctcgtggaacgtcggcatcgccgaggaactcgccatgccctgcgttcaactcaacgtcatcggtttattctccacgctcgccgtataccttgccgctgccgtcgtgaatgactccgattcggaggagctcaccgtcgcagggtttccggggccggagctacggatcccgaggtcagagttgccggatttcttgaccgctcatcggaatctcgacttagtggacaatatgcgcaagttggtacaagtgaacacgaggtgccatggcttcgccgtcaactcgttcttgttcctggacaagccatactgtgagaagttcatgtgcaacggcttcgcgaagcgcggctactacgtcggtcccctctgccttccgcagccaccggccgtagctagcgtcggtgagcccacttgcatcagctggttggactcgaagccgaaccgatcggtggtgtacatatgcttcggcacatttgctcccgtctcggaggagcagctccatgagctggctctcgggctggaagcctccggtaagccgttcctttgggcggttagggcggccgacgggtgggcgccgccggcggggtgggaggagcgtgtcggtgacaggggattgcttgtcagagattgggtcccgcagacggcgatacttgcccactcggcgacggcggcgttcttgacgcactgtggctggaactcagtgttagagggtgtgacggctggtgtcccgttgctgacatggccgctggtgttcgagcagttcatcacggaaaggctggtcatggacgtcctgcggattggggagagggtgtgggacggagcacgaagtgtacggtacaaggaggcggcgctggtgccggcggcggcggtggcgcgggccgtggcgaggttcttggagcctggaggggcaggggacgcggcgaggatcagagcgcaggatttcgcggcggaggctcatgcggccgtggcggaaggtggctcttcgtatggagatctgcgcaggctcatcgacgatcttgttgaagcaagggcggacgacggcgagtccgcgctgcaacctctgtaacctgtcgtttctctatacgataccgagacattcgttccagactccatccagttcatctcgttctgttgcgttcaatcaaaataaattacgatgtgatgtattgatacatgggatcacctatatatttgttgatataattttttaaaaaatttgacagatgtaattatagtataattgtgatataattacactgtaacttatatgtaacttctatgaaactttcaaaaatatcttgtaatataatattggtgaaacgg

SEQ ID NO: 27705 - DNA, 2106 bp, Oryza sativa
  ref <308>: DATABASE ACCESSION NUMBER: AK103147
  ref <309>: DATABASE ENTRY DATE: 2002-08-28
gggggagaagaaagcgtaagaaaaataaaaggagaaaaaggaatagagaaattggggaagagagctacctcgaatcgaagctgcgatctccacctggtgaaataggagaattgatgaattgctgagatttggtgattagagggacctttgctgctgaggcattgaggtacactaaaagcaagggtgtgaaaaaggcaacttcaattgaaaacatctacatatctaggaatgtcctgaaactaatgtgtggagtaaacttctagtttattgctgtccgtcctgttgggccacagtgcgaaggtcaggcagatagtcatccattactgatgggggactctggaaatgccagtcatcgtgatcacacgatcgacatactgagaaatgatgcaactttcccatcaacatctcatcaggataatcataataacttggatgagttgcaccaaactagagggcctctaaatgatgttcctcatgtcccagaaagttctgctagtgcaactcctgcatctatctcccgaaacgcttcttttgcaagaagagatcaaggacaccgtcaaccaaatcctttgaattctggcttctggatctcaattgagcttattgtaagtttaagccagattatagcagctattactgtcctgtcagtatcaaggaacgagcatcctcatgctcctttggctcagtggcttattggttatacgataggttgtgttgctactcttcctcacctttattggcgatttctccaccgcaatcggcagaacacagagcaagaatcaacaaatcaggtttcatctgaaagggacgtatatgagcctaattcttatgtagtagtttcgtctgctcatggatcagaagttgtggacagtggtaataatggtggagtagcaaggattgcaagtccaagggtctacgcattggttgcgtgcttcaaattggctctggattgtttctttgctgtgtggtttgttgttgggaatgtgtggatattcgggggccgtacttctctccatgacgctcctaacttgtacaggctgtgcatagtattccttgcattcggcttcatcggctatgccctgcctttcatcctatgtacaatgatatgctgctgcctaccctgcattatctccatgatgggcatccacgaggatttggattttaacagaggcgctactgcagaagcaatcgatgccttggtggcatacaagttccaatcgaaaaagtttcaagatggagaagcgggagaagataatggtggagtattggcagctggaacagacaaagagcgaactatttctgcagaagacgctgtatgctgcatctgcttgtcaaagttctcaaacaacgaagatctacgggagcttccctgcaatcatgttttccacttggaatgcgtcgataaatggctcaagataaacgcactgtgccctctttgcaaggctgacttaggcggctcgacgaatgctccggactcgagctccaggagcagccatgacagcaacaacagcagagtcaggaacgacgtcgagtcacaacagtagctgctctcatgccctttcccatgagcatggggatggaacacattcttgacaatctacaaattggcatgcaacttctcaagtcccttttttttcagacagacttgaatagagcatttgcctacactgctctctggtgttaacccagaaactcctatgaggctgaggctatggctatgagttgctgcctgcagtttgttctgaactgaagttgcctgtaaggctgtaacagattatagatggtgttggaatagttatcatgatgatcacctgagttgagcatattaggttgttgaggttaaccttcaaccggggaggttcaatgtaattatctccttgtttaggaaaaaatcccctcccctttgtatctgctcccttgtatagaaaacaaccatctccattgtatatcagatcaattttgcctgcattttgtaaattcagttagtaggcagagatctcccagcactcatcaagtgcttgagcaagtacagattagcagttgagtttattctactgtaatgcaacacttatagatgatattaccatgacataatcatttgagccc

SEQ ID NO: 27706 - DNA, 2210 bp, Oryza sativa
  ref <308>: DATABASE ACCESSION NUMBER: AK103148
  ref <309>: DATABASE ENTRY DATE: 2002-08-28
gcgcttcggcttctgctgcttccgcgcagaagaagaccaattcctcgcgccacctccaccaccgcctccgccgccgccgtggacgccgggatggatctgcggcggccgacgacgcgctcctcgtcggggggagtggagccgaggtaccggcaggtcggcttcttcaccaccactgccgagcccgccgcggcggcggcgtcgtcttcctcctccccgcgtggctccgacgtctacccggggtcgctctcccccgtgatgatcccgcccccgcgcatccccgaccacctcaccgccctttctcccgcccccgtctcgctcctgccctcctccccgccgccgccttcgtcatcccgcctcgacgccgcagaatccgacctcgacgacgacgacgacgacgacgttgacgtctcgtgggcgcggccacctccacctgcccttctcgaatcaaaggaaggtcttcctgatacacagaatgaaggtgctccagctccagccccagttcaacaaaaacagaagctttctaaagcagagagacgtgctattcaggaagctcagcgtgcagccaaagcttctgcaaaggaggcagggttatcaagaaaatctgtagccacagtttctacttctaatgctgcaatgtcaaaacaactcaaaactgtaaagacacctcccaagaaagatctgccccaacttacacctccagttgcttctgaaaagaagactagtgagcaccctcctgacagagatagaaagaaagatgttcctccccctcgtatgcagtttgataatgtacatcgggtggagaaaacaaagaagcattcactggtcaaccaagcagaagcacaaaacagagtcgaattgttcaggcatctgcctcaatatgtacatggaactcagcttcctgacctcgagtcaaaattttttcatcttgatctaatgcatccttctgtctacaaggttggacttcaatttttgtctggtgttatatcaggtggcaatgcttgttgcgtagcaatgcttcttgctttcagagaggccataaaagattactctacaccttccaccaaaactctcaaccgagatcttactgctaaaatcagtagctacgtgtcatttctcatcgagtgcaagcctctttcaatcagcatgggcaatgctattaggtttttgaagaacagaattgccaagctattgcttacattgtctgagtcagaagctaaagctagcctacagtctgacattgatcggtttataaatgagaagataataattgcagaccatgtcattgttagccatgcaatagccaaagtcagagatgatgatgtattactgacatacgcatcatcctctgttgttgaaatgatttttgatcatgctaatgagcttggaaagaagtttcgtgttgttgtggtagattctcgtccgaacaacgagggacaagcactattgcacagattagttgcaaagggcatcagttgcacatatacgcacattaatgccatctcatacatcatgcatgaggtcacaagggtttttttgggtgcctcttcgatattgtcaaatggagcagtttactccagcgttgggacagcagctgtagcaatggttgctcatgcctttggagtgcctgttttagtgtgctgtgaggcgtataaattgcatgagagggttcaacttgattctatatgctctaatgaacttggtgatccagatgttatttcaagagttcctgagagggaagatttgtgccaccttaaaaactgtacttataatgaaaatctacaacttctgaatcttaagtatgacactatgccttccgactatgtttctatgatcataacagaatatggaatgctcccacctactagtgtgccagtcattgtgagagagtaccgcagggagcacatatggatatagaacgaatgatattttccttgatgatttaatgagttggatttttaatatgaggcgagagcaaacaaccagccaacaaggaatgcagttttggatgtagataggacgggtcatgcaggaaaagtctcacatgtgaacagatgctagatccaaggatttctagctcgcttgttatcttcagtatttgtattcatactaaatgtgactgttgattagtacacagacttgttatcctgtactgaggtgaccagacatgaatttcaatggcacatcagttaacaccgcttttctacttcatc

SEQ ID NO: 27707 - DNA, 1294 bp, Oryza sativa
  ref <308>: DATABASE ACCESSION NUMBER: AK103149
  ref <309>: DATABASE ENTRY DATE: 2002-08-28
ggacgcgccgccgccgccgctcgccgccgcaccctcacgcgcagaggaggagcccccccgccggagcacctccacctgtttactctgagtgacatgtccccctcgccgctgctcgcccggccgccggcgccgtcgagcccgagcacgtacccgtccctcccgcctcgccggtgcgccccggctgtagcttccgcggcgctccgcgtggctccagccaccgcctcccgagccccattctccaggctggtgaccaagcggaatttcgctgcgtctgatattagagaagactactccactccgattgacgtcgttgccgatgtgaaaaccgagaagattgtggtgttgggagggagtggattcgttggctctgctatctgcaaagctgctgtctctaagggtattgaggttgtgagcctcagcaggtcagggagaccatcttactctgatccttgggttgatcaagttacttggctagcaggagatgttttctatgcaagatgggatgaagtgttagttggtgccactgctgttgtgtctacccttggaggattcggtaatgaagaacagatgaaaaggataaacggtgaggcaaatgtaacagcagtagatgctgcaaaagaatttggaatccccaaattcattttaatttctgttcatgattacaatcttccatcctttcttcttaactcgggttacttcactggtaagagaaaggctgaatctgaagtcctctccaaatacccaacctcaggtgttgtactgaggcctggtttcatttatggtaaaaggaaagtagatggttttgagataccactcgatgttgtaggacaaccattagaaaagctactttcctctgttgaaaatttcacaaaaccgctgagttcattgccagcttctgacttactccttgcacccccagtgagtgtggatgatgttgcctatgctgtgatcaatggagttatagatgacagcttctttggtgtcttcacgattgagcaaatcaaggaagccgcggcgaaagtaagagtgtaaactgggagtctttattgccaagatggaagattcaaacatgcggctccttattaagagatatccctgttctgtcttgcactcttgcagtcttagatcatacattcaatggttaaagttaaattcaaaactttgtacagtgtatgaatgtggtgcttgttccctccaagcagagaggaagaatgggctttgatggcaaaggccaatgcgcttcatttcttacgagatgcattgccaaatgaatgttcttctggagtacttgttt

SEQ ID NO: 27708 - DNA, 2347 bp, Oryza sativa
  ref <308>: DATABASE ACCESSION NUMBER: AK103150
  ref <309>: DATABASE ENTRY DATE: 2002-08-28
ggctgcccctccccctctctcgctttctccccctctccaggcggcgaccgggcctcgctcgattttccctgccggcgacaacctctcccgcgcgccctccgctgctctccgtcatctcctcctctcgaccctgccactccgtcgctgcagcaccatggtggagactcaccgaagcaccaccactgccgcctccaagtactcctccctgtccccttcctcctccgccgccaagcagcggcgcccgcgcccgcaaagagcgccggttcgtgcgaggatgcgttggcggccaagagaggaggagatagctggcggtcacagcggcggagtgaatctgcctggaacttgttcgttcttaatggcattctcaacagcactgcatagccagtggatcttgcttagatccgcttgtgctttgacgccggtctgctggtctttggttaaaaaatgccaggtctactttcttccctttcccttacctcttatgattctcttatgctttgtagctacaatggagcaatcgatttggtaaaaaatgtcagtcagtgcaagctacagggcttggccttgtgttgctggagcagaggttggcagcctaccactgctgtgttgtgtgctgcaacatttaatcaacaaacaagtactaataatctactatttatcttatgtgaactcctattatctatgctaatgttttttggttgcacaattggaactgtcaaaaatggggaagatgtgttggttgctgttctaatactatctgatcatcttcttctacaatgagaaaaaaaatgaagctggcattgcaactcttgcaatataaatcagggcaaccgtgcagccttcatatatcataatgtgtttccaaatttcgaataatatgtttcacataactgattatgatggctaggagaaatttggttctttctccagatgacgcagtaacgaagtaatgacctgataagcatgtatacaacagccaagcagaaaattgtatgtcattgttcacaagaactgatttggcaagcattttgtggaccttagaacttatatcacatttttgccttgctgcatctaacctgctccgtagaatcatttagccaatggtctgacttgtgctctctgctttctttgatgcctcaggaacattgtgctgacaaagtgacaattagtctagactgtagtcttggcctgaaacatatttccctgcaggcttagaatgcagattacaacccataacgtatatttgcaactgttgatacttgatttggtttacttctagaacataacctggaatttcttattaactgtaccgtcacccttttttacaaattgggtggaaagtgcttggctgcaaactaattgatcttattgttatgtgaaaggctgcagattctttatgcatggtcaagcagctgatagcaatgaaagtaaaagcagcgggagatgcaagtttttcttgactggcaggtagctgatgtttttctctcttcctctaataacctgaatccattaaaaaaagaaaacataatttctcttactatagttgtttattttacttgccaaaggtcctaaccacaataaaagaagtcgatagctagctacctcttgtttggctggtagtggtgttccctgagtaatgcaggcatgattgcgattgtaggagccttagggattgttcacttcatcgccgcttgcaaccctacaaattttttttgttcccaaattttgctaatttaacaagctaaatatgttcttactatctctaccctaccaaaattacctattttcttattttcaaattttggcccaactagctcctaccatttctaactttcatttcttactaatttaattaacactatgattatgttggactactaccatttctaactttcatctcttattaattaacattatgattatgttggaaatacatacctgtttaacatgtagttgccaggtcaacaatgatgcctttgttttaaagattctagattcgaaccgaagctacatcaagttacaaactaggcctcttgcagtatatgatcaagaataagttccactttcatgacatcaaatttgtatttcaactggggaaagtatttcatctatgcgaccaatgaggcatatatctatgcttttgacttcaaattcaacctgctaaagattcattggattgacttgagcatcaaaattagtgtaattagcaaagcattgctgagaatcattcatgttatatattttgcaccaaaatttgtatcatgttattgcttactattataatgaagcggttgtcctaagtgacattgagaatcagtgttatttgtaataacaactagatcatatc

SEQ ID NO: 27709 - DNA, 1655 bp, Oryza sativa
  ref <308>: DATABASE ACCESSION NUMBER: AK103151
  ref <309>: DATABASE ENTRY DATE: 2002-08-28
gtcgaggcagactggacgcggtcccgggcgctgctgccggctgccgccgcctcccctcggcgtctccttcccccgcggttggctacctcaaggggcttcctcagcgcggtcacctccctcctcggcggtgaagattgcagatattatgccgaacaagaagaagagaagtgcagaagatgctgctttgtatgtggagagtttattgttcggtgatgatcctagtgattctgaagcggatgtcgacaaatatgatgctagcgatttgaagggggcaataaacaaggatggctctagtgatgaagaggatttcacagaggaaggcctgagtgcaaaagaggtggccttaagcatatccaaatccatcgtgtcccttatctcttctgttgatggaaaggttctatttacttgctcagggacaatggttgatcatgtgggttctgcaacttggatactcacctctgctactctggttaggaaatgtgacaatgactatgatgcttatcaagagggtgatgttaagattgaagtacttctgcacaacaaaacaatcactgaggggttcttagcaatgtgcagtctgcagtacaatatagctgttgtcaccattgagccacaatttgatcttcctttggtgaaacttcatgacgttcctgtctgttattccatgctgtgtcggcctgtgatagctgtagctcgtaactttaagtcaaagactttactagtgagatgtggggagatgacccgtgaacgtagcgaattggactgcgatgagcttttggtctgcacttgtcctgttagtaaggttttcattgggggccttgtcatggatttggaaaggaggattctcggcatcactttttacgacaaggatactgttccattcttgcctattgagattgcggtgagatgcttggaacacttcaagaatttcaggacactcaaacaaccatctctttgcataagggggctaggtattcacgagttggaaatatgcaatttggaaaaaatatgctacatgtatcctgagctgtcttctggttctggaattgtggtagagaagatatcagaagtgttcccagaaaattgtagcagcattgaggctggtgatatcatctgtagtgttgatgacattgttctctactctctgtatcagcttacttcgatatttcttgataaaatggcggctgcaatgcccacgcaggataaagtgactgtccaggctgaaatacgaaggcccagagataacactaagtttgttgcaaagctgaatataggaattgcttgtggtgaacacaacaattgcttcaataacagatggcccctgcagtgaaagaagcaatattttggtgataaatatttgaactgatgaaggctgaccctttttttttttggggagagagagggggggggggggggttaacatgcaaacctatctgccatttgtctttgaagcctcggctttactccgaatttcttaaaccagaagtatcccaatccaacacaacacacatgcactgtggcattaatgggtaggataaaacctcctcagacagattgcttatggttttaattttcagctgtgaagatgagaactttcaaggggattcttgatccatttcaggcatgtgttgacatgaaaaggcctcttcactcct

SEQ ID NO: 27710 - DNA, 2317 bp, Oryza sativa
  ref <308>: DATABASE ACCESSION NUMBER: AK103152
  ref <309>: DATABASE ENTRY DATE: 2002-08-28
gacggcgagcgcgaggagaagcaaccgagccgaagcgagccatggctggtggggtcgtcatcggcgtcgcgccaccggcggcggcggaggagcccgagccgcacgtcgagcggctgccggccgacctcctcgcgcacgtgctctccctcatcccatccttccacgacctctccatggcggggggagtgagccggcggtggcgcagggcggtggagaggtcgctggcggggcggcggcggatgagcttcgcggggcagcgcaccggcgacgactccaccgcgcgcttcgtccgcgccgccgtcaacctccgagacctcgacatctgctggggctgccagatcactgatcaaggattgatcaggatttccaccgccgattgcgtcaagaacctcacctccatctctctctggggattggctgggatcaccgataatggcgtcatccagctggtttcaagagcgcattctttgcagcacctgaacattggtggaacatttatcacagatgaatcgttgtatgcagttgcaaaaagttgtataaatctgaaggtatgtttcttaatctggaaacactttcgtgtctgcaaattaaacatgacaaggtaccacataaaaaagatcctagaagtcaacaaatattctgtctgcagtatgtacgatgtgtttacagtagttgatactttgaaatgagtcatttcatggggaaaagaatgatggttgaactgacaaccttggcagattcgccatggcttgttctttgaattgaagtagacaaatgatgttgctggttgaggtttattctcaggttcgtgtggtcaggatatgtatgcagttattgctattatttctgctattatcttagtggctgcgatcctgctattatttctgcttaaaaacacccctgcctttagaattaaaagggtactgtagttcttttggaaaaaatgatgggggagctgtgccatgcttaattgggggataggaacctatatcaatatatcatcttgatgatcttgttctttcttgcaccatacctgggccatgtactactatataatctcaacctctatgataaagacttcaatactgatcagtgatcaattgcttaagaattatgcctgttcctgtcttgaagttgctcatcagttcgcgtttcaaaaaaaaaagagaaaagcttctcatcggttctggtatcagtaggagatgaggatatgttcaggaaagaagtaacatctttgagcgtgatcatcttaagatggtcatagaatcctaggcaactaaagccttctagtatgtgatcatttgtgctcatctgtggcatcttattttctttctttctttctttcttttttttaaaaaataaaaaagtcttctagatgttcttcacatagtatcagataaaattacctagaactatgccatcactatcacacttacatagccagcaaaatttacttacgacaattgaaatataactatagatttatcgtcatcaagagctagcgttgaaacacagcatggtgatactaatccacacgcttagattacttgaagtgtcgaactacagattaagtacgaattaataaaaacactgacaaagtacatatcaattctctagtcacatttgcacggtgttttttgcttgactttgttttggtgtggaaaaaaaaaagtcctaggttgcgagaaacgcccaaaagtcttccggctagctccataaggtggtgggctagacgacctggattcgaagtctcaccctttctaattatttgatattaggttatttcctaatattcgtgttttttttttgtgtggattgcgattgaccggcgatgcagagcatcatagtgtggagctgccgccacgtgacggaggccggcctggtggcgctcgtcggcggctgccggaggctggagtgcatcaacgtcggcgggatgagggtgccgccggagagcttcgccggacttctcgccatcagaccggcgctgcagatcaggtccatccctcagatcctcaatgccaacgtccaggtctcatgaaagacctgatgaaaaataccatccatttcataaagtaaatgggaaaaggaaagaaagattcgtgaatgattcacttttgaatcgaataagattcatgaaagggactcgtgctgtgtcttgattctttgtgttgtgttgatttattgttttattttacatgacccttgcgttgtgctgatgtgttgtgttgtgtatattttggcttgtacattagtgcgcatacagaaatacagaataaatgtatactatacagatttatggattcattattatttctat

SEQ ID NO: 27711 - DNA, 1490 bp, Oryza sativa
  ref <308>: DATABASE ACCESSION NUMBER: AK103153
  ref <309>: DATABASE ENTRY DATE: 2002-08-28
gtctccttgcgccatctcgctgctgaacagggagggacgctgatctccttctggcgagcagaggaggggagtggaggggatcctgttgggagatggctgggtttatgtcaagaggccccccaaatggttctgtttatgtatgcaatctgcctcctggaaccgatgagaccatgctggctgaatattttggcaccatagggttgctaaaggtatggggtcttcccagaaggacaaaaggactgggcgtccaaaaatctggatatatagggacaaagttaccaatgaaccaaagggtgatgcgacagtcacctatgaagatccgcatgctgcttcagctgcagtagaatggttcaataacaaagatttccatggaagcaccattcaggttcatatagctgagtcaaaaaacaaagacatgaatgatagctctgcaactgcaagtttgaacaactctgctgaacttggtggacaagatgaattagataacggggaaggcagagggagagggcgcggtgatggtccaggaaaagcctggcagcaagatggggattggctgtgcccaaatacaagttgtggcaatgtaaactttgcctttcgtggtgtctgtaatctctgtggagctgctcgccctgctggtgttagtggatcaagtgctggtggtggtggtaggggtagaggccgtggaagtgatgatgcaagaggaggcagccgtgctgctgctgctgctgctgttggtggtcctcctggactgtttggtccaaatgattggccttgcccaatgtgtggcaacataaattgggcaaagcggatgaaatgtaatatctgtaacaccaccaagccaggtcacaatgaaggtggtgttagaggtggccggggtggtgggtataaagaacttgatgaagaagaactagaggaagttaaaaggcgccgcaaagaggctgaagaggatgacggagagatgtatgatgaatttggcaacctcaaaaagaaatttcgtgctaaaacacaacaaactgaaaatgcaccaactcttcctgggtctggacgtgctggatgggaggtcgagcaacgtggctccactggaagagaaggcaaggaaaggagcagagatcagggcagagaccatgactacgatgaacgggatagcaggaacagagatagaggcagtcatggaagggagcggcgccgaagtagagaccgtgagaaggaaagggggagggacacgggcagagatcacagctatgagaggagctgggagcgaggaaccgagcgtgaccatgatcgctatagatgaatacgatggcagattttcgcatgttgcatgccgattttggttttatgatacttccgttttgctgctggatagctatgctgcttcagctagtgctgtcagatgggtttgcacattatttgtcttggcctgatggcagtttatatctttgaatgtttggatgcactggaccactaaactttgattaaatgtgctatgt

SEQ ID NO: 27712 - DNA, 3712 bp, Oryza sativa
  ref <308>: DATABASE ACCESSION NUMBER: AK103154
  ref <309>: DATABASE ENTRY DATE: 2002-08-28
gtggaatttctgagccaaggaatctcctcctcttctctctccttcgtgcttctccagtctccacctccctgggcgctgttgccccttccaaatctgcgccaactgcgccaccgtatcccggttttttttcccccgcttcttgtcgctgcgcccaatcaggaggcgaggctgctggcctcgtttcctccgcgcgagggttggggctttccgcgccgcgaccaagaaacggttcccggagcaggagcttggaggcttccgcgtggtctggtgattgagctcgggacgacgggaggtgtagttctgcgcgtcattgccgggctcaaggttggatacttggatttggtgcggatgttcctgtttgctactggttttggggacttttgaggtgggtggtggcgtcagatttgatcgcctttggtgatcgatccaccagtcctggggagtaggcctaatccctctatgaacaatacgatcggaaaagcagtctcctgttcagatgctgcccattaaactagtcccagtgttgtacaaagattctgtcttttggcagaatacagtgatcccctctgcttcttgtccagggcagaatacagttgctccaactcgatgttggtattgtaggagtggataagtcgtaaggatctttaaactgcacgagtggagcaaagccatggatatgcctacgccatccaaccgtgctggctgcaatggcaacaccggcggtactatgggcccttcagatgatccttatggtgcagcagccatgaaccttgattgttactcggagatttacagcccttcggtggccgaccaactattctcgctgctaaatgatccagctgcacaccggatgtttgctatgtggccatccatgggatcatcgccgtgtgctgctggtacgagtgaagatatgccgctcgatgcatattctggcctaggggaggcagtggaagaaccttctcaaataatgtcagtgaatccaactgaagcagagaaaacgggcaagagttcaggcgagcttggttcggacgatggtgcccatcaagggagtagcatggttccaaggtctgttgtgggcagttcacttgctgacaggatgctcatggctttgtccttgttcagggaatcattgggcagcggtgctcttgcccaagtctggatgcctgttgagcaggagggtcatgttgtgctgagtacatgtgagcaaccttttctactcgaccaggttcttgcagggtatcgagaagtatccaggcactttgtgttttcagcgaaggaggagcctggtctacagccagggcttccagggagggtcttcatctctggggtgccagaatggacctcaagtgtcctctactataataggccagagtatttgaggatggagcatgctctccatcacgagatacgtgggtcacttgcaatgccaatttatgaccccagcaaggattcttgctgtgcagtgtttgagcttgttacaagaaaggagaagcctgatttcagtgcagagatggacaacgtttgcaatgccttgcaggcagtgaacttgaaggctacaaaaggttctagcaatcagaagttttatacagagaaccagaaatttgccttcactgagattttagatgttctcagagctatttgccatgcacatatgcttccactggcccttacatgggttcctacatcaaatggtattgatggtggttatgttgttggaaaggatggtgccagtttttcacaatcagggaaaacaataatacgcatccatgaatctgcatgttatgttaacgatggaaagatgcaaggttttcttcaagcatgtgccagacgtcatcttgagaaagggcaaggcattgcaggacgagcactcaaatctaatttgccatttttctcgcctgatataagagagtacagtattgaggattaccctcttgcacaccatgcacgtaagtttagtctgcatgctgctgttgccattcgtctaaggagcacatacactggcaatgatgactacatactagaattctttctcccggtcagctgcaaaggcagtggagaacaacagatgttgctgaataacctctccagtacaatgcaaagaatatgcaaaagtctgcgaacagtttatgaagcagaagttgataatgttaatgctggtactgcagctgtgttcaggaaaaacaatgagagttgcttgccaactggacacacagaaagttcttcacatggtgatcagtcaatcacaggagcttcattcgaggatacatctttagctaacaagccaggagtcatggaacctgagttggctgagcaggtacagcctagttccataggacatgcagagaaaaagcgcagtacagctgagaagaatattagcttggatgttcttcgtaagtacttctctgggagcctaaaggatgctgcaaagagccttggtgtttgtccaacaactttgaaacggatatgccggcatcatggaatttcacgatggccatctcgcaagataaacaaggttaatcgttcattaaagaagattcaaactgtcataaactctgttcatggtgtggacagatccttgcaatatgatcctgctactggatctcttgttccagtagtttctctgccagaaaagttgacattcccttcttgcgatggtttgccaactccatcagtcggaaaaactgtggaagagaattctgacctaaaatctgaagaagggtgttctttgcctgatggatcgcaaagacaaagttgccagttgcagatctctgatgtgaagaaaagtaacgaggatgaatttcacattggcagtggtaacagtgatttttatggtgcaaatgccacagcaaaatctaattctgaggtcacacaaggtccattatgtcccactggtgcttttagtgctttgcatctcaagggaacagattgcaccaatccttctagctctctccgcccaagttccgaaagcaccagaaatcaaatagttggaagaaactcaccatctatacaacaagaagatcttgatatgcttgacaatcatgaagccgaggacaaggaccacatgcacccttctacctctggtatgactgactcttctagcggcagcgcatcaagccaccctaccttcaaacagaacacaagaagtgctcttaaagatgcagccagtcctgcactgacagttaaggcaacctacaacggagacactgtgcggttcaagttcttgccatctatgggttggtatcacctattggaagaaatagcaaagagatttaagctgccaaccggagcataccagctcaagtacaaggacgacgaggatgaatgggtcatcttggcaaacgattcagatctccaggagtgcgtcgatgttctcgactccatagggtcgcgaatcgtgaaactccaggtacgagatctcccttgcatcgtcagcagctcgggaagcagcacctgcttgcagttggcggcacatagctcataacatggtagggaatcctgggctcctgtcacccaaccctcaactgtaccatattacagtaggctagtctttgttgtagcaacagccaatagggtttgtattatgtatgcagtagggtatattatgcagtttagctagcatcaacggtggagtcatcatcccacacagatcagatcatattctcgcaagaaacaatgccattaaggtcttaagtttgttgaacacgagtacatg

SEQ ID NO: 27713 - DNA, 3548 bp, Oryza sativa
  ref <308>: DATABASE ACCESSION NUMBER: AK103155
  ref <309>: DATABASE ENTRY DATE: 2002-08-28
gactctccgtccctcggtaactgtaagctcctcatggcgagccggagccggtgaccgctggcggcggcggcggcggcggcggaggcggaggcgggaggcgagggttactcgggatacggcggcccgagaggagatggcagcaggttgcaacaggcgttccatggtttcagggctccacaccctccgggtgacgccgagccggggagtatcgccgtcttggagaacctaggcctcctatcgccaaatctacgcccatcaacgagacctatcagctgcactgggattacttccgaggggaataatagaaatggctggagagacttgatgaagatggataggtgggtgactgaacccttgggtgatagctggttgttggcaacttggcgtgcaacttggtacatcactcattacagggagaagcgcatgctagttgagatggaggagctcctctgcttcttcacggtagaacatcactatcacagaatttggaggcttatctggagcagtggctagaagtgaatggactgcaaatttgatagatccttctagactgcagctggaaagatgacctgctagaagaggcagatttaaggcttgatggatagaggagagaggaacctagtccaaatgaaaacacctataagtaagtagcagctggccacaagtacatgacgacctacgcactgctgctgctccaactggcctgcatcgtattctgcaagggtttggtttgtcactcactcctcatgagttagtttctgccagaaagagtgaaaatttaccattgttggacttttactgaggaatataaatagctcttatgggacatctaaattgtgctgtccttttttcagctttgcatataataggaaggtgatacacaatactcatagcgttggcatgaagcctattgcaattggacagtcgttcgttctgctactggtttttagtactgtgagtgttgtcatttgctctgatggaaatgagacagatcggctgtcactgcttcagttcaaacaggctatcagcctcgacccacagcatgccttgctctcctggaatgatagcacccatttctgcagctgggaaggtgtctcatgtagtttgaggtatccacgtcgtgtcacttcccttgatctatctaacagaggtttggtggggctcatatctccttcacttggaaacctgacatctcttgaacacctcttcctgaataccaatcaactcagcggacaaatccctccgtcacttggtcacttgcatcaccttcgatcactttacttagcaaacaacacgctacaaggcaacatacctagctttgctaattgttctgctctcaaaatacttcatctaagccgcaatcagattgttggacgtattcccaaaaatgttcatttaccaccaagtattagtcaactgatagtaaacgataataaccttactggtaccatccccacttcacttggcgatgttgcgacactaaatatacttattgtttcatacaattatattgaaggcagtatcccggatgaaattggaaagatgcctgtcttgacaaacttgtatgtgggtggaaacaatttatctggtcgatttccactagctctcacaaacatttcttctcttgttgaactgggacttggcttcaattattttcatggtggtctgccgccaaatcttggtacttctctacccaggcttcaggtgcttgaaatagcttctaatctctttgaaggacacctcccttattccatttcaaatgctactagtctttacaccatagacttttcaagcaattatttctctggggtggtgccaagttccatcggtatgcttaaggagctttccttgttgaatcttgagtggaatcagtttgagtcgttcaataataaagatttggagttcctgcacagcctaagcaattgcactgaccttcaagtgctggcactgtatgacaataaactgaagggacagataccatattcattaggcaacctttctatccagcttcagtacctctttctgggaagcaatcaactatcagggggctttccctctggcataagaaaccttcccaacctgatttctctaggtttgaatgaaaaccattttaccgggatagttccagaatgggttggcacacttgcaaatttggaaggcatatacttagataacaacaagtttacaggttttcttccatcatccatatccaatatatcaaacctggaagatctccgcctttccacaaatctatttggaggaaaaatacctgcaggcttgggaaaactccaagtccttcatctaatggaactttctgataacaatctccttggcagcataccagagagcattttcagcattccaacgttgacacgttgtatgctatctttcaacaaactagacggggcacttcccactgaaattggcaatgccaagcaacttggatctctgcatctatcagcaaataagcttactgggcatattcctagcaccttgagtaactgtgatagtttggaagaactacacttagatcaaaattttcttaatggaagcatccccacatcattaggaaatatgcaaagcttaacagcagtcaacctgtcttataatgacctatcaggatccataccagattctcttggtagattgcaatctcttgagcaactagatttgtcattcaacaatctggtaggagaagtcccaggcataggggttttcaagaatgcaactgccatacggttaaacagaaatcatgggctttgtaatggggcactggagctggacctacccagatgcgctactatatcttctagtgttagtaagcacaaaccatctcatctactcatgttttttgtcccatttgccagtgtggtttcactagctatggtcacatgtatcatcctgttttggaggaaaaaacagaaaaaagaatttgtctcgttaccttcttttggtaagaagtttcccaaagtttcttatagggatctagctagggcaacagatgggttctctgcatccaatttaattggcaccggaagatatggttcagtatatatggggaagttatttcatagtaaatgtccagttgctgtgaaagtcttcaatcttgacataagaggaacacagaggagctttatatcagaatgtaatgctttaagaaatcttcggcatcgcaacattgtacggattataacagcttgctcaacagttgattcgaaaggaaatgatttcaaggctttaatttatgaattcatgcccagaggtgacctgtatcaagtcctatattcaacctgtgctgatgaaaattcttcaactagccattttggtttggcccaaagggttagcatagtgatggatatagccaatgcattggagtacctgcacaatcataacaaaggaattattgttcattgcgatctgaagcctagcaacattctcttggatgataatatgactgctcatgttcgtgactttggcctttcaaggtttgaaatttattccatgacatcatcttttggttgctcaacttcttcagttgcaatcagtgg

SEQ ID NO: 27714 - DNA, 3974 bp, Oryza sativa
  ref <308>: DATABASE ACCESSION NUMBER: AK103156
  ref <309>: DATABASE ENTRY DATE: 2002-08-28
gatcctcgctacggggcggcgcggctgcggcggcagcggcggcggcggagaggcgatcaatcgacgcagacgaaggtgtactgatcctcctcaataagttggagcaggagttatcatggcaagccttgctgattctttcttagcagatcttgatgaactgtcagacaatgaagcctatcctgaagaagaaaatgctgaggcagtgggtatggatgaggatggcggtgaagatatgcttgaccttgagtctcttaattatgatgatcttgacagtgtctcaaagctgcagaagacacagtgttataatgacataatgcagaaagttgaggatgcacttcagaaaggcacagacttctccaatcaagggtccatcttggaggaggatccagaataccagcttattgttgatttcaatgctttgtcagtagatattgagaatgaaatcattataatacataatttcatacgcgacaagtatagactgaagtttcctgaactggaatcccttgttcatcatcctattgactatgcccgtgttgttcagaagattggaaatgagattgatttgacactcgtagacctggaagggcttttaccttctgcaattataatggttgtgtcagtgacagcatcaacaactaacgggaagcctctttctgaggagaatctggcaaaaaccattgaagcatgtgagagagcccttactcttgatgctgcaaagaagaaggtgcttgattttgtcgagagcagaatgggtcgcattgcaccaaacctttctgctattgttggcagcgctgttgcctcaaaactaatgggaactgctggtggtttgggagcacttgcaaaaatgcctgcttgcaatgttcagttacttggggcaaagaagaagaatcttgctggattttctagtgccacatctcagtttcgtgttggctatcttgaacaaactgaagtatttcagagcacacctccagctctgagaactagtacttgcagacttatagctgcaaaatcaactctagctgcaagaatcaattcaatcagaggtgatccaactggaaaagctggccggaacttgttagaagaaattcgtaagaagattgagaagtggcaagaaccgcctcctgcaaagcttccaaaaccacttcctgttccagactctgagcctaaaaagaagagaggaggccgtcggcttcggaaaatgaaagaaagatatgcgcagactgacatgatgaagcttgcgaaccgaatgcagtttggggtaccagaagaaagctcattaggtgatggcttgggggaaggctatggcatgcttggacaggcaggaagcgggaaactacgtgtatcagctgcgcaaagcaaacttgctgctaaagtggccaaaaaattcaaggagaagagctatggtagcagtggtgcaacatctggactgacgtctagtttggcctttacaccagttcagggaatagaactatcaaatccccagtcccatgggaacctgctaggcagtggaacacaaagcacttacttttctgagactggaacattttcaaagatcaagaggaactgagcagagaagttggtctcttcatcccacccactgcatccgttttacccacaggaaaggccaacggattgacactagaaggaattcatcaaactcggtgagctggcacttgagataggacgaagatgacaaggattttatccacagatgcatcttgatttgaggataaattaatgaatcaatcaagtaatactctggatgtgtttgggagctgatgctgaggcagaggcagaggtcgaggcagcagaatcatctccatggccttgacggttatcaggatgcttcacatctggatggttgggagctgagactgaggcacaggttgaggcagcatcagcatccaagcttccagcagcgtctccctggccttgacggttaccatgatgctccaaatctggatggttggggtgatcttttagagcaatttccaccttatctgggttgcagtcaccatgaagctcaaatgatcgcaagctcggaagacgctcaattccagaaatggatttcatctccctgaaactccaaacaattttttccaacttaggattcttgctgaagctgatatcggtaatgtcttcgccgtggatgagaagaaccttgagatgctggaactgtttttccccaagggtgagcttgctttggacatatgacctgcaccggagccggagataccgcagtgctttgagattgccaacaactgccatatcttgttctcctagatgagtgtcgcaaagagttaacttcgcaagtcggctgagctccttgatccaacgaggcagcccacatcttatgccgcatatgttcaggctctcaagaagctttggatatgagaatgctgtaggctctgccatgttcatgtcaggaaaattctcgcatccatctggtacttcaacacggattgacagagagatgagacttttatgcaacttctcaattgcctggactaagtgcttgaagctgttttggtcaccatggaagaccacacctagcttcctaagttgtagtagcttcccaatgtccatcagctcatcttctatgccagaaacaacaacatggcacaatacctgcagatttgtcatgcttccgatcccacgtggcatacgcactgtggaaaatttttcggtctgttcattttgttgttgggtgtatccagagagcaaatgttttagcattggaagaactaaagattttgtagcgaatgagctcacggttgtttctctgatgtccagtgtctccagctgctggagattttgaattttcttgggaagtttggtgagcttacttcttcgaaggttcagatacctgagctgaaatagtttgcagatgttctccagatgatggtcctttaagccatcacagccttctagatccagcactttgagcaatcccagccgagagaatgctggcaatgacttcagaaaaattgtgaggtcatccaagggctgatcataatgcttgcgcatgttccagcatgaggaagaactggggcgtggagaagcctgaagctctgctaggacctgttgcagctgactcctgttccaaatcgaaacacggtgtgcaaaatctggctgaagatctgcatccacaaagttatcctctctagcaaccttggtgatgaactttgagatcaagccattcactgcacagctcttgatcttcccagaagcgccgatgtctctctcaagaacaaatctttttgctaagagcacaccaaagcatcgctcggcttcatccagcgctgtctgcccgtttcgttctgtgtttatgctctcagcagcccatcttctgactaagcttgttctcctgatcatcatagtactgttgctactgcttccatcatcttggataaatagagagagatacgtcaagcagctcttgtaatggacaggcaggtcgttgtaccagaacatcaggatttgctgcatgttttcatccagcattaaaccatgtgaatcatgcaggctatcacacaagccctgaagttcttccctgttcctgttaggattggcataaaggacatggaggaatgctctgatgcacatgtcagtggagttggaggcacattttgacagtatggatctaatcacttcatccaggttaccgttgctgggatagttttcaaccagggagacagccttggcatggaagaagtcgatgagatgatccagaggagggaagactctgtcatgtggtgaacaggagtaggctacggcaggtgaccgggttgtcagcaggatggcactgtgagccgtgttgccggggaaagctgattcgatgccacgccatagcgattcatcaggaacatcatcaagaacaattaggtagctcttatctttcaggaagttctccatcatctcctgaaatgtcattccttgatgaaatcccatctcggatgccatcgtttctg

SEQ ID NO: 27715 - DNA, 1586 bp, Oryza sativa
  ref <308>: DATABASE ACCESSION NUMBER: AK103157
  ref <309>: DATABASE ENTRY DATE: 2002-08-28
ggccgtgcccggtcggatctaattaatttacctcctccacctcctcctcctccccccgatcggatcggcccggctcctcctcctccgccgccgccaccgccgccgcagataggagaagatggccgcacttgataccttcctctttacctcggagtctgtgaacgagggccaccctgacaagctctgcgaccaagtctcagatgctgtgcttgatgcctgcctcgccgaggaccctgacagcaaggtcgcttgtgagacctgcaccaagacaaacatggtcatggtctttggtgagatcaccaccaaggctaacgttgactatgagaagattgtcagggagacatgccgtaacatcggttttgtgtcagctgatgtcggtctcgatgctgaccactgcaaggtgcttgtgaacatcgagcagcagtcccctgacattgcacagggtgtgcacggccacttcaccaagcgccctgaggagattggtgctggtgaccagggacacatgtttggatatgcaactgatgagacccctgagttgatgcccctcagccatgtccttgctaccaagcttggcgctcgtcttacggaggttcgcaagaatgggacctgcgcatggctcaggcctgacgggaagacccaagtgactgttgagtaccgcaatgagagcggtgccagggtccctgtccgtgtccacaccgtcctcatctctacccagcatgatgagacagtcaccaacgatgagattgctgctgacctgaaggagcatgtcatcaagcctgtcattcccgagcagtaccttgatgagaagacaatcttccatcttaacccatctggtcgcttcgtcattggcggacctcatggtgatgctggtctcactggccggaagatcatcattgacacttatggtggctggggagctcacggtggtggtgccttctctggcaaggacccaaccaaggttgaccgcagtggagcatacgtcgcaaggcaagctgccaagagcattgttgctagtggccttgctcgccgctgcattgtccaagtatcatacgccatcggtgtcccagagccactgtccgtattcgtcgacacatacggcactggcaggatccctgacaaggagatcctcaagattgtgaaggagaacttcgacttcaggcctggcatgatcatcatcaaccttgacctcaagaaaggcggcaacggacgctacctcaagacggcggcttacggtcacttcggaagggacgacccagacttcacctgggaggtggtgaagcccctcaagtgggagaagccttctgcctaaaagctccctttcggaggcttttgctctgtcccattatggtgttttgtttcctcgctgctcagcattgtgattcttaacctgccccccgctgccatttatgcccatgcacgctactttcctaataataagtacttataagggtattgtgtttgaatattttacctagaggaggaggaggatttgttatctgttattgcttaagcttatgtaatggtgaaagaaggaaagatgctacactactttgagaagaagaaatgaaacctcctatgttttggtc

SEQ ID NO: 27716 - DNA, 2476 bp, Oryza sativa
  ref <308>: DATABASE ACCESSION NUMBER: AK103158
  ref <309>: DATABASE ENTRY DATE: 2002-08-28
gggtcgccgccgaggccgaccgagcccaacggacgcggtgtgccggtgcccggtgattcatctctcagcgcggcacgacggcacgagcacacgccgcggtggtagtgtagctgctactaccgagccgtcgcggcgtcgtctactttgccgcgcgtgccgatccccacgcgtacgcgcagcgcatgcaccaccagcagctcaaaccgggcgaggccgcctcgctcccgcgccacctcctcgaggcccacgtcgtcgcgctcgtccgccgatgctgcccgggcctcctcgcgctccgcgccgcacacgcgcgcctcatcaggctccgcctccctcgcctcacagccgccttcgcgctctccaagctcctcgcctcctcctcctcctcctcctcctcctcctgcggcgccgcgccatcctacgcccgcaacctgttcgaccaaatccccgagccgaccgccttctgctacaactccctcatccgcgcgctctcctccgccgccggcgccgccccggccgcggacaccgtcctggtctaccgccgaatgctgcgcgccgggtccccgctccccaactccttcacgctcgcgttcgcgctcaaggcgtgctccgtcgtgccggctctcggggagggccggcagctgcattcgcaggctttccgccgggggcttgaaccgagcccctacgtgcagaccgggctgcttaacctctatgccaagtgcgaggaggttgcgctcgccaggacagtgttcgatgacatggttggggacaagaatttggccgcgtggagtgccatgatcggcgggtactccagggtcgggatggttaacgaggctttggggctgttccgagagatgcaggcagcagatgtgaacccggatgaggtcaccatggttggtgtcatttcggcatgcgccaaggcaggggcgcttgatttggggagatgggtgcatgcttttatcgataggaaaggtatcacagtcgatcttgagctgagcacagcattaattgatatgtatgcaaagtgtgggttgatagagcgggcaaagggagtgtttgatgcaatggcggagagagatacaaaggcatggagtgcaatgatcgttggattggcgatacatggtcttgtagaggttgccttgaagcttttctcaagaatgctagagcttaaggtgaggcctaacaatgtcacctttataggtgtgttgtcagcctgtgctcacagtgggttagtgaatgaaggccgacgatattggtctactatgcaagaattgggtatcaaaccttcaatggagaactatggttgcatggttgaccttttctgtcgttctagccttttggatgaagcatattcatttgttactggcatggctatccctccaaattcagtaatttggaggactcttcttgttgccagtaagaactcaaatagatttgatatagtgcaatcagcatcaaagaagctccttgagttagaaccttgcaatccagaaaactatgttctactctcaaatttgtacgcatcgaattcccagtgggatagagtaagctatatgaggaaaaagatgaaggaaaacaatgttaatgttgttgctggctgtagttcgattgaaattaatggttaccttcacaagtttgtggtgagtgatgattcacaccctgaaataaaggagataagactgttactgagggaaatagctgaccgtgtggtacgtgctggccacaagccttggactgcagccgtgcttcatgatgttggtgaagaggaaaaagaagttgcactttgtgagcacagtgaaaggttagccattgcatatggtttgttgaagacaaaagcgcctcacgtcattcgggtggtaaagaatttgagattctgtccagattgccatgaagtagcaaaaatagtaagcaagtcatatgatagagaaatcattgttagggaccgtgttcgtttccatagatttgttgagggaagttgttcttgcaaggacttttggtgattcctcaaccgattgaatattgtcccacagctgggggtgagggatgtggcgttgaaactctttggagtccatcaccaaacaataatgactactgatcactgagcataatttggtatccagataaaaaggaatcctggaactgactggaccctcttgccctgatacaagtatacaacctctcaaggcatggttcatggctgcccgctctaactggtaatgcaactacaatgtcaattgttggcgtctacagcacagcaagacagattttccgttaattggagatcaagacagcctgttttaagacaccagaaagccaagaaaagaggctttccacagttctgatgttaactttacaataaatagaaagtgtcttgatgtcaagagttagttagaattctgaacaacagggcagataattctgaaaatattttttttatgtaaattgagaggaaaaacgataacaggggatgcctttttcc

SEQ ID NO: 27717 - DNA, 1727 bp, Oryza sativa
  ref <308>: DATABASE ACCESSION NUMBER: AK103159
  ref <309>: DATABASE ENTRY DATE: 2002-08-28
gatcgatgtcgatgccgatgccaatactcctcctcctcctgctcctcccccagggccagggccacggcggcgccggcgacatctgcatcgtgggcagcggcatctccggatcatccaccgccttcttcttcaccaactacaccaccgccctctccggtgcccagctccgcgtcttcgagcgccgcgctaaggtcggcggccgcctcgccaccgtcaccgtctccggcgatcacttcgaggctggcggctccatcatccacccacgaaatctccatgtgcgccgcttcgccgacctgctaggcctcgaagccaagaccgatggcgacgatgactggctcgggatttgggacggccaccgcttcgtcttccagacgctccgcccgctaccgcccgggacgtcctggctccgccgcaagctgcacacccttgttaactcgctgcgcctctttaagcgctatggtctctcgctgctcaagatggacagatttgtccaggaaatgttgcaaagatttatgctctactacaatggctttgaatcccgacctgtttttgacacggttgaggagatgctcaaatggtcgggcctctatggcctcactcgcaggacactagaggcagagctgcttgatgctggcctcaattctcaaactatttcagagcttgtcactgtgataacaagaatcaactatgggcaaagtgtgagtataagtggccttgctggtgcggtttctttagctggttctgaatcaggactgtgggctgtcaaagggggcaactggcagctagctgctggattgctcgaggctgctaacgccaccttgcatctgcaagaaggcatagactcaattgaatatgcaggggatcactatattctgaaatcgaataaaggtcttgaatataattgtgtagcaacggtggttgcaacaccacttgacgaggtgaacattacattcagccccccaatctccattccagcgaggaagacgcagcatacccatgcaaccttcgtgaggggcatcttgaatcctaaatttttcggtctaagctcggtatcagatattccaaagctgataggaaccatggaggtccctgagatcccgttttcaagcatttcgattctgaagaagtacagcgagcaggacatgacttacaaggtgttctcgcgtgtgaagctgaatgagagcttgctggaccagatcttcagtgggaggaaggagacgatccggataaactggcctgcgtatccacactatgaagctccagaagtatttgctccgataatactggacggtaaacagctgtactacgtgaatacattcgagagcgcagcgagcgccatggagacgggggccgttgcagcggaaaacgtggccaggctcctcattgcaaggctcaggctgcctctcccttcccgacctgctgcgcctgcgcccgatcaccacgaccagcgagcagatctgtaactgtgactctgtgactgtgatgtgaggaggtcatcgcatcgatcggctgtattgtttgtgtctaacatgtctggaacccacatgttcgtaggagtttttttaaataataaatcagccagcaggtatattactaatcaatactaagttctagagttaaaatgacatggaacccacatgtatgaatatgatgatgacctccttagtaagtaggagtatgttttcacagaaatgataagttatactaggctgaggctaagttagttg

SEQ ID NO: 27718 - DNA, 1182 bp, Oryza sativa
  ref <308>: DATABASE ACCESSION NUMBER: AK103160
  ref <309>: DATABASE ENTRY DATE: 2002-08-28
gcccatttcctcttcttcttcctccatatcacacggttttcgtccatcgatcatcagagctcgatcgggcgccatggatggggaggaggacagcgagtggatgatgatggacgttggagggaagggcgggaagggcggcggcggcggcggcgcggcggacaggaagaagcggttcagcgaggagcagatcaagtcgctggagtccatgttcgcgacgcagaccaagctggagccgaggcagaagctgcagctcgccagggagctcggcctgcagcctcgccaggtcgccatctggttccagaacaagcgcgcgcggtggaagtccaagcagctcgagcgcgagtactccgccctccgcgacgactacgacgccctcctctgcagctacgagtccctcaagaaggagaagctcgccctcatcaagcagctggagaagctggcggagatgctgcaggagccacgggggaagtacggcgataatgccggggacgacgcgcggtcgggcggcgtcgccggcatgaagaaggaggagttcgtcggcgcgggcggcgccgccacgctctactcgtcggccgagggtggcgggacgacgacgacgacgacggccaagttgatgccccacttcggcagcgacgacgtcgacgcggggctcttcctccggccgtcgtcgcagcatcatccgccgccgccgcacgccggtgccggcttcacgtcctccgagccggccgccgaccaccagtccttcaacttccactcgagctggccgtcgtccacggagcagacctgcagcagcacgccatggtgggaattcgagagcgagtgagcatccacactgttactactaggctactcatggatgatccatcgatcgccacagatcatgcatgccacgatcagaatttcaattcgccgcgaggacggatcaaacctgtactagatcggatcagagcaaacatagcagagaagatgatcagaccaacagtgatgtgtacatagctttctgtagatcaaaaccccaggcagtctcctctccatccagccatcagcatgcgaaaattctctctctctttttttcccctccaagtcttactcgacttcgatgttgttatcacaacaccacatcatgtaatccagcaacacgccgagatgaaaaaaaggttaaaaagcttatagagttcgttc

SEQ ID NO: 27719 - DNA, 1221 bp, Oryza sativa
  ref <308>: DATABASE ACCESSION NUMBER: AK103161
  ref <309>: DATABASE ENTRY DATE: 2002-08-28
ggtttacacctgctcatcttcgtcgcgactcggtgttggctccagaaatctcgccaagagaccataagcccaatccaaatctctccgcgtaggaagcagatgaagatcatcccggtcgcttgcctggaggacaactatgcctacctaatcgtggacgagagcaccaagtcggcggcggccgtcgaccccgtggagccggagaaggtgcttgcggcggccgcggaggtcggcgtccgcatcgactgcgtactcaccacccaccatcactgggatcatgctggtggcaatgaaaagatggcgcagtcagtgccagggattaaggtctatggaggatccctggacaatgtgaaaggatgcactgatcaggtggagaatggaaccaaattgtcccttgggaaggacattgagatactatgcctgcacacaccgtgccacacaaaaggacatatcagctattacgtcactagtaaagaggaggaagatccagcagtgtttactggagacaccttgttcattgctggttgtgggagattttttgagggcactgcagagcaaatgtaccaatccctttgtgtaacactgggctcgctgcctaagccaactcaagtttactgcgggcatgagtacactgtgaagaacctgaaattcatactgacggtcgagccagataacgaaaaagtgaagcagaaactagaatgggctcaaaagcagcgtgaagcaaaccaaccaactattccatcaactataggagaggaatttgagacaaacaccttcatgcgtgttgatctgccagaaatacaggcaaagtttggtgccaagtcgccagttgaggccctgcgagaagttaggaagaccaaggataactggaaaagttaataccgatgcaactgttactcttcgtctgatggtccggtctctcgaggttagctaatgcagaaagcttaccctgtaggtggggcttactgccgtgcaacgctttaagagcgatggtgttaggaagagttttaagctataaataagctccatgttaatgttcaaggagacatcatcagatgtgcatgttaatgctggtcttgtctatcactgtactacatgagctacgtatgaattttggagttggtcttgtttaactttgaaaagtcgaaaacgagaggtagtagtcatcctccagtttacatataaacgcataataagggtgaagtgaatcaagattattgtgcc

SEQ ID NO: 27720 - DNA, 752 bp, Oryza sativa
  ref <308>: DATABASE ACCESSION NUMBER: AK103162
  ref <309>: DATABASE ENTRY DATE: 2002-08-28
caaagaaattttctctgtcaatagatgattccatcaccagaaatggccataggaggagcaataatctgcagcgactaattcgaggcagcgtatagcatcgtggcacgcagaagcttggggatacactcttctttgcctccgtccagtcctataaatggtggagtcagggtggaaggctatgcattgtgctcatcatctcaaagcccttcatctccttgtcatcttgagttgcttgagcttatagatttcgacaagatgtcttgcagctgtggatcaagctgtggctgcggctcgaactgcacgtgcggaaagatgtaccctgacctggaagagaagagcagcagcgcccaggccaccgtcgtgctcggcgtcgcgccggagaaggcgcacttcgaggcggccgccgagtccggcgagaccgcccacggctgcggctgcggctccagctgcaagtgcaacccttgcaactgctaagaagccatttatttggctattatcatctgtgtgatcgtgtgtccgtgcgtgtgatgaatgaataataaaggagccatatctgctctggcatatgcatagtgcatatgcagtttgtgtgatcaatctgctgtttctgtccctgtgctgatacgcacacgtagctcctgaaactgtctggtatattaatttactggtgtgtttgtgtgggtgggtgtgatcgtatctgtatcatatcaaaccatgcatgtatctatctagtacctatagcttgctggttc

SEQ ID NO: 27721 - DNA, 1301 bp, Oryza sativa
  ref <308>: DATABASE ACCESSION NUMBER: AK103163
  ref <309>: DATABASE ENTRY DATE: 2002-08-28
gactctctctctctctctctctctctctctctctctgctcccgccggaggcaacggcggcggacgtgctcctctcctcccccgatcgccggcgagcgggttcgccgggggcggcgacgcggccggctcatcccaccggcgcccccacctcgcggcccgattcgaaattttgaaggtggcactttcagattgcctatgctagttcatttcacgctgcatatccaaaatggtgaagctgacaatgatagcacgtgttactgatgaccttccgttagtggagggattagatgatggtcgggatctgagggatgctgacttctacaagcagcaagctaaactgttgttcaagaacttatcgaaagggcaacatgaagcatcaaggatgtcaattgagactgggccataccttttccattacatcatcgagggccgtgtgtgctatttgacaatgtgtgactgctcttatccgaagaaacttgctttccagtacttagaagatctcaaaaatgaatttgagagggtcaatggcaaccaaattgaaactgctgcaagaccatatgcttttattaagtttgacactttcatacagaagacgaagaagttgtatttggataccagaacccaaaggaacctggccaagttgaatgatgagctttatgagaggtgagtgaaatgtccaataggttgatctctgatactagaatttatgcggagaaggcgaaggatctcaatcgtcaggcccttattcgcaagtatgcccttgttgccattgtgattggaatagtactgatgctcttttgggtcaagaacaagatatggtgactgagagtaacagtcaggcctcctgttacggtgctggaacttgagttctccgtgcaccccgaatcgattctggctcaacagatgctttgatggcttatcccgcatctgcccattcaagcgagtagtagtgtagctcttcttccgtgctttttgttttttgtttttttgttttttgcctattcctcccaacaaagatcatccaaactaaacccattgtagtataaaccctcgtcatcgacccagcctatcctgatggatgaagaagtccttgagttcttgcagcaccgatttctggctaattgttgtgtagagtcggcttttcgacctccgaaatggtatatgttctttgcaaactcaccatgtaagaattgatgtttcaggctgatggatggacaaggcacataccatccaaagctgcatggaatgtcttgtgactcagacgttttagctgcaatcgaatacgtccggttatgctgctgg

SEQ ID NO: 27722 - DNA, 1979 bp, Oryza sativa
  ref <308>: DATABASE ACCESSION NUMBER: AK103164
  ref <309>: DATABASE ENTRY DATE: 2002-08-28
gatccgcatctccccacccattggttccctttccaatttcacctcgcccaaccctatttatttatttatttaacccttcccccatctcgcctccattcttggagaccaagaagaagaaagaggaaaccacacccacctccatctccgcctccgccgccgccgccgccgaccaagtcgagggggagatccagcgagagcgaggaggaggaggaggatggcggtgatggaggagcagcaggagggagccgcgggggtgatgcggcggaggcccaagacgaagatcgtgtgcacgctggggccggcgtcgaggtcggtggagatgatcgggcggctgctccgcgccgggatgtgcgtcgcgcgcttcaacttctcccacggatcccacgagtaccaccaggagacgctcgacaacctccgcgccgccatggagagcaccggcatcctctgcgccgtcatgctcgacaccaaggggccagagatccgaactggatttctgaaagatggaaaacccgtacagttgaagaagggtcaagaaatcacagtttcaactgattatagcataaagggtgatgacaacatgatatcaatgagctacaagaagctagcggtggatctgaagccaggcagtgtaatattatgtgctgatggcaccatcactcttactgtccttcactgtgataaagagcaaggcttggttcgctgccgttgtgagaacactgctatgcttggtgagaggaagaatgttaaccttccaggagttattgttgatctcccgacacttactgagaaggacaaggaggatattcttaaatggggtgtcccaaacaagattgacatgattgctctgtcttttgttcgtaaaggctcagaccttgtagaggtcaggaaggtgcttgggaagcatgcaaagtcaataatgctgatgtcaaaggttgagaatcaagagggagtggctaactttgatgatatcctggcacaatctgatgcttttatggttgcaaggggtgatttgggaatggaaattccgatagagaagatcttttatgcacagaaggtgatgattttcaagtgcaatattcagggcaagccagttgtgactgcaacccagatgttggaatctatgatcaagtctccccgccctactagagcagaagcgactgatgttgccaatgcagttcttgatggcactgactgtgtcatgctcagtggtgagacagctgctggggcttacccggaactggctgtacggaccatggccaagatctgcctgcaagcggagtcatgcgtcgaccatgccgctgttttcaagtccattaccgcatcagctccaattcccatgagcccattggagagccttgcatcatcagctgtgcgtacagcgaactctgccaaggcggcgctcatcttggtcctgactaggggaggaacaactgctaggctggtggccaagtacaggccatccatgccgattctgtccgtcgtggttcctgagctgaaacagaccgactccttcgactggacctgcagcgacgaagctcctgcgcggcacagcctcatcgtcaggggagtgatcccgatgctgagtgcagccactgccaaggccttcgacaacgaagccactgaagaagctctcgggttcgccatcagcaacgccaaggcgatggggctctgcaactccggtgagtccgtcgtcgccctccaccggatcggaactgcatctgtcatcaagctcctgacagcgaactagtggcagacggcagttaatccacaccattttgctcggaggaaaatttttgctgggggattcttacttaccacgcatatctatagcttttgttgccatgatagtggcatttgcattcaggtgcaccttcggtgtttgctgttcatgggttaaccattgaaacagttaaattcgttattgctaccgcagcttatttcgctgcctctgctgctactagtattaaacttgacagccg

SEQ ID NO: 27723 - DNA, 2415 bp, Oryza sativa; identical to SEQ ID NO: 15066
  ref <308>: DATABASE ACCESSION NUMBER: AK103165
  ref <309>: DATABASE ENTRY DATE: 2002-08-28

SEQ ID NO: 27724 - DNA, 2958 bp, Oryza sativa
  ref <308>: DATABASE ACCESSION NUMBER: AK103166
  ref <309>: DATABASE ENTRY DATE: 2002-08-28
ggcccccacccagagccagcggactgcacctcgcagtccggcatggctggacagatgctaccgccgattgcgcttgttgctgtggccatctgtatcaccgcggcggcggcggcgaaggtgccggcgatatacgtgttcggcgactccacggccgatgtcggcaacaacaactacctgaccggcgccgccgtgccgcgggcaaacttcccgcacaacggcattgacttccccacgtcgcggcccaccggccggttcagcaacgggtacaacggcgtcgacttcttggctcttaacatgggattcaggcgcagccccccaccgttcctcgccgcgctgcagaagctctccctcgcctccaatggcctcaccggccaggtcagcagccgcctccgcggcctcacaaacctcacctctctcgatttgtccgtgaaccgcttcaccggccacctccccgacgtgttcgccgacctcacgtcgctgcagcatctcaccgcgcactccaatggcttctccggcttgctgccgcgctcgctctcgtcgctctcatctctccgtgacctcaacctccggaacaactccttttccggcccaattgctcgtgtcaacttctcctccatgccgttcctcgtgtccattgaccttaccactaaccacttgaatggctctctcccgcttagcctcgccgattgcggcgacctcaagtcactcagcattgccaagaacagcctcaccggccaattgcccgaggagtacggccgcctcggctcgctctccgtgctctcgctgtccaacaacaccatgcgcaacatctcgggggcgctcaccgtgctccgcgcctgcaagaacctcaccacactgatcctcaccaagaatttcgtcggcgaggatctccccgacgacggcattgctggattcgacaatcttgaggtgttggcccttggtgattgtgctctcaggggaagggtcccggaatggctgcatcagtgcaagagactggaggtgcttgatttgtcctggaaccaattggttggcaccatccctgaatggatcggtcaacttgataacctgacctacttggatctttcaaacaattccttagtcggcgagataccgaagagtttgacgcagctcaagagccttgtcaccgcccgacgttcgccgggtatggcgttcactaacatgccgttgtatgtgaagcataacaagagcacaagtggccggcaatacaaccagctctcaaacttcccaccgtcgttgttcttgaatgataatggtctgaatgggactatctggcccgagtttgggaacttgaaagagctacatgtgctggatttgagcaacaatgccatatctgggagcattcctgatgtgctgtcccggatggagaatttggaggttcttgatctgtcatccaataatctcagtggatcgattccatcgtcgctgacggacctgaccttcttgtcaaagttcagtgtggctcacaatcacttggtggggccgatcccaaatggaggacagttcttcaccttctcaaactcaagttttgaaggtaaccctggtctgtgcaggtcaagttcttgtgaccagaatcagcctggggaaactcctaccgacaatgacatacagcggagcggcagaaacaggaaaaacaaaattcttggagtggccatctgcatcggtttggtacttgtagtactgttgactgttatcttggttaacatctcaaagagggaggtcagcattattgacgacgaagaaattaatggctcctgtcatgactcgtatgattactggaagccagtgctattctttcaggattctgccaaggagctaactgtcagcgatctcatcaagtcaacaaacaactttgatcaggccaacataataggatgtggcggttttggccttgtgtacaaggcctacctcccagatggaacaaaggcggcggtgaagaggctatctggagattgcgggcagatggagagggagttccgtgctgaggtggaagcgctgtcgcaggctcaacacaaaaatcttgtttcactgagagggtactgccgctatggaaatgataggctgctaatctactcatacatggagaacaatagcctggactactggctgcatgagagatcagatggaggctacatgctgaaatgggagtcaaggctcaaaattgcacagggttccgcaaggggactggcttatctgcacaaggactgtgagcccaacatcatccaccgagatgtgaagtccagcaacattcttctgaacgaaaatttcgaagcgcacctggctgattttgggctagcaagactgatacagccatatgacactcatgtcacaactgatctggttggtacattgggatacataccgccggagtacagccagtcggtgatcgccactccaaaaggggatgtctacagcttcggcgttgtcttgctggaacttctgacaggcagacggcccatggatgtgtccaaagccaagggatcaagggacttggtctcctatgttcttcagatgaagtccgaaaagaaggaagagcagatctttgacaccctgatatggagcaaaacacatgagaagcaactgttttcggtccttgaggcggcgtgtaggtgcatcagcactgaccctcggcagcgcccatcgatcgaacaagttgttgcttggcttgacagcgtataatcattaataattctgtgtttttaagttgtctgctgttcattttggattgcaggctaggcctgacatgagaagtagacagagggtataggagcaatctgagtgctaataatctttagaagatgcagtctatgtgatgtacatagcttagtgtcgttttgttatattatatccaggaatagacctgtatctttgttttgttgtctgaaacttggccttccagcaaaataccaatcaagaattgagtacctagtactatgtggc

SEQ ID NO: 27725 - DNA, 2426 bp, Oryza sativa
  misc_feature (62)..(62): "n"=any one base of a, t, c, or g
  misc_feature (336)..(336): "n"=any one base of a, t, c, or g
  misc_feature (339)..(339): "n"=any one base of a, t, c, or g
  misc_feature (398)..(398): "n"=any one base of a, t, c, or g
  ref <308>: DATABASE ACCESSION NUMBER: AK103167
  ref <309>: DATABASE ENTRY DATE: 2002-08-28
gtctgtccccaatttcttctggaaaccctccgcggcacgggcgaaatggggcggcggcggcnattcgcgcagctcgccaccaccagcgacgacgacgacgacgacgcccccgccgccgacgcgccgcccaaggcgaagcccccgccgccgccctcctcctcctcaggccccaagaagccgaagcagcgccgcctttcctccgcggcggccgacgacgacgacgacgtcgaggaggacgacctgtagctcgaggaggaggaggaggacgagaaggatctggaggagatgcggaggaacgaggaggaggaggcggcgggaggagacgcagacccgccnccnccgccgccgccggggccgcaagcccaagcgccccgccgaggaggaggcgagggaggacngaggaggaggaggaggaggaggccaaggcggaggaggcccgcgaggaggagaacaccgaggcggtccccatcggggagcccgtcaagatcaccggcagggggaagaagcagcgcaagcattacacctccttcgagtacgagggcaacaccttcgagctcgaggacccggtgctgctcacgcctgaggatagcaaggagaaaccttatgtcgccatcctcaaggatataacagaaactgagggaagcttatcagtaactggtcagtggttttatagaccagaagaggctgacaaaaagggtgggggaagctggaaagcaagtgacacgagggagttattttatagtttccatattgatgatgtgccagcagagtcagttatgcacaagtgtgtagtccatttcattcctcaacataagaaaattcccagccggaaggaacaccctggattcattgtccaaaaggtctatgacacagttgcgaagaaactttggaacctaacagacaaagattatgaggataacaagcaacatgagattgatcttctcgttaagaaaacaatagaccgtattggacagctttctgatattgaacctgcagatgctcctggtgacaacaatgatcagctctcaaacaagcgaggactgcggaagagacctgtgcttcctatagatgtttcaagagatgatgctttagcaggcaaatcagagcaatttggaaaagcagagacacctggaagtgataagctaaagaattatgccacccttgtcaagtataaagctgttactggtgatcaatatcgtgataggtggcttgataaattagtggatactattccactaacatcaaaggaaagtgctggggcttctcatgctgatcctggtggtgctaccaaaagttcaactaatggttcatctgcaaaggaagacaatgaaaaatcttattcacctgatgtgattgtttcaataatggcctccttagaaagatctacttatgaagctcttggttctgacttccagaagtataaccagaaattgagacagttactgttcaacatcaagaatagccctgtactacggaaccggctgatgaacaaggagcttgatcctccagtcctgttaacaatgtctcctgacgaactaaaggttggcttgacagcagcagagagaacatctgaacctgaagaatcaaggaagttgcagatgactgatgcacgatgtgtaagatgtgcagaaaaggaagtaggtgtatctgatattattcatgctggtcatggagatcgctatcagctcgaatgtaacgcctgtggacactcgtggttctcgtccagagatgccatcacaaccctgacagtggatactccaacaagtgctggtgggagcgtgggcacggcaccatgggcaacagccaagttcgatgtcatggagaagcagctcacgagcccacgggatcatcagccggacaagccgttggccgatgctctccacaagagcgcggcaccgtacatgcccacgctggagaagcagaaatcgttcggcaagcacaagccagacgagccctcgtcggcgccagcagctggccacgagtagatcagacggtccacacgcactacacctctcgtcagaactagtagctagctagacacgattagaagagcacgcgcacccacggttcgcatcgtcattagggagtttcagagattacgtgtacagatgtaattgtgttttgtatgtcgtgtactaccatctgagggaggctgagcagatcagacaaactctaggttggcatcctcctgtcgcctctaatcgtgtgttttaacttgcatcactgtcaatgcatttcagtgctgtggacgcagccggtactcctgtacatcgtgagggtgtcaatggatcgtttttggctactgctcatgttttgtgtgtgtacttcccatcaattctgctcgagctgtatctgtttgtacccaaatgatacgggcatcaggagtatgcaacccaactatgaccaataaaaaaaattccctgccc

SEQ ID NO: 27726 - DNA, 2122 bp, Oryza sativa
  ref <308>: DATABASE ACCESSION NUMBER: AK103168
  ref <309>: DATABASE ENTRY DATE: 2002-08-28
ggtcgccgccgcgaatcacggcggccggcggcggcaatgcgggatggagaccaccgccgcgctggcggccgttgccgtcgacaccggcggtgcgaggcggcggcgcagcaatggaccgaaccggccggcgtgttccagcctcgcctgtggaggcggcgcgccgaaccaccaccagcaagccggccggcgtcgaagacgaacccgacatgttgtactccaccgttggcctccctccacaccgtccgccccacgccgcgacgccgtcctcgcggctcgcgcgcgccgcttatgttcacttcacccgtgaaggttgtcccgcgggcagcctgttcgatgaaatgcccaagcgggacagggcacgctctctgcggatgcggcattggcggccaagctcgccgctctgctcggtcagtgccaaaagcggtccagaaagacgagatgttcgacaaggtggtggaggctgctcttgattgccggaacgtccaagaatgggaggaagacgtttggagggtgagaatgcccgcgtagccgcattacgggtgaatgctggagaaacatggcaataatcagcaggagaaatgcatttcaacgcaagcatcgatatctatgtaagtgctatcatatctgaatgaactatatttttattccatttttttcctgtctacttgagtaactccattttttccatgtgcaactagtcatccagtgtcttatcaatttatcatcaaaggtatatatggtcaaggatcagatactctccatttcctaagatccaacaatttgcttggactatgattcgatgtagactactttgagaatggacgatgacaatgcggtgactaaaacagaggtactagaggttataagcaggctgctttcaaatcgaaggataagttctatggaagtagttcaagagtgcctgcaatgactctaagcaagaaagcgaagcagtctagcacgtttgatcacaagaatggtttgattgaagacccactatcttttgaagtggagaaaactaggattagtccatggagtcaacaagaaaaagaagtctttgtggagatccttgtcagttgtcacattcggaacaacaggactgaggagttccattgaagcaaagaaaaggttttcatacctagtaacatcaaagaggaaatgtgcttgtaagaagagtgcagctgcacttaatataatggatggatcaacagtagcaagtgctgagaaacataaaggcatggcaagtgggcaaagtagtagtgactgctctagaaaagctatcgtggccaagaagctcccagaggatcaaaatcaggatctcccttacgactcaggtgattctaattttgatcgcagtgagctgaatagaaataattggagtgaaaaagaaaaatcaaaatatgtccaagctatgagcatcaataggaagaattttacaatgatatcaagataccttggtacaaagtcaattaaggaatgagaaacttacttcaacaaggctcagcatgttcttgatttgattgtgatggaaattgaattggagagagatgattggactgaccctgaaaaatcaaaatttgtttgagttttcagcatctatgggaataattttgcaacgatctgaagataacttggtacaaggtcaattgaagaaatgcataacttgctattgttgctggaatccatcctggtctcaggtgagtgggaaacatacaccatcctgttattcctggggagcggagtaattttctgcagtgtgaagctgacgggtcaagcgcaaacaaaaacaatggggtgatagatcctgcagagtattgttctcctaagcagttctgccttcagtaatcttctgcttttatgtttttgctggagctctgtggatcaatcaacaggatgtttgtagcatttcctttgaggcctgggatcaatggaattgtcaaccaatatgaatttagcaagcacagacctggtatgtgattttatgcctttcgattattatcagcaatgcaacactaagttgttttttagaattttcaatgcaacactaaattgtcttgaaatatcaaaggatgtgactttggttccgtgataatatttgcaatatatctcgtttattaccgatacc

SEQ ID NO: 27727 - DNA, 1675 bp, Oryza sativa
  ref <308>: DATABASE ACCESSION NUMBER: AK103169
  ref <309>: DATABASE ENTRY DATE: 2002-08-28
cggagaaagcaaaatactagcggccgccaagaaattccccccctctcgccctcgccttctccgagtttccagcatatgcgccccggattttccttcagatttgcctagtttttctccctcgctcttgactcgcgatctcccgatctggaggagggcggttgcggcggtggtgtcgtttgcggattggattctttgtctgatctcgcgtggtgaggatcttgtctgtgtggattcgcgggtttcttggatcggaaagggggaatgctggtatcaatatgctagcccgcggagccgtgcggtcgctgttcgatcgtctccggccgccgccgcatcaccggaggaggaggagtagccccgccgcgattatgccggccgccgccgccgcccaccgtggctgcttctgcagcctcagccactcgaatctgtgcggggagggcagtgtgattcagaggaagggatttcttgatcttgggatgggtcggaggttcgcgccgggcagcgcattgggatccaagggatgcctgaattggcaggatcggggtagatccaagaggggggtggatggtggcgaggccgtgaggatcaaggcgcaggttctggcgccgcagcggcagctgctccatgacccggaggttctgccattggaggaggttgccacgaagagcttgaacgggaatggcgcgtgccggcgtgggaagccgctgggtttccccgagaacgctgcgccgacgaagatggtggttgctgttgatgtggatgaagttcttggaagctttcttgctgctctcaacaaatttattgcggaccgttattctttgaatcactcagtatcagaataccatgtgtatgagttcttcaagatatggaattgttctcgagaaagagctaattttcttgtccatgagttctttacaacccattacttccaagatggtatacatcctatccccggtgcccgagatgctctgcaaaatctctcttctttctgtagcttatctgttgtcacatctcggcaggatgcaattaaaaatcacacattagactggatcgacaagtactatccagggttatttgagcagatccattttggaaaccattttgctttgcaaggtcaatcaaagccaaaatcagaaatttgcagatcttttggtgctcaggttttggtagatgacaaccccagatatgctttagattgtgccgaggatggcatgagggtccttctctttgattatcacaactcgtacccttggtgcaaaactggtgttgacgaatcgcatccgctggtgaccaaggttcacaattggcaagaagttgaggaaaagcttctttcttgggtagtaccagagttctgacacttgattcggtaggagacgcaccatttgagagcagcagatgtctcggtagactttgatttctgaagaaacatgttcaacccattccagtatgtcagagttaaataggatctacaacatccctaggcaaagactggcagaatgaacgttgttgcagaatgaaggtctggaaggctccagttttagtatgtctcccatgtgattcaagacgaatttgcaatgttgacgactgaaaccgtcttcactcttcagttcttttaccctgctgtggggtgtatatattgacactgctataacctcaatgaatttggggaacgcttcat

SEQ ID NO: 27728 - DNA, 1783 bp, Oryza sativa
  ref <308>: DATABASE ACCESSION NUMBER: AK103170
  ref <309>: DATABASE ENTRY DATE: 2002-08-28
ggtcgtgagggcttctttttgacctcgttccctacccccatccatccacgcacgccgccccccacattgggagagacaaaaggcgggacgctgatcgagcttcttctcgggattttagggaaggtaaaacaacacgagtgatgctctttgtcattttcatcctggaacacatatggaggactatttttcacgcatcctagaccttgcttggcagttacgacatcaactgacacgattaatagaacatgtgtttgggtatattgattggatcccagaacatcatggattccagttctctccttgttataaaagatcattacctgccaccgaaagatacatccgtggagaggctcccttgctgtctgtcagtaattctacagaagaccagaccccaaatggactatctgaagccattgttgtcagaaaaggcttgtccagtatttgtcaaaggtttcccagttttttgcatgacttcagattgggacaacagttggcattccatttgcgagaactgtgcagtgctgttgcaagtgaaattcatgctaaactagctaggttcttacatcgtttctggacaacattacagggatcttctaaagatataggatggctaaaaagaacaaaaacattgccttgttcagttgatggtacagatcgtttcaaggagcttttgtatggcatcagaaatggcatgcatcatcttcctaacacactggtttacttattcatccctggactttttagtaatcacagtccactttacttcgtcaatacgaaaagaatcttttcgaagatggggcttacttgccatattgcaaggattcatagtgaggcatcagtggagaaaaatgcacgggaactgaaattatacattgaagagctgtactggggttctggtaaacaggtgttgctcctgggccatagcaaaggtggagttgatgcggctgcggcgctttcgttgtactggtctgaactcaagggcaaggttgccggactggcattggttcagagcccatatggtggcaccccaatagcttccgacatccttcgcaaaggccagattgctgataaggagacaaggaggatcatggaactgataatatgcaaactcatcaagggtgatataagggccttggaggatctcacatatgacaagagaagggacttcatctccaagcacaagctccccgtggacgaactgccgatcatctccttccacaccgaggccagcaccgccccgacgatgctcgtgacattgtcgcgcgtcgcccaagccgagctcctcccatggctcccattgccgcggttcctgtcgtcatcggagtacgccgaatcgttgctcgcctctctgaagctccccgtggtcgtgccggcctcggcggccatggccgtcagcgcgctccacctgaggctgcgctacggcgagaggagcgacggcctggtgacgcggcgggacgccgaggtgcccgggtcggtggtggtgaggccggagaggaggctggaccatgcgtggatggtgcactccacgctgagaaaggatcatgccgaggctgatgccactcagatgtgtgaagccctgatggccatgctcgttgagattgggaggaagaaatgctgctgatcataatcttacagtttcttggttaaattcaagtttgaacttgagtttaaaccaaacttaggatccaatgccataatcatagatgatgttacaaggcagtttacaaatacagaatgatttccactttgaaggaccaatataaaatgctctttatttcccccg

SEQ ID NO: 27729 - DNA, 1493 bp, Oryza sativa
  ref <308>: DATABASE ACCESSION NUMBER: AK103171
  ref <309>: DATABASE ENTRY DATE: 2002-08-28
gggcgcaacctctctcgacgtgctaatggcggcggcggcggcggacttcgcggcgagcaagcgggccatggcctacgcgctctgcaagcacctcagcctcgatccgaatacaatatccagtacaagtattgaagagagtgatattgccaccctgttctcacatattgtgaaatcgagtgaagatgaggtactgaaatgggttgaattttccagcaattttgttggaaaatgtggagaacagcatgcattgcttggtaatctgaatcaagacttgtcccagaaatcagttctgttgggtaatggttttaaaccatcagttgctgatattgttgtgtttgcaaccatacaagtttttgtgagtcatcttggtgaaaacgagttgcagaaatatccacatgtattgcggtggatggactatatccagaacatcgttgattttggcacaacagtacaaaaggttaacttgaccaaatctgtcttcgatccaccttctcatccaaagaaggcagataaaggtgacactgatccaagttcaaagaaagttgtttcaggacagaagaatgtgggcaaatcggatgcaaatgttgattccaagaaagctgcaccagagaataaagctcctgagaataaggcaaatcctactccagcaaaaaataacaaaccttctggggataaaaagaaagcccaggagaaatctgcaggaaaaccaaatgagggagttgcggataaagctccacagaaaactgcagaaaaggactcagaatgcaatgtcagtatcctgaatatacaggttggccttattcgcaaagcatggaagcacccatctgctgacagcctcttggttgaggagatagatttgggagatggcaatgtgcatcaagttgttagtgggcttgccaagttcttcagcccagaggaacttgttaatcggcatgttgtattaatcacgaatgtgaagcctgggaagctgcgagacgtaatgtctgccggattggtcttgtgtgcttcaaatcaagatcatacagttgtagagccattgattcctccagaaggagctaagcctggagagcgtatttcatttgcagggtttgatgggaagccagaagatgttcttaatccgaagaagaaacagctcgacaagatcacaccggatcttcacactgatggaaatggaattgcaacataccgaggggtacccttcactacatctgctggtccatgtagatcttctgttcctaatgcgagcattaagtgagcagttattttaacagattccaaacattgttgtgctataacacatgctaggtggatgtactatttcatcttgcatcttattacatgccctatcaactgttgtcagcgtagcgtccatctactgtgatatctaatagaaaattttgactagccaatgtgaagaacatttgtattaccttgcaccaaatgcaaaatccttcatgaacacggttgttttcaggcaggatttctgatgagtc

SEQ ID NO: 27730 - DNA, 2100 bp, Oryza sativa
  ref <308>: DATABASE ACCESSION NUMBER: AK103172
  ref <309>: DATABASE ENTRY DATE: 2002-08-28
gatcgcctcgtgctcctctcgaaccttccaaagtccaaaccctagtggtgacctcgcctcggcctcgaaaccctagccgcagatctcgcctctccttgccccgcgccatggacgacgacttcgagatgccgccgcccggcgccgacgacgacttgatgatgggggaggacgggatgggcgacttcggcggcgccgacgggccgccgctgaaggtcggagaggagaaggagatcgggaagcagggtctcaggaagaagctgctcaaggagggcgaggggtgggagacccccgaggtcggcgacgaggtcgaagtacactacactggcacactgcttgatggaaagaagtttgattcaagccgtgaccgtgggacacccttcaagtttaagttgggacaaggtcaagtgataaaaggttgggatctaggtatcaagaccatgaagaaaggcgaaaatgctgttttcaccattcctcctgatttggcctatggtgaatctggttcacctccaactattccagccagtgccacactgcagtttgatgttgagttgctttcttggacaagtgtcaaggacatttgccaagatggtggtatattcaagaagatactgaaggagggagaaaaatgggagaacccaaaagatcttgatgaagtatttgtgaaatatgaggctcggcttgaggatggcactgttatatcaaagtctgagggcgctgaatttactgttaaagatggtttcttctgccctgcgctggcgaaagctgtcaaaaccatgaaaaaagcagagaaagtgctccttacagttaagccacaatatggatttggtgagaatggtagaccagcagctggtgaggaaggtgctgtgccaccaaatgccactcttcttgttaatcttgagttggtttcatggaaaacagtcacagaaataggtgatgataagaaaatcttgaagaaagttctgacggagggtacagggtatgagcggcccaatgaaggtgcagttgttaaagtcaaaataactggaaaacttcaggatggtacaatatttacaaagaaggggcatgatgaaccagagccatttgaattcaagactgatgaagaggaggtcattgatggtattgaccgtgctgtgctaaacatgaagaatggcgaggttgctcttgtaacaattcctcctgaatacgcatttggttctactgagtcaaagcaggatctcgctgtagttccaccaaacagcactgtgatttatgaggttgagcttgtatcattcgtgaaggataaagaatcttgggacttgaacaataccgagaagattgagactgctggggcaaagaaagaagaggggaatgcattgttcaagctgggcaaatatgtcagggcttcaaagcgttatgagaaggctgcaaaattcattgagtatgacagctcatttagcgaagatgagaagaaacaatccaagcaactgaaggttacctgcaacttgaacaatgctgcctgcaagctgaagctgaaagattacaagcaagctgagaagctttgcaccaaggttctggaacttgacagccaaaatgtcaaggctttatacaggagggcccaagcttacatgcaacttgctgacctagagttagcagaggtggatattaagaaggcacttgaaattgatcctgataacagggatgtgaagttgacatacaagaacctcaaggaaaaggtcaaggagtacaacaagaaggatgccaaattctacagcaatatgttcgccaagatgaccaagcagccagccgaagacggcaaagctggatctggagctgaatcgaagcaaggatcggaacctgttactgctgcctaaggacaggacactcacgacatatcttagattttgtgtgctggctaatctttgttctagtggtgcactgatgagaaacgttacttcccaagttgtcgggcgatgatgattcttgttgagattttcaaattgcaatccatatttgaaccaatctcgtcaagtttctagtgtctttctggatgaatgttacaaccatacgccatgtcgggtccagtttgccacgaaagatcaagagagcattagctgagatgtg

SEQ ID NO: 27731 - DNA, 2143 bp, Oryza sativa
  ref <308>: DATABASE ACCESSION NUMBER: AK103173
  ref <309>: DATABASE ENTRY DATE: 2002-08-28
gagttgtcagtcacgcatcggcgccgccctccggccagcagcgactcgccgacacatcttcaaagagtcccgccgtcgtatgcgtggctcccctccccggcctctcgtctcgtgggaggtctggatcgaccgcttcctccgctcgtcgcggcgaatccaaccaacgccggcgtccctccgcgccgcagcttcctgtgctgaatctcgccgctccccgagtccgggaacgcacggagcgggcgcggcgagcggctggcaccttggttcaaatctcgccgcgaaacttctagtagcaggcagcggtttaaatctcgaatttatccattttggtgttcggctgagcccccatggccgacgctaggtccgcccctgaatcgctgccgcccgcgtttctcgagttcctccaggagaatggcttggacccaatgatgtattccatggtcgacaccatcccacgatacataaggctaaaaccaggcatggagccccatattccagagattcagagcgagctgacgtgccatctcaacaaggtttcatggctgccagatttctacgcaattccgcctcaagttcagattgctagctccatggcctatcagcaaggaaagatctatggaattgatgcagcttctggagctgctgtcttagcacttgatgttcaaccaggagaacatgttctggacctctgtgctgccccaggtgcaaagctttgcatgcttgcagatatgcttggaggcagaggttctctgactggcgttgatgttgcaaagcaccgtcttgcggcctgtcgtacgatgttgcagaagtattctctcggagatcgttgtcgtctctttgttgccgatgggacttcattttctatattacctgtgaactctagcttgggtaatggagaaggatcaacttgtcataaggacaatggaagtacattgtcggaatggacttcaaagagatcgtggaaagaccgacaaaagtctaaaaaggcaagaatggcgggttcacctcatctaacatcaacttcagaacctgaactgatatactatggcaaacattcaggattagttggattacgcaaatgtgatgctattcgtccatcagctgatgatgaagcccagacatctggctatgacaaagtcctagttgatgcagaatgtactcatgatggatccataaagcacatccaaaaatttgagttctggggatggaaaaccttagatcgtcgtgtacttgatgcagaaagaactgatgacctgcttcatcttcagttacgccttctcactaatggttttaaattattgaaaactggtggatcactagtatatagtacttgcaggtgagtaatctcttcacatgcaattccaatatttgatgcctcctcaatcgcttcccagctgtgtagtcaccttttcctattgcatttcgtgtcttacttaactactgatggcttgcgttgaaatagcttgacagttgcacaaaatgagaatgtggttcaacagtttctttgcaaacactcttcagcaggtacagaatagccgtgttcctcatttcagtattatgtatatcccttatatttttactttgaagatgaatattgttatttttctcaaatggactgattaaattgattgtggtacttctagtcaggaaatctttagtagtgtacttgttctcacttcttggtgtggttaagtgaaccttacttataacaagattatttagtttgtcttggttcattgaagttgtcaaagttcaacagatctgccctgatgaccttctgggatttcttttgcaaacatgcagagctacaaaagattgattcagctgacagttggccttgcagaagtggcagcatcttcaaaacattgcgatttgatcctgcaacttcacaaacgagtggcctttttgttgccaagttcactaaattacagatttagagcatatctgatcagtctccatgtagttctaaagatgtgcatttaactagtatatgattccatgtgcacgttagatgttcacaagtaactgtatgcttcaaattcccggagccatcactgttatggtttgcgaagcaaagtggtgcaaactgtcagctatgcgaatctaaacttgcaatttggaaggtaaaagcttggtttcagtt

SEQ ID NO: 27732 - DNA, 2025 bp, Oryza sativa
  ref <308>: DATABASE ACCESSION NUMBER: AK103174
  ref <309>: DATABASE ENTRY DATE: 2002-08-28
gagatagaggcacatacgcatacgtatatagcttgctaccttgccttctctgtgtatgtttcggcgtgtgttcttcttcttctcttcttcctcctctcgattctgaagaggttagctttgatttgatcgatcgatgatgagcgggagcgagagccagcaggagagggagcatcgtcagcagcaggagatgaacatctcctttgggatgatgatgaaccatggccaccatcactacggacagcatcagcagcagcaccatcatcatccgcctccgtcatcgtcttcctcttcctccatgcatgccgctgccgcaagcttcatgagcagcaaggaggcatctgcaggagcttatgatcatctgggggagctggaccaggccttgttcatgtacctggatcatggcagccatgcggcgtcgcaccaagaacaaaggcagaccctcaacatcttcccttcccagcccatgcatgtggagccatcacccaagggagagattagtttagtgctgtccccagcagctgtgggaaccaagatggcgaggtcacctgatcatcaccaccaccatcagcagcaagcagcagcagccatggaggagttggcgacagggagcaggagacaggatcaccaccacctgcagcaccaacctttcgctgctgagcctgcagggatcaacagggatgtgaagccggtgacagccaagaaggatcacaggaggggtgtatctactggtgaacgcgacccaaagacgctgaggaggctagcccagaacagggaggcagcaaggaaaagcaggctaaggaagaaggcttacatccagcagctggagtccagcaggatcaggcttgctcagctcgaacaggaactgcacaccgcgagagcccagggggtgttcttccccggcagcggcgggctgatcggcgagggaggcagcgggaagggggtcctgctgggcgggatcgatggcgtcggcggcggcggcgggggggggctgagctcggaggcggcgatgttcgacgtggagtacgggaggtggcaggaggagcaccaccggctgatgtacgagctgcgggcggcgctgcagcagcagctgccggagggggagctgcaggtgtacgtggagagctgcctggcgcaccacgacgaggtcgccgccatcaaggacggcgccatcaggggcgacgtcttccacctcatctccggcgtctggatgagcccagccgagcgctgcttcctctggctcggcggcttccgcccctccgaggtcatcaagatgctggtggcgcacgtggagccgctgacggagcagcagatcgtgggggtgtacgggctgcagcagtcggcgctggagacggaggaggcgctgacgcagggcctcgacgcgctctaccagtcgctctccgacaccgtcgtctccgacgccctcagctgcccttccaacgtcgccaactacatgggccagatggccgtcgccatcaacaagctctccaccctcgagggcttcgtccgccaggctgagaacctgaggcagcagacgctgcaccggctgcagcaggtgctgacgacgaggcagatggcgcggtcgctgctcgccgtctccgactacttccaccgcctccgcaccctcagctccctctgggtcacccgccccaggcacccgcctcacgaccaccagccgccgccgcactccgccgccccccacacctgagatcaccgccgccggcaacgcatgcaaacaccgtagctcttagctagcagcttagagatatcgagagatcagaaattaagcgatcgatcgagagaggacgacgactgtgaaaccccccatggaatggatggatggatggatggatgaaccgatgtgtactgtgtttgggcattaaccctttgatgtaaacaaagtaggcgtgtttgactgcttggtcgatcgatcgagatctctgtcgataggatcttgaattagcggatcttacctcagcagctggttcatcaagtgttgatgcagctcaatcaaactttttcctgacg

SEQ ID NO: 27733 - DNA, 2376 bp, Oryza sativa
  ref <308>: DATABASE ACCESSION NUMBER: AK103175
  ref <309>: DATABASE ENTRY DATE: 2002-08-28
gattcaccttcatctcaccttcccttctctccacgcatctcctctctcctctcctctcctctcctctccccggcgaagccaccgccgaccatctcccgccgcctccccaccccaccccacgcgcgcccgcgccccggcgagcactcccggaggcgcgccgagggtggcctcctcctcttcctcctcctcctcttcctcttcccgacctccccctcctcgcgcgcatggccggcggcgagagaacgctcggagcgacgacgcggccgcgcccctcccgaccccccccgtcgcctcccggctcgaattgaagtgctaacagcaagcagtttggtttggaagcaaatttgggggattattatttttttggtgggaaatttgagtagggatctgtaatagcggaaaaaggaggagcttcggtggtgaattgagggggtttctccatggtggggaaggaattggtggtgagaaagaacggccccgtggacatccgcgagattgccgccaaggcgacgctgagggaggtccggcagaatgggcacacctacgttgagctccgccgtgtcggcaagcgcgtcatcttcttctgcaccatctgcctcaccgagtgcttcagcgacaccgtgctgtttgatcacctgaaggggaacctgcactcccggcgctacgcggaggctaaggtcacgctgttcgggcccatgccatggccgttcaacgacggcgtgctcttcttcaacaactcgcgcgagaaggacccgctcttgctggactcgagctcgcagaacaccagagagctggctctggttccagccaacgacactgaagtgacttcgaggttgagagatgattctagctctcgcaatggcgcaaaaggcacacgccgtggtgcaaatgcgcatggtaatggtagaactgcttctgtatctgaagatcatgtgctgtcaaaccaaagtggaactgacggtcctctcgttattcctagtgtattgctaaaggatgttgtttcggatttgcctgtgcatcttttgggatatggaaatattgcatacaggttatgggaagctagcaaaggaagtaaaaagattagcaagatctggtgtgcttgggtaggacaggatggctcccatggcttggatgagtgtgacacctatgagcaatctgactttgccattgtcaacttctcttatacaattgagttgggcaggaagtggtcttctgatgatcaggaccttcctatctctgctggatctttcttcgtgattgatgatgctggacaccgtggaaagagaagaaagaagtcattttcagatcaagaagcatcttcagaggagtcgaatgagcaaagcagctccgcccatgacaatagccaagctatcataacaggttccccgacaggtacttcacacaatcttcaagttggcctcttatccaccaaatctatgaggagggagttgcgtaagcagaagcgccttgctgctgagaaagcttgtgatatttgtgggcgaccaatgcttcttgaaaaggatgtagctaccttgctcaactgcaagacaggaaatctagcctgcagcagtagaaactcaagcggggcatttcatttgtttcacacttcttgccttgtgcactggactattttatgccaatatgagatgctagcagacaaaattacaagcaagggaaaaagcaatcgaggaagaaaggcaaaaaatgcacctaagaaaataacatccatcctttgcccagaatgccagggtactggaatccatgttgagggagatgaactggaaaaaccaaccatttctttatctgaggttcagacttcagagtgctattcttcgctgctacttttctttaactggacctgcttcaattatttgttgtgttaagtaattgtcgacatccttaattttagatccgtatcgcagatgtttcgctataagctgaaagccattgaagcacacaaagcatggatgaagagccctgaggtgcttgagaactgttccactggacttcatttccctgcagagcaaatagagaactctgaggtgattccactgaagtcggttgctttctatgcagctgacgggtgagatgtcctgctaaggccatggaccgtgcctcgtcgctgccagaaacgagagggattctgccagggacgttgtaaatttactagagcagctgtaaataagcttgcttgacgatactgttagagatgctgacagtgtagttcgcttcggtttagcctgtaattgcgttgtacctatgttaacctgtctgtcctgagatacaatgacagccagtagatggaactccagcagaactgtataaagactgggtgttgtaaccgtatatgtactgtccgtatgctttgttaaaacg

SEQ ID NO: 27734 - DNA, 1611 bp, Oryza sativa
  ref <308>: DATABASE ACCESSION NUMBER: AK103176
  ref <309>: DATABASE ENTRY DATE: 2002-08-28
ggtcgtcactcctcgatttttctcccgcaactcactgcgccgccgcggagaggcaaacccgaaggagactaggagaggaagagcttcaccgcctccgcctccggcaaggaaagccaaagccaatcgaggccaagagcgagggggaaggaagaagaggggggaagggagagatgccgacggtgacctgcaacgcgtgcaacgcggggttcgatgacgaggagcagcagcgcctccactaccgctccgagtggcaccgctacaacctcaagcgcaaggtggctggagttcctggagtgactgaggctctgtttttggctagacaaactgctttagcagaggggagcaactctgatagcactccaatgctctacagttgtgctctttgtggaaaggagtacaggagctcaaaagctcatgcccaacatcttaattcacgatcacatctcatgaaagcttctcaggagcctaatgcatccattgctggaattaccatagtcaagcctcgtcctgagcgagttcaacgcagggctccatctgcagtagaagaggatgaagatgaagatgaggaggaagagtgggttgaagtggacccaagtgagttagagtcgacttcggaaatgcaagtagatgagcattcctccaaatcagatgatgagatagatgagtttgaagagttggatcccacattctgcttcatgtgtgatcttgagcatgacaccattgagaattgcatggtccacatgcacaaaaagcatgggtttttcatacctgatagcgaatacttgaaagatccaaatggtcttcttatatatgttggtctgaaggtgaagcgtgattttatatgcctatactgcaatgacagatgccagcctttccaaagtctagaggctgtgagaaagcatatggatgcaaaaggacactgcaaagtacgatatggagatggtggggatgatgaagatgctgaccttgaagatttctatgattacagcagcagttatgctgatgtggagggtaaggagttggttgctgcagatgacaaggataacattgaactgggaagtggtggggctgagcttgtaataacgaacaagagtgagaaaggaactcgtgtcagaactcttggttctcgggaatttattcgctactatcgccagaaaccacgtccttctgttgcaacagatcgtgctcttgcgctttctctggcttccagctacaagagcatgggtctggtgacagttcagtcaaaggagcaagttgtaaggctgaaagttctccgcgcaatgaacaagacaggtgtggagaccatgcgaaccaagattggaatgaagagcaacgtgatccgcaatctccccaagaactgcccatattagtcgatgccacctgttgcaggatcaaagcccttggagctccagcatcatctttgtggcaatggctgtttttttgtgcatctgctagccatggcagagagcttgtgatattcgcaaaaacaatagatctttatattgtttaatttgcacctcaaatgagagtatcatgcttactggaaacaagactgtatccggtataagagttatgacttcggtaaacacatcaccttctgtgattttgagc

SEQ ID NO: 27735 - DNA, 1511 bp, Oryza sativa
  ref <308>: DATABASE ACCESSION NUMBER: AK103177
  ref <309>: DATABASE ENTRY DATE: 2002-08-28
gtggttggaagcggagaccgagagagagaagcagcacccaaaccctagccctcccctctcctcccgcacgcgcgcgtcggcgccaccaccgggagctccgccgccgccgccgcctcatccgccccgtgccatggcggagacccccgagcgcaggaggtactcagggtccccctctccttacaggggaaacccaaaatcaaggtcaagatcacgatcacctgctgctcgatcccagtctaggtctccagtccctgaccctagatctcaggcaaggtcaagatcaagaagccgcgagagggagcctgatgctgtaaatcatggaaatacactgtatgtgactggactctcttctcgagtgactgaaagagaacttaaagattacttctctaaagaaggaagggtgactagttgccatgttgtccttgaaccccatacacgtgtttctcgtggatttgcttttgtcaccatggacactgttgaagatgctgaacgctgtatcaagtatcttaaccagtctgtaatggaaggccggaacatcacagttgaaaagtcacgtcgaggtcgcccaaggacgccaactcctggaagctatcttggtcatcgatatgaccgtagagagccacgtgggagataccgcagcagaggaggtggctatggccgtgatgagtactacggcaatagctaccgcaggtctccgcctccaatgtacccatcctacagggacacaagggactaccctccatacagggacacaagggactactccccccacagggatgctcgagattactacgacggaaggggaggcaggggatactccccacatagatctcctccttatggcggtggcagggcccggagggagcgatctagatcattgccgtattctccctaccggatgcctgagagaggctatggacgccaagccggtggtggtggctatgacaggtaaggttgctcccttggctcttgttgcattagatacctgaattccaagctggaaaacgtgctgttcctgttagccctgatgaatgttagattgctgtagctttgtactatttgaaagatgcattcctggatttaatgagcgttgttgtatggggtacctatagacgggggtgtttagatggggctaaaactttttaacccatgtcacatcggatgtttggacgctaatttagagtattaaacatggactaataaaaaaactaatttcataaatgagagctaatccgcgagacgaattttttaagcctaattaatccataattatcaaaagtttactgtagcatcacattgtcaaaatcatggcgtaattagactcaaaagattcgtctcgcgaattagtccaagcttatgaaatgggttatgtaattagtgtatgtttaatactccaaattagtgtccaaacatccgatgtgacagggacttagaataagtctctggaaaccaaacagcccctagtctgtaatctggaatgattttaagtacgactggtatgtcttattttg

SEQ ID NO: 27736 - DNA, 2110 bp, Oryza sativa
  ref <308>: DATABASE ACCESSION NUMBER: AK103178
  ref <309>: DATABASE ENTRY DATE: 2002-08-28
ggcctcgtcggcttcctctcgccgcacccatcgatatccatctccatctcatctcgccacccaaaaccctaaacctccctcccatttccgccgccgccgccatgcagtcgcttgccctcacctccccctcccttccggcgccggcgaccgcatccggccgccgccgccgccgcctggagcgcatccgcgccaccgcggtgtccgacgagccgaagctgaacaagtacagcgcgcgcatcacggagcccaagtcgcagggggcgtcgcaggcggtgctctacggcgtggggctcaccgacgccgacctccgcaagccgcaggtgggcgtctcctccgtctggtacgagggcaacacctgcaacatgcaccttctccgcctcgccgaggccgtcagggacggcgtccgcgaggccggcatggtggccttccgcttcaacaccgtcggggtcagcgacgccatctccatgggcacccggggcatgtgctacagcctccagtcgcgcgacctcatcgccgacagcatcgagaccgtcatgggcgcgcagcactacgacgccaacatctccattcctggatgcgacaagaacatgccaggaacaataatggcaatggggcggctgaaccgaccaagtatcatgatatatggtggaactattaagcctggtcattttcagggtaattcttatgacatagtatctgctttccagtgctatggagaatttgttaccggatcaatcagtgatgagcaaagaaagaatgtgctccgcaactcatgcccaggagcaggtgcgtgtggtggtatgtacaccgcaaatacaatggcatccgccatcgagaccatgggtatgagccttccgtacagttcttcaacccctgctgaagacccactaaagctagaggaatgccgtcttgctgggaagtatcttttagaattgttaaagatggatttgaagcctaaagacattatcactgagaaatctttgcggaacgcaatggtcattgtcatggcacttggtgggtctactaatgctgttttgcatttaattgctatcgctaggtctgtaggtctgcaattaactcttgatgattttcagaaggtcagtgaccaagttcctttccttgcggaccttaagcctagtggcaaatatgtcatggaggatctgcataagattggtggaacacctgcagtaattcattatcttctggagcaaggtcttcttgatggtgattgtatgaccgtcactgggaaaactctagcggaaaatgctaaaatcttccctcctctgtccgaaggacagcaaataataaggcccctggacaacccaatcaaatcaactggtcatatacaaatactttatggcaatcttgcaccagaaggttctgtagcaaaaattactggcaaagaggggatgtttttctcaggccctgcactagtgtttgagggtgaagaatctatgattacagctatatcagaaaacccagcgaatttcaaggggaaggtagtagtgatacgaggagaaggaccgaaaggtggaccagggatgcctgaaatgctgactccaactagtgcaataatgggtgctggtcttgggaaggagtgtgccctgctgaccgatggcagattttctggaggatcacatggatttgttgtaggccacatttgtcctgaagcacaggagggaggtccaattggtcttgttcaaaacggtgacaaaattaccattgatgttgtgaagagagtaattgatgttgaactgactgaagctgagctggaagaaagacggaggaaatggacgccgccgccacacaaggctgcccgtggagcgctttggaagtacacgaagctcgtgtcccctgcatcaagaggatgcgtcaccgatgagtagatcctgctgctgctgctcgagtaataaaaaataaaaaataaaaaagaggaggaataggaggaggtttttgaggaacagtttgcatgtaacagtagttcatggtggtggttggtgaaggctgattgtgatggtagttcccttcaataaaatggcagtttcctaggtgctcaagcaatgccgagggaactgcttgctgaataatccattgtctgttgctgtgttgg

SEQ ID NO: 27737 - DNA, 1223 bp, Oryza sativa
  ref <308>: DATABASE ACCESSION NUMBER: AK103179
  ref <309>: DATABASE ENTRY DATE: 2002-08-28
gaatggcatatgggtaaaagactcctgctccttcgcttcgcttctgttcgtctctccgccgtgcgccgtccgtcgtccgccatggaggttgctggccctcctccgttgaccagcgcttcccctagcccctgccgctcaacaccaactgtggccggatctagttgtttggcggctcgcgagaaagaagttttggtggtctagatctggtcagttcatcctccctttcgagctgatctctcaccaccgagccttttccccacatcccttctcgtcgttcggtttgaggtggtcagatctaccggcggcaaagctgctggatgccctcacttcgtgtggctgtgagatcatcggggttagaactgccagaatcgcttggactcgaggaagaaggagagcgagcaagacgagggatgcaaatgggcgacgacctgggtgtggagcggtgaccccagctatcggatgcagcagtttgcacgcgcgggtgcaacacggagcacgcgctcagcctggctgagtagcgaagtttgcccgaatcgggcgttcctccggagcctggctggcgaccgctttttgcacgcgctgggcctggctgggaggtccatgcaagcaaccaacaaggataattatatgaaagaagcccctctatatctggagttagggagcacatttttactagcagaaatggtgaacatggagtagtgccatattatgtcaagagttatcttaatctaacagaggatacaccgtcaactatatctttctccatcgcactctctaaaatatatatttatcaggaagatgtttgtagaacttattgatttgggtaatatttattcgtcgatgtcaaccatttcttgtccacaatgaatggttgatcgtattcaagatgacaaagccatatttatgcttcatagtttgagactactatatggaaaaaacaaagcaatctgaacgcaacacagattcaacaggatgatccaatgacaacagtgaacactatgggttaaggtatccaaacatagcatatgctttcatcacctactgcaaacatcagtcaccttttacaccagctgtatgcaggtggtgcgccaagccgccaagggcgcgcgccccagatcctagtatccttcaacttcaagatgaaagacgtaaatgaacccatgtatgaacatgcctacatctaataggcatccaactatgcaaggaaagcctatttagcctcc

SEQ ID NO: 27738 - DNA, 2714 bp, Oryza sativa
  ref <308>: DATABASE ACCESSION NUMBER: AK103180
  ref <309>: DATABASE ENTRY DATE: 2002-08-28
gagaataggcccatggaaaacactcaaaccttctctctggcggctggcggcggctctgcttaaaccccgccgcccgcgcgccttcttccccaactccggcggccgcgccaccattcctcgcagctccggtgttctctgctgttgtctggggctcccccgcgcaggataaggggacccacctccgccgcccgcgcgcctgctcccccccaactccggcgcccccgcgcctccttcccaactccggtggtgccggctgaggagcttgagcacgccgggaggggaggggtggggggtttacggggacggctgtggcatggcggccgcccgagcttgccctatgggagtatcggtcgaccagcggcgcgcggccgttgccgtgctccgcgccgccgccgccgccggcgagctttcgttagggaaggcggttcacgcgagggttgtcagggccgcgcgcttcgacgtcgtccagtacaacaacctcattgccctgtacgtcaagtgcggccgcctaggcctcgcccgccaggtgttcgacgcaatgccctcccggaaccccgtgtctgggaacctgctcatgtccgggtacgcttcttccgggcgccacagggacgccctcgcgctcctcagggtggctgactttggtctgaatgagtacgtgctgtcgtcggctgtggccgcgactgcccatgtccggagctatgatatggggaggcagtgccatggatatgctatcaaggctggactagcagagcacccttacgtttgtagtgcggtgctgcatatgtattgccaatgtgcacacatggacgaagcggtgaaggtatttgataatgtttccagttttaatgtattcgcgttcaactcaatgataaatgggtttcttgatcggggccagatggatggttccaccagtatagtaagaagcatggtgagaaatgtcgggcaatgggatcatgtgtcatatgtcgcagttcttgggcattgtgctagcacgaaagaggtggtgcttgggagtcaggtgcatacccaagcgttgaagaggaggcttgagctgaatgtgtatgtggggagtgcactcgttgatatgtatgggaaatgtgactttccccatgaagctaatcgcgtgtttgaggttttgccagaaaagaatattgtttcctggacagccattatgactgcttatacacaaaatgagctgtttgaagatgcattgcagttgttcttggatatggaaatggaaggagttcggcctaatgagttcacttatgctgttgctctcaacagttgcgctggtcttgccaccttgaaaaatggtaatgcccttggtgcatgtactatgaaaactgggcattggggccttttgcctgtctgtaatgccctcatgaacatgtactcaaagagtggcagtgttgaggatgcacggagagtcttcctttctatgccatgtcgtgatgtggtttcttggaattcaatcatcattggctacgctcatcatggccgtgcaagagaagccatggaagcatttcatgatatgttgtttgcagaagaagtcccatcttatgtaactttcattggggtgctgtcagcctgtgctcagttgggtcttgtagatgaagggttctactacctgaatattatgatgaaggaagtgggagtaaaacctggtaaggaacattacacttgcatggtcggtttgctgtgcagagttggacggcttgacgaggcagaacgattcatagaaagtaactgcattggtaccgatgttgttgcatggagatcacttctaagttcttgccaagtatatagaaattatggtcttggtcatcgagtagctgaacagatttttcagttaaagcccaaagatgttggaacctatgttttgctttctaatatgtatgcgaaagcaaaccggtgggatggtgtcgtgaaggttcggaggctgatgagagagttgggcgttaggaaggagcctggtgttagttggattcaagtgggtagtgaggtccatgttttcacatctgaggacaaaaaacacccatatatggagcagatcaccaaaaaactccaagagctgatagacaagataaaagtgattggatatgttccaaacattgcagtggccctacatgatgttgaggatgaacaaaaggaagaacatcttatgtatcacagtgagaaattagctcttgcatttggccttattcgcacccccaagggagaagctattcgtataatgaaaaacgtcaggatatgtgatgattgccatgttgccatcaaactcatttcacttgccacaggcagaagaatagttgtaagggacactgttcggtttcattgtatagaagatggagtctgctcatgtgatgactattggtgattcaatctatataatatgtcaatataaaagtggcaaagcttttgccctttcttaaaaaaaaactatataatatgtggttctcaaaggtcgattgcataaagcctcgtgaatcagctgaatggagctgattggccatatatgtgattcaagagcatttttgctgagtataaatgttgaggtgggaccagagagtcattaaagtcgcagctccagaggacaagtgaagttaggacatggacatggaaatgcaatcatttttttgaagaacaaagttaaaagatgtaaatatgtgaattattttaacgactaacaagggaggatatgctattgctttccc

SEQ ID NO: 27739 - DNA, 2233 bp, Oryza sativa
  ref <308>: DATABASE ACCESSION NUMBER: AK103181
  ref <309>: DATABASE ENTRY DATE: 2002-08-28
gtctcgctgctgctgcttttgcccaaagctgcacaacctgcattgcctctcgcctgaccctcttgcctcatctgtgtctccccccttctctttttcttcaacccctctttatgctcgtttctccattgcagctcacctccatctcctattctcctcctccttgttgaaggagttcgtgtgcctctaccaagaacaagaagaagcctcttgcatcggcagccatgatcacggtggtggacctgtaccacgtcctgacggcggtggtgccgctgtacgtggcgatgacgctggcgtacgcctccgtccggtggtggcgcatcttctccccggaccagtgctccggcatcaaccgcttcgtcgcgctcttcgccgtcccgctcctctccttccacttcatctccaccaacaaccccttcgccatgaacctccgcttcctcgccgccgacacgctccagaagctcatcgtcctcgccctcctcgccctctggtgccgcctctccgcgcgcgggtcactcgactggctcatcaccctcttctccctctccaccctccccaacaccctcgtcatgggcatcccgctgctcaaggggatgtacgccgccgccgccgacgtcgactccggcagcctcatggtgcagatcgtcgtgctccagtgcatcatctggtacacgctcatgctgttcctcttcgagtaccgcggcgcgcggcttcttgtcatggagcagttcccggacaccgccgcctccatcgtctccttccgggtggattccgacgtcgtctcgctcgccggcggcggtggtggagccgcggagctgcaggcggaggcggaggtcggggacgatggcaggatgcgggtcaccgtgcgcaagtcgacgagctcgcgctccgaggcggcgtgctcgcacgggacgcagtcacactcgcagtccatgcagccgcgcgtctccaacctctccggcgtcgagatttactcgctgcagtcgtcgcggaacccgacgccgcgtggctccagcttcaaccacgccgagttcttcaacatcgtcggcaacggcaagcagggcgacgaggagaagggcgccgccggtggcgggggccactcgccgcagccggtggtggggaagaggaaggacctgcacatgttcgtgtggagctcaagcgcctcgccggtgtcggagcgcgccgccgcagcagcagctggcgcggtgcacgtcttcggcggtggtggcgccgaccacggcgacgccaaaggagctcaggcctatgatgagtacagtttcgggaacaagaacgagaaggacgggccgacgctgtccaagctggggtccaactcgacggcgcagctccggccaaaggacgacggcgaggggatggcggcggcgatgccgccggcgagcgtgatgacgaggctcatcctgatcatggtttggaggaagctgatcaggaaccccaacacttactccagcctccttggtgtcatctggtccctcgtctcctacaggtgggggattgagatgccagccatcatcgcccggtcgatttcgatcctgtcagatgcagggcttggaatggccatgttcagcctaggattgttcatggcattgcagccacggatcattgcctgtgggaactcccttgcttcgtatgccatggccgtcgggttcctcgtgggtccggccgtcatggctgccgcctccatcgccgtcggacttcgcggggtgcttctgcacattgccattgttcaggccgctcttcctcaaggaatcgtgccctttgtgtttgccaaggagtacaatgttcatcctaacattctgagcacagccgtgatattcgggatgctgattgctctccccatcacattggtctactacatactgctggggctctgaagagctctccaagtctcaactcaactgtgcaagaacttgatgttactgacagtttgattaggatttatggttctgttttagttgctcagattttgtttggatgataggtcagcttagtgatgctagttagacaattatccgaggacttttgggttcaagtgacggccagccacggtttctgattgaagattaggaacatagacatcacattagtgacaacaggcatctaatttgtaagacattgagaaggtctgtttcaaattactgacaatgtagtaagacattgaacagtgcttataagcttatttagcattccaataactgatggtaatgcacttaaaggagct

SEQ ID NO: 27740 - DNA, 1780 bp, Oryza sativa
  ref <308>: DATABASE ACCESSION NUMBER: AK103182
  ref <309>: DATABASE ENTRY DATE: 2002-08-28
agattctgctaagctgcccacggccatggagtcgccgctgagccatccggcgatggtcgccttgtcgctgctgctactcgtggcgctctacctcgcgcgccgcgccgtgctggggaagaaacgcaggtatccgcccgtggccggcaccatgttccaccagctgctcaacttcggccgcttgctggagtaccacacggagctctcccgcaagtaccgcaccttccgcatgctcaccccgacctgcaactacgtctacaccgtcgagccggccaacgtcgagcacatcctcaagaccaacttcgccaactacggcaagggcccgatgacccacgacgtgctggaggacctcctcggcgacgggatcttcaacgtggacggcggcatgtggcggcagcagcgcaaggtcgccagcctcgagttctccacccgtgtgctgcgggactacagcagcgccgtgttccgcgacaccgccgcggagctcgccggcatcctggagcgtggtccggcggcgaaggggcgggagagggtggacatgcaggatctgctgatgcgggcgacgctggactctttcttcagggttggtttcggggtcaaccttggcgtgctctccggatccagcaaggagggcttggtgtttgccagggcgttcgacgacgcgagcgagcaggtgctgttccgattcttcgacctgctctggaaggtcaagaggtttctcaacatctcgtcggaggcaaccatgaagcagtcgatccgcaccatcaacgacttcgtgtactccatcatcgacaggaagatcgaacagatgagcagagagcaacacgaattcgccaagaaagaggacatactgtcgaggtttctgctcgagagggagaaggatcccggctgcttcgacaacaagtacatcagggacatcatactcaacttcgtcatcgccggccgcgacacgacggcggggacgctgtcgtggttcctctacgccgtctgcaagaaccagcgcgtacaggacaagatcgcgagggaagtgcgcgacgccaccaccggcgaccgcgacgtcggcgtccaggatttctcttcatttctgacagaagacgccatcaacaagatgcagtacctacacgcagcgttgacggagacgctccggttgtaccctggcgttcccctcgatgtcaaatactgcttctcggatgacacgttgccggacgggcacgcggtgaagaaaggagacatggtgaactaccaaccgtaccccatgggcaggatgaagttcctgtggggcgacgacgccgaggagttcaagccggagcggtggctcgatgacagtggtatgttcgtcgccgagagccccttcaagttcacggcgttccaggcggggccacgaatctgcttggggaaggagttcgcgtacaggcagatgaagatcgtttcggctgtccttctctacttcttcagattcgagatgtgggatgacgacgccaccgtgggttataggccgatgctgactctgaaaatggatggcccgttctatctccgcgcattggcccggtgaagcttcacaccatatcaaaagttcaaaactcaagggcggcgctggtctatttcatccattttggcggggataatgacggttagatatggttgtcgaagacaacagtgctcctaaggtgtaggtatgtaagaaaaataacgtgtgtattatactcttaaaaactttttactagagggctatgtgtactccctccgttccacgtaataagacacgatcaaacatgacaccatcacc

SEQ ID NO: 27741 - DNA, 1424 bp, Oryza sativa
  ref <308>: DATABASE ACCESSION NUMBER: AK103183
  ref <309>: DATABASE ENTRY DATE: 2002-08-28
gagccgcctcccccaaccccgcgctcccctcattgccttatccgaatcgcctcgccgtctccgtctcgccatggaggccgtgcgcgcgtcggcggcgtgggtggccagccgctcctcccacgtcaaggtcgacatgttagaggtcgagaaggtggtggacaaaatccaaggaaatgttccaaaagttgaatgggacttcgaaggaattcactattttgacgatggccccctcactgtccagtacctcttcgtcctggatgctctgaacttctgcttctggccagataaggatctgagctatgaccatttggcttctggactaaagttagccttagagaaagataagacagcccttgatgcagatcgtctccagagttacactgggcctcagctccgccaactgctgaactggccacgcccactgccaattgaggaggaaagagtacggcttcttcatgaggttggtatggaacttgaaagaagctttggaggtgaagctgcaaatctagtgaagtctgctggaaactctgctgctactctaatcgaacttattacccgtcattttcctggttttcgggatcattcactttacaaaggacaccaggttttcttgtataagagagctcagatatttgttgctgatctgtggggtgcttttaagggacaaaactatggcgagttccacgacatcaagtccatcaccatatttgcagactatattgttcctgctgtcttgagggagcttggcatactgaaatatggctccaacttatcttgctcaattgattcgagcagtgagattgtgcctggaagtgaagaggaagtggagattcgtgcttgttctgtatatgccgtggaaaaaatgagagagctcatcaacaagaagtttggaaagcagcttctgagcattgacatcgatctatggctctggtcatgtggcgttcagaacatggcgttgtcacatcaccgcaccctctcaatatattactgagagccagcagctgctgctgggcgccccctccgtccagtgtattgttccagcaactctctactactagtagctgctatagctactgaatttttgtccctcttgggagtgcacaaaagtgcacgctattgtagacttgttggttcgtccagattctgagacaagaaatctttagaacagctcaaagtttccagttgacctgtagggtgtagtagggtgtgcaattggatgcacttggactagaattcagaaccattctgtagagtactgtgtttttcattgatcttgccaaaccattctgtagagtactgtgttattctcaaactcaacaactgcaaagttcatcaggaaattgctactgtagcaagaagaggtactagctgtaacaggtgagctttgtccaggttagatgaattctgcagatcgatgaacattc

SEQ ID NO: 27742 - DNA, 2928 bp, Oryza sativa
  ref <308>: DATABASE ACCESSION NUMBER: AK103184
  ref <309>: DATABASE ENTRY DATE: 2002-08-28
ggaagaaaaaaaaaacatcaacagcaaaaccgactcccgagaagcggagagggaaaaaaaaattcgcccaaatggcgggggtcgtcgtcgtcgtcttcgtctccgatccccctctcctcatccgcctccacccctcacatcgcccattgccactgtgatcactagggtttcgcgctgctcctccaggtaaggattcgctcgccttcgccgatgcggtggtggaagcgctcggtctccccttccccgtccccgtcctcttcgtccgcgtccgcgtccacgcccgcgtccccggcgcgggcctcgacctcccgcgttggcggcggtgtccccagccgccgccgggatgtggtggggtttggttggggtggggggagtgatccgcagccgcggttgaccaggcagaggcggctgcggcacgtcgacgacatcgaggtcggggtctcggcgctcgggctggattcctccccctcgcccgccgcgccctcgtcgtgcccctccagtagggattcggtggggttcggcctcctgaccgcgagctccacgccgatctcgaggaccgcgagtaacatggaggtggcgccgccgaggtcgtcgtcgtctcccgtgctgctgccgcacccgctgcccctgcccgatgagggggactcgccctgccgcggctccgggagatccctcccgtcgcccaagctattcgaaggagactgcaacgggtcggccgtggagtcgaacttgctcggggtttccgagatcgggagcgacagagcatcgttgtttccgagagtgatggctaaaacggtgcaaaaaaaccctgagcatggtgacttgcgatcaaatggcacaaatgggattaactgtggacaacggaggaaggcatttaaagagaaattacaggataagagctcagctgaaacattgacattcagattgaacatacccgctaaaagtgctccaagcagtggattttcaagccctgtacagagtcctcgaagactgagtagtgtagactttttgtccactgcaacatccacccaaggtgccaatttatcgtcagcacagtcagtctggtctcctgatctatatggatcttcacctcgttgtgcgtcacctgaaaaaattatgggtagtcaggagcgatctcctcgctccaatccattgagaagccctgttctaagatcaaaaaacccaagtgcacctccttcaccaatgcatccaaagttgttcccggagaaccatgtttctcgtcctgagggcaatgggagtgtaaatttccatccattacccctcccacccgcctctgtaagcccaaagcagacgaattttagtcaccagccagttccaaaagttgatgcaccctcaatggctggtcagtggcaaaaaggaaagctcattggcagtggaacatttggatgtgtatatgaggccgccaatagacacactggagctctgtgtgccatgaaagaggtcaacataattcccgatgatgctaaatcagctgagtctctcaagcaattggagcaggaaataaaatttcttagtcaattcaagcatgaaaacatagtgcagtactacggcagtgaatatattgaagatcgattctacatatacctggaatatgttcaccctggttcaattaataaatatgttaatcaacattgtggagcaatgacagaatcagtaatccgcagcttcacccgccatatacttaaaggccttgcctttttacatagtcagaagattatgcatagagatatcaaaggagcaaatttgcttgttgatgtgaatggtgtagtcaaattggctgactttggaatggctaagcatttgagtactgcagctcctaatctttcactgaagggaactccatactggatggctcctgaggttgttcaggctacacttgtcaaagatgtagggtatgatcttgctgtggatatctggagcctaggttgcacaattattgagatgttcacaggaaagcctccttggagtggtcttgaagggcctgctgcaatgtttaaggtgttgcataaagatccgtcaattccagacagtttatccccggaggggaaggaatttctgagatgctgcttcagaagaaatccagctgagagaccaacagcaagcaagttgctggagcatccatttgtccacaattcgaataacttcaaccagcacagtgctttacattctcccactggacttaaatccaccgataccggtcacaatgcaagagacaaaaagtcctgtaagattgtttcatgcatgagggggaaaaatatgattacaactggtgaaacaagcagtgctagatctcccggttcattatctaatcgggtggcagtaggcttgacagccctgccaaatttggaaactcgtagcttatcccctacgccgatgagtttgaggtccagtcctggctctgcggcccatacacctagtatgcacttttctatcgcataccatcagcctagtccattgccaaggccaaatggaaaggaagcaataaatttgttcaccttgaagcatgacgagctgcctacctaaggtgcggaaacacatcatctgtccatccacccaatctgttggatgcgagcccatctctaacttctgatccctgtactgccagtcatcataattgaacattcgctgggtcttgtaaagtacttggcatgcgaaggacatcagcacggtacgatcgcaatagcttctgaaacctgtaatgtttgttttcaaggaaatgatggcgtttcctttgtaagatattatttagggttagctgtaggttaaactaatggccctgattgttgccaacaggtaggacactagggttgtagttgtagcttgtgttgtttttgctattgtgtaaccacaccacgatgtaatcattgttgattttttgaggcccagtaataatgataaagagttggc

SEQ ID NO: 27743 - DNA, 1504 bp, Oryza sativa
  ref <308>: DATABASE ACCESSION NUMBER: AK103185
  ref <309>: DATABASE ENTRY DATE: 2002-08-28
gtctagcgtgcccgagctatatacaagtatgcacttgatagggtgcccaaaggccaggctgaggagctgtacaggaagttccttgcatttgaaaaacagtttggtgaccgtgaaggaattgaggatgccatcgtgggtaagaggagattccagtatgaggacgaggtgaggaagaaccctctcaattatgattcatggtttgattacattaggctggaggagagtgttgggaacaatgacaggatcagggaggtgtatgagagagccattgctaatatccccccagcagatgagaagcgttactggcaacgatacatttacctatggataaattatgctttgtatgaggagcttgatgcaaaggacgtggaacggaccagggaagtttagagcgagtgtctcaaattggttccacacaagaaattcacttttgccaagatgtggctcgtggcagcccagtttgagataaggcaaaggaatcttaaagctgcacggcagatactcggaaatgccattgggatgtctccaaagggcaagatattcaaaaagtacattgagattgagttgtatcttggtaattttgaccgttgtaggactctctatgagaagtatattgaatggtctccagcaaactgttatgcctggaggaagtatgctgaattagagaagaaccttagtgagactgatcgtgctcgttccatatatgagcttgctattgctcagccagcccttgatacaccagaagttttgtggaaggagtacttgcagtttgaaattgatgaaaatgaattcgataggactcgcgaactatacgagagattgcttgatagaacaaaacatttgaaggtatggataagctataccgagtttgaggcctcggctggtttggctggggaagacggtgagagtgaggagattaagaaagaagttagttatcatgaacagcagatagaacgggttcgaaggtgccgagcaatctttgaaagagcattcgaatacttcagaactagtgctccagagttaaaggaggaaagagcaatgctccttgaagaatggcttaacaaggaggtgagctttggtgaccttggtgatgtcaccttagtgcagaaaaaggcgccaaggaaagtgaagagaaagagaccaattcctacagaggatctccactgttgcgtatgaagagtacattgattatattttccccgatgaggttgcgctggctccaaacctcaagatccttgaagcagcctataagtggaagaagcagaagacagatgatactgatgatgtctgagctaaactgccactgtttctgtggtcacgaatgagctaatcgttgtcaaaattagatctgaaggtcttctacaatgctgggtaaagttgtgaatgtgccctacctgatcatgtggtgtggtgctggcacttcgatcaattcagttttacatctgtatgtctgatggatagaaactgaaacaagttcatagtctttaatttagttttggcatgc

SEQ ID NO: 27744 - DNA, 2628 bp, Oryza sativa
  ref <308>: DATABASE ACCESSION NUMBER: AK103186
  ref <309>: DATABASE ENTRY DATE: 2002-08-28
gagcttctctatttgcacgcagttcacacgcttcctccgtcgatccatccagcgccgccggtggcatcgccgcctcccttgcccagtgtgttcttgcgtcttctttggcttagctgtggacggccgtggtcttctgctcggtggcttcgtctccaccatctccattccatccgtcagaggctgtcgccgtccgcgagtagcagcagcctctcctctcccagtgacagtccagttgcgccaccaccgacgaccttttgccttaccggttggttctccggtgcccattgccatcgtgcgcgggagcaatgccctctttttcccacggcagtccaggagtggtttggtgatggggatggatgcggtgcctgacactctaacaccaacaccattttctcagctaacttagggacaaatgagacagagaacaggccaggaatctccatgtcagtgttttgtcgtccatttcaacgacccgttaacaggaggcttgcatttaaccctatcaatcctgctactccaatagatcaacattttgtctcctcatcagatggcccaacagtgccaggtgttcagtcccttcctgcagtgcgcggtaaaggtcctttggataatattggtttgagactgcctcgaccagatccatctattgctacggaagcacgcaagaagcgtaaagtcacaatggttttaaggagaggacataagttacccatatccaatattttctccttcaactaactggcttatttgttgcttccattggttcctacatttctatttgatttcgttcagcaagtgctgattcgaccaatctatagctcctcaatttgtgattgttacattaggagctggacctgatgatttctcatcttcatatcgatgtgttcaacgatgtatttccccacaagttaatgccaggcattgtgatgtgcggatagccaggaataatgggatgagtactactattggcgcttctccttcatctcacattgcccaaaatgacacctccttgcatagggtgaatacatgtcaacgaagccgtgtagggcggtccagagctgatggaaattttgtaccccttcttgccagtcgacatcgccctgatcatgatgctgctcgatattcaggctcaacctccacagttcatgttccgaagtaatttttgctgctcaacactaatgttctatctcgatgatcgtaaagcttctcgacaataatactccacccaatgatcttttttctatggtactattttcacacctctcaatttaggaggccctacccatacttgccaacattgtggtgctcgattctggtatgaggaacgcgtacgtgggtgtggacgaacagctttgcaaatttacaacaaatgctgtagaggagggagcatttatttgcctccatataggccaccaccagaacctttgctctctcgtttaactggacgagatcgtgttttgtccaaccacttctttgaaaacatcagacgatacaattctatgtttgctatgacatctatgggtgtaaatatcatcaactcaattaatgatggtcatggcccttacattttcaagattagtgggcagctatgccaccgaattggatcgcttattccaaagcatggtgcaagaccagaatattgtcaattatacatatttgacactgagaatgaaataagaaatagagtggctgttgcttcacatagagagatgagttttgaaccaaatgaggatattgttgcatctttgatgaccatgctcaatgcacacaacccagttgttcagctctttcgaactgctcgtgataggctgcatgatcagttagaggatcattactcagtgaagttatttgccacccccaatgaacatggtaatatctactcagccccagttgcatcagaggtggttggtttgatggttaatgatataggcactaccgagaaaggtcgtgacttaatagtagaggatcactcattgcagcttcaaagggtaaatgaaactcattgcaaatttatggcaatgcaatacccgctattgtttccttatggagaggatggttttcatgaaaatctcaagtatagacaatgtcaccgctcaggaatgatcaaacggaagaaagttagtttggtagaatactttgcatatagattgcatgatagagatgatgacttcaacaccccattgcgttgcaagaggctcacacagtcatatgaggttgatggtttttgttgtgtcaaggatagccgcttgaaccattataggaaaaaaaaaacttttcagctgaagtataggagtagcccctataaagctttacttgatacagtcagtagcggcattattgatgcttcatcggtaggccagaggattattttgccaggttcattcactggaagtccacgctattactaccaaaattaccaagattgtgtggctctctgtcgtagatttggatgcccggatcttttcatcacttacacgtgtaatgctgcttggccagagataacagaagctttagcatttataccaggacaacaaccttctgatcggcccgatattgttgatcgagtttttgaaatgaagctcaagctgtttgttgatgatataaaaaaaatatgagttctttggtccc

SEQ ID NO: 27745 - DNA, 1876 bp, Oryza sativa
  ref <308>: DATABASE ACCESSION NUMBER: AK103187
  ref <309>: DATABASE ENTRY DATE: 2002-08-28
gacaattttgttcccccaaaaattctaaacctccgcgtcgccttcttcttcttcttcctccgcaagcttgctagcctcctcctcctccgcgccatgatggggagcagggtggcggcggcgctgctccgccgggggagggaccaggcgtcctcgctcatggccgctcgcctcccgaggggagcccccgctccgtctccggctgctcctagggttggatccggctccgtctgcggctgcggcggcggcggcggtttactaactggatcgaggtcgacgggatccgtcttctccgcatcgcgcctcgcctcgttccacgccttccgttcaatcggctccaagaccttgatgggccaatgcacaaggaaaatgactactactgtggcagcaatgaattcaggcgtggccaatgcagcggcatattcaggattgaagttgcttgttaccaaagggccccaagcacagaaggccatcgggatatggctcttcggatgtgccacgtgggtattcggcttggtcatacttggaggagttacacggcttacacgctcaggattgtcgatgactgactggaaatttacggggagcttgcctccaatgtcagatgaagagtggctgctggaatttgagaaatacaaactgtcacctgagtacaagagggtgaacaaaggcatgagccttggagatttcaaatttatatactggatggagtatggacacagaatgtggggaagggctctgggatttctattttctgttccttttgcctatttcattgcaaaagggtatgttacccgccaacttggactcaggctgtcaggtcttttcgcacttggtgcgggtcaaggactaattggctggtggatggtgaaaagtggtcttgaggaaccagcatctgagtatgttcaaccaagagtcagcccatacagactggcgacccatttaacgtctgcatttgttatatattgtggcatattgtggacagctctgtcagtggttatgccagaacctccggctggatcaatgaattgggtaaattctgcagcaaagattaaaaagttagcaattcctgtcagtgccgtggtaggcattactgccatatctggagcatttgttgcgggcaatgatgcagggcatgcatacaatacatttcccaagatgggtgacacctggataccagaagatgtgttcgctatggagcctttcatacgtaacttctttgagaacacgtccactgtgcagcttaatcaccgaattcttgcaacaactaccctattgtctgtgggtggcttatggttggctgcaaggaaagtggacatgcatccagcaatcaagtctcttatcggaagcacgcttggaatggctgcccttcaggttacattgggaatatctacacttttgatgtatgttcctacttccttgggctcagctcatcaagctggggcattgacactactgtcactgatgatccttctcacccacactttaagaagaccgtcaccagcccttctgaagtcacttgcatcagcagtgaaatcaacctgacaccgtgtcatgaaattttccttcaggcacagtagactgtttgatatttttcccgtcttcttatagctgacatgcggtcgcctcctttgcactacattatcaccgtactcatttggcccaaaagcattcaattcttgaataaggggccctcataattttctagtgccaaatattacgtaccttttccaagacttctttggacatgctgcattttgtcaggcaatattgcatttttgacatgctgtccgcagctgtgcactctgattagataatatctagggaaactattgtatcatgtaccaaattaataccaagtctccaaacatttctattg

SEQ ID NO: 27746 - DNA, 1498 bp, Oryza sativa
  ref <308>: DATABASE ACCESSION NUMBER: AK103188
  ref <309>: DATABASE ENTRY DATE: 2002-08-28
ggattaaacctgatttccccttgctaattcgggccatcgcatcactcccccaactaatcacactcctctcttctccgcttcctcttctcgtatatttataaccccacttcccttttcttcctctttcttctcatcttggtttcttcctagtttcgggagaggattttagtgagggatttgaaggattttgaggtgggagaggagatggagttgccggcggatgggagcgcgctggcgaggcaggggtcgatctactcgctgacgttcgacgagttccagagcgcgctgggaagcgccgagaaggatttcgggtcgatgaacatggatgagctgctgcgcaacatctggacggcggaggagtcgcaggccatagcgccggcggcggcggctgcttcggcggcggcggtggttggggacgcgcagcagcagcagcagccgatccagaggcaggggtcgctgacgctgccacgcacgctgagccagaagacggtggacgaggtgtggcgcgacatcatgggcttgggcggcagcgacgacgaagaccccgcggcggcggcggctgcggcggcgcccgcgcagcggcagccgacgctggggggagatgacgctggaggagttcctggtgcgggccggcgtcgtgcgggaggacatggggcagaccatcgtgctgccgccgcaggcgcaggcgttgttccccgggagcaatgtggtcgccccggccatgcagctcgccaacgggatgctgcctggtgtcgtcggcgtcgcccccggcgccgccgccgcgatgacggtggcggcgccggccacgccggtggtgctgaacgggctggggaaggtggagggcggggatctctcgtcgctctcgccggtgccttacccattcgacaccgcgctcagggtgaggaagggccctaccgtcgagaaggtggtggagaggcggcagaggcggatgatcaagaacagggagtccgctgctaggtctcgcgcgcggaagcaggcttatataatggagttggaagctgaggtggcaaaactgaaggaacagaaggctgaattgcagaaaaagcaggtggaaatgatacagaagcaaaatgatgaggtcatggagagaatcactcagcaacttggaccaaaggcaaagagattttgcctccgacgaacactgactggtccatgctgaagccagagtctccggtttcgccgtggcgctcagcttcagagttgcttctctccttgttggtgaatggtgatggctcagtctcttggacggtcgaatgctggcgtcgattactcactaggtttagctgcgagatcgttgcgtgagcaaaggcatactatctaatctgtttaactccttatttagggaaatctggcatggtgaaaacggggcatgccatctgtgtttgttgtttttgtgcagctgttgcatctgctctgtatgttgctgttgcgttgacatgtcatcccgtttacagttcagtgattctgttctgtaccc

SEQ ID NO: 27747 - DNA, 795 bp, Oryza sativa
  ref <308>: DATABASE ACCESSION NUMBER: AK103189
  ref <309>: DATABASE ENTRY DATE: 2002-08-28
tgacacacagcaacacttgcactgcaaccagaagccagccactactcagtaggagattggagctgagagcagcagcagcagcagcagctaggaagatgaagagcctgcaaggtgaggtccacctgaacatccctgcatccaaggcatgggagatgttcaccaacaatgagaccctgggcaagatcagccccgaaatgctgtcgggcgccgagtaccttgaaggagatggcagccctggcagcctcaggatcttcaagctaggacctgcacttcatcactttgtcaaggaatctgttcagaaggttgagaaggtcgagacaggccggtccttcggctatgaagtggtcagcggtgagctgaaggaggtctatgatccctaccatgtcaccttctccttcgcccccgtcccggggaaggaaggcgagcagtgcgtcgctgggtggaaggctgagtttgagcccatcacccccacttccccgccaccagagaaggccaaggatgccgccctcgggtttcttaaattgtttgagacttgcgaagccactaactagtaaaatgacaaaagctgttgtcatcttaatgaagataagtatgaagaaacctatgggtaggacagcgtatagagtactaggcttgacatgtgtaatacctgcctagtacctttctggaagtgtgctatgccaagtgctatgtaatgtaataaccctgtactaattactctagacccaaaaaggagtccatataagcttcttgtatatgtatggctgaaaatgagataatgtgtgtgaagattct

SEQ ID NO: 27748 - DNA, 1439 bp, Oryza sativa
  ref <308>: DATABASE ACCESSION NUMBER: AK103190
  ref <309>: DATABASE ENTRY DATE: 2002-08-28
ggctctctctctctctctctctctctctctctcagtctctctcccccccaagaagaaatccattcctctctcacgcgcctccgcgtcgccgcattcggggacgcccaccgccgccggatccggccagccttcccccctcccctcctttccccggccgctcccctcctcggtaagatccggcgccggttccatgtcgagcaccggcgagcagtcgcaggcgaaggcggaggccgaggaggcggtggagctcgtgctgttccaggtcgctgagtgctacgtctacctgatacctcccaggaagacagccgcctcctacagggctgatgaatggaacgtcaacaagtgggcttgggaagggactctcaaggttgtcagcaaaggagaagagtgcatcatcaaactggaagataagaacacaggggagctgtacgctagggcattcctcagagaagacgaaccacatccggtggaacctgttattgatagcagcagatattttgtactccgtgttgaagagaatatagatggacgtcagcgccatgcctttattggtttaggcttccgtgaaagacctcaagcatatgatttccaagctgctctgcacgaccatatgaaatatctaaacaagaaaaagactgctgaagagatggtacaacactatgagaaatcatcatcagtggattacagcctcaaagaaggggaaactttggttttgcagctaaaaaatgttggtctggtgggctaagaaaccggcggttgaaccgggattttcccttgtcagctattttaacggtcccattggccagaacagcctggcccaggtaccaggtccagttttttctggctgggattttctgatgtttggccttattctttctccaattccctagaaagagtccggcgcaaagataaaatctgcattttttgagcaaggcctcaacaagctctcatttaacgaaaaagccaactccaaggaggccccagtttccctcaagctccctccacctccgccatcaccggtctctcctacagattctggcatcgcggcttctccgttcaaagcggagtttccttcccaagaccaaccagctgctgatactggagctgataccactcctttcaaagcagaatttccttcttctcatgaacaaccagccgcggataacgtcgcttcttccccaccaccgaaagcagaagctgctcctcaggagcaaccaactgcagcagagaaggcccctcaagagagcgtggacgacgacttcggagactttcaggcagctgggtgaatcatgtatcttgtacataccacatgttactcaaattgctcctttgattttccatgttccatcagttgtgacttctgccggcacatgagttgctgtacagtacagagagctagtaactatcttgttataatctataaaagaacagatggatac

SEQ ID NO: 27749 - DNA, 1065 bp, Oryza sativa
  ref <308>: DATABASE ACCESSION NUMBER: AK103191
  ref <309>: DATABASE ENTRY DATE: 2002-08-28
gaggaaaatatctcctcgtctcctcccgtctcctcgtcctcatccacggcgagtccgcgtcatccacacgagcccacccaaaacccaaaaccctactgcgcccatggcttcgccgccgccgccgccgccgcagccacctagcccctccgccgccacggcgggggcggcagcggcgccggtggacgcgctgttcctccagaacctgatgagccgggtccagctccgcccgcccttcctcgacaccaactccttcctcacccaggacctcgacgagttcctcctcaacgagttcgccgcgctgtcggccgccgcgggggcctccgacgatgacgacgacggcgaggatggggaaggggagggatccgatggggaggtggtctccggggaggcgaggcggcggcggacgctggcgagggaggaggccaagctggagcaggagatcgtgcggctcgtgctcgccggggaggcggaggaggcgctcaagcccaactccggccagtccgtcgccgtcggcgaccaccacatctgcgtcggcttccacgacgattccggcggtgtgtaccgcgtctgggagtggcacggccacgtcatgatcttcgacgacgaggatggctattccgcggagtacatctacggcaaccacttcgagcccctcgccgccgccaccgccagggcgaaggagaaggagagggagaagagggagaaggagctcagctcgggcctccgcgatttgatcctgggcgacactggcagcggcgccaatggctccaaggagaatggcaagggtggggcacccagggtggtgcgcaggaacgtcgtcaatgcccctgcggcgcctgcgaggtaataaaactcctctttagctctagcgcgtgtattgatggaagcgaggcatcaatccgagaaacagaagcaaaataatgatttgatctttccttttcttctgtagttgccgctgagggcggtttcttttgttctgatcagaaatgctatatactttgcttctgttatgatacacagtgtacccaactgggttttgagatgggagtatttgttccatatact

SEQ ID NO: 27750 - DNA, 1131 bp, Oryza sativa
  ref <308>: DATABASE ACCESSION NUMBER: AK103192
  ref <309>: DATABASE ENTRY DATE: 2002-08-28
gggatgaagctcggagatctgcaaagaaggctcaggcaagggaatatggatatgaggaggataagtcagattcggattctgatgaggaaggaggggttcgtaaggcggggggtgaccttgcagcacaagctattgctgctgcccaagctgccgctactttggctgcagccaaggctgctagtaatgccaatcagcaagtacaaagcaccaatgcagggtccttactttctatacctgtcgtagccaatgctccaaataatgaggccacggcacgtgcacttcaggctgcattgaacattcagcaaaatttagcacggatacaggcacatgtagtcccagaacattatgaggttgaacttgacattaatgatttcccacaaaatgcacgctggaagatcactcacaaagagactttgggtcctattcaggattggactgaagctgcaatcactacaagggggacatttattcctcaaggaaaaattgttggtgcaaatgagcgcaagctgtacctgttcatagagggacccactgaattatctgtcaagaaggcgaaatcagaattgaaacgtgtccttgaggattgtgccaatcatgctctgaaccttcctggttctgcccaaactggaaagtactctgttatttgagctgcggattgctaacagaacagctaattcagagatgcagggttttcttgtgaaggtctttcttggaaggtggactgcgattcttgtcttccttgatgacggcgttatctgcaacatccgtgctgagaagctggataagtggcaggttagggtgttctatgtgaaagttgctgatccactaggttacagcatcactgaatgatcatgccagattgcacactacatattgtagcctaccaaaagacaggcaaagccacatattcaccagccaaaaaaagaagtcatcgtcctaggagcttgatggagaaccaggctcctcacaactgcgttgctgataattgcagttaaatttgttgaaatccaaggatttgttaggctttttaggagtgccaatcactcataacagggattaaagtgagatcgttgttcgttgagttatacagaacaatgaaaagctgtttgagcaaaggccattaacttgatg

SEQ ID NO: 27751 - DNA, 1748 bp, Oryza sativa
  ref <308>: DATABASE ACCESSION NUMBER: AK103193
  ref <309>: DATABASE ENTRY DATE: 2002-08-28
gattctttctcttctcgtcgcattcgacggcatcactcgccaaaagctcagcccaggatcccccgccgccgatgtcggacggcagcgtcgagtcgccgtcgctccaccgcacgccgcctccgccctccccgtcgccgtcactctcgctctcgcgctcccagcagcagaccccgcggggccgccagccgcccccgcccggcgccgaccccgtcgccttcgccgtcgtcgccttcgtcgccatctgcttcgtgctgatttcattttcggcaccgtcaagcattctacatcaagtccctgaaggacatgttggggtgtactggagaggaggtgctcttttggaaacaatcactccaccaggttttcatgtgaagctgccttggataacccaatttgagccaatacaggttactcttcaaacagaccaggtcagaaatattccttgtggaacaaaaggtggagtcatgatcagctttgataagatcgaggttgtcaaccgcctccataaagagtttgtgcacgaaaccttactcaattatggtgtgcattatgacaagacatggatctatgacaaaattcatcatgagataaaccagttctgtagtgcccacagtttgcagcaagtttacatcgacttgtttgatcagattgatgaaacgatgaaagaagctattcaaagagactgtacacgctatgctcctggtattgagataatcagtgttcgtgttacaaagccgaacatacctgatagcattaggagaaattttgaacttatggaggaggagcgtacaaaggcattgattgccattgagaagcaaaaggtagcagagaaggaagcagaaacgcagaagaaaattgcactatctgaagcagagaagaatgcacaggtgagcaagatcctcatggagcagaagcttatggaaaaggacagctccaagaggcagcaacagattgataatgaaatgttccttgcccgagagaaagctcttacagatgcgaactattacaggataacgaaggaagcagaggccaacaggcttaaacttacaccggagtaccttgagctgaggttcattgaatcaatcgccaataactcgaagatattctttggtgaaaagattccaaacatgatcatggatcaaaggatgcttaggaattacctcgacaatggttccaccaaggaccatttggaaatatagcagttgtctctgtgaattgcaaagaacattggctgtttttctgatcccacggggaaattaggattctcacggatctgctcactacttggtaaagccaaaaggactagacattagggccttttaaagatggaaattagtagtctactgtagtagcatagctggaggctggagtaatcgttttgcgtgcgtgcgtaggagctgggagttacgttagatcactagatgcgctatcttgtgcaatctgcagaactgatggacaggaacaaatgctatcaggagcactatgatttccaagttcagaaaaggttctacgagtacaaatgggaaagatcgggcattacttgatacagtagtctcagcgatcgacacagcactaactgtgtgaagctatatactcctatctggaattgaggtatagcatctgtctgcaaggaagatttctgagtatagcaggttcacatacatgttgcatgcatctatctgcaaacaaacctgtatcatgaatgtgaacaattggactagtaactaatgggtataggaaacaagcaggtg

SEQ ID NO: 27752 - DNA, 1573 bp, Oryza sativa
  ref <308>: DATABASE ACCESSION NUMBER: AK103194
  ref <309>: DATABASE ENTRY DATE: 2002-08-28
gtcgtctccacgccgtcgtcgtcgacctcaccggcggctgcctccctacccccacctactccggcggcggcgcggcggagaagcacatcacatcatggctcctcctccgcactcggactctgacctgctcaagccgagagacgtctgcatcgtgggcgtcgcccgcacgcccatcggcgccctgctcggctccctctcctccctccccgccaccaagctcggctccgtcgccatccaggccgctctcaggagagcaaatgtggagccggcgctcgtgcaggaggtcttcatggggaacgttctcagcgccaaccttggccaagccccggcgaggcaagccgccctaggcgccggcttgcccgacactgtgccctgcaccaccgtcaacaaagtttgctcctcggggatgaaggctgtcatgcttgcggcgcagactattcagcttgggatgcatgatgttgttgtcgctggtgggatggagagcatgtccaatgcccccaaatatgtcgcggcagcaagacgggggtcacggtttgggcacgacgtcctcatcgatgggatgctcaaggatgggctgtgggatgtgtataatgatttcccaatgggaatgtgtgccgagttgtgtgcggatcaacactccatttcaagggaggagcaggatctttatgctatccagagcaatgaacgtgcaatagcagctcgtgatagcggcacattttcttgggaaattgctccggttgaaatttcttccggtagagggaaaccaccacttattgttgacaaggatgagagtcttgcaaagttcaattcagcgaagctgaggaaacttgggccgactttcaagaagaatggttctgtaactgccggcaattcttctagtataagtgatggtgctgctgcaatcgtgctagtcagtggacagaaagccaagagtcttggccttcaagttattgcaaggatcagagggtatgcggatgctgctcaggcacctgaattatttacaactactccagctcttgctattccaaaggctgtatcaaatgcgggtctccaaacttcacaaatagattattatgagataaacgaagctttctccgtcgttgctttagccaaccagaagcttcttggtattccttcgggaaagcttaacctaagtggtggtggtgtttctctgggccatcctattggttgcagtggtgcgagaatcatagtcactttgctcgggattcttagacataaaaatggaaagattggggttgctggagtttgcaatggaggtggtggtgcttctgcccttgttgtggaactcatgcaaccatcactatttacacgttcctcgttgtgaagttggcgcgagcaaaaatagcacaaagctgaactgtaaagtacagtagctctatgttttcatcttatattacttaattttactgggcgttcatccatgatgtacaatgatagaaggaacgttgtaaaaataagatggctgtgcactaccgcacgagtcttgtataacttgtatagcggccatagcaataataagggaaaagaaggccagaggaatactttgcattct

SEQ ID NO: 27753 - DNA, 1210 bp, Oryza sativa
  ref <308>: DATABASE ACCESSION NUMBER: AK103195
  ref <309>: DATABASE ENTRY DATE: 2002-08-28
gctccctctctctctcctcgcttctctctctatcgcaggcgaaggcgaaggcgaaggattcgggctcagctcctccgcctccgccgatctctcgccggagatgtgtcagccctaggagaggagaagctttctttttttggaaaatcgagtcaacaaaaggtcttgccaattaacacagtgaaggataattctggcttgagtgtttgtaaatggagagaataagcaccaatcagctctacaattctggaattccggtgactgtgccatcgcctctgcctgctataccagctaccctggatgaaaacattcccaggattccagatgggcagaatgttccgcggggagagaattgagaagcacacctatgccacctcatcagaatcagagtactgttgctcctcttcatgggcattttcagtccagtaccgggtctgttgggcctctgcgttcgtcccaggcgataaggttctcttcagtttcaagcaatgagcaatatacaaatgccaatccttacaattctcaaccgccgagtagtgggagttcttcaacgctcaattatggatcacaatatggaggctttgaaccttccttgactgattttccaagagatgctgggccgacgtggtgtcctgatccagttgatggcttgcttggatatacagatgatgtccctgctgggaacaatttgactgaaaacagttctattgcagctggtgatgaacttgccaagcaaagtgaatggtggaatgattttatgaattatgactggaaagatattgataacacagcttgtactgaaactcaaccacaggttggaccagctgcgcaatcatctgtcgcagttcaccaatcagctgcccaacaatcagtttcatctcaatcaggagaaccttctgcagttgctataccctcgccctctggtgcctccaatacctccaactccaagacacgaatgagatggactcctgaacttcatgagcgctttgtagatgctgtcaatctacttggtggcagtgaaaaagctactcccaagggtgtgttaaagctaatgaaggcagacaatttgaccatttatcatgttaaaagtcaccttcagaaatacagaacagctcgatacagaccagaattgtctgaaggttcttcagaaaagaaggcagcctcaaaagaggacataccatcaatagatctgaaaggagggaactttgatctc

SEQ ID NO: 27754 - DNA, 1048 bp, Oryza sativa
  ref <308>: DATABASE ACCESSION NUMBER: AK103196
  ref <309>: DATABASE ENTRY DATE: 2002-08-28
ggatctcttggactctgccggcgccggcgttggtagggtagccatggcggaggaggccaccctgagccacccgtcgcggtacgtgaagctgagcagggagcacgacgcccccgcccccgccgaggacatccgccccggcgagctcaaccagccagtccacgtcccgcagctcgagggcaggaggtgcagcgagtgcggccaggtcctgccggaatcctacgagccccccgccgacgagccctggaccaccgggatcttcgcctgcaccgacgatccacaaacctgccgaactgggttgttctgtccttgtgttctttttggacgcaatattgaggccctcagagaggatatcccttggacaacgccttgtgtttgccatgctgtctttgttgaaggagggattgcgcttgcaattctcaccgcaatatttcatggtgttgatcccagaacgtctttcctgattggagaaggtttggtgttcagctggtggttgtgtggtacttatacgggcatctttcgccaagaacttcagaggaaataccatctcaagaattctccatgtgacccttgcatggtccattgctgcttgcactggtgcgcgaattgtcaggagcaccgtgaaaggacggggcggcttgcagagaacagcgcggtgccaatgaccgttgtgaatccacctgcagtgcaagagatgagcatggcagaaagccgtggtcctgtttcccccggtatggagaacggagcaccatcaaactcaaagggtgagcatgaggaacccaagagtgatcacgatgatgtggaggtgatacctctatagggtgaatgaaagaaagatattctttctgataataggatagcaagaggaatgaatcgatgtgacgaattcatggacgcttggcgacgatgttcttgtgtcatctggaactggaatcatcataaaacacacagggtgatactctttctttttttttgtactagtattaaaacttcaaatataattaactggagagcaggggctgcctgagtacattgctacgtttctgcatcc

SEQ ID NO: 27755 - DNA, 1058 bp, Oryza sativa
  ref <308>: DATABASE ACCESSION NUMBER: AK103197
  ref <309>: DATABASE ENTRY DATE: 2002-08-28
gtgaagctgccaacacaaagaaggcctatgtaagactgtatccatcattgccgagtatttcatggccacaacgacgaagtagctagcacataatttgctatagctccatttctatctcttctcgagagtgtacgtgtgtgagagagagagagaggctaataattaagtaagagagagtgccatgaactgcatcaagattgccatggtggtgacactgatcatcgtccctctcgcgctgaggggagcctcgcttctcggcaatgccgtcgccgccgccgtcgtcccgtcgtcgtcgccggagcagcagcagcagcagcagcggcggccgcggccgcctcccggttccaagaacggcgcctcgccgtcgtcgtcggctcatgggcagcactggaaggatcagagccgccacgccgccttcacccgacggcggttcggcaccggcaccggcggcggcggcgacgatggcttcttcagcgacgacaagaggttctcgccgactggatcaaatccgctgcacaacttgaggtgacgacaaggaacagcaagtgaacaaaacagttccatatattggaatccaaagtacacaagaccccatttaattggctgaatgcatatccaggtgacaaaatgcaaatgacagccagaaaaggctggtctgcatactctgcaggtaagtaagcaggagaaaagattggcctccaaagctacatcaaaatgcagccatggatgaaatttctggtcaaaagaacagagaggaagcatgcaacaatctgatgggtatagcatgcaatgcaaactcatgtacttctgctgaaaatgctgctctgcctatgccatgtgaaaatgtatggatctctgtcaggtactgcttttgagttttgagcagtcacgttatactgacacgcagatggtagtagagcaaaagacaaagttcttggtgttttttttttttttaatctctgatcatgttgatattgttggctagctaggggaacttttttgtgttatcctctgaattcttgtggggaattcagttattgtgcttgaaattatctttc

SEQ ID NO: 27756 - DNA, 2626 bp, Oryza sativa
  ref <308>: DATABASE ACCESSION NUMBER: AK103198
  ref <309>: DATABASE ENTRY DATE: 2002-08-28
gccttcccctctcccctcccaaaaccctcgccccgacttcgccggagcgccgacgccgcccccccaccatgctgctgcaccgccgtggtctcctcctccgcggcggcggcggcctcctccgccgcctatcagtggcggtcgaggaatccgtctccccgtcgccgcctcctccgccgccgcggcaaccgcaggaggactccgtggatgacgaggaaacggcctcgccctcgccggggaaaccgcaggagggctccgtggccgccgaggagagagcctctccctcgcctcatccgccgcggcgcaagaaggactccctcttccgccgggtcgcggccgccgcggacccgcgcctcccgctttgcccccgtcctggagcagtggtgcctcgccgaggaacgccctatcgcgaagcccgagatccagtccatcatcaagtatctctgccgccgccgccctagctagcacgtactccagtagactgcgatgggcgcgccgccgaccagggaatccgaagcccgcgacgaggaggcggaggtgtcccgatcgggtgagcaaggcggcggtgaggcctctacgacgcagcagcagcagcagccggtgcctctgcgccaccagctgctcggcgcctgccgcgccgacgaacgcctcaggcccctcctcactctcaacctctcatgcggcgccgccgaggaccgcttcatctcccacctctcgcagcacttcgaggcgtccgaggtcggcttgctctacaggtgtctctgcgttcccctcgtcgctcttcgcgtcggcaaggtcgaccgccatggtcctctcctctgcccaacgcccatcagaggaaagctgagccttggtcttcttccttcatcgagcatgtgcattatctttgctggtgatgatggtcattcggagcaactagctctcctgaacaatgaccatgaagtttcagaagtttgtgttgaagaaatttcagctgataatacaggacgatctttcctcatcaggatttcagaatctaaagttttttactattggtgtgctgagaagtcaaagaaacacgggatggaccttcttgcaaagatgaaaaatctactgcagggaaggccaacactctctgatctcacaggcatctcagattcacgactggatgcttttgccactcatctacacgcttatcttgttgcatcaagtattggagatgttaaatcgctgggatcacttaatgacttcctgggcgcttcaagcccacaagatcaatatttacagccctcatcagttgtttccaagtcttcacgcttctgcacctctgcagctaatgcagcaaaagcaagttctgtctaccaaactagtctgagtcccagatgtggtgcttttaaagatggagtgccaaggatgtcgtgtgcaaagattgctggaagagacaagctgaagcgacgtggggactggctgagctcatcaactggtcctgatgacgcaaatcttttgacaccgaagattgttagctctgattctgccagtgagaagtgtggtggggactgttctgaaaacagtgctaattcacctcctctagacttgcctctttcatttcccttgttgccatctctgtttcctcttgcgactcaatatccacttcctaaggattctacagagcaaccatttaagccttactattgctggtgcccaccatgcccatcttctctgcagtacagtgtaacccctctgcatatgccagttacatctgtagaaccactgcccttgccgcctttgagttctctgctatcaaatgatcagccgccgacttcaacagtttctgcaaagatggatacaactgatctcccgtcacttaatcttccatcgatactgcgtgatcctttacttcacctgccgcttcctacttcaccacttgtatccttgcatggttcacaagttccaacattcacaccattgatgtctgaccccattgtgcatgtcccggtcattgatgtgtgttcctctggccaggcttacctggtgagttgcgggccttctatgtctgcgactgttaccctgctccctagcttgaagcccctgattccagaaacagaatctttggttgagagaagcgctagggaaacactaatgaggcttatagcctcaacaccatctgcaagtaatccccagctggtgaacattctccctgcagtccttactgacgtgcctgaaatgaatgtgaggaaacatcttggtgtccatccaggcgacaggctaagctcatcttgtagcgtcgatgtgattggacctgggtttgccgtcacagaggatgatgcatctgttggagatggggctcacgcaacttttgcggaatatgatgatatcggcgatcagcagcattttcagagcatgtaggtggtaggttgtcgacaaggtactcgttggttgtccagaatattttgaaaggcagttgtatctatatggtaatagcttagcgttgggtttacttttgtgacgctctgcgtactgcctatttgctgtgatgatttagctgctcagtcaaaaacctcattaggttggtcaatgtaattagctgtttgtagtgtattcattcataaaactaaaagcaaactacccagttaatttgctcgtgcgtttc

SEQ ID NO: 27757 - DNA, 2207 bp, Oryza sativa
  ref <308>: DATABASE ACCESSION NUMBER: AK103199
  ref <309>: DATABASE ENTRY DATE: 2002-08-28
gctcctcctctcctttctctctctaaacctctctctcctctctctctctctcttgagttcttggttgatcgccattgccgcggaggagctagaggagatgagatgaggggtgcggggtttctgctgctcgttgtgttcgccgttgccgtcgccggtggggcggtggcggcggcggcggatttggacggcggcgatggtggtggtggtgtggcggcggagtggcggtttccgagctcgaggatgcgggacgcgtacgtggcgctgcagacgtggaggcgggaggccatcttctccgaccccggcaacctcaccgccgactgggtgggccccgacgtgtgcaactacaccggcgtgttctgcgcgccgctgccgtgggatcgccgggaggtcgccgtcgccggcgtcgacctcaaccacggcgacatcgccgggtacctgccccccgagctcggcctgctcgccgacctcgcgctgctccacctcaactccaaccgcttctgcggcgtgctcccggccaccctccgccgcctccgcctcctacacgagctcgacctcagcaacaaccgcttcgtcgggaggttccccgaggtggtgctcgacatgcccgcgctccggttcctcgacctccgcttcaacgacttcgagggcggggtgccccgccagctgttcgaccggccgctcgacgccatcttcctcaaccacaaccgcttccgcttcgacctcccggacaacttcggcaactcgccggtctccgtcatcgtcctcgcgcacaacagcttcggcggctgcctcccggcgagcctcggcaacatgtccgggacgctcaacgagatcttgctcatcaacacgggcctcagctcctgcctgccgccggaggtcgggatgctgcgagaggtgacggtgttcgacgtgagcttcaaccggctcgccggcccgctgccgtcggcggtggccgggatgaggaaggtggagcagctcgacgtcgcgcacaacctgctcacgggggcgataccgcaggcggtgtgcgagctgccgcgcctcaagaacttcaccttcgcgtacaacttcttcaccggcgagccgccgtcctgcgcgcacgccgtgccgcgctacggcgaccggaggaactgcctgcccaaccgccccgcccagcggacgctgcggcagtgcgccgcgttcttcgcgcgccctcccgtcaactgcgccgcgttccagtgcaagccgttcgtcccggccctgccgccaccatcgccgccaccaccatcaccgccgccgccttcgccaccgccgccatccccaccgccaccgtcgacatcaccgcctccgccttcaccaccaccgccatctccaccgccaccatcgcctccaccgcctgcaccaatcttccacccaccgcagccgccgccgccgccgccaccacccgcgccacaaccgcatccgccatgtccggagctgccgccaccaccaccgccgccgccaccctgcggcggcgcaacaccagcattgtcaccaccaccaccaccaccttactaccccgggccatggccacctgtccatggagtaccatatggctcaccaccacctccccctctgcaacaccacagctcatggccaccgatccacagcgtaccatatggatcaccacctcctcccccgctgcattgatagaatttctccgaagaatgtttggaaacatgcatgtgttccgctcttgctcctcacatccggcaaatcgacagcagcggaagtcgcacacaagtatacgtggtcattatcgttcttattagctactagtgttcttggttggttgattgatgactaccggcgtgaagagcgtagtaaggtgcacaaaattttgtttggttatgatttgtcggcgtcagcatcgaaacagtttgtgttgctgtggtgttgaaagggattgggaagtggtgggggtgtggggatttggaggatttgggaacatatgattgatggctaattgggttgtgaataataaggaaaagtttgagagggacaggagggtttggcagaggattgtaggtgcagggatatatgtggttgtatagatgagaatcatgagttcagttcagttaaattcagtagtagtaagacataagttttagaacaaaaggattctgtgtcatttcttcctgctgtatcacaattacttctggctattcaattcttattattatttagtatgg

SEQ ID NO: 27758 - DNA, 995 bp, Oryza sativa
  ref <308>: DATABASE ACCESSION NUMBER: AK103200
  ref <309>: DATABASE ENTRY DATE: 2002-08-28
gtctccgatctctctctctcacacacccgcctcaccctcaccgccaccgccaccgacgagctccggtcgccgccggcgagaggcgccgcgcgatcccgggagatgccgccgctcacggggcccaagtccggggacgccctcttcggcagcgtcgagcgcgtcaacgcggagctgttcacgctcacgtacggggccatcgtcaggcagctgctcacggatctggaggaggtcgaggaggtcaacaagcagcttgatcagatgggctacaacattggaactcggttggttgacgagttcttggccaaatcaaatgtatcaaggtgtgttgacttcaaggagactgccgatgtcatcgcaaagcttggattcaaaatgttcttgggtgtgactgcaactgtcaccaattgggatgctgagggtacaagctgcagctttgtattggaggacaatcctcttgtagactttgttgaacttcctgatacttgccaaggtcttcagtactgcaatgtgctaagtggagttattaggggtgcactggaaatggtgtccatgaagaccgaggttacatgggtccgtgatatgcttcgtggggatgatgcctacgagatgcgagtgaagcttaccaagcaagtcccagaggaatacccctacaaggatgatgactgacttgacaatttcgtggatagtttctcagttctcacatgctgcctgtttgttcgtctggatttcccttcttttctttcctatgtgactctggttctggatcgacttggctggacgctacatgagatagctgtgcattatattctacacttgaccttttcacggcagcatcaagtaggtatggaattaattcacttcattgtccttaagattttaacatgctgatcaagtatgttatccgcacgctaccatcagcaacatggatatgccatgtggtcatttgtgaggtttggctccgagcgggcacggaattaattcacttcaatcacctt

SEQ ID NO: 27759 - DNA, 2477 bp, Oryza sativa
  ref <308>: DATABASE ACCESSION NUMBER: AK103201
  ref <309>: DATABASE ENTRY DATE: 2002-08-28
gacgcccgtacctgcctctccctcctgcaaacggaggtggcgccgcgcggcggcgggatcggtcttcccgatcgccggggggccaagccgccaaggggagttcaccgcgcgcttcatccacgcgcccaagtaagttctcgttgttgctgtatctcagtttgtctcggatttgccgggaactctcgcactggggtcatggggttggtggttcgtccgtgttctctctttttttttttgagatatttatatccacttgtcagcactcagcactgatacggagtaatcaagctgacgagggaagatgccgttgagacaaatcttggattgcattgaattcattcagatcaaacgaaatctctcctgcaccatctcttgctaagcatagcactgccttatttcacaattacttcctctgtcccaaaataagtgcaattttagcactattcatgctaagtgcagttttagcactatttaagttcaacgtttgaccattcgtcttatttaaaaaaagattatgattaatatttttattgttattagatgataaaacatgaatagtacttcatgtgtgactaatttttttaatattttttatattttttttcaaataagacggatggtcaaagtgctaaacacaaatatctatggttgcacttattttgggacttattttgggacggaggtagttagagctgcaaattcttggcgttttatttgtggacaatgcgctgtatctttactgcgatggaacccttagccatttgtgctactcaacttcttcttttgagcgaattgcatgccattccatctgcttgcagatcactagtcatctgctgctgtctgcttccatggttaagtaggcatagtgttaacaagatcaagacgtatgataaagttcagtaagacacctcctttcatcttcaactcaattagaaagtactaaatttgactgctccaaggagatattgatgggtgtgtataaacattgctcgtttaaaaaattaacattttgaatctctcattgataaagaatgtaccactcccagcacatattttacaaattagtgtacagatgtttaattccaactataaaggaaaggaagagaacaaaccaccaaaatttacaagaccactacaacaaacatttcgaacttttttttcatgttctacaccgatatgcacaaattaattcgtatatgcaaatcaatcgatctaattcctagtttaggacctgtttcctagtccctatcaatcactatctcttctggaagttgagcttcatgatggcaaagccaaacaggaaggcaaataacatggtgaatgcgacgatcaccacagccacgaaacccagccagctgtgcttaaagtcaaaatagttctccacgaagacattcacgggtatgccatcatccatcggcgtcacgatatctccatattgcgagacaatcagcccgtatagtgtccatgctacagggcatatccagcagtaccatctccaccagactggagttgcctgagcacacggtccagggaaaatggaattgagctatagaaatgatgaaacaaaattaaatgcaggggccataaggatggtggtggttaccggtctggagatgacgaacccggtgaagaggttccagatggcatagaaagccgaggagacgattgaggcgacatggtagcttggtgttaggcccacagccatcatgccgtagaatgtgaagtatagcagcgtgaagaacatgaagaagaggtaccagaagaatttagccactgtccattggaacccaatcatcgagtacactatgatgctatatatgacagactgaacaagtgtgtacgggaattcaatggcaacctgcaagggagaagttgataactgtcaggtttctcagcaatacgataaccagcaggcaaagcagtgtcaggcattgtcgaattgatatgagagctatgtacctgcccaaatgcatacgggagagctgaatacatcccagcagctctttcacggtaaaagactgtcctctccactgataccactggctgaactgactgaccgtttagcacgccaataaacagcactgcagcatacattgaccccatggcgttgaacaagtcttgtgactggcccctggatcaagaagccaaagacgcgtaaattacattttgaagatggtttagtcatacgccatatatgtctacatggtaagtgcatacattttaccaccaaggtcccagaagatggtaccgaagatgagagctatgacagtagtgaaaaatagtcttatggcattgtaaggaggattcctccagtatgacaggtgctgcttccacaggcatgccaggcattgaattaagaaagactgtgagtactgtgtaggaaaatatagttcacttgaacctggcggtggtgtgctcagttcctgtatcaatgccttgttcctcctatgaatatcaattgccaatgttcagattgc

SEQ ID NO: 27760 - DNA, 582 bp, Oryza sativa
  ref <308>: DATABASE ACCESSION NUMBER: AK103202
  ref <309>: DATABASE ENTRY DATE: 2002-08-28
gggctttggtctggaaggggagaggaggcggcggcggtgggggatggcggcggcggcggcggcggcgacggcgacgctccggtgggtgctgcagatgcaccgggacgtgccgcgggcggcgaggttctactccgaggggctcgacttcagcgtcaacgtctgcacgctgcgatgggcggagctccagtccgggccgctcaagctcgccctcatgcacaccaacgacagtaatcttgcatcgcagagaatctattcttcgatgctgtcattcactgtaccagacataaacagtacagttacgaaattattgtcgctgggagctgagttggatgggcccatcaaatatgagatccatggaaaggttgcagccgtacgatgcatcgatgggcacatgcttggccttttcgaaccagcgtgaagaacctacactgcaatgtacataatgaaaaaattatttcaatttcttgcagatggtatgttttatttctgtggactgaagttgttgttgacagaagcaactgactgggcctgtagtgtctgaaacactgatgaatagttagatgggcatctctttctgttaag

SEQ ID NO: 27761 - DNA, 2400 bp, Oryza sativa
  ref <308>: DATABASE ACCESSION NUMBER: AK103203
  ref <309>: DATABASE ENTRY DATE: 2002-08-28
ggggggcgcgcgcctgcgcgcctctctcccgcagtcccgcccgcccgcgcgcgcgcgcggcgctcgaaacaggcaatcgctttccccatccaaaaccagtccaccctcgcgccgcgggggaaaaccccgaaaaattttcttcttcccgccgatggcacgccggttcagacccgcgcccgcacgcggcggcatccaaacattttttttccagccgccgccaccccttccctccaattttcgagcgtggccacgcgtatttcagtggctccggagctagcttaattagcagtgcccacaagccaccgtctccgcagtccgcacacaggttcttcaatcctttgagagagagcgagagcgagagcgagaccgtgcggccgtgcagggatggagagcttcaggaggttcctgaacccgctggtgctcaacctgcagaagatggagctggagctcacctgccccgtctgcctgaagttgctcaacgcgcctaccatgctgccatgttaccacacttcctgcagcaagtgtgctactacacggaccatggacggttacagctgcgcgatttgcaaatcagcttatcgttctcaagacctaaggcctgcctctcacctcgaggcaatagtgaacatccacaggagcctaagctctacagtcagcagcatggtcactcagcaggaggctcaagctgatattcctgttgcaaagacatcatttcaaggaactccagaatcgggaaacagaaatggagcagagaaatctgatcaggtgaaatcatacaccccggttgcttctaaactggcatataaccagtcaactgggcttgcatatggaaatgtggacggcgtgaaagaaagaaatcctgcattggagactagaggtgcggctgatgtgactgctatgcccacaattcttgtgcagaagggaccctgccgatctcaatcttctgatggccctagggatctggattgcgacagcaatgaccttgaaggagagctgataacaagcagatcatctcctcaaagtgtcttgaaaagagaaccaaatacagcgaatgatgataatagagaattaaaaaggcaaaagtccactgatcaggatgatagacaaccagctgttgctggtgcttggaaatgtgaattttgtcactcttccaaaaccactgagagtactggccctctgtcccattatctgcatggtgagccattagaggataaccaagcatggaaaccaaacgttttacatgttcatgagaagtgcattgaatgggcccctcaagcgttctttactggtgacattgcaaataacttggagcctgagttggcccgtgcttctaagatcaaatgcagtgtttgtggactaaaaggtgcagcccttggctgccttgtcaagagctgccgcaagagctttcatgttccatgtgcccatgggatatcaggctgccgatgggatgatgagaactttgttatgctgtgtccttctcattcctcgaagaagttgccatgtgagagatcaaagtcaaaaaataagaagaccagcttgcagcgatcatcttccgatacaatgcttgatgacctgaactcaccatctacaatccatatggatggactttggactgcttcaccttttctcactagtgaatgggttatatgtggatctgctctctctagtcaggagaaggaaatcttggaccagtttgagcaccaaactggcatcactgtaactaacggttggaggtcgaatgtgactcatgtgattgctaatacggatgaatgtggggcatgtgccaggacactcaaggttctcatggccatactagctgggaaatgggttctgaatataaactggctgaaagcttgtatggaggctaaagaaccagtcccagaagagccttatgagatcagttctgatgttcatggctcctttgatggccctcgcatgggaagactacgagcaatgcaaaatgcaccacatctgtttgcaggattgaccttttacttcagtggccatttcatgcccaattacaaggttcaccttgaagatttgatcactgcagctgggggatcaatcttggacaaggctgatctctctagcacatccttgataatttacagcatggagccaccacaaggaagtgatcctgatacccttaatgaggtcatcagaaagaggaaggctgaggctgaagaattggcggcaacgattggctccagggctgttcctcatacatgtgttctggattctattgcatcatgcacagtgcaattgaccatgtgatgctgtatcttaggttaggagttaggatgttactgatatgttcttgagtgaaaatatcttctagatgttgtaagttgtaacgtgagcaagcaatttaattcaaataatattgatatgtctctttcc

SEQ ID NO: 27762 - DNA, 1601 bp, Oryza sativa
  ref <308>: DATABASE ACCESSION NUMBER: AK103204
  ref <309>: DATABASE ENTRY DATE: 2002-08-28
gaaaatccaatcctcctcctccagatctctccaccccacctccgcctcccatgtccgcctcctcgcgcttcgatctccgggcctcgtcgcacccgcaccagcacgccatcggaggcggaggcggaggcggaggcatgagtgacggtggcggtggcgcggcggcggcgttcgcggacgcggggaacctcgagcactgcgccaggtacctcaaccagacgctcgtcaccttcggcttcccggcctcgctcgatctcttcgccaccgaccccgtatcgattgcgagaacgtgcaactgcatctatgctcttcttcagcagcggcagcgtgatattgagttccgggagtctaccaatgatctgcgtcagcgtatgcagtctgatatttctagattagaagccaagattgaaagaatggatgctcaattagctgcaaaagatcgcgagctggccacattgactagaacggaggccaaaaacactgcaactttgaaggctcagattgacaagctgcaacaggaacgcgatgagttccaaaaaatggttattggcaatcagcaagtacgtacccagcaaattcatgaaatgaagaaaaaagagaaagaatacatcaaattgcaggagaagttaaaccaggtattaatggagaaaaagaaggaatcatcacgttcaggaatggaaataatgaacttgttgcagaaagaaggacggcagcgtggaacttggagtggaaaaaagaatgacaatgattattacaaaatgattgttgatgcctatgaggtaaagaagcaagagttgatgcaagaaaatgctgatttgcgagcactattgcgttcgatgcagatggatatgcgcgagttcctcaatgctccaaatggagttcaacagccagctgttgtgggcaatggacgacaggaggcaggatctcctcagtctccacttggtggcaagacggatgtctttgatttgccctttcacatggctagagaccagattgaagagagtttgcgcactaaaatggcttccataaaggcccgaatgacacaacttcaagatgcccaaaagggtgcagaagtgacatcagaagctaccgagcgggaacttgaacttgaagctcaactagttgaagctagaagcattatccaggagcaggcatccctcatgtccaagcactttacgaagtctgataaaccaaggaggttgagtggattggatgctgagcgtgaggcggttgcagctcaggaggtgtaaattatgtttgtgtcgaccttcacaggcttcagctatccaaggcacgtcacgatgccaacctttcatcgaggtctcatgtgtttagtaaccaccaagcttcctccttggtaaacctgttgttgccatggtagcatgacttctaggcgttctctgtgtagtattatgtgcaggagcatctcctccgctgttgctaactgcctgcctctgactgttacatgtatcgcacttctactgttagggagaacagatcaatgtagctattatggcctacgaaataggcatcaataccttacttacagaattgttattcccttctttcaaatgtggagctagttgtggctgttgacctctggc

SEQ ID NO: 27763 - DNA, 1428 bp, Oryza sativa
  ref <308>: DATABASE ACCESSION NUMBER: AK103205
  ref <309>: DATABASE ENTRY DATE: 2002-08-28
gaggacaaatcctcctcctccccgtcctcggcggctgatccccacccgtctccctccaccagcgcgcgcgcaattccccccccccccacccatcctgcgtgcgctccggcctcgaggagattcagagcctacgtaatcacttagaaatggatagagggcgaaatggaagagatgacttctttggtgggagggacccgtttgccggattcggtggctttggtcgccagaggagcttgatctctggtgtctttggaggcagggatcctttcgatgatccgttctttaatcagccatttggaagcgggatgcacggtcctagcctttttgggccaatgggaggaccatttggagacataaggaatgatggattccttgagcaagctcctcccagaggtaatggcaggaagcttattattactgagcttgatgaggaggaaggagagaactcagggaggcaacgccaagcaaatcgtgagccgtatgttcaagaaccagatgatgagatgcaagggggccaactccagccacggagggatttcaacagggcaaatgaagggcagccacaagctcgtacattcacatatcagagctcttccgtgacttatggtggtgtcaatggagcttactacactgcttcaaaaactcgaaggacaggaagtgatggaataactgtggaagaaagcaaggaagctgatacaacgactaaagaggctactcatagaatctctcgaggaattcatgacaagggacattcactaacaaggaagctgaaatcggatggcaatgtggacactacacagatattgcacaatctccatgaagatgaactagctgggttcgaggaatcatggaaggggaatgctaggcatcacttggctggcttgaaccaaaatgctggtacatctaataataatgaaccaggtaaccgtggcaccagtggacgtggcaggcaatccgcttggggttgggctcttcctggaagagagcaaggccgtgatcaaagacggaacggggaacgaccgaaatcacgtgtcataccaatctcctaaaggatttctcttatacatctacggatcgaatcagtaaactgctagttgtgaaagcagcaagattcaggtccagagaatttaattaggttcaggtgaatagtcctgattcctgaatgtcccgagtgtcccctacgacctcgtgtgtctgtatggtgtaatctgtattgtgtaccggaaactgtaaaaacgctgtcgagggtatgtgctgcctttcgatctgtagcagcacgaatgtatgatacgctgtcaccacgttgctgttttgctcatggggaaaactgaaaacacggttcttgtaaatgcctacgtttcgctctacttgtgtgtttgtccggaaccccgaagggtccatgtaaaatactttctcctatatgtgatc

SEQ ID NO: 27764 - DNA, 1097 bp, Oryza sativa
  ref <308>: DATABASE ACCESSION NUMBER: AK103206
  ref <309>: DATABASE ENTRY DATE: 2002-08-28
gaggcactcatcgagctacattttgctaactatccagtaccaagaacggagctgcaaggaagagacgtacgatgaccatgacgtcgacgacgacgaaggccatggcgatggcggcggcggtcctcgccgccgccgccgtcgcggcgacgaacgcgcagacgtgcgggaagcagaacgacggcatgatctgcccgcacaacctgtgctgcagccagttcgggtactgcggcctcggccgcgactactgcggcacggggtgccagagcggcgcctgctgctccagccagcgctgcggcagccagggcggcggcgccacctgctccaacaaccagtgctgcagccagtacggctactgcggcttcggctccgagtactgcggctccgggtgccagaacgggccgtgccgcgccgacatcaagtgcggccgcaacgccaacggcgagctctgccccaacaacatgtgctgcagccagtggggatactgcggcctcggcagcgagttctgcggcaacggatgccagagcggcgcgtgctgcccggagaagcggtgcggcaagcaggccggcggggacaagtgccccaacaacttctgctgcagtgccggcggctactgcggcctcggcggcaactactgcggctccggctgccagagcggcggctgctacaagggtggcgacggcatggcggccatcctggctaacaaccagagcgtctctttcgaagggatcatcgagtcagtggctgagcttgtgtagatcgatgagtcgatcgtcgccatgagcgttttctgctttgtatgcctctcggcgtacagggcttttcagcttagctgcctttcaataaaatcactgatcatggcgatcgacatgcagagcagtgttgtgtacgtagttgctcatctgaataaataaaggggctgagcctgagctgctgcctagctcgcaccaacagagtccggccgggaggagttgtagtttctgaaggtgagctagctagctttgggatcgatgtatggatcagcaatgtaacaatgtgttgtggaagcccgtagctactaactagctcattggtgcatgaaatatatgtcattatctgcc

SEQ ID NO: 27765 - DNA, 1704 bp, Oryza sativa
  ref <308>: DATABASE ACCESSION NUMBER: AK103207
  ref <309>: DATABASE ENTRY DATE: 2002-08-28
gaccagaccagaccacctcctcctcgagcttcccctcctccccctctttccaaatttccccaatctcgcgtcgcttcttccccgaattccccaacctcgcatcccgattcctcccgcggatcgtgcggcgacctcgcccaaaatcccccgccggattggcctcgccgatggcttaattggcgatttcgactctgcaatggaggcgcagtggctcgccgagtacccgcaccagggcgccgacaagcggccgcggaagcggccccgcctcgcctgggatgtcgcgcccccgctgttccagccccccaaggcaattcctatgctatattgcgggcaggaactaatcaatggaaattttgcgaccgcttttctgccaccgccaccaatctattatacaggaccaccacgcaatctttcgcctccctggaggccagatgacaaggatggacactatgttttcgcagttggggagaaccttacaccaagatatagaatacttagcaagatgggtgaagggacttttggacaagtcttagagtgctgggacttggaacaccaagagacagtggctatcaaaattgtgcgctcccttcagaaatatcgagaggctgctatgattgaaattgatgtgcttcagaggcttgggaagcatgattttactggtagccgctgtgtgcaaatacggaattggtttgactatcgtaatcatatatgtatagtatttgagaggctcggaccaagcttatatgacttcctccgaaagaatagttatcgtgcatttccgatcgaccttgttcgggaatttgccaggcaaatattagagtctgttgcatttatgcatgacctgcgacttattcacacagatctgaaacctgagaacattctccttgtttcatcagaatctatccgggtgcctgattataaggttacaatacggcccccaaaggatggttccttttttaagaatcttccaaaatctagtgctatcaagctgattgattttggaagtacaacattcgaacaccaagaccacaattatgtggtatcaacaaggcgttatcgtgcccctgaagttatccttggtcttgggtggaattattcatgtgatttgtggagtgtgggatgcattttagttgaactctgctcgggtgaagctctctttcaaacacatgaaaatttggagcatttggctatgatggagagagttctaggtccccttccaaaacatatgattgtcagagctgatcgccgtgctgaaaagtatttcagacgtggattaaggttggactggccagagggggctgcctcacgggaaagcctgaaggcagtctggaaattgcctcgtctgcagaatctggtaatgcaacatgttgatcattctgctggggatcttatagatcttcttcaaggccttcttcggtatgatcctgatgcgcgcctaaaggcacgtgaagctcttcaacacccgttctttacaagatgccacagaagatgtggttactgagactatactgagattaaaatgctcaatgctgtatttcttcattttgatgtgtaagaaccacccaaaaaaaaagtgaagatgttccacaaaaatgaaatgtgctaactcgcattctgttcgatgatgtgcaaggtaactgttgtatatagacagagttctacgactgccgatttattttaactgggagatatttttcaattctt

SEQ ID NO: 27766 - DNA, 2470 bp, Oryza sativa
  ref <308>: DATABASE ACCESSION NUMBER: AK103208
  ref <309>: DATABASE ENTRY DATE: 2002-08-28
gaccttccccaccctcattggctcccccgcctgcctccccttctccatccaccaactcgccgcacactcaaccccgcctcgccgccgcacaccacccaccggcgaagagaagaagtcgtggtttttcttggctgcaagatgataacgggggcggacttctaccacgtgatgacggcgatggtgccgctgtacgtggcgatgatcctggcgtacgggtcggtgaagtggtggcgcatcttcacgcccgaccagtgctccgggatcaaccgcttcgtggcgctcttcgccgtcccgctcctctccttccacttcatctccaccaacaacccctacaccatgaacctccgcttcatcgccgccgacaccctgcagaagctcatcgtcctcgcgctcctcaccctgtggagccacctctcccgccgcggctccctcgagtggaccatcaccctcttctccctctccacgctgcccaacacgctcgtcatggggatcccgctgctgaaggggatgtacggggagttctccggtagcctcatggtgcagatcgtggtgctccagtgcatcatctggtacacgctgatgctcttcatgttcgagtaccgcggcgccaggatcctcatcaccgagcagttcccggacaccgcgggcgccatcgcgtccatcgtcgtggacgccgacgtcgtgtcgctcgacgggcggagggacatgatcgagacggaggccgaggtgaaggaggacggcaagatacacgtcaccgtgcgccgctccaacgcgtcgcgctccgacgtctactcgcggcgctccatggggttctccagcaccacgccgcggccgagcaacctcaccaacgccgagatctactcgctgcagtcgtcgcgcaacccgacgccgcggggctccagcttcaaccacactgacttctactccatggtcgggcgcagctccaacttcgccgccggggacgcgttcggggtgcgcaccggcgccacgccgcggccgtccaactacgaggaggacgcggcggcgcccaacaaggccggcagcaagtacgggcagtacccggcgcccaacccggccatggcggcgccgcccaagcccaagaaggcggccaacggccaggccaagggcgaggacggcaaagacctccacatgttcgtctggagctccagcgcgtcgcccgtgtccgacgtcttcggcaacggcgccgagtacaacgacgccgccgccgtcaaggaggtccgcatggccgtcgcctcgccgcgcaaagcggacggcgtggagagggacgacttcagcttcgggaacagaggcgtcgccgagagggacgcggaggccggcgacgagaagagcgtggcggcggcggtgtcgggtgagcatggcaagcctggcttgacgccggcgccgacggcgatgccgccgacgagcgtgatgacgcggctcatcctgatcatggtgtggcgcaagctcatccgcaaccccaacacctactccagcctcatcggcctcatctggtcgctcgtctgcttccggtggaacttcgagatgccggcgatcatcctgaaatccatctccatcctctccgacgccggcctcggcatggccatgttcagcctcgggctgttcatggcgctgcagccgcggatcatcgcgtgcgggaacaaggtggcgacgttcgccatggcggtgcggttcctgaccggcccggccgtcatggccgccgcctccatcgccgtcggcctccgcggcacgctcctccacgtcgccatcgtgcaggcagcgttgccacagggcattgtccccttcgtcttcgccaaggagtacagcgtgcaccccgacattctcagcacggcggtcatctttggcatgctcatcgcgctgcccatcacgctggtgtactacatcctgctggggctgtgactgtgaacaaccaccaccaagaacagcatgtttttgcaggtgagggtcgtcatgtttgcagcgagtgccgggacagaggagaagacaaagggctgcatgcatgcatcacgctgcagtcacccaccagttcaccatggaggaggaggagcaagaagccaagcaaccaagcagcaatgcagtgcagcagctgggttttcattagagtttttttaggtgtagagatcgatggatgggagtatggataattgttttagggcagagagttccaaaaattgcaggcatgtgcaaaggctttggagggaggggagggggaggggacagggttcaggtttttagtacagggcctgggggtttataggggagtgagaatgtgagatgcatcgcttggctgggttggctggccttgtggtgaaatgggtgtgtgtcactttggtggaaaaaaaacaaatggtttagtagagctcttgttcatcctacggtatagtagtactttggcatggcacaatgcttcggctttgattagcaagattaatcaataatactagtaatagct

SEQ ID NO: 27767 - DNA, 642 bp, Oryza sativa
  ref <308>: DATABASE ACCESSION NUMBER: AK103209
  ref <309>: DATABASE ENTRY DATE: 2002-08-28
gatccatccatctatccacccaaccactctctcgctcgctagctcatcgctcaccggccggttgagatggcggcggagggcaatgcgtcgtcgtcgtcgacggcgacgggaagggggtgcgggctggcgctggggaggttggtgaggaagctgaggaggcagagcaggatgatgctgtccacggcgacgtcgtcgcggccgccggcggcggcgaggtgccagtacgacccgctcagctacgcgcgcaacttcgaccggagtggcctcggcgacgacggcggcgacgtctccgcgcagctctaccaccgctacaccttcgcctcccgcttcgttctctcctcttcgtccacggccgctcgccggcagccgcaataggggccgagaccgatgctagctgaggcacgcatggccggtctgcgcgtgccagtgctgcgcgtagctaagctagctagcttagctctagccattagaggtagatgcactcttgttcttcatcctgcagtgttgttaattaattagtgtgttcatatgaggagggagtggtggttgtaagggatttcttccatggctctctccattggccgagatgatggtttcgatctctcgtgctgatttcttggaaatccatgcacattattcctg

SEQ ID NO: 27768 - DNA, 2918 bp, Oryza sativa
  ref <308>: DATABASE ACCESSION NUMBER: AK103210
  ref <309>: DATABASE ENTRY DATE: 2002-08-28
gagcttccacctcctgatccacccgaaccctagaatccactgcgacgagcagctgaggaagaggaggaggaggaggaggcgttctcctgggaggggaccccgtcccgcccgtttccgccatggcggcggcggcggcttcgtcctcctcctcgccgtgggcggggcggatggcggcggcgttcggggcgccgttcctgtggctcgtctgcctgatctacttcatccagggtttcaggtcttttgtctggacagctgtctcgtaccaaatgaaggacatgatgaaactgtcaccatcaacatcacagtttttggtctcagttgcatatttcccttggagtataaagcctgtatatgggtaatgttacttctgtttgcttctgctgtgaactgaaatttaatcatgttccctacaacctaattatgttttttttgctacagagtagtttttgtaatgtactgtttcaaacatcatgtgccttacacagttacaccttagtttcagaaatcttacatgtaattatacttcttacaacaacagagtttccctgacatgtttactgtggcttatctctattgcaagtgattaaagtgtagttgcttacaaacagatgggtgctcaatatttcctgagcaagcaacaattattacttactgccttcggacaatttgtcaattatgacaattataaatattcttttgtagcataagagctaaacaatttgtcaattttatatttactgccttcacacagattaacacgattaattctaaaggatgtttctgaatagggtatatatcaactaattttggaaattattttactttagtggaaaatggattaatatgtgcactgcatttggagacccgacagtaaatgtgaaaaggcaaaaggaagtgctgcaagcactccaacatcgatgggtatttttttctgttggatcgcttagttttcctcatgcatttatacccactcaaatgtttgctgcatacttgctgtggagctgtgcattatggcattatgtaacagatagtcctgtgtaacattaaaatcacaggtcttagaaatttcttctatgttgaattgcacggcttgtcggcttctgagcactggctgcccattactgtaaaacatctatatgcgtttgtgtataactataatgagtttcagattgtactgtacaaaatccagatactcgttacttccggatgagtctcctctgactacgtcagagggactttgtcactgacatgtgggacccacaaaggttgggcccacacatcagtgacccacgtccctctaactttacgtcagaggagcgcgatccgttacttacacatgcatctttgtgcctgcaggattttgtcagactgtattcccatcaagcagaggaagcgtacgccctatttgatcatttctagctgtctatctctatttccgtggctaatccttgggatgtcagaacctttgaggagctcaagcaattttcttactgctttgctgatagtacagaacttgggatctgccatggcagatgttgttatagatgcaatgattgcagaagcagttcgatcagctgggccagaatttgctggtgatctccagtcactatcttggtcatcaatggcagtaggggggatttttgggagcttattggggggatatgcactgtccaatctccctatacatgttatatatattattttctcggcgcttccattgtttcaactaatttcctgcatatttgttgaggaatctccaaaaggatttgagagtagaatggataatgctgcacctaaacatgtcgaggatcaaactattgatgcttctcccggaaaaagctctagtgaatcatataaatatgaagatactagaaggcgaaaaggagctaggagaaataataaaaggaaatcattgtccaaacgacctgaggaccatgacaagaacaagtcaactaacttaaggccatacttgtctctgaaatcagcattcttcagtttatgcacagcattcaaacaaccaactattttacgacctatggcgtggtttttcttttcgaatgtagcaattccaaatatctcaacagtcatgttctactatcaaacagaggtcctacatttggaggcatcctttctggggactgcacgtgtaattgggtggttcagtctaatgcttggcacatatatctacaaccgctattttaaacacaagaaactcaggaatattctcatgtttgcacatgttggtcttgccataattggcgtactggacattcttttggtgttgcggttacatgttcactatggaattacagacaaatacatggtcttgtggggttctgctttggctgatgcaattaaccagttcaagatgatgccgttcctcatcctctctgggcagctttgccctcctggaatcgagggaacactgttcgctctgttcatgtccatcaacaactttggctcgactttaggctcattcttgggagcggctctggcgtcagctttaagcatctcatcagcacaattcgacaatctggcgctcggcttaggtgtacagctgattggcactctcctaccggttggatttttgtttctgataccaaaggaagttacagggctaacgtcataggaagagggatacacatacctgaccatcattttcttttttccggattggtttgcagtcttaagtgctggagtaattcagaacagaaaaattaaaggtagcatgatgaaggtactaaggtagtcaattctgttgaaagatgtatacatgaatacactagagtgaggaagaatacaaatagacagtagatggtaggcattgccaagagttgagcaaaggttatgtacctgcgtaatgtactacagtggaagtgacattttttccccggagaaattgacattactgacattgg

SEQ ID NO: 27769 - DNA, 2166 bp, Oryza sativa
  ref <308>: DATABASE ACCESSION NUMBER: AK103211
  ref <309>: DATABASE ENTRY DATE: 2002-08-28
gcggaacgccgcgtgcgtgagagagagagagagagagagagagagagagagaaaccaccccaaaattagcgaggcgaggaggaggaggcggaggaggggagccgcaggaatggcggcgatgcagagctggcgcaaggcgtacggcgcgctcaaggactccaccaccgtcagcctcgccaacctcaactccgacttcaaggatctggatgtggcgatcgtgaaggcgactaaccacgtggagtgccctcccaaggagcgccacctgcgcaagattgttgccgcgacgtccatcgctcggcctcgggcagacgtcgcctattgtatccacgcgctttcccgccggcttgcaaaaacacgcaattggattgtagccttgaaaacacttgtagtgatccatagacttcttcgagagggtgaccctacttttcgagaagagcttcttaattttgcacagagggggcgtattttgcagctctcaaacttcaaggatgactccagtccaattgcttgggactgttctgcatgggttcgtacatatggtctgtttctggaggaaagattggaatgcttcagggtcctcaagtatgacgttgaagctgaacgtttgtccaaacaaggtcaaggtcctgaaaaggggcacagcagaaccagagaattggagtcccaggatctgttagagcagttgccagctttgcagcagttactatatcgacttgttggatgtcggccggaaggagctgcaaataataactacttggtgcaatatgctctagctttggtgctaaaagagagcttcaaaatatattgtgcaataaacgatgggattattaaccttgttgataagttttttgaggtgccaagacatgaagcactcaaagcccttgaaatttacaggagggcaggccaacaggctgggagcctatctgacttctatgaaaattgccggggtctagaacttgctaggaatttccaatttcccactctgagggagccgccacaaacatttcttgtcactatggaagagtatgtgagggaggctccacgcatggttccagtgcgagaaccattggaattacctgagaggcttcttctgacgtataaacctgaagaacaagaggaagattctgtgcctgatcctgtcgaagaggaaaaaccacctgttgaagaacctgttccagtaccacctgttactgaagctgtttcacctcctcctcctcccaagactaaggtggcagatactggtgatctactgggattaaatgatccgaaccctagtgtatcagcgatagaagaaagcaacgctctggctttggccattgttccagcagatgctggtgcttcaacatccagcaccgctacatggcaagataaaggatttgatccaacagggtgggaactcgcccttgttaccactccaagtaacacgaattcatctgctgcagatagtcaactgggtggtgggtttgacaagctcatcttggaaagcctatatgaccagggggactacaggcagagacagcaacagcagttatatggttcttcagctcccaacccgttcatgtcaaatgatcctttcgtaatgtcgaaccaagttgctcctccaccatcggttcaaatggctgccatgtctcagcagcatcaacagataccaactatgatgcaagcgaatccctttggaccaccaatgcaaccgcagcatgtgggcatgggccctgcaacaaacccatttttggattctggttttggcccattcccaatggcgaacaacgggcatcagcaagccaacccatttggtggcacccaacttctgtaggttgcatagaagaagagcatatcgtgtcctagcaaatgcgattttcgtgtgattatattatgcattgtgcctggccttacttgtatgtcactcgtgtaattgattttgtgtattggcctcgccacacggggctggcaagcaacccttgtaaagaaattagtggcctgtgtagcatcagttatatgtcaataaatagtatgacatgattacaaaccaaaatggctggttgaacaattattctaaactgctcatgcatgatactccatttaagcctccttggaagcgaaggaatttaggaggaatgaaccaattcctatgaaattcctttgttccaaagaagcctgtttcactcc

SEQ ID NO: 27770 - DNA, 2189 bp, Oryza sativa
  ref <308>: DATABASE ACCESSION NUMBER: AK103212
  ref <309>: DATABASE ENTRY DATE: 2002-08-28
gggagtcgctgaccaccatggcaaccaccaccgtgcacgccactgacgccatggccggacggggcctctccgccgccagatggggattgctctgccgccgaagggtccgcagcgaggccgcgccaactcgtggatcggcggcgcaaggcggtgccataatggcgtttccttcctcgatccgatgccgctgttgcttccactgtgagccgccaccatacacgcgtgcttgtgcggcgacccggcgatgcggagagggaagaaggccgccgcttcctcgcggcggccacggcgcgctagatcaagggaggcagctcttgcggattgatcactgaagatgggagagatagtcagttctgccattgttaccgagacagtgaacaaaatcatatctggcatgattgacaattatgagcaaaaattaagtgcagacgagctgatggagaggctggagatggcacaaatcaagttggagcttgcacttgagacatccagtaagtggcagatcacgagtgagccgttgctgcgttggcagaagaagctgaagcgtgctactgaagagtgtgatgacacactacgcaagtgcaggcagcatgtccaggaagaagaggagaaggaacagcaagtaaggaattcctcctttcctaggcgaattgcctgtgccaccaaatcactgatatcatccatctttcacggcaatatcgacgagccaagtagatcaactgttcaaagatttgagtggtttgctaagggagctgatgactttctgaaatctctggagtttggagggacacctcgccgttacttgttctttgaccctcttatcgggcaccttcttgctggtgaaacacttgagtacaaatttgtgcagggaaacaagcagcatttgttttggatacggcccaatgacattgcagatcgaggagtagaagctaagttgatctttgtttacaacgattgcagtgcacctgagaataactttttcctcggtatgatgctacaaatttcagagagtacaaacataattggcactataattaagtgcttgcaatggtttacccctcatttcaagtctacaactgaaactgttaggaaggaacttgctcagctccctacacaagacttctcctgggtgtcacattatcgttcataccattgggacaacattcatggtatagctactaagtggttccgcccaaacccaatatgctgcaaacatcaagatcagagcatgtgtgggagtggcagcatggacaaggcagaactgctagatgtttctcttcaaccaatcattgaagtgtatttggagcgtcaaatcacacaatttagatgcaacagtcagagggcagctatacaaggaaaaaacaataaacagagagcagctgtacgaggaaaaagatgttatccaagaaggccttcacatctgaaacttggggttctttttttgcctcatagctcttcaaatgaccttctgcctgcagctgagagttctgcagtagaggtgatcaatggcgaggagcagccttggtatcacagaaacattaccctggaacagctagacaaggtcatgctgccaaaggcaataggtagcatcaatcagaattctgaagcaacagcacaccagcttctctggaagtcaaaacatgaagctgcattctttcatttggggaagacgagaatgaatatgccgagcacattgagcactgctagggaagcaactgtgtcgagacgacaggaacttgatctggagagccgggcagatgtgatctctgagttcctcaagttgtgggttgagcgtgcgcctgtccagatgcagcgctcaattgtagactggattcagaaagagaaggaagtgcagttagcgccaacaccattctagaattctagatcatgtaagagagatcgatgagggtaacaaggggaatggataggaagttcttcatgatgagaaatgagccttgttcagtcttaatttctaagccagcaataacttggtatgtacaatagggtttcatgaaagtgaagcacagtctgttcagctcagcatataagcaagctggtaataacatggtgttgaaatattacgcaagaaatccgttcactggatgggtaatcgttctttttatctgaatttttcttgtctaatcttttgccatcattgaaagtgtgatgatgatattgatatatagttt

SEQ ID NO: 27771 - DNA, 2768 bp, Oryza sativa
  ref <308>: DATABASE ACCESSION NUMBER: AK103213
  ref <309>: DATABASE ENTRY DATE: 2002-08-28
gctttcttccccatctttctccactcccctttcgcactcgcactcgcactcgcactacacccacccacccatcgatccatccatccatcgatcagttgtgaattgtgagttgttgttgttcagttcaaatccaagcggagtgtggccgagcaccgcaaccgcttcgattcccccaagcattcggttcgccatgagcagtgtcagtagtggggcgaggtggcgatgaaggcgacgctgctgccgccgccgccgccgccggcgaagaggcggagggggccacgcgtggccgtgctggcgctcttcctctgctcgctgctcgttcccctcgccttcctcttcgaccgctctcaatccgggtacgtcacgacggatgagcggcgccgacaggaggttgctttgcctgagttccatcacgtggagaaggcggatggtgacggtactgtcaatggactgaatcaggatgcaccaaagaagacgcccaaagttaacagcggagggctgcagaagcataagcaaactgatcgacacacctcccgtattagcactaaaccaaaagttcttccctcaccaaaagttgacccatcagaggctgtgaaggagtcaactcaaggcacaagagaggttagcaaagttagaaagagactagacaaaggcacaaacacagatgaagtggaaaatgagaaggcttgtcaacttgaatttggtagctactgtctctggtccagagaacacaaagtagtcatgaaggactccattgtgaaaaggctaaaagaccaactatttgtggcacgctcatattatccaagcattgcgaagcttgaaggacaggaggaacttactgtgctaatgaagcaaaacatacaagaccatgagagggttcttagtgtatcgactgttgatgctgatctaccgtcctttatcaacaagaagatggagcagatggagcaaacaatagctagagcaaaatcttgcactgtagattgtcgaaatgttgacaggaaacttcgtcagatacttgacatgactgaggatgaagctcactttcatatgaagcagagtgcattcctctacaaccttggtgctcagacgttgcctaagagtcatcactgtctatctatgaggttgacattagagtatttcacatcctcttcactgggttcaaatgattcttctgctcgcaaatttagtgctgcacatggtaggcactatgtcatactatctaagaacatccttgctgcttcggttgttatcaactcaacagtgaacagttcaaaggacccaaaaaaaatcatttttcatatcttaactgatgctcaaaatttctatgccatgaaatactggtttgacaaaaagtcatacagagaggcagctatccatgtcgtgaactatgaggatattatcaaggagaagttaacaaagtttaatgtgcggcacctgtatctgtccgaggagttccgtgttcttgttaggagtactgagcaacctgctgggaagacaagaatggaatacctatcattatttagtcactcacatttcttcattccagaaatatttaaggatctaaataaggtggttgtgttggatgatgatgtggttgttcaacgtgatctttctttcttgtggtctcttgatatgggggacaaggtaaatggtgctatcgaattttgtggtttaagactgggtcaagtgagaaatctcttgggtagtacaacagttgataccaagtcatgtgcatggatgtctggaataaatgttataaatttggataaatggaggaagcacaaagttacagagaactacctgctgcttctgaaaaagttcttgacgaaggatgagacatctctgcgagcagcagcctttcctctaagtttgttatctttccaacacctcatttatccccttgatgagaggttgattctatctggacttggatatgattatgcaattgatgaagacgttgcacggagttctgcagcattgcactacaatggcaatatgaaaccttggcttgaattaggtataccaagctacaggagatactggaagaggttcctaactcgagacgataaattcatggatgagtgcaacataattccctgacaaactgacacaattggacctgggaatcagaccaaccgatagcagtgtgcatcaacgagtctcacccttatgtggcgtactgactggatgctatagctcccaaaagcttttattgtgaactacgactacaaatacagctgtggaacaggagaagggttgctatcgttggtcataaatgtcggcagaagagtggacaaagcatgttctattcattaattgacaggattgattaactattttttttgcgatgggattagtctcaaatatggggactacatgctttgcaggtattgatgatatgaatgagtcttcaagtaaaggtgggtgtcagcctcattgtccagatactcgttctcttggaagaaggcactgtccagattgttagatagggtattcaacgagcttcgggctcatggctgtgtttcacgccccatcgattcatgacggtttttcccttcctcttctgccaataagggtaaatatatgtaatcctgatagtcattgttttttggttcttagttgttgtacatggattatttatcgaattcttcacacggaaagtctgctattggaagctttcgacacctctgtgattaacctctactgtacatttcgacttgttcttcctcacttggtgattcattcattataattgaaatttggatatg

SEQ ID NO: 27772 - DNA, 2080 bp, Oryza sativa
  ref <308>: DATABASE ACCESSION NUMBER: AK103214
  ref <309>: DATABASE ENTRY DATE: 2002-08-28
gtgcccaataccctactcccccgccgaaccctaaccctagctccccctcctcctttccgccactcgccgccgccgccgccgccggggcgggcggctcctgctggattgaggtaccacgggtagctaagtcggtaggcgcctgatttgggagatcagggtgtcctgtaatggaggggcatggcaaccctccactgaatgcggcggaagcagttttgaagaggcccaggagtgttgcttcaaggaagccgagatcgaaggagcagctcattagtgagttcaaggacctctcgtgcacgccgtcgcggagcatctccccggaagatgatgctggcgttgagggcagtgggcatcggcgcaaggagttgtacctcaatggccctgaggctaggggatccgtaccacacaggagtgacgcgtccagaaaaataaagagagatgataatagagctgcaggagaccatgatgaacaaaataagagcagcaaatcaaaggatggcaagcatactagtgagggggtcctggctcttgcctgcacaagaaactctggatcccctgatggccagcatttgcctccaaaagacactactagtatgccaggtttgagaaaagtaaagctcaaggttagcgggattactcgacctctacatacaaaaaacatccaagaggcaagtgatggtggcacgctcggcacatcagatggctcttctcagcggcataagcaaaaggattctggtgggcacaaacatcaccaagataagcatgatgtttcaccatcttcagaccttgttcgcaagagcaaacggattcctaagaagcgaacacttgatggtgattctggtgatgaagatggtggatcaggctatcttgtaaaatttaagatagctaaggttgtgccagaacaatctatagctactgaccatgctggagagtatgatgaatctcttgaagatgatattaagaaaaagaggctgtcaaaggtttccaaaaacaagagccttccatatgaagtggacgaagacttcactatgtaccgatctggcagggatggtaggaagaagttgaaactggtggatagcgatgattttattgaagaggaacctgagatggatgagccaaagaagagactaagtgaagctgattcacattcagatgtaaagaatgaaactactggccttataaccaggcagcgtgctcttcaaggcagaggtggcaatggtgaaactctgattgaatttcctgatggattaccaactgcttcatcgagaaggcaaaaggataaggcttctgaagtggaggcacaagccaaaaaggcagaagcggctcagaggcgtaaattgcaagttgagaaggcagagagggaacaacaggccgaagcagtgaggaaaatcctgggtattgatattgagaagaaaaaagaggagaggaaacagaaagagcgggatgagaaggaaaagcaagaaaaaacagaagaatatagaaggaactgcatccaatgtgtcatggggccagaaggaactgttgtcacatttcctgataagatgggcctccctagcatatttgactccaagcctatcagctatccacctccaagggagaaatgtgcaggcccttcatgcacaaatccatacaagtaccgggactcgaagacgaagcttccgctctgcagcctgcagtgctacaaggctgtccagggaagctctgaggctgcccagggaagctctgagacgctaacatgctgatctcagaaattaaaggatggtggtgaggcaatcgtgactgttttgtggaactggagaattgtgctagttccatttgccacctttgctgcttgttcttgtgttgccaatgttaccttttgccagtcctaacaatcaaccaaccaacagagggggtgtcgcctgctgctggccatccttttgactcgttgtggatgcagctgcagtgttctcgattaaggattaatttaggtggtagtcagatgaatgagagtgatgtatacattagttgtacagtgatcatcctactcgtcatcgttggtcatgaaatcatcttgaaaattgtctctctgtttgcactttgc

SEQ ID NO: 27773 - DNA, 1199 bp, Oryza sativa
  ref <308>: DATABASE ACCESSION NUMBER: AK103215
  ref <309>: DATABASE ENTRY DATE: 2002-08-28
gatctctctctcttccaaaaccctaaccctagcggcgggcgggagcggcggaggaggagggcgcggcggcggtggggtggtagtggtgttgggtggaatggacggaggcggggcgcaccgcacgccggaggacgtgttccgggacttccgcgcgcggcgggccgggatgatcaaggcgctgaccacagatgtggagaagttctaccagcagtgcgacccagagaaagagaatttgtgtttatatggtcttcccaatgagacatgggaagtgaacttgcctgctgaggaggttcctccagagcttccagaaccagctctgggaattaattttgctcgggatgggatggatgagaaagattggctgtcacttgttgcggttcatagtgatacctggctgctagcagtagccttttactttggagcaagattcgggtttgacaaagaatccaggaaacggctttttagcatgattaacaaccttccaaccatatatgaggttgtcactgggactgcaaagaagcagagcaaagaaaaaacccccaagaccagtggcaagagcaataaatccggcacgaagccatcgcgccagccggaacccaactctaggggtccaaagatgccacctccgaaggatgaggatgatagcggaggtgaggaagaggaggaagaagaagatcacgaaaacacattatgtggtgcatgtggtgacaactatggacaggatgagttctggatctgctgcgatgcttgtgagacatggttccacggtaagtgtgtcaagataacccctgccaaggctgagcacatcaagcactacaagtgcccgaactgcagcagtagtagcaagagagccagagcttgatggtggatccctctatggcttatgtctgaagaaccaagaatttgactcgctgtaaagaccctcatgagatagaatgcccaatggatatgcattcagctgttggttttcagtttaggaccagctttagggtctttaatgtgttgtttggtgtatgtcaatggcatcaattctagattttctgttagtagtagaaactaactgtaatagcttatgcttcttcaagcccttctaagtgcacctgtactggactctttagtgttttagatttgaattgtgtatttgtgtcaaacatgtactcttgtagtttgttaaaaattgcttgtggtcatttattctc

SEQ ID NO: 27774 - DNA, 368 bp, Oryza sativa
  ref <308>: DATABASE ACCESSION NUMBER: AK103216
  ref <309>: DATABASE ENTRY DATE: 2002-08-28
gtcgaaccgagccgcttcttctccagaccttggagctcgccgtcagggagggagaggaaggacagaggtgagcggcgcgccgccgcgatgagggccaagtggaagaagaagaggatgaggcggctcaagaggaagcgccgaaagatgaggcagagatccaagtaatcccataggcgatcgactgatggaggaggagaaagcgtctttggctctcactgctgtcatctcatctatttaagttgtttagtttcctttagtaagagagaaaaaaaactaatcaatgtacttctcttgatctttgtcatgggagtaattgattgtactggacagcaatgtttccataattctattacctggagttatctgtc

SEQ ID NO: 27775 - DNA, 1399 bp, Oryza sativa
  ref <308>: DATABASE ACCESSION NUMBER: AK103217
  ref <309>: DATABASE ENTRY DATE: 2002-08-28
gattgactccacctttgcttccttctctactacatctcctcctctcctcacgtttccgccgccgccgccgcctccgcctccgcacggccgagcagcggcgagcagccgccggcgtcctgctgcttcctactccgcatcctcgcaacgccggtttttcatcgtttgattgttggagaagaaggagaagaaccgtgttaatctgatctgaccgaagcgagtttgggattatggcgtattacgccaggaggggtggggatagggttagtggtggtggccgtgttcaaggtggtggaggtggtggaggtggtggtgggagaggtggatatgtgctgcgtggaagatcagggatgcctcctcgagggccccttggcctcggggttaactcgcggccatcagcgcgcactattgctaagtcttttagcagaaccaaagacatgacctggagacctgatctgtttagtgatagtatggcagctagtggaattgaaactggtacaaaattgtacatttcaaacttggactatggggtttccaatgaggatataaaggagctgttttcagaagttggtcacttgaagcgctttgctgttcactttgatggttatgggcgcccaaatggcacagcagaagtggtgtttactaggagaagtgatgcaattgctgcattgaaacgttacaataatgttctgcttgatggtaaagctatgaagatagaagttattggaagtgacttaggtttgcctatgacacctcgcataaatgtggttggggcttctaatggcagacctacaagaacagttgttatgacgcctgaaattggccagcgtggcagtggttccggcagtagaccaacaggtcctacagttaatagatataaccgtggtgccttccaagctggccggggccgaggccgtggcaggggtcgtgccccattccagtcccagttccagggccgtggcactggcagtgtcaggggccgtggtcaattccagggccgtggtcgcggaaggaggcaagctgggaagactgcagatgagctggacaaagacctggaaacttatcatgctgaggcaatgaagaccgactgatcgctgcagacctaacggtggtggcagccattttgtcacaactgctctataagcatctgttgcaagattatcgttatgataggttagcccgattgagctgtagtactcctggaagcagagaactttctgcttaggtttgcaaaaacaaactctgcctctagaagtttgaagaagacgcaactgtggtgtgtagtgattatctgggatttgcaaccctaggtttttttttttcttttttttggtgctgcttgctcttgagattgtcgtgttaagcttcccaaacaaaagtaaatcctgggattttatgactc

SEQ ID NO: 27776 - DNA, 944 bp, Oryza sativa
  ref <308>: DATABASE ACCESSION NUMBER: AK103218
  ref <309>: DATABASE ENTRY DATE: 2002-08-28
gtgtgcagccataatcgttgcccctccctccaacctttttcctttttttttactctggagatgcaggtaggagatggcagatgcggtggcatccagggctcccggtggttcgacgacggagacagcctattcccggcggcggcgagctcgacgacgagcagatcgggaggcttgtccaccacctcgagtggccctccatgggtgcctcccctcccccatggatttggtggaagccaagtcctttcacgtcgcctctgcgccggctgttgatcccctccacccggttcagcggcggagacggcgtgctgattcgatggctggatctgcttcatgcagcggaggccccgccgcatccgtcgcaccgtgtccatcgcggcctgggtatccccctacccagcgctaatatcctcggcccgcgcgacgaatccgagagaggaagcgcgaccatgcgtcttctccgtgtgccataggcgcaggcgcattatgcagtgttgtgaccgccgacggcaagaatgcgcgtcaaggcggccaagccgtgtggcgggcggtggctgtgtgcctgcttgctgcgtgaggcttagccagcttgctaacgagcagggatctggagcaagggagctgttattcttgattctttgatttacgattgttcaattgagcaaacgagcaggagtccaacaattttatctcaaaaatgcatgcttgctaacgagcaggaatttagagcaagtgaactagtttccgaccttgctatattttttagataaaattgtttgactgtttgtgaaaatcatagctaatgtgcatttgtttacttcagagataaaattgatggatccagtgtgaaaatcctagctcatgtgccttttttttctcaaatgtcagtatggagatgtaatagacataccattctgtaaatatatcttggcattttcctgatttcc

SEQ ID NO: 27777 - DNA, 1436 bp, Oryza sativa
  ref <308>: DATABASE ACCESSION NUMBER: AK103219
  ref <309>: DATABASE ENTRY DATE: 2002-08-28
gcacttgctttcatcttcaatggataaaactgtacggttgtggcacgtgtcaagcacttactgtttgaaaaccttctcccacagtgactatgtgacttgcatccagttcaatcctgttaatgataaatacttcattagtggttccctggataaaaaggttcgaatttggagtatacaagaacgcaaaattgttgactggattgatctgcatgaaatgatcacagctgcctgttatacccctgatggacagggtgcactcgttggctcccacaagggcaagtgccatgtctacgatatttctgataatatgcttaagcacaagaaacagattgatctacatattaagaaaaggaaatctagccagaagaaaatcacaggaattcagtttgttccagggagttcttcaaaggtcatcatcacatctgcagattcacgaattcgagttattgacagttttgaactagtttgcaaatttaaaggctttcgtaacaccaacagccaaatttctgcttgttcagctgtgaaagggagatatcttatctctgcaagtgaggatgcccatgtatatatgtggagatgtaatgatgattccgaaccaaacacaaagaagggcattgtttctatcacaaatacccatgaacacttccactgcgagggtgtgacagttgctgtttcttggccttgtgccagcagcacaatgacatctagagaatggcctgagaatggcctgtctggatctgagcttgataaagatcaggagatgcctgatgctcagcaccagagcaacatcatcagaaacaccaacccaaatcataatggtgatacatctgcgacttggtctgaagaactcatgacaccaacaaaacagagcccgcggtctagtgccagccatcctatggagggagatcaagctccgagtcattcggcctggggcttggtgattgtcacagcaggccatgagggtcatatcagaacatttcagaacttcggctttcccgttagagtatagcatatggacctggatgctgagtcatcctgcaggagtgtagttttgtgtatagaatacacggaaatatatattcaatgagatgcacagcattgggttgggggattggatttggttgctccttggtgcgcctgcttcagaatttggaatcttcgactaacacatggtcagtactcaggtacttgtggtatgacattcattttagatattacctcaaattgtacatgaaagtgaatccctagaaagagtaatgctgtccgctggttggagtgacatctttcgccctcatcttcaacctttgctccacttttttttaatactccctactatgtattcttgtaaggggaaaaaaatcagtgctacagaaaagagatgcaaaagaaaattacgtattgtgggcagtgggcgtgtggtgaaattctttacattg

SEQ ID NO: 27778 - DNA, 984 bp, Oryza sativa
  ref <308>: DATABASE ACCESSION NUMBER: AK103220
  ref <309>: DATABASE ENTRY DATE: 2002-08-28
gactcacctcctctgcttctcccaccacctcactacctctcgccgcgagagcagcagcgctcgtgttcggtcaaaagcctcgccgcggcgagctcgagctcattcgcattccggaggggagggagggatgggggacgagtcggagggggagacggaggagtacctgttcaaggtggtgatcatcggggacagcgcggtggggaagagcaacctgctgtcccgctacgcccgcaacgagttcaatctccactccaaggccaccatcggcgtcgagttccagacgcagagcatggacatcaacggcaaggacgtcaaggcccagatctgggacaccgccggccaggagcgcttccgcgccgtcacctccgcctactaccgcggcgccttcggcgccctcctcgtctacgacatctcccgccgctccaccttcgacaacgtcggtcgctggctccaagaactcaacacacattcggacacgactgtagccaagatgttggtgggcaacaagtgtgatctggataatatccgtgaagtgccggtagaggaaggcaaagcacttgctgaagctgaagggctgttcttcatggagacctctgctctggactcgacaaacgtgaggacagctttcgagatcgtaatcaaggagatctacagcaacgtgagcaggaagatcttgaattcggactcctacaaggcggagctatccctcaatagggtaagcattgagggtgattcgaaggatgatcagaaacagtcaaaccggtttggatgttgctaggggttttagtacattattattattggattcactgtgatatgaaggttttttgttcattaatattattattattatctgtaaacttgtaatccaaattgttttttggtttggttactctggtacacactgtgacactgagatacaaagtgagagaagaatagttgctggtaatgaatagttgagaggactgctttgtgctgttacct

SEQ ID NO: 27779 - DNA, 3507 bp, Oryza sativa
  ref <308>: DATABASE ACCESSION NUMBER: AK103221
  ref <309>: DATABASE ENTRY DATE: 2002-08-28
gcgttcgcacttggcaggtggcagcagcaatcctctcttgctagccatctcttgcaaccggcacttcccccctgcgagtccacgagatctgctatcgcatcatcaggtgcgcaaactaactagcagccacactgagaaagagtgcacaagatgtctgaagcgatagcccttgcgatgtcaaagattgaaacctgtgtagagactgtagcttcattcaacaacgcaatgtccaagctatctaaaaaggataaggttgtgaaggaattgctggaaaagatcaaacaaatacaggagcaattggatatcaccaatgatttcatccaaaatcacataggcacagccaaccttggtgacccattagatgagagttggattgccacagtgaggaggctggccttcattgttgaggatgtaatggagaagtacttgtattatgctcatcaactgcaggaagaggggtcacagaagcaccctgtcaaaaggtcaagctatgtcgatgttttcaaaaaagttggtcagttgatggacaagataaataatcgcattgggcaccttttaagcatcagagagcagagtaagcttgcaccgcagcttgttcctcactcaccataccccgattcagagggccaaccggagctcattggtaccaatggcccaattaatgtactactgaaatttctgaagcatggtgaggacggagctgtgctgcaactcaaggttctatctatgcttggaattggtggaattggtaaaaccgcacttgcatccaaggtgtatcgaatgcttcgagaagaatttcagagccatgcttttgtgacagtgtccaagatgcctgatatgacaagggtcttatttgatatattggaccaaattggcctgcggaagtatccagctagtttgaacgagaatcaagtcattactcaaattggacaagacctaaaggataagagctatctcattgtaattgatgatttatgggatatgcaacattggaagactatcaaggatgccttgcctgatgtcaattgtggtagcagattgatagttataactcgtctaaacaacatagccaaaacatgtagctctggccagaataatttgacgtataaggtcatgcctcttgctcaccatgactccagaacattgtttctcaaggaaattttgggccatgagggcagttgcttggatgcaccagtttttgatgaaattttgaaaatgtttggtggtatgccttcagcactaaaatgtattggctcatttctgcgcaacaaatcagtcacaactgagtctcagaagatcaatatgagttctttgtattctgaacttgagaattttcctagctggaagaaattgaaaattgctcttttcctcagttgctgtggtccttcccaaactctggaggcttgctcgttgtacttaagtacattaccagacaatcataagatcgagagagatattttgactaggaaatggatttctgaaggaattatccttaaagatgatgagcttagtattaacggagtggtgaataattgctttgaggaactaatcaataggaatgtgattcagcaagtggacaatagttttggggagtaaacctatgaaatccaatttctgatgcaccacattcttaggcagatagcacgagaaaggaattttgctaccttcctatcggaaaatattttgatatcatgcaaggagcctatccatcgcctctcatttcactgttctaagttaagaatttcgattgataaaggtgatattcagattatttcggattcaggagattcaaatcaaaaacctaagagtctatcgcttgctcgctccataactctatgtggttatgcaaagccagtttcttttaagcttttggagcacctgcacgtgttagatctggaaggttgctggaatgtggacaactctactttggatgatatatgccgcatgatcctgctgcagtacttaagtctcaagaaaacacgaataactgtgctacctccacagattgagaatctaagatgtctcaagacactggctgtaacccaaactggaatcgcagaactcccactgcaaattgggaagttgcctgatttggagactctggatgtaaggcatacacaggtcaaagagataccgaaggaacttgttcaacttcctaaattggtgtgtttgctttttggtcaaagtggttttcacggtggagttaagttccctgtgggaggtaatccttcaaagtcactaaaggtgctgggttccatcgattcaacacaatgctcagcaagtttcatgggggagcttagtagtttgacagggctgacgaagctttcagtagtgtgctatgacgggaccaaggacatggagtggaatcttcgtatgatgaattctatgttcaaatttagcaatcttgaatccctgacaatttatggtgatttcattttgggcaacgaagttcctgcactccagaatcctcctaaacttcagaagttgaagttggccggaagatgtttgagtgttcctggttggattgataaattcagcgatgttacccttctagatatcagggtttgcagcctagaagagagtgatatgaagatactttgcaagatgagctccctgcagagacttgtgttaacacaggttcacatgccaataaaacaactagaaatcacaaaggaagcaagtttcagcaaactaaatggtttcacatttgattgccgtgtgccttgggtaacctttaaagaagaagctatgccaagtctgcaatacctcgaactgaagctttatgctggcccagcgggtaaaattccttcaggtattacatgcctaccatgtctcacaaaggttatcctccggtacttggtacattaccaaagcagtgctagtgtacaggatacaatttctaaaatgagaaaagaaagcagtgagcatcccaatatgatcgtgctttctcaaaatggtgagcatgagattttcccacaaaatgctgtttctcgaaatggcgaactcgagattgtcccggtcaatgctgttgatggcatgcatcaggattagcacaggcaaaaattgaagaacaatattgtcattgttaacgccctatctgactgcattctactgccgttgttctctggtgggttataaggactggtatattaacttgcatcgtacaaacggcaaattaatcctcattctcgtgccagacatagttgtggagcagacgggcaaatcagatcctattggaattacaatccttctatgactcaagccaaccaaatcaatcaagatagaagccaaattaagttgaaaaatatttgctagggattgcaattcgcagcagtgaggagcgcaagtaacaatcaggtagtactttgataatttggtttctctaaagttccgcatgtattagtatgtattgaattggaattaatgtgtccctgttcacattgatatctaatatatcacgatttctcaatgattgaatcacaataaattatatatatcttttgttcg

SEQ ID NO: 27780 - DNA, 1165 bp, Oryza sativa
  ref <308>: DATABASE ACCESSION NUMBER: AK103222
  ref <309>: DATABASE ENTRY DATE: 2002-08-28
gggcgtgggcagcaagccgatccgccgccaaaccaggcgcacgcctcgccctcgcctcgcctctttccccaattccgctccgcttcccgcaccttccagatcccccacccatggcgtcctcgcgcctcctctcctcccgccgcctcctccccgccctcctccacacgcccagccccgtcccaatcccacgcgccgccgccgccgccgccggagaggttgggggaacgccggtggcttccttcctccggcggcccgcgcggttcttctcctccgcggcgcggcgcgggccggcgcggccgcgggcgacggacatcggggcgcgggcgcggcagctgcagagcaggcggctgtggacgtacgcgctcaccttcgggtgcgcggccgggttcgtggtcaccgtgctcgccacgttccaggaccagctcgtcttctacctcaccccgaccgacgcgctcgcgcgctacgccactgaccggtccaagtcccgcgtccgcctcggggggctcgtcctcgagggctccgtcgcccacccctccgcctcctcctccgagatcgagttcgtcgtcaccgacctcatcaccgacgtcctcgtccgctacgagggcgcgctacccgacctcttccgcgagggccactccgtcgtcgtcgagggcttcctcaagccgttcaccgacgacctccgccgagacaccgcggggaggaaggtctcggacaaggcccgggactgcgagtgcttcttcagcgccaccgaggtgctcgccaagcacgacgagaagtacatgcccaaggaggtcggcgaggcgctcgagcgcaacaagaagaagctcgaggaggaggccgccgccgccgccgctgcctctcaagagtcggcgacggccgcggttgctttggatggagccaagtcgagctcataaggttttgtttgcattctgcttttaagatctagatcttaagtgcgtattcgctgaggcacagatagatttgattgcccaaatggatttttgggatttcagatgagtgattcaattggatctgttgtaattctagtagtaccatgagccagggggcaaacgaaattttgctagggaataacgactgagtgacggttgaacacgattatacttattctttttaagcaatagtatttggtatactccttccaccg

SEQ ID NO: 27781 - DNA, 1471 bp, Oryza sativa
  ref <308>: DATABASE ACCESSION NUMBER: AK103223
  ref <309>: DATABASE ENTRY DATE: 2002-08-28
gatccaaatcaaagacctggcatagctaaaagccccaaaggatggttggttggttggttggttggtgagttgtctccaatctccaaactccaagaacaagaatgccaaatcaaaagagcacaagtgctaattaagcaagatgcctaaggcctggtggtgctcgccggcgatgccagctgctcgacggcgacaccgccgccttttgcgcctcgctggtggacggcctcgcgcagctggagagcacgctgcttcgtgaggaggacgacggcgatggcggcggcggcggcggtggggcggtgtcgatgaggtggtgcgccgacgccatgaggctggtgaagcggatgcagcgggagcttctggtcatgttcaagaaggccgacgtgccggtgggcagcgccgtctcctacggcggcggcggcggaggcggcgacggcggcgggtgctggttcgagcactacatgcaggggacggcggcgctgctcgacttctgcaacgcgttcaagtccgccgtgtcgcggctgcaccgctactgcatggtcgtcgacttcgccgcgcaggtcggctgcgccggcggctggtggctggaggaggagccgggcggcgacgacgcgggcgccatccgccacaggctgtccgacgtgagggcggcggtgagcgaggcggagcggctagggaggaagatcatgtctagctccagcggcggcggcggcgccggggacgacgacgccggcggcatggtggtcgtcatgctcgtcgccaagatcaccatggccgtcgtgtcgatgttcgtgctccaggccctcacctcacccatcgtccccctcgccgccgacgtcgacgacggccactgcacccttggccgcgccgccgccgtcccggtccccgagctccagccatggcgagaatccctctccgtgatcaccgaccggttcccgaggcggccgggcgtcgccgagcacgagagggtggccatggtggtgaagtccatgatgatcaacaccaagatggaaggagaagaagagaccaaaaatggcaaacaagaacaagaagatgaccatgttgagcttctaagaacaagatcaggtgagctcagggaaggtgtggagatgtttgattgtgttttggatgaagtgtttgatgaggtgatcaagggcaggaatgagatgcttggcatcttcagagataaggccctcacactgggctgaatttttagatgttagctaatctctgaaaagttaattgaccttgagcaatctggaaaccagcagggtatgtatgtaacctggggtggatgctaatttgactgatcaatttgagttgttttgttgagggtttagagcttcttgcaatgtgtgagtatgtgtttatgaaggtgtttaattatatttggtttccttttatactttaatttctcctttggtttgtaacttgtttcagtgtgacatactgatcaataaagcatctgaagttt

SEQ ID NO: 27782 - DNA, 2801 bp, Oryza sativa
  ref <308>: DATABASE ACCESSION NUMBER: AK103224
  ref <309>: DATABASE ENTRY DATE: 2002-08-28
tccgagtttgtctcgtcttccacctccggccaccggatttagtgccggtcatggttatagcttgattttgagtcctagggtgtgtgtgatcggtgattcgccaccagcggccatggggtggaggggcgagcaacgggcgtagcaagccgaagagccacacttgtaggagggggcagggggacggagccgtgggtggccggcgaactgaattgctagagctaggcacatcgtcctcaagggcgcgtctcggcacaaggcgcagtacaggatcatgtcttcaaagagaggaggaggtggccgccgtggtcgtggctgtggccgtgggagaagtgctttggctgaaaatgacatggactttcatgaaacctccacaccttcttccccaagtactacttctgataaagaggacaatgttgagtttactccgcagcaaagcccactaccttgtcttgtaagcccatcagtagagcatgtatccaacacattactcaatccaaagatcaaccaccgatcggacgcaatcttcggtgatcaggctgtggaacagttgaagttgcgacatcacaaacctttaaaatttcatgagagataccgtccttatttgagggatgctggcttgcttgggctctcacaaatttgccagaagatgcctcagttggacaaggcattgatcactgcccttgttgagcgttggagaccagaaactcatagtttccacctggcttctggggagatgacagttacactacaagatgtctcaatgttgttagctcttcctatcgatggccgtccagtttgttctaccactgatcatgattatgcgcagatggtcattgattgtctaggtcatgatccaagaggaccatcaatgcctggaaaatcttttctgcactacaaatggctaaagaagcatttctatgaattaccagaagggacagatgatcagactgtggagaggcatgttcgagcatatatcctgagccttctatgtggggtgctatttccagatggaacaggacggatgagtctgatatatcttccactgattgctgatctttctcttgttgggacatacagctggggatctgcagtgctggccttcctataccgttctctttgttctgttgcttcctcccacaatatcaagaacattggtggttcattgcttctcttgcagctttggagctgggagcgctcccatgttggcagaccgttggtccggtctcccgtgtgcccagagacagacattccacaggatgtgctcccagttggctttcgttgggtaggtgctcgcacacaaagtgagaatgctacacgctgtcttaagcagtacagggatgaactgaatctgcagcgagcagatcaggtgaagtgggagccgtacttgcacattgagtctgcaagcttgccactgctttgtacaaaaaatgctgacttgtggcttacacaagctccactaataaattttccaatagtcgagatgtatttgcctgagcgagtgatgcggcaatttgggcttcgccaatccattccaccaccttttcggcctacactacaggcgctgcatcgtattagtcgacgtggcagagaacgtgagaactgggaagagacacatcatgagtacattcaggaatgggaagcccgccgacagcgcatatttccagagtcagagcagtatgacccgtcttcttatgaggagtacctgcattggtacacaggggctacacggcggtatcttgtaccatcaattagtgatgatgtggaagcaggatcttcattacagcctgatgactccattaatcttcattatcaagccaaggctcctatgatccgcaaagcagttgataaactgcatggtatggtaaagaaggccaagatagccatggcgtccacagctgatacaaccacacaagccttggtctttgagtttctgcatggctttcaagatgttcttcacgaccttggcgagatcaaggaaaatggtggttcagctactagtccacatgttgaatcagctgccactcaagacatgcctctacttttgctagaaactgaacagaacattgtggatgccgatcaagaagctcaacaccaggaagaggaagagcttcacatggtggatgatgcaacaatgacccttgagcctatggatgaggagaaaatgatttcaacaatgtcatctgtccatgtccttcactggagttggaggaacattgtcacttagctacaccagccatcgatgagtgtaatacagccactcctgctccagactctgtaattccacagcagaacactgattttgatcaagatggacatctggaaaatcctaatgaaatggaccagattgaactgatggtggaacctatatgtgtggatcacaatgattccgacaatgtgctctcatccagcccgtcagctcaggcactggaggagaattgtgaagtagcaaaggcagtcaatggaaatgtcgatccaaccacccaagttactggctcatctaccccacaacaggacacagatgtcaaactagttgctgaacaggaaaacccaggcacaacagagggcaactaactataatggtgtcccctcatctgcagaggagacaggcgattctgatttcacccctcatcatgtcacctttgtatagtgactagttatgtttgccatgttgatttttttgacattagaagttcttttttttgtatttatattcattgatggtagtattctgcttcatctccaatgtaatatgggaatggatatattaagccctagtgtatactgtatactacctccatccc

SEQ ID NO: 27783 - DNA, 1990 bp, Oryza sativa
  ref <308>: DATABASE ACCESSION NUMBER: AK103225
  ref <309>: DATABASE ENTRY DATE: 2002-08-28
gatgtttgcagctgcagagccccccacacgcacgcacgggaccagcccgccccagggtgaaggaaaggaccatgcaacatggcgagtaggcgtagtgtactgtgctgctctactgctctgctacaccaaacacacacatctgcaaagatcaaaacgctcgcgaaggtgacgctaatgatggagatgtcgatgccacgaggaggaggaggaggaggagaaggtgtagtgatggtgtaattgccggatgctggtgcatccgatgaattaaccagagtgcgttgccgtttgcattcttgcagagtttggtctcgcttaacgcgcgcttttgagaggtaaaacgtaagggtggctgcgttggccggccgcgcgcgcgcgtcatggaggcgtctcttgttctgctctgcctctgcgtctttcttgcgagcggcggagaagggaggtcgccggcgggcacggtcctcccgctgcaggtgcgggtgcaggaggtggagttggaggcgccggcggcgaacaggctccggttccggcacaatgtgagcctgacggtgccggtggccgtcggcacgccaccgcagaacgtgacgatggtgctcgacaccggcagcgagctctcgtggctgctctgcaacgggagctacgcgccgccgctgaccccggcgttcaacgcgtcgggttcttcctcgtacggcgcggtcccctgcccgtcgacggcgtgcgagtggcgcggccgcgacctccccgtcccgccgttctgtgacacgccgccgtcgaacgcctgccgcgtctccctctcctacgccgacgcctcctcggccgacggggtcctcgccaccgacaccttcctcctcactggcggcgccccgcccgtggccgtgggcgcctacttcggttgcatcacttcctactcgtcgaccaccgccaccaacagcaacggcaccggcacggacgtctcggaggcggcgaccggcctcctcggcatgaaccggggcaccctctccttcgtgacgcagacgggcacccgtcgcttcgcctactgcatcgccccaggcgagggccccggcgtcctcctcctcggcgacgacggcggcgtggctccgccgctcaactacacgccgctgatcgagatctcccagccgctgccgtacttcgaccgggtggcatactccgtgcagctggagggcatccgcgtcggctgcgcgctgctccccatcccaaagtccgtgctcacgccggaccacaccggcgccgggcagacaatggtggactccggcacgcagttcaccttcctcctcgccgacgcctacgcggcgctcaaggccgagttcacgagccaggcgcgcctgctcctggccccgctgggagagccagggttcgtgttccagggcgcgttcgacgcgtgcttccgcgggccggaggcccgggtggcggcggcgagcggcctcctcccggaggtgggcctcgtactccgcggcgcggaggtggccgtgtccggggagaagctcctgtacatggtgccaggcgagcggcgcggcgaggggggcgcggaggcggtgtggtgcctgacgttcggcaactcggacatggccggcatgtcggcgtacgtgatcgggcaccaccaccagcagaacgtgtgggtggagtacgacctccagaacggccgcgtcggcttcgcgccagcgcgctgcgaccttgccacccagcgcctcggcgccggcgcgtaggctttacagtactaatcgatgcgtcgtccatggcgagaactcgccgtggccaagtaagagtgtagaggcctagtattagagatggtctctccggtcacctgctgtgcttcacatcactgctggcgtgtgtagtagtgtacggagtagttaaagggtgtgtttatgtcgaaactagatttcggcaataataaaagggggtggctatcaagctggaaaagtgtatgagtttggagacaaaggatttatacaggttcaggccttcttattcc

SEQ ID NO: 27784 - DNA, 2158 bp, Oryza sativa
  ref <308>: DATABASE ACCESSION NUMBER: AK103226
  ref <309>: DATABASE ENTRY DATE: 2002-08-28
ggaggcgactccagaaagcttcccctccgcggtccgctcgcctcctcacggcgccaaagcagccaggaagaagaagaaccacgctgtttctaggacgattcctggaacagccaacttctgaacctctatctgcaagactgcagacagtataatacttcttcctggttgcagccgcctcagcggaaaaaccaaattcagcttcattcatgggttccccaagcaaaacacgtcggatgaagccattggggattcagctatatgagtgtgcccgggggagtcctatctccttcagatcatgccaggctcttgtattgatactgacgttcttatcctatgctagctatcgtgccactaggaagactacaagcattgtcaagagtgttcttgatcctaagacagaaaacctaggtatgttgcattggccgagccatctgtatcttcaggatttaagagatgcacagggcaacatgacggctctctatagcggctgggctccgtttaatgccgacgatggtactgcattgctcggggagatcgacttggcatttctcggagtatatgcaatcggcatgttcttcgctggccatttgggtgatcgggtggatctcaggatacttctgaccatcggaatgataggcactggatttttcactgctgcctttggtgccggcaactggctcaacatacacaacttctactactttctgggtgttcagatgatggctggcctgtttcagtcatccggctggccatctgtggttgcagttgttggtaattggtttggaaagagcaaaagagggctgataatgggaatctggaatgctcatacatctgtgggaaacatatctggttccttaattgcagctgcaatgttgaagtttggatggtcatggtcgtttgcagtccctggagtgatgatcgcagtcgttgggcttgcagtgtttctgttcttgcctgtcggtccggagatgattggaatcgaggaggatatccatgagaaggatgctgagaaggatgacatgagtgcacctctgttggaagaacgatcggcatcaaaagaaaaggcagtcgggttcattcaggcttggagaattcctggtgtagcgccatttgctctctgccttttcttctgcaagcttgtggcttacacattcctgtattggcttccgttttatatcagccacacagcaatcggtggagtgtacttgtcagacaccgcagccggtgtactgtcaactctgttcgacgtgggtggcgttgtcggcggcatccttgccggccacatctccgaccgcctcgacgcacgggcgctgacggcggcgagcttcacgttctcggcgatcccggcgctcttcttctaccgcatatacggcagcttctcgctgtactcgaacatcgccctcatgttcgtcaccgggatgctcgtcaacgggccgtacgccctcatcaccaccgccgtctccgccgacctcggcacgcacagctccctgaacggcaactccagggcgctcgccaccgtcacggcgatcatcgacgggacggggtcgatcggcgccgcggtcggcccgctgctgacggggtacatctctgccaagagctggagcggcgtgttcacgatgctcatggcgtccgctttcgtcgcggggctgctcctgtcgaggctggtcatggcggagatctccgcgaagatggagtcccggaggcctgacgctgctgctagtgatctgccagtgtcctccatggaacaatcttaggctccattagacactttggaaattgtgtccctggtgaaatgctgagaaattttacaagcgaaaaagcctgaaaatggagacttgagaggtgtggcaggaagagcaaacccctcacaaattcccttttttttttacacctgaggagcaaggtgctctctccagccccaggattgcatcttggctatgagcgatttctgttgcttgtgatgtgtatatggaactcctaccgtatgaagtgatgattgtcaactctagctgttgacaaaggcgcgcgtgtggaatgcgggaggttttccggatttctgtatagcgagttataatcgggctcttaaagcttgtgcgagaatgcagcagaagtgttggttcctatcagatgctaatgtaatcttgctgattcaccggtg

SEQ ID NO: 27785 - DNA, 2521 bp, Oryza sativa
  ref <308>: DATABASE ACCESSION NUMBER: AK103227
  ref <309>: DATABASE ENTRY DATE: 2002-08-28
gattgcacccaagccaccacccatttcggcacacccttccctccacttgccgattacttttttgccccccggcgcgctgggcgccttggctttggccctggctttggctccgctgttcttatcttccccactcgtgcctggctctctctctctccctttctcctctcctccaaggtcatggcaaaggagaaataacagctagcgggcttggggaagggaaaacagcaagtgggagatcggcagggagaggtgaattactacttgagtagaagtggtacaagaagagtcgtcgtctacctgtgagcgaattatttcgaggttgtgcgttgcgatgatgggaggtggtctggtgatggaccagggcatgatgttccccggcgtgcacaacttcgtggatctcctgcagcagaacggcggcgacaagaacctcggcttcggcgcgctcgtgccgcagacgtcgtcgggggagcagtgcgtgatgggggagggcgacctcgtggacccgccgccggagagcttcccggacgccggtgaggacgacagcgacgacgacgtggaggacatcgaggagctggagcgccgcatgtggcgcgaccgcatgaagctgaagcggctcaaggagctgcagctgagccggggcaaggaccccgcgggcggcgtcgtgggcgacccgtccaagccgcggcagtcgcaggagcaggcgcggcggaagaagatgtcgcgcgcgcaggacggcatcctcaagtacatgctcaagatgatggaggtgtgccgcgcgcaggggttcgtgtacgggatcatcccggagaagggcaagccggtgagcggcgcctccgacaacctccgcggctggtggaaggagaaggtccgcttcgaccgcaacggccccgccgccatcgccaagtaccaggccgacaacgccgtcccgggcttcgagagcgagctcgcctccggcaccgggagcccgcactcgctgcaggagctgcaggacaccaccctcgggtcgctgctctcggcgctcatgcagcactgcgaccctccgcagcggcggtacccgctcgagaagggcgtccctccgccgtggtggcccaccggcgacgaggagtggtggccggagctcggcatccccaaggaccagggcccgcctccgtacaagaagccccatgacctcaagaaggcctggaaggtcagcgtgctcaccgctgtcatcaagcacatgtcgccggacatcgagaagatccgccggctggtccggcagtccaagtgcctccaggacaagatgaccgccaaggagatctccacctggctggccgtcgtcaagcaggaagaggagctgtacctgaagctgaaccccggtgcccgccctccggcacctaccggcggcatcaccagcgccatatcgttcaacgccagctcaagtgagtacgacgtcgacgtcgtcgacgactgcaagggcgacgaggccggcaaccagaaggctgttgttgtcgccgacccgaccgcgttcaacctcggcgcggctatgctgaacgacaagttcctcatgccggcgtccatgaaggaggaggccaccgatgtcgagttcatccagaagaggagcgcgtctggcgcggagcctgagctgatgctgaacaaccgtgtctacacctgccacaatgtccagtgcccgcatagcgactatggatacgggttccttgaccggaacgcgcgcaacagccaccaatacacttgcaagtacaatgatccactccagcagagcacggagaacaagccatcgccaccggccatcttcccggcaacctacaacacgccgaaccaggctctgaacaatctggatttcggcctgcccatggatggccagaggtcaattacagagctgatgaacatgtacgacaacaacttcgtggccaacaagaaccttagcaacgacaatgccacgatcatggagaggcctaatgcagtcaacccaaggatacagattgaagaaggcttttttggacagggaagtggcatcggcggcagcaacggaggtgtgttcgaagatgtcaatggcatgatgcagcaaccgcagcagaccaccccggcacagcagcagttcttcatccgcgacgatactccattcggtaaccagatgggcgacatcaatggcgcatcggagttcaggttcggctctggtttcaacatgtcaggtgccgtcgaataccccggcgcaatgcagggccagcagaagaatgacggctcgaattggtactactgagagtactgaagaataaacttgtagcgtttaaagaaagagcaccttaagcttttaaagttcaccatggtcatccctctgcttccatggtggaagcgtctcctgtgaacccggtaattctataggtctttctcatataggttttgcattagttgcaaaatggctggaacttggaactggtttatacatgtatgtccgtccagccagtaaacctcctatggaaacttaatgttatttctagtttaatttgttagttaaatgctgttc

SEQ ID NO: 27786 - DNA, 4411 bp, Oryza sativa
  ref <308>: DATABASE ACCESSION NUMBER: AK103228
  ref <309>: DATABASE ENTRY DATE: 2002-08-28
ggcttcagccgccgccgcttctctcgcacgcgcatgactgccgctccacgccgtcgctgttcctcccctcccggcctcttccgctcacctctctctcgccacggtctcgcagcatccgcctcagtctccccaactcccgttgtccgtcgccgaccgaggcgccgagccactgccgtcatttgccctcccggctgctcaatccacggagcagcagagggtcgaggaaccgccgcgccaaggcaccatggcgaccacgctgccactggctggtcaccgcgaggcaggcgccatcagccgctggcgccgggagcccaagacccctggccagcctgcttaactaattttgtgctctctaaaactaggactacccaacgaaaatttcctggctacgccactggttaaagacccaatcattcctcatactccaaatagcccaagctcctacaacaaaacaacaccacaacactctaatatctgatctcctctgattctgaaaaagattcagaagatcgtttttagaagtagggaccgtattccacctaaaagcatctctataacagcattagagaaaacaagccggtgggcacctgaacatgaggtgatttgtatccttttccaagccacacagcttgcagagagggctacctggccagttcatttttttgagctatttagctacttggattctccctttcaacatcacccacataaacactcttgtttttagggggggggggggttggggatttccaaagttcctgaagcataatgtctttaacacccccaaaaacaatttccttgtatagggattttgttgtaaatttcccagattggttcagtttccacaccataatatttctctctgttgttagctggactgtaccaagtaagtcctgcaaccttagccagtcaggtagttcatcttgacctaaagatctcctaagattcaatttcccactccccttcagacaacatttgttttacagtcttgtcagggccactgtagatactgtgaatgtaagggaattggattttcaaaggagactcccctaaccaaatatcatcagaactggatagactccccacaaccaattttatatgcactgccaaatttcgtccaccttttcacttcatgaagtcctttccaaaattgtgagcacccttcggcagaagattggaaaaaccctcccccatttgagaagtatttttcctaagcaattcacaacaagggctggtattgccagattctaatttataaatccattttgcaaagaagagccttcattcattactctagtattaataaagccaagacctccatcttctttgggtctgcaaagggcatcccatctaatcatgtggtattttttctttccatccaaaccttcccaaaagaacctagctctgatagcatccatcttatgatgaacctgtgctggtagtaagtagaatcccatcatatacatagggatgctggagagaagaaattgattagaatggatttgcccccataaggtagaaagctacacttccatgtagctaatcttttttctatttttgagactgggattgacaaatcttttgctatcaacttcagatcactgacaggcatccccaaataagtgataggtagctctcctctcttacaattaaacagatcagccactctttgtgcctcttcttccccaacacctaattactccatgattttgataatatggtgctacagtaaacatttgctaatgatggattaattaggcttaataaacacccccttactgaatagcatggtggctggcgtatattgcgcggctaatatctttatatttttttcataatatttattattattttattttaaatttttgttatttgtaaattatatttctatggttttagactattcttctaatattccttatttttttaattccgaatttctattatttctaattgtatttttatatgtactctaaactcatcttttaacattgcttatttttaattttaaatttcacttatttctaaattatatttctatataaactctagactttttttttcaatatttcttatttttcatttatcaattttagttatatttctatatggatttaaactttacttttacttttattattttttatttcgaatttcaattagttataaattcctatatgcactctagattcttctttcaatttccttatttttaatatcgattttttgttaattccaaattgtatttttatatggactctattttgctacatgatatcgcgactttgtggttttagctgtagtatcccgcacaaagtcacttttgaagaaacacactctgtatatgtgtgtatatgtggttatttcacagggcactccatccattaaattaagacaatttttgctgtaggccactatgactttgaggttttagcttttggacatgccaaaagtcaatctttggagaaacacactatcaaaatatggtaatttaccatcggacatcgcacccattaaaatattaatttcttgttggatgggagagagaaacaacataaagagtaaataatacccttagactcacttgtcatattcaagctcttcctttctactaccttcatattttaatgtatgacgtcgttgattttttgtccaacgtttgaccattcgtcttattcaaaaaatttatataattattatttattttattgtgacttgattcatcatcaaatgttctttaagcatgacataaatattttcatatatttgcacaaaatttttaaataatacgaatggtcaaacgttggtcgaaaggttaacaacgtcatacattaaaatacggacggagtatttcctctttcctttatacttccttctcctttccaggtgggcaacggcttgcctggtgtgtgcttgcacggcgtgatgcactacagccatgcatggcgaggtagtccagtgcgagggagctggcctggtgcatggcacgtcgtatgacgtacgtgtttgtggagtgcaagaggagagcaagctagacggggccgtagcgggagagcaagggagggtgcagcagggagctgagacgcgcgcacggccggtggcaacgacgacagcaacgtctcgccggtagcaccgcatcgtctcaacgttagtccttgtccgggaacacattttgacgcgcgcacctggtcacgttcaccaccggagctcagtgctgatgtttctctctctcccccgggaccgttcccgtcattttgatcctcctcattgctggctgccgccacctatgaaagagtcacaccataagacacactcagccgccgccatcacggccgttcccttgctggagtcgtgacgcccggcctcacccatctctccgctgctcgtttctggatcgatctaagaaagaagatgaacagtgccaagtcactgtttagactgagtaatcaatccataataaaaccggcatgtgtgatgggagatccgaaaagtgggcccaagggtactttagaactttcacatggtttctgtaaaatcaaagatgtttttttattattattctgtgatgaacaattgggcattggagtttattggttttgttatttggaatttattcacgaagtggttttggagatgattggatttcacaggtgaatatacaggtactgctgtggttttatgtggaccggtcagaccgggctctggtagccggtcagaccggcgtgtaatgcgcggtcagaccggcgcagcccgcggtctgaccggcctatactgtgtcggtttcggtttcgggttgtttatttggatatccgagtttattccatgattatggcttctagatggatactatacgtatgtaatactattgtttgctgctaatgagtcaagttggagatagcttggtctcggaatatggtttatttgtttgttccatgtgtaggtgactcgatgtctcgggagagtatttgcggtgatggaccgggagtcggcttgaggataagacgacgtccgtggtggtcagagatcatgcgggatacttaggcaagagttgatgcacgtggttgatggagattccatatggcatacgatagaggaattgtgtgcgtatgggatgcggagtcgaatttagaaggagtccaaatttggtacgtttggttatgtaaagtttctttcttgtactagtgggtttcctaaggtgtttaggactcctagtatgagtttggttcgtggctttaggctgcctacctcatgtataaatagagggggagcgtgaggcttcccggtatcgttttagagagcaattgagttgagttttgagttagagtttcgagtttagtcgaaatttttgtaaggagtgctgttgttgcactttgtaaacacagagagaagtaataaagtcgtcatccacttc

SEQ ID NO: 27787 - DNA, 1824 bp, Oryza sativa
  misc_feature (568)..(568): "n"=any one base of a, t, c, or g
  ref <308>: DATABASE ACCESSION NUMBER: AK103229
  ref <309>: DATABASE ENTRY DATE: 2002-08-28
gagccacttccggtgtccatccaattccccagcaaccgcggcgccgatcgagttcttgggctccggcggcagccggccggtgttgggcgcgcgacggagccccggccacctgcagctagccgtacagccgcgggcggccggtgtatacaggtatctctctggattctgtttttttttctttttttctttttcttttggatcgaatcggccccatcgctcgctccgagaaggcggcgttgatccgcgccagcgccacggtttcgaggggctgtgtgtgcccccgatttagcggaggagggcacggtggtttcgaggggtcccgagaaattcgtgagtttttcatcctgcacttcactttgttttcttgcttatcgccgtgtttggtgttgctaatagcagttattacttattcttattactattactattattattattactcactccgttttataatgtatgtgtttagatttattagtatctaaattaatgtaggcaatgttagaaagtcttacattgtgaaacggagcaggtattatttttggagtaaatttcagaaatgggacanagttatgaaaaaccacgggtattaatgacgagtggcacataaccacatatgacatatttatggtctcattgttttctaaaacccaacctttattggaattttgataaattccagcatatctatggtttagaactttaagtaaatacacgcttaaagtgcataagggtgatattttgtgaaactttaaaatcataatacctgacagcggcggagccaaggcccggccagcacaggcaggcgcctaggctccgccacatgcatccatgcattagagctaaatatagcgtttagccattagcctagcttcacatacaccattagattagcactaattatcatacttggttattagccagcggcctaatttcgcttcttattcatgataaaatgctatatgtatttttgtttacttgttaatttgttatctatcgttaggtttgcccatgcctaaaaaaaattctagatctgccactgatacctgaggttgtgtcatgttataaaacctgtggtttttacaacttcaccaaaaaacacaatgttttctgaaatttgttcttatttttattataaagatgcatagccaccactacggggtttcccaaaccaccggggccggggttaccgcgacccagcggtaagcacggttaccgcgcagtaaccacggtaaccgtgaaaaaccgtacaaaaccgtgcaaaatttatcaaaaattcaaattatattttaaatttatttcaatttaaggaggttaccgtggtatttatattaccgtaccccgcggtaagcccggtaaccgtggtaaccgcgcggttacagtcggtaagtcgaaccctgccactacccactgttctatatgcacacacctgtaagcaagtccacttaataaacacaaagtgacggatgtcagaagcaaatttccaacctcactataaaatagtattaaaagggtacttgtgtgcttgcaatattgtaggtataagtattgatccctggtgtgtgaagtcatgtatgaaatattttgttatatgccattttcgaagatggcattcagatgtgcaagtgcacaaacaaactatagttgtggtatattaacctgtcaagctattagctaaacttgaggggagggacctaatgtttttctttgaaccaagtgatgggacctaacctttacagcctgtttggcaacaattgggaggaggaatgagagttcagttaaccagtaaaatactctctgtgtatcttacactggttttgggcc

SEQ ID NO: 27788 - DNA, 2910 bp, Oryza sativa
  ref <308>: DATABASE ACCESSION NUMBER: AK103230
  ref <309>: DATABASE ENTRY DATE: 2002-08-28
gaatctaatcactcctcccctcttccaccctccccccacctcgtcgcctcgccgtctccacccccaaaaccctagccgccgccgcgctcctcctcctccgccgccgcccggcgccgcccgcggccatggatctcctccgctcgcacctccacaaggtccgcatcccggagcccggcagccgcatccacaaggacgagtgctgcgtctccttcgacaccccgaggtcggagggtgggctgtacgtcgacatgacctcgttcctggggttcgggagggagcacgtggcgtggaactacgagaagagtgggaaccccgtgtacctccacatcgtgcagcgccggaagccggagcccgacgacgaggcggatcgcccgctgaagaagcccacgctactcgccatcggagtggagggaggtttcactgatcaagaacccgaatacgatgaggcttttgaaattgttatcttgcctgaatttacttctctcccttttccatcaattgacttgccagagaaggttaggattgcagttgacaaagttatacttgccgaaagtgctgatcgaaaacaacaattggcttcttgggttgctgacaagaaaaaagtcagtgcacatgctatggatctgaagcagctagacaatggtgtcattgtgccacctacaggatggaagtgcagcaagtgtgataaaactgagaatctctggttaaatttaactgatggcatgatcctatgtgggaggcggctttgggatggaagtggggggaataatcatgctattgaacactacgaacagactaaatatcctcttgcggtaaagcttggaacaattactgctgatttagaagcagcagacgttttctcatacccagaagatgatagcgttgaagatccactattagcgcagcatttgtcacattttggtattgatttttcttcactccaaaagaccgagatgactactgctgaaagagagcttgatcacaacacaaattatgactggaatagaatacaagaaagtggcaaagatgccgaacttttatacggccctggttatactggccttgtaaatcttggaaatagttgctatatggcctcagtaatgcaagttatgttttcaactcatccttttatatcacgctactttgagaagcagagcttgaaagctgcatttgcaattgccccagctgatccaacattggacttgaacatgcaaatgacaaagttggctcatggaatgctctctggcaaatactctgtgccaaatcaggagggacaagaaggaatacaccctcgtatgtttaagacagttattgctgcaaagcatcccgaattttccagtatgaggcaacaggatgcgcttgatttcttccttcatcttattgaccaagttgatcaggcaaacaccggaaaccatgagctgaatccttttacagggttcaaattcttcattgaggagcgtcttcaatgcccttctggaaaagtctcctataacaaacgttctgactacattctttctttgaacataccgttacatgaagctactaacaaagagcagctagaagcatttcatgagaagaaagctgcaatggatttggatggaaaggaagtgtctaatgaggaaattgtgaggcctagagtcccactggaggcatgcttagcaagtttttcaggcgcggaggaagtgcctgaattttacagcactgcattgaattcaaagacaacagcaattaagactgctggctttaaaacatttcctgattacctggtgttgcagatgcgcaagtttgtaatggaagcaggatgggtgccaaagaaactagatgtatacgtagatgtgccagatataattgatatctcgcacatgcgcagcgaaggcatacagcctggtgaagagctactacctgaaggagcttctggtgataacaaagctgaacctgttcatcctgttgccagtgaggacattgtatctcagctggcaagcatggggttcaattatcttcattgccagaaagctgctattagtacatcaaacacaggagttgaggaggcgatgagttggcttctctcacacatggatgatccagatatcaacgatccaatatctaaagattcacaggctgctgaacaaactgttgatgaaactagcgttcaaactcttgtttccttcggatttcaagaagatgttgctcgaaaggccttggcagcttctggtggaaatatcgagagagcaacagactggatttttagccaccctgaggcttttagctcagtacctactgattcttcaacaagcaatatggaagatgatgatgcacacataccagatggaagtggcagatacaaattgatggcgtttgtgagccatatgggcacctctacccattgtgggcactacgttgcccatgtcctcaaagacgggaggtgggtaatattcaatgatagtaaggttgctgcctctgtcgacttgcccaaggatatgggatacctgtatttctttcaaaggatataaagcattagcagctgaaagacttcacaggcaagaaatacattcgctcgctgacttgagtcttagttatgggcacctatgatcaaaagcacggcggatagtcggtgaacttgcatgcagatggacttagagcgagtgttggtcacatcctgtcgtgctgactttagactgatcgatcagctgggatatcactttgttccatggcattatgcattggcacattcaattcttctttgtcgatctatcatcttagcgttaacattctgccatgaaaactttggactggctcaactttttacatatgaaatggaaaacaaaaggcaagggacggtccctgatgccgcatatatattttgcacattgtagcagagcgctgggtgttaaaagattggtcctggacacc

SEQ ID NO: 27789 - DNA, 2101 bp, Oryza sativa
  ref <308>: DATABASE ACCESSION NUMBER: AK103231
  ref <309>: DATABASE ENTRY DATE: 2002-08-28
gtccgcttggcttgcgtcccttttgacgcgctctcatctctgtcctcccttctcttcctatacaagtcctccctttattcttcttcttcctcccctttcttgtagtagtacccttgtttgtgtgttgagccgtggctgtcaccgggtcaacacactaccatttcaacctctttgccctgttcaacaccagctcatgcttccattgctagtggtataagactcggattttccctcatgaaccatccaaatattcagtcttgaagaaggaggagaggggagggggaaggcgatgaagtctaacaggaacctgaccaggggagacggtaggaggctggggaatgcggcactgatagcgtttatgctgggatccctacttgtgctctccctcgtcagggcaaggttctcccccatcgggaagccaggggaagccatcaaaacagaggagcaggaggcgatgaggaaggggagtgtgaagatggagaccctcgaggccgccgatgaggctgcagcatcagctgcagcagcagaagaggaagaagaaacgcagcccaaggctggagacaccacagctggtggcggtggcggtggcgcaagcagcgcagctgttgcagcagcgtccaccacggccacggaccacctgactaagccggtgtgttacgagtcaagccggcggtcggacacgtgcgaggccaccggcgacgtccgcgtgcacggccgcagccagaccatccacatcagcccactggagcaggagtggaaggtgaagccgtactgccggaagcacgatgccttcgcgctgtcgcacgtcaaggagtgggcgcttcggcccctctccaccgccgacacatacccggcggtgccgcattgcacggttaacagttcggccaccgcgttcgtgctctccaccggcgggttcacgggcaacccgttccacgactacacggacgtgctcatcccggcgttcatcaccgcacaccgcttcgctggcgaggttcagttcctggtgagcagcttcaagtcgtggtggacgaacaggtacatgcaaatcttccagcggctcagcaagtacgaattggttgacatcgacaatgatgacgaggtccgatgttaccggagcgtggtggtcgggccgacgttccacaaggagctcggtgtggacgcgtccaggacgccgtcggggtactccatggtggacttccgcacgatgttgcgtggagcgctcgggctggagcgcgctgtggctgagcccagcggcgaccggtgggacatccggcgccgcccacgactgctgatcatctcgcggcgcaactcccgtgcgttcctgaacgagcgtgccatggcggacatggccatgagcctgggcttctacgtgcgtttgggcgagccggacatcagcacggacgtgtccaagttcgcccggctggtgaactcggcggacgtgatggtgggcgtgcacggcgcagggctgaccaacatggtgttcctccctgccggcgccgtgctcatccaggtggtgccgtatggtggcctggaatggctcgcccgcggcacgttcaaggagccggcggccgacatgcagatccactacctcgaatatatgatccagctcgacgagacgacgctgagcgagcaataccccaaggacgacccggtgctcaaggacccctactccatccacaagcagggctggaacgctctcaagatggtctacctagacaagcagaatgtgcggccacatttgggcaggctcaagaacactttcatggaggccctcaagctgctgccccatgggcacaccaactgagtaacatacttattgatcatggagcccaggtaattaccaggaacaccatatcatgtacttaatttgcgtgatcggtcgactagatagtggttgaagatgctaggttctcttcctttggatgtaacaagtctgagtttcaagggtggagtttctcattgatctgtaaatgcgagttaggaggcgcattccctcctctctgtttttctgctctcttgtagtagtattttgggagtagtactacaaaatgtagtttggaggatgtggaatctaataagaatggagggattgcatgggatc

SEQ ID NO: 27790 - DNA, 816 bp, Oryza sativa
  ref <308>: DATABASE ACCESSION NUMBER: AK103232
  ref <309>: DATABASE ENTRY DATE: 2002-08-28
gagtattcctccccctttttctcctcctcctcctccgcgagtgtgagcctagaaactgcggcggttttgggcgcgatttggtttccaaccacctcgattggagtgcgccggcggtgatccggttggtccatggccggtggtggaggtaggtgagggggagggcggcggcggcggaggaggaggggtttggggggtcgtgggatgtgggaggtggcgtggtggaggcccgggacgtggggcgggctggcgatgcgggtggggcaggtcgccttcgccggagcctccatcggcgtcatggcgtccggggccggcttcgccaactacacggccttctgctacttgattgcatcaatgggattacaatcattgtggagcttgggacttgcatgccttgacgtgtatgtatgccttgacagtcaaaagggatctcaacaatgctcttctcgtgagtttgtttgtcattggagactgggtaactgcacttctgtcctttgctgcatcttgctcagctggaggtgttatggttctgtttaaaagggacgtgcttttctgcagaaggtatccacaactgccttgtgggagattcgaacttgctgtagcgcttgcatttttgtcttgggcacttagtgctacatcagccattatcatgttctgtctccttgctgcattctagtcttgcatataatcctgtgtaagttctgtttatagtgctgccttttttctgttttatcttgttagctttgattttgtataggatcattttcaagaatatgtagtgaaccacacgaccgaaaagtggaaatgctggggaagttc

SEQ ID NO: 27791 - DNA, 1327 bp, Oryza sativa
  ref <308>: DATABASE ACCESSION NUMBER: AK103233
  ref <309>: DATABASE ENTRY DATE: 2002-08-28
ggcggattcgcctcctccccccctccccccccccccccgcatctcctcccccccacgccgccgccgccgccgccgcttcggctccagctctccgccccgtccggtacccgccgaggaggagggtggggggtttgctccgcgcctcgcgcgcgatccgcggcggaagtcccggcgatccggcactgatttcggggtgccgccgcggcgacctggggaggtgagccgcgattcggggcctgctggggcgggtttgcgggggttttggtaggaatttggccgggggtggagtggggtggggtgggctacgcgagcgtgtgcttagggcggagattcggatttcgggggaggtggctgcggctgtttggagcggaggggtttaatagctacagcatgtgacgttgatactctaatgatgaaggagcggagctctttatgtgaaagtgcggcagatggaagttgggttttgaaatacaaaaggaaacggagcaagctaacagttagtccatcaagtgagcatgatgcttcctcaccaatactggattctcaaatgaacaatggctccatcaaaaagaagatcaaacatgacactaacatttctccatcaaccaagaagataagaggacatgacgggtacttctacgagtgtgtagaatgtgatctcggtggcaatttgctgtgctgtgatagctgtccacgaacataccacttggaatgtcttaatcctcctctcaagcgtgcaccacctggaaattggcaatgcccaagatgtcgtacaaaaaaagttagcttgaagctcttagacaatgctgatgctgacacctctaaacgtgaaagaacaaggagaatgcgcacaagcaccacatcagatagcccatccccatctccacaaaacaaagcctcttttaacacatcacgtggtgctgcatttagggatgatgaaccaggtgcaaaagacaatgaagttgagaaaaggaaaccattgatattacatttgaagaagcgttcaaccaaggaactatctacagataccacatcatcaaagtcagggttacttggaaagtcttcagaagagaaacaggagaaacacggaagtgctttgaaagtgaagaaacatctgcatcccatggaattatctccaaagaaatataagaacaagaagcaacacaatcacagagacagtaagagatccgaagcaaaaaaggtccaatatttggcatcagatgtggacagtgattcttcaatggaaccatctacttctcttgagcacagcgaatcgccgcccccaaaaagaaaatcgttggatggaagaacacctgcatcaagtacc

SEQ ID NO: 27792 - DNA, 3428 bp, Oryza sativa
  ref <308>: DATABASE ACCESSION NUMBER: AK103234
  ref <309>: DATABASE ENTRY DATE: 2002-08-28
gttcccgactccgagagattacttcctccaccttccatccatctcctcttctccccctctccctctctctctcgagatcgaacgaacgaagaaccctaggtcatccatggcgggggcgatccgcgtcaccatggaggtgggcgccgacggcgtcgcggtcgtcaccatctgcaacccgcccgtcaatgcgctgcatcccatcatcatccagggattgaaggagaagtacgcggaggcgatggatcgcgacgacgtcaaggccatcgtgctcaccggtgctggaggcaaattttgtggaggctttgatatcaatgtgttcacagaagttcacaagactggaaatgtatctcttatgcctgatgtatctgttgagcttgtgtcgaatttgatggaagcgggcaaaaagccttcagttgctgccattcaaggccttgctcttggtggcggtttggagttgaccatgggttgccatgctcggatatctacccctgaagctcaacttggactaccagagttgactctgggcataattcctggatttggaggaacccagcgtctgccaaggcttgtaggtctgcccaaagcaatagaaatgatgctgcaatcaaagttcatcacagcaaaggaagggaaagaaggtggtcttgttgatgccctgtgctcccctgatgagttgataaagatgtcacgcctttgggctctggagatagctaattaccgtaaaccttggataagatctcttgccagaacagataggcttggttcactgtctgaagctcgttctgtattaaatagtgcaagacagcaagcgaagaaggttgcagcaaacttgccacagcaccaggcctgcctagatgttatggaagaaggtgtactatgtggaggccatgctggtgttctgaaggaggccaaggttttcaaggagttggtgctatcaccaacatcaaaggcacttgtacatgctttctttgcccagcgtttaaccacaaaggtgccaggtgttactgatgttcaattgaaacctaggaaaataagaaaagttgctgttattggtggtggtttgatgggctctggaattgcaacagctcttcttgttagcaatacatccgttgtgcttaaggaagtaaatcctcaattcctgcaaaggggacagaagatgatagcagctaatcttgagggtctagtcaagaggggctcattgacaaaggacaagatgaacaaggccatgtcacttctcaagggtgcattggattattctgatttcaaggatgttgatatggtcatcgaggctgtcatagagaagattcctttgaaacaatcaatattttctgaccttgagaaagtatgcccaccccactgcatacttgcaacaaacacatctaccatcgatttgaatgttgtgggcgagaagacaaattctcaagatagaattataggggcacatttctttagccctgcccatattatgcctttgcttgaaattgtccggacggagaagacatcaccgcaagctattcttgatctcatcacagttgggaaaatgataaagaaagtccctgttgtggttgggaactgcacaggcttcgcagtcaatcgtacatttttcccttacacacagggttctcatcttctagttagtattgggatcgacgttttcagaattgatcgagtaataagcagctttggcatgccaatgggaccttttcaactgcaagatctggctggatatggagtggcattggcagtaaaggatatctatgcggctgcctttggaacaaggaatctggactctaatctggtggatttgatggtacagaatggacggcagggaaagagcaatggtaaaggttattacctttatgagaagggtgggaagccgaagcctgacccaagtgttcaggttgtgattgacgagtacagaagatgtgcaaagacaatgcctggtggaaagcctgttactttatctgatcaagatatattggagatgattttcttcccagttgttaatgaggcatgcagggtcatggatgaaaatgttgtgatccgagcttctgatcttgatattgcttctatccttgggatgggttttcccaagttcaggggtggtcttgtcttttgggctgacactattggagcaccttatatacattcaaagcttagcaagtggactgaaatttatggcgatttcttcaaaccatcatcctatttggaagatagagctaaaagaagcctaccattgagcgcaccaaacgcaacccagcaggcttcgtcgaggtcacgcatgtgagatgctatttcagctgatggcagaataattgcttgatgtgcatcggcaccctagttgaccctcatatctgggacctgaaaaaggaggtcagagcagtgttcaccatgtaatctcttttggatattttggcctttccggttttccgaactgggttgctatggcaatcggagtaataaatgttggcttcggatgccacaaaactgtagctttatggttaatgctccatccgctccagcaaggccactacaacctattaagttttcaaatgatacagaaaggctacaacacatcaattcagttaggaaatctcctattggagcacagatcaaacttgtcattgaattgctgtacaagacaagacaagcttttactgcggagcaaataaatgaaacaacttatgttgatatccatgggaataagtctgtctttgacagtctgaggaacaatcctaaagtacattatgatgggagacgtttctcttacaagtccaagcatgatttgaagggaaaagatcaactacttgttttggtaagaaagtatccggagggtcttgctgtggtggaagtcaaggatgcgtacccaactgtaatggaagatttgcaggcactgaaggcagcaggtgaagtttggctgttatcgaacatggattcccaggaggacattgtgtatcctaacgacccaaaggcaaagatcaaggtcgacgatgacctgaagcagctcttccgggagatggagttaccgcgggacatggtggatatcgagaaggagctccagaagaatggcatcaagcccatgaccaacacagctaaacggcgggctgcagcacagatcaatggggtgcagcccaaggctaagcctaagaagaagcagcgtgagatcacacgccggaccaagctcacgaacgcccatctgcctgagctgttccagaacctcaacacttgattgctctacgcttattcgacgtcaagtggagatatttatttctgtcctcactctacctactgcaatgctttatatacctgctacccttattgtgtatgttataaatgtaattccggcctccgggagcataatctgagacggtcagctttgtaaaacataaatcaattcaagagcttgagatggcataccttcgcctgtc

SEQ ID NO: 27793 - DNA, 1198 bp, Oryza sativa
  ref <308>: DATABASE ACCESSION NUMBER: AK103235
  ref <309>: DATABASE ENTRY DATE: 2002-08-28
gggggctttttagtctactcgatctaactccaaatcccatcaaccccgccgccgccgccgccgccgccaccaccgcgagacgcgagaggagagtgaaagaaagattcagagagagagagagagtaagcatgatgtccttcagccagcccgacgccttctcgccgtcgcagttcacctcctcccagaatgccgccgccgactctaccaccccttccaagagccggggcgcatcgagcaccatgccgctcaccgtgaagcagatctctgaagcgcagcaatctggcatcaccggggagaagggcgctcccttcgtcgtcgacggcgtcgagacagccaacgttaggcttgtgggattggtcagtggcaagacggagcggaacaccgatgtgtccttcacgatcgacgatggcaccggccgcctcgatttcatcagatgggtcaatgatggtgctgattctgctgaaaccgctgctgttcagaatggaatgtatgtttctgtcattggtagcctcaaggggcttcaggagaggaagcgtgctactgctttcgctatcaggcctgtaactgattataatgaggtcacactgcatttcattcagtgcgtgcgaatgcatttagagaacaccaaatcacagattggtagccctgcaaaaacatattctgccatgggatcctcatcttccaatggcttcagtgaaatgaccactccgacctctgtgaaatccaacccggcaccagtgctcagtgtaacaaatggatcaaaaactgatttgaacacagaagtgctgaatgttttccgcgaaccagcaaacgtcgagagcgagcatggtgtgcacattgatgaaatcgtgaagcgcttcaggctaccggaggccaagatcaaggtagctattgattacctcgctgacattgggcacatatactcaacaatcgacgagtctcactacaagtcagcgttcaatgaataaaggggattgaagcctcagttacttactagtatgtatcctctagcctcgaagctggctgcagctgaaactgaagaacaatcgagatgcttcatgtttgcttgtcatactaaccagtgtgcgtttgttttgctccatccagtgaaattacatgtaaccgtatctgtattacgagtagcacatatcgagtgacaaaacatataatatatgtatgtttgttgttttgcagcacc

SEQ ID NO: 27794 - DNA, 3777 bp, Oryza sativa
  ref <308>: DATABASE ACCESSION NUMBER: AK103236
  ref <309>: DATABASE ENTRY DATE: 2002-08-28
ggccgcttaaaccctggtcccccttgtctcccaaaccctctctccttcccctcgcttccgcctccggccgccgccgccgccgccgcgaggccaccgcctgctgctgcagcggcctacccttgcgtcggtgcaagacggcgccctgcggcttcggttgcggggtgggtggtggcgttgcgggaggaggaggagggaggcgggcggggtccaagctgaggcggctcgtgaggtccatggcggtggcgccgccgctgccgccggcaccggcgcggcagctacggcggtggaaggggtcttcgccgcggccgccgccgtggctgtcctctcccttccgccgcacccgctacttgtcgcgcccggccttcgccgcgggaggaaggcaagattattctcctagttcaggcatgggggttagcaaaaccggtgctttcaggcttggattgtatggcaacttaaatgtacaaagtagtgtgcaagaatgggttgatgaaaccaagaggttatttttcctcaggaccacaaacagtgtcagaaacaacatcactaatggcactactcctctgcgggttggaaatctgcgtcatgatccctcagaagatatcaggagttcaaactatccttccttgtataatcaaagagaaagaggaccatctaattcaattgtaaatagacatgtcgatacagatttggctaagcatcgtgtgatgtatcagtcagcacatgctgtgcctgccccattcagtgttgttaataatgatatcaaaccactgaacatgcttgatggctccaaggaggaaattccttggcacgattccgttacgatggaatcttctctgcctaaagtttccaagtcagagaaaactttggtggttgataaagctatcccagacaaaaaggagcacaaacgcattacaaggaaggtgacgccaaatttcccggacaaagcttccttgtccactgagtcaaaaaatgcacggaagttgcttgctaccatctatgacaaagttttggttgtcgacaatgttgagtcagctaggagtgttgttaaattgcttactacaaagtacaaaggctttattcatgcatgtgacacggaggtggcaaatattgatgtcaaagaagagacaccagttggtcacggagaagtaatatgctttagcatctgttcaggaaattctgatggggaggctgattttggaaatggtaaaacatgcatatgggtggatgtgctagatggtggaagggatgttctaatggagtttgctcctttctttgaggacccatttatcaaaaaggtttggcataactatagttttgatatccatgtcattgagaactgtggaatcaaggttgctggatttcatgctgatacgatgcatcttgcacgcctgtgggattcttccaggagaactgatggtggatattcacttgaaggactaacaaatgattacagagtcatggatgctgttctaaaggacatacctaaaactgggaaggtgtcaatgaaaactatctttggccggaaaaaggttagaaaagatggatctgaagggaaaaccatatctatcgagccagtcgaaaagttacaaagggaggatagagagttgtggatttgctattcctcactagattcaatgagtacattgaagctttatgaaagcttgaaaaacaagcttgaagcaaaggaatggattttcgatgattgtcctagaggaacaatgtatgatttctacgaagagtattggcgtccctttggtgctcttcttgtaaagatggaaacagagggagtgcttgttgaccgtgcatacctttcggagattgagaaagctgctgttactgaacgagaattagcagcggataagtttcggaaatgggcatctaagcattgtcctgatgccaagtacatgaatgtgaatagtgataatcaaattcgccaacttttctttggtggcatcgaaaatagaaataagcgtggtgaaacttggccacaaagtaaaacttttaaagtgccaaatgatgaaggcatagctacagagggcaagaagactccaaagtctcgcacaatcaaacttttcactattgtggaagatcttaaaattgatatgttcaccccgactggttggccttcagtcagtggggacgttttaaggagtttggctggtaaaatacccacagatcatatatataaaattgatgatggccaagagtttgatgaagatgggagcagtttggaacttcctgagcaggatatagaagacacttccccatatggaactgcatatgaagcgtttggtggaggaaagaagggaagggaagcatgtcatgccattgctgctctatgtgaagtcttttctattgacaaattgatatccggcttcattgttccattgcagggagatcgtatatcatgcaaggaagggcgcattcactgttcattaaatatcaatactgaaacaggacgcttgtcagcaagaacaccaaacttacagaatcaacctgctcttgaaaaggataggtacaagattcgccatgcttttgtcgcagctccagggaacactcttattgttgctgattatggccaactggaactgaggatcttggcgcatcttactaattgtaaaagcatgctggaagctttcaaggctggtggtgacttccattctaggacagccatgaatatgtaccagcatgttcgtgatgctgttgaagaaaagaaagttctgcttgaatggcatcctcaaccaggtcaagacaaacccccagtgccattattgaaggatgcttttggcgctgagaggaggaaggccaaaatgcttaatttctccattgcatatgggaagactgctgttggtctatcttgggattggaaggtttctgttagggaagcaagggatacactcaaactttggtatagggatagaaaggaagtttcagcttggcaaaagaagcagaaagcctttgcgcttgaaaagtgcgaagtctacactttgctcgggcgatcacgccaatttcctaatatgactcatgcgggtcctggtcaaaagggtcacgtcgagcgtgctgctataaatgcaccagtgcagggcagtgcagcagatgttgctatgtgtgcaatgcttgagatagaaagaaacgctcgccttaaggagcttggttggagactcctattgcaggtgcatgatgaagtaatcttggaggggcctacagaatctgccgaggaagccaagaccatcgttgtggagtgcatgtccaagcctttctatggaaccaacatcctcaaggtcgacctagctgtcgacgccaagtacgcgaagagctggtatgctgccaagtagtagaatccgcactcggttcttctgccctatacatagccagatgagcacatttgtctgccccaaagttaggcgacaccaaagttatgtgtcgccgatgcgatgaagactctgcccatccgtcctgacgaaatacagcggactgaaccagcacagatagagatgcaagccgctcaagaagttgaagtgccacccccatcacccacaggaacacaagaccacacgtccatttttcggtggcagaggcagagcatccaagaaccgaataggctgaagactctttcactggcagtagctgaatgtacactagtagcctgtccgatagttactccattagatttggatttgactgtagagaccacagtagatactgacctgtatgagactttcagatacttgatcatgaaggaagtgcagaagcatgctgtcttcatatgacctgttc

SEQ ID NO: 27795 - DNA, 1025 bp, Oryza sativa
  ref <308>: DATABASE ACCESSION NUMBER: AK103237
  ref <309>: DATABASE ENTRY DATE: 2002-08-28
gccttcccgttgggctcgcgcggcgccgtcccccctctctctctctctctctctctctctctctctacactgctcacgcctctctctctctctgctcccaaatctgcgtgggagagagagagagagagaaatccagtggggggagggattggtctctggaggggatctagcagcagcagcagcagcagccatgaacatcttcaagaagaaggtcgaccccaaagaggctctcaggaccagcaagagggagatgtcagttgctacacggggagttgagagagagattggctccctgcaaatggaggagaagaaactagttgctgagattaagaaaactgctaagacaggaaatgaggctgcgaccaaaatcctagctcggcaacttgtgaggcttaggcaacaaattgtcaatttgcaaggcacgcgggcacaaatacgtggagttgctactcatacacaggcaatgtacgcaggcacttcaatatctgcaggaatgaaaggtgcaagcaaagcaatggcagcaatgaataagcaaatggaaccaacaaaacagatcaaggttatgagagaattccagaaacaatcaaatcagttggacatgacgcttgaaatgatgtccgatgctatagatgaaacacttgataaggacgaggcagaagaggaaacagaagaacttactaaccaggttcttgatgagattggtgttgatgtggcttctcagctgtcttcagctcctaaaggtcgtattgcggcgagcaacaggaaagctgagagcaaccaagcacgaaatgccgctccccccagaaataacgtggagcctgaatcctctgctgaagttgacgacctggagaggagactggcttcacttcgccgcatctgagcagctgataaatatatagtgcatctataattctatatgtaaatttgtttcactcaacatagcttgtctgaatatgtgcgagtagagtattgtaggcaaacaacaagatttaaataacataattgaaccttcggattttctatgg

SEQ ID NO: 27796 - DNA, 744 bp, Oryza sativa
  ref <308>: DATABASE ACCESSION NUMBER: AK103238
  ref <309>: DATABASE ENTRY DATE: 2002-08-28
gattcgaagcgtgctctgctcgctgctgctcctccacctctcccaattagggttttcgctggctgcggcggcggcggcggcggcggacggcggcgaagtcaggcggcctctccggcatccgctccgtcgagatgaaaagcaaatgcggtatggtcctgtgatttaagctggaagatccgatgctgtgttgtgaggcttggacacctttcacattctgagtctctcaggattatgtaaatgccactttttggagtgtctgcccttttggtttagtctccattcctcaagactatagctagcaattatataaagaaaaaaaattgaactgttaattgccaccaagtcggcaaaatcgctggaacacaacattcgagggagaaacttcagtggaatacgagtagtatcagtgccccaaggtctctgcaatcagagacagtaacaactgaaccttaagtatcgaccaagtctggcaaaacactggaacacagtaaatgaaggagaattttggtgcaatctgttgatgccccagataacagcaattactgcttgacattgttttcttggtaggttgtgtttgtagatttagccgtcctgtaagtgtagaaagcaaacattcttgtcatatatttacctgtaagttgtataggtttatttgagtggttataatgtatatgttgaatgaagtattccatggtttttgattgtgaactatgccagatgaataaaaaacactggtttgtacct

SEQ ID NO: 27797 - DNA, 1968 bp, Oryza sativa
  ref <308>: DATABASE ACCESSION NUMBER: AK103239
  ref <309>: DATABASE ENTRY DATE: 2002-08-28
gactctccaccggcaccctgcatttactgctcccccatcactcgccccggcttccttgagcgcgatctccagatcatcttttgtgtagcgagaaagctgacgacggggaagggcggcgtggtcagcatggtgccgcgcgagcaggcggaggaggccatcgtggctgacagcaacggcaaggaggaggaggtcggggtgatgggcgtcagcgccggggagcacggcgccgacgaccaccacggcggcggcggcaagttcagcatgaagaacctgctctggcacggcggctccgtctgggacgcctggttcagctgcgcctctaaccaggtcgcgcaggtgctcctgacgctgccgtactccttctcgcagctcgggatgctctcgggcgtgctgctgcagctgttctacggtttcatgggcagctggaccgcctacctaatcagcgtcctctacgtcgagtaccgctcccgcaaggagaaggaaggcgtcagcttcaagaaccacgtcatccagtggttcgaggtgctggatgggctactgggcccgtactggaaggcggccggactcgccttcaactgcacgttcctcctcttcggctccgtcatccagctgatcgcctgcgcgagtaacatctactacatcaacgaccggctggacaagcggacgtggacgtacatcttcggcgcgtgctgcgccaccacggtgttcatcccgtcgttccacaactaccggatctggtccttcctgggcctcggcatgaccacctataccgcttggtacctcgccatcgccgccctcctcaacggccaggccgaaggcatcacccacaccggtccaaccaagctggtgctgtacttcaccggcgccaccaacatcctctacaccttcggcggccacgccgtcacagtggagatcatgcacgcgatgtggaaaccggccaagttcaagtacatctacctgctggcgacgctgtacgtgttcacgctgacgctgccgtcggcgtcggccatgtactgggcgttcggggacgagctgctgacccactccaacgccttctcgctgctgcccaagaccgggtggcgcgacgcggcggtgatactgatgctgatccaccagttcatcacgttcgggttcgcgtgcacgccgctctacttcgtgtgggagaaggtgatcggcatgcacgacaccaagagcatctgcctcagggcgctcgcgcggctccccatcgtcgtccccatctggttcctcgccatcatcttccccttcttcggccccatcaactccgccgtcggcgcgctcctcgtcagcttcaccgtctacatcatcccggcactcgcccacatcctcacctaccgtacggcctccgcgcgcatgaacgcggcggagaagccaccgttcttcctgccgagctggacggggatgttcgtgctcaacatgttcatcgtggtgtgggtgctcgtggtgggcttcgggctcggcggctgggccagcatggtcaacttcatcaggcagatcgacacgttcgggctcttcgccaagtgctaccagtgtcccaagcccgccccggcgttggcgcagtcgccggtgccattgccgcaccactagcgcgcgcccgttccgcaccaccgccgccgccgcggcggaccgtgacaacgtgcaccgccgagcccggagcaaggaacctcgctctcctggccggcacggctgcaaaaattcagtgttgcttaggttttggtcgccttgtaatatacaaagcctctcctcctgtgctagggtgtcacaccaaaatggtagaagaagaagagggcatgggtccctacgatcttgccccgggccgtccgctgccgcgttgctttcccccgatcctcgatggtgtccttgtgtttgtttggcttgcccctccctctggcgatatatatgtgatggtcgtcatggcttataaagattttcagctcatgtcacattttc

SEQ ID NO: 27798 - DNA, 3058 bp, Oryza sativa
  ref <308>: DATABASE ACCESSION NUMBER: AK103240
  ref <309>: DATABASE ENTRY DATE: 2002-08-28
gacttacacacacaaacacacagagagagaccaaaagcaaaccctcgcctcgcctcgcctctctcaaccatcgtcttccaccgccgccgccgccaccgaacgaacgcgccgaccgaccgcgcgaagatctgggcagctgggacgagacatagggagtataacggaggaactgaagaaggagacaaacgccggatttaactccacggaacgggaacacattgctgctgctaccattcaagcttggactccggtctcctcctcctcctagggtagggtggtaagggagaaaattgcagatgcagatgcagatgcagtcgaggtctcgcattcgcggccgcgacccgcccccggcctcctcgggaggacgataccgccgacgatcgccctccccgcgccgccaccaccgcgctcccccctccaaccccaacccgcacagagacagacgcacccccgaccgcccccgccgccaccaccacgaggacagcctccctctccatgtccatctcccacccccacccgacgccctactcaccgccgccgccgaccgccgctcccgcgctgacgtccttctcgaggccggccgcctcgccgcccgctacctcgtcgcccagggcgtcatccccgagcaccgtctccgcgccagggaggaccccctccctgctgccaggaaccatgacgtcgacgaccccaggtcccgccggaatgccgacttcccccgcgacagaggggacgatgacaggctatcccgtagatccggctgggacaggaggagcaacagctttgacagcaggcgcaagtacaatgatgccgcctcagccgatcggagtgcccgccggagccacgactacgacgaccaaaggagaccaaccatgtcacgctcctattcacaaaacgaccgccgtgtctccagtgatagcaggctggatcgaagacggaggagcaggagcagaagcaggagcagaagcagaagcaggagcaggagcagaaccaggacaaggagctataactatggcagccggagggattcagattggcgagcatccggcgccgatttggatcattccaaggtgccagagcctggcattgtccgtgacggtgatgctgatgtgggatacggtgatgctgatgatgtgccaagagatctcaaggcacctccccgttcagtggttgttatggagacaaaagagagtgccagccaagctgcagccaatgaagacacagcagaggtggagtcagagatcatagaggtcgatcaagctcaagatatatatggggatgacgatgacgatggtgacgatgctgttgctgccttcaattatccaagcgttgctgaaataaatgttacccaacacaagctgtccaattccaacgaggatgttgttcatccatcacagtctgatgaggaaccactgcataggcagtcccagttcagcgatgctgaggagggcatggagggtccgatctctcccagggattcatgcttggtagaaccagtggccgaggaagtcagagatggaatggaggctccgcagagtgaagttgaaactgataacgcagaccttaccaaagatgaacaagacctgccagcttggtatgggatttttgacctcaatgttgtggaatctcaagaaaactgtgaaatggttgagatttccaatgattcgcctttagataatggtcgtgactctgttcctgatcaagttggtcagatgagccaaggagcaaactgcgtcacttcaggaactcaaggtcaagatgaacatgcatttgacaaccaccagtcggaggatgaacaagtgcctctaaatcaaagaaatggtacggatgattttaacaatgaacaaggggttggaaatcagacaggtgatgaacatggacaggataatcaccagttggaggatgaccagatgcatataaatcatgtcatggatgtgcatactttagataacggccttatgaacggtgaggaaatgcttctaaagcggtgtgcagatgagcacacggatcatggacacctggtggaaactgaagaaatgcttctgaatcaggggcagagtacctctgtacaagtgttggaaaattataatatgaatggagaacaggtgcagctcaatcatgatgctgatgaacattcaggcgatgatcgcccaataaagaatgagcaaatgcttttgaatcatgttatgggtgtgcatgatttggataatcatgaccagaacagtgaacaaatgcttctaaacaatggcgctggtaaacaggctgcagatagtgctcagttacaggaagaccagatgcttctagaccaggctgcagatggacaagctacgcttcacggtcagagcattggccaaatgattcctgtaatcaatctggaagatgattatgaagagcagtctgataccatagagttttcagaatccaagtaagcttttttagattctttttgtcacaacctcaagggggtgaggaaaatcctttgcacttgaacatgttcgctatacagaagtgacaccttacataaacttactgaaaatgttctaccagaacatatctgttctcaagggcaacaaacttcgagtattcctgaccatcctcagactaacgtcccagctgctgctgctgcttcatcagttaccctcaaccatggaaataggtggactagaaggggcgctactgttgcacaggaaatcccagcgatgatgagttgatggcatgttgtatgttgctttttgatgaaatactgttagaggtaatcatcttgtattgtgggactgccatcctctgagcttgggaaatctttgtgaaccatgatgttcgtgttctcagctcctacgcttgagcttactgatatcctgaaccatgggaagctggcatgctgaagttggttgatcggtcatttgcttgtttgtatgttgtggtgtagtaagtagtaacaaattttgatccccagaggtcacaaattccatgctggtctagcgatgtgttagtagctgggtagctctaattttactgcgaacaatatgaatcatgttcgtctaacaaaattctctgctgcctt

SEQ ID NO: 27799 - DNA, 1603 bp, Oryza sativa
  ref <308>: DATABASE ACCESSION NUMBER: AK103241
  ref <309>: DATABASE ENTRY DATE: 2002-08-28
ggccacacacacctacgcctacgcggggaagagaagacgagacaagaagaggagaggagagaagagaatctcgtggaattctctccccctctcctcgcctctccaagaacccaccaatcctccccccctccccccccaacactccactggcgccgcacagctccgatcttgcctccgccgccgccttcttccgctcccaattcgggcccgaattcggtccggggggggtttcttggtgatgatcattgtattaaccaaaacctgaacctagtgttggccctactgtaataattcagtcacttatcagcagcatatggaattaggtggcaacaatatgggcccagataatggagcaaacaacaattccaacttggctgcaaggcaacgcttacggtggacaaatgagctgcacgaacgatttgttgaggctgttactcaacttggtggtcctgatagagcaactccgaaaggagttctaagaattatgggtgtacaagggttgacgatataccatgtgaaaagtcatttgcagaaatacaggcttgcaaagtacattcccgactcttcagctgatggtaacaaggctgaaaacaaagaccctggagatttgcttgctggacttgagggatcctctggcttacagatatctgaagctctgaagctgcagatggaggtccaaaagcgtctacatgaacagttagaagtacaaaggcagctgcagttgcgcattgaggcgcagggcaagtacctcaagaagatcattgaggagcagcagcgtctcggtggagtgaaatctgaaacacctgctgctggtgcttccgtcacattgccaagcgatcagttccctgattccgaaagaactgacccctcgactcctgcacctacatctgaatctccaactcaaggtgtaccttcgaatagggacaatggaggacaaaacgaagcaaccaagagcccccagcgcgatgattctctgtcccgccatgaaccactaacccctgattccaactgtcagcctggttctcctaccgctagtccaaagcatgagagggcagcaaagaggcaacgaggtaatggtgcagagttctcggaaactgacttcgcccttcctcattctatcttcgagtcgagttcggggtcagagttccaacaatgttccatgtcctactcaggtcattagcatctggtgatactcctcacagcatcttcgctagcttgttcgagacgaagtaatgatctaagatccgtgttgtagctctcagtagtatatttctaagtcccaatggagatgttggtagacaaaaatgttgtaggtgttcagatgattgtttacatgatactacatatgacagctatttaagcttgtaatttcgtggcctgtaaattttattatcagctgttgagttgggaagtttgaaggttgcgctttgtcgcggcgtcgacttctgctcatctgggtaaatctttattgacaaaagtgtttaacatgaacaatttttcgcgtgtaatttgttgtaaacttgtaatggtcagtggtcagaagcacaagctgttgatgttatgctgttacacttggatgttactatcatggttacttttctcc

SEQ ID NO: 27800 - DNA, 1696 bp, Oryza sativa
  ref <308>: DATABASE ACCESSION NUMBER: AK103242
  ref <309>: DATABASE ENTRY DATE: 2002-08-28
gagagaagaaaaaacgaaacagccgagatggagaacgcaccggccaccaccacctcctccacccaagacggcggcggcggcgccggcggccatgtcttcctcctcgctttccccgaggcgcaaggccacgtcaacccgatcctgcagttcggccgccacctagcggcgcaccacggcttcctccccacgctcgtcaccacccgccacgttctctccaccgtcccgccccctctcgcccccttccgcgtcgccgccatctccgacggcttcgactccggcggcatggcggcctgcggggacgccagggagtacacccggcggctggcggatgtgggctcggagaccctgggtgtcctcctccgctccgaggccgccgcggggaggccgccccgcgtgctggtgtacgacccgcacctcccgtgggcggggcgcgtggcgcgcggcgctggggtgccagccgccgcgttcttctcgcagccgtgcgccgtggacgtcatctacggggaggtctgggcggggcgcgttgggttgcccgtcgtggacgggggcgcgctccgggggttgctgagcgtggagctcgggccggaggacgtgccgtcgttcgtgaaggcgccggagtcgtacccgccgttcctggaggcggtgctgggccagttcgacgggctggaggacgccgacgacgtgctcgtcaattctttccaagaattggagccgaaggaggcagattacttggcatcagcatggcgttttaagacgattggtccgaccgtaccatccttctacttggatgacgatcgcttacaaccaaacaagaactatgggttcaacatttctgacagcacttcaccttgcttggcgtggctagataatcagcccccttgctctgttgtctatgcttcctatgggactgttgctgatcttgacccaactcagttagatgagctgggcaatggattttgcaattccggtaaaccgttcctttgggtcgtgaggtcctgtgatgaacacaagctatcagaagaactccgtgacaagtgcaaggagaggggcctaatcgtttcttggtgtccccagcttgaggtcttatctcacaaagccacaggctgtttcttaactcactgtggatggaactcaacaacagaagcaattgttactggcgttccactgttagcgatgcctcagtggacagaccaaccaactacagcgaagtacattgaaagtgcatggggaaatggtgtacgcgtacatcgggacaaggaaggcatggtgagaaaagaagaggtggagagatgcatcagagaggttctagagagtgagaggaaggcagagtacaggaaaaatgctaataggtggatgaagaaagctaaggaagccatgaagaaaggagggagctcgaataagaatattgctgagtttgcctcgaagtacgcttcatattgacatggaatagttttcatccagctaccaaggtattttatttagatctctggttatgattacaataatggagggagaaagtttagttctcctatggaatagttttcatccagctaccaaggtattttatttagatctctggttatgattacaataatggagggagaaagtttagttctcctatgttattacaataatggagggagaaagtttagttctcctattatagtttgctcaacgatatttggacaagaaaacc

SEQ ID NO: 27801 - DNA, 1157 bp, Oryza sativa
  ref <308>: DATABASE ACCESSION NUMBER: AK103243
  ref <309>: DATABASE ENTRY DATE: 2002-08-28
ggcttgtgtgctgacgatggtgttaatgttttaggtgttcaacaccaaattggtacaagtatggacagtcaaagtaatttgccagttgcttctgctactttttatagtcattcaagagatcaagacgaaacggttgcagatgatataaattcttatgaatgtcaacaatgcaatttaacttttcatggtcagagtgcctatgcgcatcacctgatcacttttcacaaagtgagttctaagaggcgtaagagtaacaaggttagcaaatttggtgagccagtgataggcaaagatgggaaatttgaatgcccagtatgtaacaagacgtttgaggaacagtcacggtactttggtcacattggatcccatgcaaagtatcaggggctgactcctgaagcattcctacaaaccttttcaggaaaggttggtaacaattcttttgcaggtttgtcatctagccttcaagtattggtcggatcaccacaactgaatgagaagactactgcttgtgaagcacgatcgcagcatcacgattgttcaactaaacatggaggcaatagtacaagaggtatagacctttttaactcaaatcatcctgctaacttcaatgggcataatcaatcttggtgtagatctgatgaaattcctcccaccacagaagctcaaagcacatggacttatagaaataatgagatgaactgtgctgatagaactgttccgagaacagtacctcagcccaatgatcacgaggattgcagggttagtggctttgctgaagcaactaattttaatgatcaagcaggaagacaccaaggttttagacctttctcctttggaactaccaaccattgtcaaggccagataattgatcatgcagtagctgcttccaagcatgctgaggttaataatagtatgaaatcaagagatgtcaacctcaattcacgcctgaacacaatatcctttcctattgcaactgcaaacaatgaaacatcgactgcccttaatgacgtgaatcggtcatgcattactggaaaaggttttagtggaagtttcagtaacaatgatggtgctgcatctatcgtgttgcccagttctggattaaacaataaaatttctagctccctcggtgtagctgacagatcatctattgctgccag

SEQ ID NO: 27802 - DNA, 2520 bp, Oryza sativa
  ref <308>: DATABASE ACCESSION NUMBER: AK103244
  ref <309>: DATABASE ENTRY DATE: 2002-08-28
gtgcgggtgatcggagctgagcatttcacgagcagcggatgaagctgccggcgtggctcaccgccgtgccgccggatcctagggcgtacggtcacctcatccagctctgcgcggaatccggccacctcgccgctgcccggcagatccacgcgcgcctcgtcgccgcctccgtgacgccctccaacttcctcgcctccaagctcatctccctctactcccgcgccgaccgcctgcgcgacgcccgcagggtgttcgactctatcccgcagcccagcctcttcgcctggaacgccatcctcatctcgctctccctccactcgccggacccttccgcggccgtccgcctgttcgcctcctccgccgtctcccccgacgagatcaccctctccacgctcctcaggtccctcgccgcgtccggcccggcgctctccccactcgtcaccggggagctccacgccgtcgcgttcctgcggggcttcgggtcagacctgttcgtgtccaatgcgctcatcaccgcatatgcgaacgccggggacatgcgctccgctcgcgctgtgttcgatgaaatgccgagaagggacgtcgtgtcctggaactcgcttatatccgcgtgtgcccgtgcaggctggtatagagagtgcttggatctgttccaggagttcgtgcgggttcgttgcagtgatggtgatggtgttgggccgaacggtgtcacggtgacaagtgttctgcatgcttgcgcgcagctcaaggttgttgatttcgggattggtgttcaccgatttgctgcggagagtgggctggacatggacatggcagtatggaactcaataattgggttttatgccaaatgtgggaggttacaatatgcacgacagttgttggatggaatgactaggaaggattcaatcagttacagtgcaatgatcacagggtacatgaataacgggcatgttgaagagggaatgcagcttttccggcaagcaagtgctcggggcatcagcatgtggaattcagtgattgcgggcttagttcaaaatgggcgccagtcagatgttcttcggttgttgcaagaaatgattgcctctaaagtactacccaattcagccacactttcaatcgtcatgccttcagttccttctttctcaacactactgggagcaaagcaagctcatggttatgcgatcagaaatgactatgatcagagcatcagattggtcagtgcattgattgatgcgtatgcaaaggctggatttcttgatacagccaggaaggtgtttaaactgactgaacatagaagcacaattgtttggacatcaatcatatcggctgtcgcagctcatggagaagcagttgaagcattgagcctgttcaatcagatgattactgctggtgcgaagccagacactgtaactttcaccactgtgcttagtgcgtgtgcccattctggcaaggtagctgaagctcgtaaggtttttaactcaatgcaggctgtttttggtatctctccagtgattgagcagtatgcttgcatggtttctgcactcagtcgtgcagggatgctcaaggaagcagttaagctcgtcaacaagatgccttttgagccaaatgcaaaggtctggggtgcattgcttaatggagcagcagtagttggtgacgttgagttcgggcgttatgcatttgatcgcttgtttgtcattgaacctaagaatacgggtaattacattgttatggctaatttatactcaaatgctggcaaatgggaagaagctgaaaccataaggagcatgctgtggggagttggattggagaaggttcctgggtgtacttggaattgagggagaacaatcgcttgcaagttttattcctgtgtttgccttaaagccgaaagctacacacattgatttggttgttgaggggttaaatgggttgaatgatagaaaagatcttgacatcaacctaagagttggatgaagacaagttatgtcgatagcattcaatagagctaaaagttgaaatgtgattatcatgcctgaaagcacatcggcattttggaattatttggaccatcggattccatacgccattatgtggtcaattatattgatctgaccaattatcaaaccctaggatgacaaaggaaaatgagaactggaaacaataagagctttgctaccacaatcttcaaacctttcgaagtgtatgatcttgagctctaatttttaataaggccaacagttactacagcaacaggaaagtcaatgattacaaaaatgatgaaagcagttgcattctgatttgaattttcaggaagtgcctccacaagttaaatctcagtgtttgatgaaacaccaaaagagcagcatacaaaagttagttcagttcatcaaaagtagttgttctagcttcagtgtttttatctcatgaaaatcactactggatcatttctttagcccaccatgcttttttgcattttgaaactggaatctgtggttaatgggattgaacctgtgattttttttc

SEQ ID NO: 27803 - DNA, 1258 bp, Oryza sativa
  misc_feature (576)..(576): "n"=any one base of a, t, c, or g
  misc_feature (611)..(611): "n"=any one base of a, t, c, or g
  misc_feature (635)..(635): "n"=any one base of a, t, c, or g
  misc_feature (644)..(644): "n"=any one base of a, t, c, or g
  misc_feature (653)..(653): "n"=any one base of a, t, c, or g
  misc_feature (656)..(656): "n"=any one base of a, t, c, or g
  misc_feature (662)..(662): "n"=any one base of a, t, c, or g
  misc_feature (671)..(671): "n"=any one base of a, t, c, or g
  misc_feature (674)..(674): "n"=any one base of a, t, c, or g
  ref <308>: DATABASE ACCESSION NUMBER: AK103245
  ref <309>: DATABASE ENTRY DATE: 2002-08-28
gacacgtgtacacgacgcgacgccggcggcggcggcagccatggagcccgcggcgatggaccgcatcgccggccgcctcgccggcggagacggcctctactacccgaccaccttcctcctcgccgacccgccgccgtccgccccggaccgcaaggccgccctcctcgcgctcctctcccgcgacgccccgctcttcctcgagcgctacggcgggtcgctgtcccgcgacgagctcgccgccttcgacgcgctcgccggcgactacgaggtcggctggcacctccgccgcctccgcgcggcctccgaggggggcccctccgcgtcccgcgtccgcaaccgccgccgcgcctacctcgaccgcctggtgcgcgagggggagtacttctccgaggaggctatgcgggagcgggagccatacctgcaccacgagtaccttggcaggttccaggatcccacgggacgggccatggcgaggccgggggagcggtggtccgagacgctgatgcggcgggctgaggaggccgtgatcgttgagaagattcgaggggagcagattaggagaggggttgatcccancgagtgggtaggtggtggcgctgaggaggccatgnaggagcaggaagaggaggaagaanaaaaaaagnaggaggagnagnaggagnaagagagcnagnaggagcaaggcatggacatggaggagaaaggaagaggtgccgataattcttccgagaatccgagtgtgactgaggtggttgactccaacaaaactgcaggggcttccaagcaaacattatctgctgaagatatggaggatcaacttgaacagtttaccagcttgatgcaacagaagttcctgtccggtgaagactctgagcatatggactactctcggatcgataacgacgagatgctggatgaccattggtcaaaagaagccaactatgatgcggaggagaagtatttcgaagaggattagttcaaagttcaaactaggctgctgttatagcatcagttatgtagtgcatcatcgcatctcgttttttttttgttcatgttcagcacttacttagtctatcatgtacatatatctatatatgcagttgttgcccctctaatccgaataagttgagtaacttgcttatgaaaaaaaccgtatgtgttggaacatcaatcagaaaatagggtcctgtcttgtggagatgtttacaaattgcaaaatatttttatgcactacctccaggatgatggtgcatgcagg

SEQ ID NO: 27804 - DNA, 686 bp, Oryza sativa
  ref <308>: DATABASE ACCESSION NUMBER: AK103246
  ref <309>: DATABASE ENTRY DATE: 2002-08-28
gaactgatctctctcctttcgcgagctccgaccaccgagacctcctcgccgccgtcggccgcgatgcagcagcggcgccccgcctccggccggccatccgggacggacggctccgacttctcctaccgcatggtcgtcgactcacggtaccagagagttgcagatggcaaatcccgcctcggccgcctcatcctcgtgcaggctctgcaccaagtggccgggggtgcgctgctgttgctcgcgctgtcgaagggcgcggagatgaacaagttcgccgtgatgtccgtggctgctggactgttggccattgtgctgggagaaataggacgtaggcggacaatggctgtgctgctccggatgtacacaagcttgtcatcaattgctgttgcattctctgtggcgtgcattattcggtcagagttgttcttcaagatcacgaagcaaaatacagagtccataacaagccatgaactattggaggtggttcgtgttgctcttggtgtcctgcttcaattggtggttatagctacaacaactcgacttctgcaaaatatgtctcctcccaggagagcttcatgaaaatgttgtgacatggcacttgtgctttaccattagaaacaactactcatttttgtacttgtagattgcaacttgcaagagacttgtaatgaagcggcaattggttc

SEQ ID NO: 27805 - DNA, 2307 bp, Oryza sativa
  ref <308>: DATABASE ACCESSION NUMBER: AK103247
  ref <309>: DATABASE ENTRY DATE: 2002-08-28
gacgtcgcgtcgccagtagactccactggggacggtgtgggtggtggtggtagtagtagttctcgcccccctcaggtcgcaatccgctccaattccccaccaccaccatcaccaccgccgcgagggagaaaaagctcttgcctgctcttttcttggctccgctttgttcttgctctcatcttgctcgtggcgtggtagtcttcgactcgttctttttgttgttgttgttgttgtggtggtggtggtggtggtagtgcgtgagtgagtgagtgagtggtggcgatgtcgtcgccgtcgtcgccgccgccggctaaccagacggcgacaccgcctccggctaaccagacggcggcgccacctccggcgagcaacaactcgtcgtcgccgccggcgccgggctctttgtctccgccctcgctgacgcctcccgcagcgccatcgcctccgtcgaccacgccctcctcgccggcggcggcggcggcggcgtcgagctcggggctgacgacgcccgtggtggtggggatcgtggtgggcggcctcgtcgtgctgctgctcgtcaccatcctgctcgtctgcctgttcaagaagaagaagcggcaccaccaccaccaccctccgccgccgccgccgccgcacctcctgcactactacggccacccgccgccgccgccgccgcccccgccgccgttcaaaggggatcactatggtggggtgtaccaaaattggcagcaaaatggtcctccacctccacctgatcatgtgctgaagaaggtgccttcgcatccttcccctccaccacctcctgctccactaaatgtacacagtggtggttctggctcaaattactccggtggcgacaacagccaacctctagtgtcacctggtgctgcattgggtttttcaaggtgtactttcacttatgaggacttgtcagcggcgaccgatggattctccgatgctaatctgctcggacagggcggttttgggtatgttcacaaaggagttctgccgaatgggacagaggttgctgtgaagcaattgagagatgggagtgggcagggagagcgtgaatttcaggcggaggttgagattatcagccgggtacatcacaagcatcttgtaacattggttggttattgcatttctggagggaagaggttgcttgtctatgagtatgttccaaacaacacattggagctccacttgcatgggagaggccgaccaaccatggaatggcctacaagattacgcattgctttgggtgctgcgaagggattggcatatcttcatgaagattgccatcctaagatcattcaccgtgacataaagtcagcaaatattcttcttgacgcgagatttgaggcaaaggtggcagatttcggacttgcaaaattgacttctgataataacactcatgtttcaaccagagtaatgggcacatttgggtaccttgcaccagagtatgcgtcttctggccagctaactgagaaatcagatgtcttttctttcggagtaatgcttcttgagctaataactggccgccgtcctgtgagatcgaaccaatcacagatggatgacagcttggttgattgggcaaggcctttaatgatgcgagcatcagatgatggcaattatgatgctttagtggatccacggctaggacaggagtacaatggtaacgagatggcgaggatgattgcttgtgcagctgcttgtgtacgccattctgcacgccgacgcccacggatgagccaggttgttcgggccttggaaggcgatgtgtcattggatgatctgaacgaaggtgttcgtcctggccatagccgattcttgggatcatacaacagcaacgagtacgacacgggccattacaatgaagacctgaagaaattcaggaagatggcatttggcagtggcaatctagagagcagccagcaaacgcagcccaccgagttcgtcccgaatcgatccgtatcaatgggggatgcgcgtcaaataccggagacggagatggagatggggagtttgaagaaagatggcgacagcaatggcaccagagacagccaagcttcatgagataacctcatcttccttgtttttttaggacattgcaactaccgtagcttgtaaagtcccagccttagctgaaaattctcataagttgctgacattgtttgcaacgaaccgaaattgtttggttgagatatatatagttcgagagttctcggtagctgcaattcactgcttcttttcactgaatttttcctgtgcacctttctgatctgcattacgtttttttcgcttgcc

SEQ ID NO: 27806 - DNA, 1876 bp, Oryza sativa
  ref <308>: DATABASE ACCESSION NUMBER: AK103248
  ref <309>: DATABASE ENTRY DATE: 2002-08-28
gaccggagcaagctggtgtctcacctcttggactccggcatggcggacaccgtcgccggagccgtcgattaccgtggccggccggcctcccgcgccgccaccggcggctggaagtcgtcggtgttcgtcatggccatggagatcgcggagaggttcgcgtacaagggcgtggcggcgaacctgatcacgtacctgaccgggccgctggggcagccgatggcgcgcgccgccgcgtccatcgacgcgtggaagggcgtctcccagatgctgccgctgccgctcgcctgcgtcgccgacgcctgactcggccgctaccgcgccatcgtcctcgcctccgtcatcttcgtcctgagcatgggcacgctgtcgatgtcgtcggcgttcccggtgtcgcgcgccggccacgtcgccgtcttctacgtggcgctgtacatggtggcgctgggcgagggcgcgcacaagccgtgcgcgcaggcgttcgcggcggaccagttcgacgagaaggacggcggggagtgcgccgcccggagctccttcttcaactggtggtacttcggcatgtgcgccggcaccgccgtcaccaccatggtgtccagctacgtgcaggacaacgtcggctggggcctcggcttcggcatcccctgcatcgtcatcgtcgtctccctcgccgcgttcctcctcggcacccgctcgtacaggttctacacagccaggacggccagccccgtcgcccgcgtcgccaaggcgttcttgacattgatcaagagctggagatcaaaccgtcgcaccaatccggcgagcggcggcaaaggagacggcgacggcgacgccggtgacctcgtggaggaggtgaagagcgtgctccggctgctgccgatatgggcgtcgtgcataatctacgcgataatcttctcccagacgtcgacgttcttcaccaagcaggcggcgacgctggaccggcggatcggccggagcttcaacgtgccgccggcggcgctgcagacgttcatcagcgtcagcatcgtcgtcttcatcccggtgtacgaccgcctcttcgtgccgctcgcccgccgctacacggggaggccgtcggggatcaccatgctgcagagggtgggcgccggcctcgccctctccctcgtcgccgtcgtcctgtccgcgctcgtggagacgcggcgcctccgcgtcgccgccggcgccggcatggcggacgcccccaaggcgcggctcccgatgagcctgtggtggatggtgccgcagtacgttctcgtcggcgtcgccgacgtgttcgccatgatcggcctgcaggagttcttctacgaccaggtccccgacgccgagcgcagcctcggcctcgcgctgttcctcagcatcttcggcgtcggccacctcctcagcagcctcctcatctcggtgatcgacggcgcgacggcgaggcgcgccggcggcagctggttcgccaacaacctcaaccgcgcccacctcgactacttctactggctcctcgccggcctctgtgccgtcgagctcgtcgccttcttcctcttctcgcgggtgtacacctacaagaagaagggcaacgatgctgatggcaattgtgattacaggggagttgatgatgatggcatctgcgtgtaaacctccgatttgtgctctgttgcttcattgctcgcgagtgtacacaaaaaaatctcgaattgttgtagtgcgttatcatatactctgatgatcaagtgatcagtaatcagagcaaagatggcgagctgatgagcatggtggaccgaggtgaacaaaattcatcggatgggcctgcgaacacattctcttcatgttgttgaacaatattccctccagtttcattttaattgacgttttg

SEQ ID NO: 27807 - DNA, 2136 bp, Oryza sativa
  ref <308>: DATABASE ACCESSION NUMBER: AK103249
  ref <309>: DATABASE ENTRY DATE: 2002-08-28
ggcttttctcccctcttcgcctctcctcgctgctgttatatccgctttcctctcctcctcctcctatcccccctctcctcctgctcctcggcctcctcccctagatgccagccgcggcctgaccctcaccgctggggagcccccctcccattcttcgcttcccccgcggttgcgctcccggagcggcgttccagcggccacagcagctttccctcattgtacacatgatgggttgcttcactgtcctgagatccaagaagaagaagcctcttgctctcaccaagaaatcggttgatgcaagggaaagcacgtcctcaagactcccagagccagaagcgcatgtgccatcgttacaatctgctcctcctagttttaggaacaaggctaaaatccaccaatcggaaaagaaagcttcttacagcagagcgcgcgtgctgtctgctccttccagcctaattgtggttgatcaggatggtcttccatatgccgaattcgatgatcaagatgactccaggggcaagggaggttctataaagggccaccgtttctctaatccactgccccttcctctcccatcaccagaaggaaaattattgaggaactttggcagcttcaaagccatcaatgcaagtggaccactcgatgcttcaggccctctgccacttcctccaaagaagtgtgatgggcttaagaatttctcctatgaggaactttcatcagcttgccaatggttttctggtgaccagtgtgtttccgaaagtttgacatcaacatcatacaaggcgtcctttagggatgattttaccgacccaaagaccattgaagcaatagtatctcggttgctctcctccactcagagtttgaaagagtttaaaacacaagtgaataccttggcatcacttcagcatcccaacttatgtaaactaatcggctttcacgcaagagaagaatctaatgaaaggatgttggtctatgagcgactccatcatggcagcttagataaactactctttggaagatcggatggtcgtttcatggactggtcagcacgtttgaaggttgctcttggtgctgctagaggcctggctttcctacatgatgaagggccttttcaggccatgtacaatgacttctcaacctcaaacatccaaattgacaaagatttcactgcaaagctatcaggatatggatgtgttggattcaataccgaggaggaaatatcaaatgcatctgtggctgctgcaaacctctcagtggaaaccttggagaaaggtgtactgactcccaagagcaacgtatggtgctttggagttgtcctgctggagctaataacaggaaggaagaaccttgatgtccgttcctcaaaagaagaacgcaatattgtcaagtggagtaggcctttcctcaccgatgatagtcgcctatcgttaatcatggactcccgtataaaaggacgcttccctaccaaggctgctcggattgtagcagatatcatattgagatgccttaataaagatccatcagagaggcctaccatgagggccgttgtggagtccctagcaagcgtccaggacataaaggttccatgtcgatatcctttgcaagagccatctgctgccccaagaaaggtgatgttaaaatctacaagtctcaatggcatcattcatcaccatcctgtcgtaaccttctcaccgtcacctccttcgcgaaaccaacatttgctctcgccaaggtcatccacgtctgcactgcttcctccaaggaccagctgtgctctggatggccctagagtaagctctatcaagaaatcgccttcccctattttacggagatctggtgttgagggtttttgattgtccatatttttttttctcttctcttcacttcgatttgtttgttgtttttgctagcctagtggttttagtgtaatctcatatattgcaagacaaatggccttatgaactcccttcagtagtactaagaagggaagggtgaactgtagatagaaccaggttgtagatacttttcgttttctaattggatggaagcagcgtgttgagtgcgccttgtaaactccattatgcaataataaacgtgtgtcactcagttcttttttggggagtcaaacatttcagc

SEQ ID NO: 27808 - DNA, 1112 bp, Oryza sativa
  ref <308>: DATABASE ACCESSION NUMBER: AK103250
  ref <309>: DATABASE ENTRY DATE: 2002-08-28
ggaggactacacgacccaggcgttcatggtgtcggacaaggcggaggacgcgagcctcgccgtggtggcgttctgcggcacgaagccgttcgacacggagcagtggtgcgccgacgtggacttctcgtggtacgagatccccggcgtcggcaaggtccacggcggcttcatgaaggcgctgggcctgcagaggaacggcggctggccggagcaacccaccggcgccggagacgacggcggcagcgacaagaagccgttcgcctactacgtcatccgcgagcggctcagggcgttcctggcggagaacccgcgcgcccggttcgtggtcgccgggcacagcctcggcggcgcgctcgccatcctcttcccgaccgtgctggcgctgcacggcgaggaggacatgctggcgaggctccacggcgtgtacacgttcgggcagccgcgcgtcggcgacgaggggctctgccggttcatggacgggcacctggcgacgccggtgagccggtacttcaggttcgtgtactgcaacgacatcgtgcccagggtgccctacgacgacacggcccttctgttcaagcactttgggacgtgcctctacttcgacagcttctacaaaggccatgtgacggaggaggagccgaacaagaactacttctcgctgctgacggtggtgcccaagtacgcgaacgcggcgtgggagctcgcccggagcttcgtcatcggctatgtcgacgggccggagtacggtgagggttggctgatgaggatcgccagggccgccgggctgctgctgccgggcctgccgccgcacgcgccgcaggactacgtgaacgccaccaggctcggcgccgcctcgctcgagccgctccgataggtagctcgtcggcgtcggcgccaacacatttagtagtaaactagtaacaggcttgtgattcatgattcatgaagtggaatgcaacatacacagtgtaaattcatgccttaaacacaataatatgattcataaagtggaatgcagcattcattttcagaattcttgaacaagacagtgtagattcgatgtaaattcatggcttaaacacaataatatgatgaaaatcggtccggttggc

SEQ ID NO: 27809 - DNA, 1653 bp, Oryza sativa
  ref <308>: DATABASE ACCESSION NUMBER: AK103251
  ref <309>: DATABASE ENTRY DATE: 2002-08-28
gtctgcagcagcagcaacagcagtagcttcacaagggaggagaggaaggattaagacgacgagcacttgttggaggaggagagcagctgtcccggtgaacatggcagccgccaccaggtgaattcttactgagttctgacaagatggatcatggattctccattttcgctgttcctttttgttcttttttatactccgaaataggagagcatcctactgtaattttcttgggagttgggagggagatgatcgattgattatattgctggttcagctgctcgtgctgttcaattgatcaatcgttcttcagtttgcatatgttcagagttcatgctgttctaacaaaccagaaacgccgaaacatactgtgatactgatgataaattgataactgatcctctatgtgtctctctgtctgaattaagcagcagtgcgctgtcaaagcttgctccactggaggcgatcttgtttgacatcgatggcaccctctgcgactctgatcctatccatttctgcgccttccgcgaactgctgcagcaggttggtttcaacaatggcgtgcccatctccgaggagttctacagcgccaatatcagcggggggcacaacgatgacctcgcaagggccttgttcccggatttggatcatgacaaggcaatgaagttcatggacgacaaggaagcattgtacagaaggtatataaattcttatcttcttccatactatagcatgatatggtagatgaactaattgcagattttagtttttctgcagaaattcagctgtaaacctaaacacaatgctaatgccaacgcactgacaactctgaattttcctaacataacatagtcattcggtttcagaactagcaggcaggttggttcatcctgataaccttaagccgaaaactatgcaggttggctccagaacagttggtggcagtagaaggcctgcatgatctgtgcagatggataaaagatcacaagctgaaacgcgccgccgtaacaaatgctccaaggtcaaatgcagagctcatgctgtcactccttgggctcactgaattcttcccggtgctcgtaatcgggagcgagtgtgaccgagccaagccattccctgatccttacctcaaggctcttgagcttattggtgcatcacctgatcacacattcatttttgaggactccgcgtcagggattcgagccggtgtagctgcaaatgttcctgtagttggtctgacaactaggaatccagagaaagttctgcaagatgcaggagcaagcttgctgataaaagatttccaggacccaaagctactgtccatacttgaagagatagaacctacggttgccgccgtcgagcaagtctgatttttgcagatggagcaatggaattctggagtactagatggagcattttttgcagatggaacatgaatactggaataattatacatctgtctatcctaacaaaataaagctgatttctagatggggccggggtcagcacacgtcttaggacttttgagtttgtcaattgaccatcatctgtgcatgtgacttgctgtaaaaactcctgtaaaaaactcccagtatgcatattgccgaaaataactgtaatgtatgtttacatggtttgatagaactaaacagctgc

SEQ ID NO: 27810 - DNA, 2728 bp, Oryza sativa
  ref <308>: DATABASE ACCESSION NUMBER: AK103252
  ref <309>: DATABASE ENTRY DATE: 2002-08-28
tactttcactaaaccccatccccttcctctcgcccatgctcctccggtgagcagcggcggcggcgacggcgaggtctagactctggagacgtgtggctgtcgaaatgaatcaactgagtgcctccgcaatgctctcccgcgcagcctctctccgccgcgccgcggcggcggccttctccaccgccgcggcgaggccggagaccgggctgtacggcttcgatgtgctgcgcacggccaagggcttccgccgcttcgtcgacgacgccatcgagaggtcggacgagctcgtggcctacatcgggcagctgccgccgcccgcggagattgtccgcgccatggatgagatatcgaacactgtctgctcagttattgattcggcagagctgtgcaggaatacgcacccagataaggaatttatggatgaggcagataaggcatcaatgaggatttatgaacatcttcaatatctgaataccaatactactttgtacaatgcaatacttaaagctgagagcgaaggtgtcatgctcacagaggaagctcgaagggcagccaccaccttgcgtgttgactttgagaaagggggaattcatcttcctaaagataaactcgaacatgttaatcatctgaaccttgagattgcccagctgggtcgaaagttcagtgaaaatgttatgaacaaaccaggttttgtggatatatatccagcttcgcgcattccaagaaatatgcaacgccattttaaatccattcaccgtattaaaccttggggcgatgaggaacaaagaaatcaaatggacactacaaagcaaaagggtctaaggatagtcactgattcaggaactctatcaacagcactgagatgggtctcagatgaggaaatcaggaaacaggtatacctggtaggaaactctgaacctcgtgaaaacattacagttcttggcaagcttataaatgcacgtgacgagcttgcgaagactatgggatgcaaatcatatggtgattttgctattcgtcctaacatggctgcatctgtagatgtcgtgatgtcatttctcaaagatttgagtggcgtggttaggcataaagctggtgaggaatttaaacgtatacaggacttcaagagaaatgtatgcaatgaaaagagtgctaaacttgaaccctgggatgaggattacttcattggaatgatgaaatcagctgtacataacctggatgtctcagtggttgcagcatactttccattgtcccagtgcctaaagggcttaaacgtgctggtggaatcattatttggtgccacatttcatcaaattcctatgggggacggcgagtcatggcatccagatgtgatgaagttgtctctccatcatcctgatgagggcaatttaggatttatgtatcttgatctgtactccagaaagggtaaatatccagggtgtgctcactttgctatcagaggggggcgacgattgcaagactcaaattaccagcttccaatcgttgctctagtttgcaatttttcaagttcgagcaaaataatggcaaggcttaaccattgggatgttgaaactctgtttcatgagtttggccatgcccttcattctctactctcaagaacggagtatcaacatttctctggtactagagttgctcttgatgtggctgaaatgccatcaaacctctttgagttttatgcatgggattatcgtgtcttgaggaaatttgctgtagatgaaacaactggtgatccaataccagaaaagttggtaaaggcacttaatgcttctcggaacatgtttccagcaacggagctgcagcgtcagattttctattctataatggacttgactttgtttggggagcaaggatccaagccaatggacacaatttctactgtagctgatttgaggagaaagcatacaagttggaaatgtgtagaaggcacacactggcatactagatttactcatctgataaattatggcgctggctactatagttatctttatgctagatgttttgccacaactatatggcaagaagtatgccaaggtgatccattatcccgcagcacgggtagtgcacttagggacaaatttttgaagcatggtggagctaaggatccttctgccctgttaaaggatttcgtaggtgattccattattataaactctggaggaggaataatccctgacattagctccttgtgtaaagaagtcggtttgtgaaataccattgggagtggagattgggatcattatttttgacattgagatgggttaaagggtcaaagactcatgatatcatgagtcaggagcttgatctgccacagggctgcaggatctagttgaaggtcaagctgaaaaaaataatagtagattcttgacaaagaactgatgaattggttctcaatacaggattgcaggttagattagttgggtggatcctgtttgaccattgctgaatcttcgattttaacttgctgctgctgctgctgcaagggtggtttagttccctgtcagatgatttttcgcatttactccgattgttcggaactgttgttccaaagctacaaagtggctgtgcctgtaatattgacccaggttaatcttcatagcccatcacatgtaatagttctctaaagtgattataagagtgagagatgtgcccatatgatcttttttgcattcttagttggtctcatggatagaaagcatgtttgaggacc

SEQ ID NO: 27811 - DNA, 1801 bp, Oryza sativa
  ref <308>: DATABASE ACCESSION NUMBER: AK103253
  ref <309>: DATABASE ENTRY DATE: 2002-08-28
gacagcccgcgcccgccttctcccctatctatcattctatcccgcccgcttccttctcccccgcggccggactgcaactgtaacccaattcctcctccctcctcgatcaccatggagggagttggcggcggcggcggcggtgaggagtggctgcggccgatggacgcggagcagctgcgggagtgcgggcaccggatggtggatttcgtcgccgactactacaaatccatcgaggccttccccgtcctcagccaagtccagccaggatatctgaaggaagttcttccagattcagccccaagacaacctgatactttggattccctttttgatgatattcaacaaaaaataataccaggagtaacgcactggcaaagtccaaattattttgcttactatccttcaaatagcagcactgctggattcctgggggagatgcttagtgctgcctttaacattgttggcttcagttggataacctctcctgctgctactgagctagaggttatagtcttagactggtttgcaaaaatgctccagcttccaagccagtttctgtcaactgctcttggtggaggagtaatacaaggtactgccagtgaagctgttcttgttgcactattggctgcacgagatagagctttaaagaagcatgggaagcattcccttgaaaagttagtagtttatgcatctgaccagacacattctgctctacaaaaggcatgccagattgcaggaattttctcagagaatgttagggttgtaattgctgattgtaataagaactacgccgttgcccctgaggcagttagtgaggcgctttccatagacctgtcatctggtttgataccatttttcatctgtgcaacagtaggtacaacatcatcgtcagctgtggaccccctgcctgaactaggacagatagcaaagtccaatgacatgtggttccatattgatgccgcatatgctggaagtgcttgtatatgcccagagtaccgacaccacctcaatggagtggaagaagctgattcgtttaatatgaatgcccacaaatggttcctcactaacttcgattgttccttgctatgggttaaggacaggagttttctcatacaatcattgtctacgaatccagagtttctcaaaaacaaggcttcccaagctaattcagttgttgatttcaaagattggcaaattccacttggacgacgctttagatcacttaagctatggatggtcttgagactttatggtgtggacaacctacaaagctatatccggaaacacatacatttggctgaacattttgagcaacttttattatctgattcaagatttgaggtagtgactccaaggactttttcacttgtttgtttccgacttgtgcctcccacttctgaccatgaaaatggacgtaaattgaattacgatatgatggatggtgtaaattcaagtggaaagatcttcctatctcacacggttctttcaggtaagttcgtcttgagatttgcagtaggagcgccacttacagaggagcgacacgtggatgccgcttggaagcttctacgagatgaggccaccaaggtcttggggaaaatggtgtagataagtgaataccgctcactgattcagctcattgtttgcccttcgagtattgaaggtgccaaagttcatacaaaaagtttctgttaaggacaatacacgatagcataatttattcagttgtgaaacagaaatactgaatactttctatgattcttttagtgggttaggtcgtttgatcgacctgcaatttttttcg

SEQ ID NO: 27812 - DNA, 1946 bp, Oryza sativa
  ref <308>: DATABASE ACCESSION NUMBER: AK103254
  ref <309>: DATABASE ENTRY DATE: 2002-08-28
gtccgtctcctatcgccggcgccgcatcgaccgaaaccaaccgatcctgctagcctccacgcatgggcttagaggacgacgagggcggccgccacggccgcaggcgcgtgcgcgaccgcctcggcccgacctcgcctgcctcttcgtccgccggcgaggtctgcatccactggcgtgccgggcaatgcatgcagccggttcccctgccgctacctccacagcgaactccccgaggcgcctcccgagcgactgcgaccaagccatagacccagcgcggccgcttgcggcggcggcggcggcggcaactgcgtggtgtccagtacccgcgagaagccctgcaagttcttcctctccggtgattgcaggtacggcgacgaatgccgctgctacctccacgccggctccatcaacgacgggttctcgctgctcaccccgctccgcggacaccagaaggaacgcatttgctgttctctagcagcaaggacggaacggtgcgcgtctcggattatcaaacggagcagtgtgcaggagccattgctatttgttggaattcctgatgctgtgaagatctgggatacaggagctgagatgagcctaagtgagccaactggcgagtacatgcactggcggttggcaatgggatgctcttcgctgcaatgcaactatacaagatggagatattttagcgtggagatattgtgcagaaaaagactcttttgagcttgcttcttctcttgtggggcatcaccgcatcagggtcctgttgtttcattagctataggaacaatgatgctttactctggttcaatggatcacactattagagaaaaaaaaatccttgtaaccctatgccctatttatttgtattcatttttagataatatgcgtggtacttctattaacatttagatgatggttagtataaaaatgcaatgtccaattctaaatttctgttgggtatttgctctcactgttttgttggcaatgaaaacatgacaggcctgggacttggcaaaattgcaatggactcaccctttctggtcatacaggagctataatgcccttgctctgctgggatcaatttctattatcttgttctctggatcaaacaatcaaggtctgggctgctatggaaagttggaaactggaagcctggcagtaacatatacacataacgaagatcatggtgcacttgctcttgctggtatgcaagatgcacaattaaaccctattctgctatggtcaacgaattacaacatagtccacctctatgagctcccatcgtttgctgagagaggtaaaatatcctttgaagcggaagttggagcagtgaaaaatggtcctggtggattaatatttactagcgatgaaattgtcaaactaaagttgtggaaatggacagctgaacgaacttctggagtctcaaactgatgggcttgtgtatttagaatggaggaacaggtcagaaaagccgttttcctgaacagagagacctttggcagccaatttgctctggcaatctctcgcattccttattcagtagttgaagaatatacaagcacaggcttggaagaattgtttgctgatgttggaacttggaaggaacagaattagatttccacggcaattctgtacaattcctcatcactggaaataagatagatggaacaagttacggtcgtattctttagtcagggtccccttggaaggtttgttcggtaagaatgtaagcctggtttagctggaggaaaaacaagcttttttttagaggaaaaacaagcatttgaaccaacaacaaatgtatgattatcaagccatgaccttgcggccaattcaaggtctgttgcaaccgatcatactttttcgttgtgcactcctatctatcgattcatataatgagcaaacaatgaactgtcatcctcacatgtttcaacgcagaaatgatg

SEQ ID NO: 27813 - DNA, 2813 bp, Oryza sativa
  ref <308>: DATABASE ACCESSION NUMBER: AK103255
  ref <309>: DATABASE ENTRY DATE: 2002-08-28
gggtcatgtggtggtggagaggctaaaaaaccagagataaaatgagagcaacgccatgtgcttcaccctcttccttcttctatctcgctcgccttcccttcgctgaagcatccgtccatctgttcgctttgtcctcttgcaatcattcactctccttgctcgattctataaacacgcagtgaggctccgatccgccatcggctcaccgccattgctgaggaacacagctttctcttttttttcccacgatgtggcgccatggcgagagatgtgtgatccttgctgtcgccgccgtggctcttgtcgcggcggcgacggcaacggcggcggcggccgttgggggtgagaggaggacgtacatcgtgcacatgtcgcggtcggcgaagccgaacgatttcgtggagcacggcgagtggtacgcggcgtcgctgcagtcggtgtccgacgcggccaccgtgctgtacacctacgacaccatcgtccatggctactcggcgcggctgacgcgcgcggaggccgaggcgctggagtcgcagcccggggtgctcctcgtcaacccggaggtgcggtacgagctgcacacgacgcggacgccggagttcctggggctggaccgcacggacgcgctgttcccgcagtcgaacaccggcagcgacgtcatcgtcggggtgctcgataccggcgtgtggccggagaggccgagctacgacgacgccgggctcggccccgtgccggcgggatggaaggggaagtgcgaggaaggcaacgacttcaacgcctccgcctgcaacaagaagctcatcggcgcgaggttcttcttgaccgggtacgaggcggcgaagggccccgtcgacacgtccaaggagtcgcggtcgccgagggacaacgacgggcacggcacgcacacctccagcacggcggcgggatccgccgtgcgcggcgccgacctgctcgggtacgccgccgggacggccaagggcatggcgccgcacgcgcgcgtcgcgacgtacaaggtttgctgggtcggcgggtgcttcagctccgacatcctcaaggccatggaggtggcggtgaacgacggcgtggacgtgctctcgctctcgctcggcggcggcaccgcggactactaccgcgacagcatcgctgtgggcgcttacagcgccatggaaagggggatcttcgtgtcctgctcggcggggaacgccgggccaggctcggccacgctgtcgaacggcgcgccatggatcaccaccgtcggggccgggacactcgaccgcgacttccccgcccacgtcgtcctcggcaacggcaagaactactccggcgtctccctttacagcggcaaacagctgcccaccacgccggtcccattcatctatgccgggaacgcgtcgaacagcagcatgggcgcgctctgcatgtccggcagcctaatcccggagaaggtcgccggcaagatcgtcctctgcgaccgtggcaccaatgccagggtccagaagggcttcgtcgtcaaggacgccggtggcgccggcatggtgctcgcgaacaccgccgcgaacggcgaggagctcgtcgctgacgcgcacgtcctcccgggcgccggtgtcgggcagaaggccggcgacaccatgagagcgtacgcattgtccgatccgaacccgacggcctccatagtgttcgccggaacacaggttggcatccagccatctcccgtcgtggccgcgttctcgtccagggggccgaacaccgtgacgcccggcatcctcaagccggacctgatcgcgcccggcgtcaacatcctcgcggcgtggtccggatccgtcggcccctcggggctcgccggcgacagccgccgcgtcggattcaacatcatctccgggacgtccatgtcgtgcccgcacgtgagcgggctggcggcgttgctccgcgcggcgcaccaggactggagcccggcggcgatccgctcggcgctgatgaccacgtcgtacaacggctaccccaacggcaacggcatcctcgacgtggccaccggcctcccggcgacgccgctcgacgtcggcgccggccacgtcgaccccagcaaggcggtggatccgggcctcgtctacgacatcgccgccgccgactacgtcgacttcctctgcgccatcagctacgggccgatgcagatcgccgcgctcaccaagcacacgacggacgcctgcagcggcaaccgcacgtacgcggtgaccgcgctcaactacccgtcgttctcggtcacgttcccggcgaccggcggcacggagaagcacacccgcacggtgaccaacgtcggccagcccggaacatacaaggtgacagccagcgccgccgcaggcagcacgccggtcacggtgtccgtcgagccgtcgacgctgacgttcaccaagtccggcgagaagcagagctacacggtgagcttcgcggcggccgcgatgccgtccggcacgaacgggttcggccgcctcgtctggtccagcgaccaccacgtcgtctccagcccgatcgccgtgacatggacctgaccgtcgtcgcgctcatagctagatcttctggatgatccatcaatggcgggcgcaagagattatccgggataattagcgtgtaatctgccgattagtgtggcgaagtatcgtttcaatttcttagctccagccttgtttagttgttcgaactgtggcatagcgaggaagtgagtgagtgagtgagagtgatccgagttagctccactcctaacaggagtccaaaaaaattaaaggataatgaatggaccagcaaagcaagtggttgctcgt

SEQ ID NO: 27814 - DNA, 2662 bp, Oryza sativa
  ref <308>: DATABASE ACCESSION NUMBER: AK103256
  ref <309>: DATABASE ENTRY DATE: 2002-08-28
gttgcgtgagacgttctgctctctgagctgatatacttccgttcgctacgatgctctgctgggctctgatggtttcctgaactgctctatgttgtgtttgtttgtgtttcttctcgcgtgcagtccaaggcggaatcgccggcgagcgcggcctcctccaagtctgacgggtaaagaattcagcacccctctaattttataattgtgtagtacagaatccatacggtaaccaagcgttcaattatttcttctgttcataagaccgatcgattcagctcaatctgggtttgatttggctggattgtgttggtcttagtctattgtgtgttggggctatactccagttttggagcttggatctgtttaggggttgggctcttgttattctgctcgttaggtgatgcaattttgcagccttccgttcgttgaaagttgatacagggggctagttgaatgttactaagcttgtatgaagaattgaagttagagaacttatgactagaaacagttcatgaagaaattgtttgaagcatccgagaaactaggagtattttatagcggtctttagatttatgaggtctattaccagtagtaggatagatatggcccattattattattatataagaaaagatgaaaggtctagattgattttactaccagtagagacctctgtaaagtgaatttcaatcaacaaagtagaacattcaactgacttgcccatcagctttcagctatggcttctgctgctggctggcattcacaatttaacatatattttcttggatatgagtagggaatgactttggaagcatcaatttaggccttgattgaaacactgatgggacttgcatactgccttatactcctacctgcactgtagacatgtccaatgtttggtgtattgcaaaaaagaaattaggaatttagtttttttcccctttggctattactaatctatataatggacatagggctggaaagcacagaatttataacgtctagccattcaaatttgacattgagctcagtggaatatgctcctcaccgggtgacacaaactgttctgttactccctccagtcatttagttctcccaacgtcagacacattaaagtagagagattagtttccaacccaattggccacttaccatgctattatataggctgcatatactcataaaaaattgcttcaggctgtcaagcttagttggtttacatttactttgtaatgttgactgtaggattatcggtacctgtaacgaatcggttaacactggtattcagaattcagtatttgccctggttcattacaatgcttatatgtgttgtgcacttgtgctagtttaggtgttacatttctgattttttttatcttatccaaataaataacatttcagtgcatagaatatgtaatctaaggcaaattcctaattctgtaacttttattcagtcatgaggtcttactgtttgaggctcttcgcgaggccttgatagaagagatgaaagaagatccaacggtatgtgtctttggtgaagatgtcggtcactatggaggttcttacaaggtgaccaaaggtctggctgagatgtttggagacctacgagtccttgatacccctattgctgagaactcattcaccggcatgggagttggagcagcgatgaaggggttgaggcctgttgttgaaggaatgaacatgggtttccttctccttgcttacaaccaaatctcaaacaactgcggaatgcttcactacacctctggtggccagttcaaaatcccaatcgtgatccgaggtcctggtggagttggtcgccagcttggtgctgagcactcccagcgtctggagtcttactttcagtcgatccccggcctccagatggttgcttgctctaccccttacaacgccaagggtctgatgaaagccgccataaggagcgagaaccccgtggtgctattcgagcacgtccttctgtacaacctgaaggagaaaattcccgacgaggaatatgttctatgcctggaggaggctgagatggtgcgtcccggagaacatgttaccatcctcacatactcgcggatgaggtaccatgtgatgcaggctgcgaagaccctggtgaacaaagggtatgatcccgaggtcatcgacatcaggtcgttgaagccatttgacctgcacaccataggcaactctatcaagaagacccaccgcgtgctgattgtggaggagtgcatgcgcacgggcgggatcggcgccagcttgagatcggccatcatcgacaacttctgggactaccttgacgcacccatcatgtgcttgtcgtcgcaggatgtgccgacgccgtatgctgcgcctctggaggatgccaccgtcgtgcagcctgcccagattgtggctgccgttgagcaaatatgccagtaatctagacaaccgtttatacattgttctttgcgtggaaagtttttgttcatcgttttgcccatgtagcgaggtatccattgtggtataggcttatttatagccatttttattcgtattctgagttgtactttagctgcgaggacatgctccacaggatatattcgtgcactgtatcatgctgaattctaggatttaaacatgtttttactgcaagaagattttataatgttcgatt

SEQ ID NO: 27815 - DNA, 1510 bp, Oryza sativa
  ref <308>: DATABASE ACCESSION NUMBER: AK103257
  ref <309>: DATABASE ENTRY DATE: 2002-08-28
gagtttttgattttgaagaagaaattgttgtcagcatcattagatcttgtgtgagtatatttgagagtcaaatcagcatgagcggtttggaaaaccgccgtctgtagtgtagcggttttgtctccagagcgacctcttctctataaagaggaggagaacttccatggaatgagccacaaaaccaccatcgatcatttccatttccattttcaggagagatccacatcgccgttggcctttcatccagtgagtgagggagggagatctcgatctcggtctcgcgacatgaagaaggcttcgtctctgtcggagctggggttcgacgcggagggcgcgtcgtcggggttcttccgtccggtggcggacggcgggtcgacgccgacgtcgcaccggcgtcggctgacgaagatatcggtgatcggcgcgggcaacgtggggatggcgatcgcgcagaccatcctgacccgggacatggcggacgagatcgcgctggtggacgcggtgccggacaagctgcgcggggagatgctggacctgcagcacgcggcggcgttcctcccccgcgtccgcctcgtctccgacaccgacctggccgtcacgcgcggctccgacctggccatcgtcacggccggcgcgcgccagatccccggggagagccgcctgaacctgctgcagcggaacgtggcgctgttccggaagatcgtgccggcgctggcggagcactcgccggaggcgctgctgctgatcgtctccaaccccgtcgacgtgctgacgtacgtggcgtggaagctgtcggggttcccggcgagccgcgtcatcggctccggcaccaacctcgactcctccaggttccgcttcctcctcgccgagcacctccaggtcaacgcccaggatgtccaggcgtacatggtgggagagcacggggacagctcggtggcgatatggtcgagcatgagcgtggccgggatgccggtgctcaagtcgctgcgggagagccaccagagcttcgacgaggaggccctggagggaatccggcgagcggtggtggacagcgcgtacgaggtgatcagcctcaagggctacacctcctgggccatcggctactccgtcgccagcctcgccgcctccctcctccgcgaccagcaccgcatccaccccgtctccgtcctcgcctccggcttccacggcatcccccaagaccacgaggtcttcctcagcctccccgcccgcctcggccgcgccggcgtcctcggcgtcgccgagatggagctcaccgaggaggaggcccgccgcctccgccgctccgccaagacgctctgggagaactgccagctgctcgacctctaataaatcttattattatcatcgtcgtcgtcgtctcgtcacggaattaattaaagtacctactccgtacttagctagctacaataataaggattcattgatcactacaagagtgatcgactcgactgtagtatgtgtgtgcaatataatgtgctgtctatcaact

SEQ ID NO: 27816 - DNA, 1762 bp, Oryza sativa
  ref <308>: DATABASE ACCESSION NUMBER: AK103258
  ref <309>: DATABASE ENTRY DATE: 2002-08-28
gaactgcaaaccgctgcggtctcggaaaccctagctctcgccccctcccctccctctccgcccgtcgccgcgcgggtcgcctcctcctctccgccgccaccgccgccgctgacatgggctccgatgcggacatggaggattacgggttcgagtactccgacgacgagccggaggagcaggatgttgacatcgagaaccagtactacaactccaaaggtatggttgagacagaccctgagggtgcacttgctggcttcgatcaagtagtacgtatggagcctgaaaaggctgaatggggtttcaaagctctgaaacaaacagtgaagctgtattataagcttgggaagtacaaagaaatgatggatgcctatagggagatgttgacatacatcaaatctgctgtgacacgtaactacagtgagaaatgtataaacaacattatggattttgtctccggatcagctagtcaacacttctctcttctgcaagagttctaccagacaacactgaaagcacttgaagaggcaaagaatgagagattatggtttaagacaaacctgaagctttgcaaaatttggtttgacatgggggagtatggccggatgagcaagatactgaaggagctgcataaatcttgtcaaagagaagatggttctgatgatcagaagaaaggcacacaacttttggaagtctatgctattgagatccaaatgtacactgaaacaaagaacaacaaaaaattgaaggaactatatacaaaagctctttccatcaaatcagcgatacctcatccaagaatcatgggtataattcgtgaatgtggtggaaagatgcacatggctgagaggcaatgggcagatgctgcaactgatttctttgaagcattcaaaaactatgatgaagctggcaatccgcggagaattcaatgcctgaaatatcttgttcttgcaaatatgttgatggaatctgaagtgaatccctttgatgggcaagaggctaagccgtacaaaaatgatcctgagatcctcgccatgacaaacttgattgcagcatatcagaagaatgacatcatggaatttgaaaagattctaaagagcaacagaagaacaataatggacgatcctttcatccgtaattatattgaggacctattgaagaacatcagaactcaagttctgctcaagcttattaagccatatactagaatcaggattccattcatttcacaggagctaaatttcccagaaaaggatgtcgagcagctcttggtctcactcattctggataaccgaatccagggccacataggtcaggtgaacaagttactagaacgtggtgacaggtcgaagggaatgaggaaataccaagccatagacaagtggaatactcagctgaagaacatctaccaaacggtgtccaacagagttgggtgagagagatagcaggatgcctgggctgcactgcgcttggcacctgcttgcacgttttgttgtggtgggtaaatgcagcgagtgtttggtgcgtgcattacatttgagataggctcttggataggtaaagaaaaaaacagtctcgtgtattaaacatggtactcttttgcgcgccatgtgaagatgctgggattttgtcctgaactgaatctatctgcaaattccaacccctctgaaactatactagcgtcaatggctcgaaacttttggttttgttggcattgccgcactagcaaattttggtatggtagagagaatgtttggttccgtgc

SEQ ID NO: 27817 - DNA, 3533 bp, Oryza sativa
  ref <308>: DATABASE ACCESSION NUMBER: AK103259
  ref <309>: DATABASE ENTRY DATE: 2002-08-28
gacaaggggaagaaccggagagagagaggaacggcgatgaggaaggcggcggcggcggtggcgccgtcgaccacgacggggtacgggtccggcgaggcgaggcggtcctccggcggccggagaagccgcggaggcaaagggtgaagaggatgaaggaggcttcacctgccaccgcgcgtcaagtacatgcaccaactactatttctcaatttcattttccgcttgattcattctagtagtctcctataatttccactgagttttgggtctaataaattaatataagcgcgtgttagtttccactttggttttcatcgatgcgattatagcgtagtttcgcgttaattgagatcatttatctatagggtcttatcctatttatctatatgatcgtaaattgcagggaactaaggcaccttctgtcacatgatcccatcatcattaggtaacaacaaacaccagataaaagaagtggtagggtgggtgatgatcttaagaattcaagatttgttgtcgatgactgagtagcctccgccagcgagcatgataaggattggattgttttattttctttttgggagaacgattcaagtattgattactcctatcttggaaacgaaatgcggaaatggcatagttgattacagaatttttggctaaatgacgcgcttaagtagataaacacagattagacaaacccatgctaatgtaaatctaccctcgtttgcaacttcctacggttttgcgggtgaatgtgacatcttaattaggaactttcctcctccttcgtggaaacttttcatgtctctttctgtctttcatatgttcaacttcagtaatattacttttttgaatactcattatattattaaggtttagtaatattacaataatctcaatctgctctacttcttcatatatagacagttagttcatttgtaagacagctgcttactcctactgtcctacatgcatggtttgtccaggtccatcaatacaaattaataacaccagtacgccactaggccaattctctgcatgtgacctggccagcttccaaatcttctcagagttgggatcagtggctagtatctcggttctttagtaagagcctaagaggcaaaggtgagaattttattatgcataccatctacctatacttatactaactgggtacttcaagaaaatatcttaataggaaaagcagtgaataaattgctgccactacatatctagtaatagttcctcctttctcactcaccttctatccattcatccgtctagtgggagtgaattataagcttagattgaaagaagaatagacatcaattacaatttgctaattgtcaatttttaatttcattaaattaataggataccactaaattgagagcccgaaattggtttccttttaaatcttataatttttaaatataaatcactttgtccttaacttcttaaaaacagcttcacacacacgcgcgcacatattgtatgtgtgtatgtatgtatgtatgtatgtaacataatttagaggatttccctgcgcaattttgagcagacctagatttcaaaagtaggatcaggtttagtaacaattcttagcttaagtttcttagattcaattgtaatttgtatataacagattctaacattagaattggatttgatacttgatagacaactcttactttctactatttatatagacatggctgtattttttatatacaactatatcgatcaatctatatcattataatttggacctatcacgatcaaatggccaatatctttactttttttttcttcaattaatgtgataatttctacgtcccttaagcgaatatggtgccccatttcgagctctctctgcaacctaatcactttcactttatgtcttctgtcaaaatgctcccttttttcttttttttttctgtagaaacagtcctcatggcagaaatggtggcctcaactgttgtccaagaggttttgggcggagccgtctcctacttgtccagcaaccgggagaaggtgtccgagaggcacaacttggagaagttggagatggcacacgctcaattggagcacgccctagagagatcttcaaagctacccatcacagatgtttccttgcttcgtcagaggaggatgttcaaacgtgcctatgaggagtgcagtgaagtggtggagaaatgcaaggtgcggattttggaagttgctgaagagcaaggggtaacacacagctattttcccaagcagtttgtccaagccgtaaaagccatgaaatcatatgtcttgtctttccttggcatgaacaagcaatatcttttgagttgctcccatgttcgcagattcgaatggtttgcaaagaaggctggtaagtttgcgagggatgtggagactggccgtacactttggcactacaacttttttagctctctcatcagaccacttctagaagggaaacatctcaagtatgacatgccattgcaaggaagcaaaacccttggtattacaatagtacctgtatctcttgaagggcgtggcgtagaggcattgatacagttaaataaggaggatagcagaatgccactgaaaaatttttgtctgttgctgatactacgactctcagagagcacggacatagttaggattatcatcaattgcttgcagttacttgggcctcatttcacgcgtttggctaaagatgcaattggtcaacttgctgctctacaacactcacatcctcaagacctcgaaccactgctagcacttcaggccgtggactaccatcggagctttcttgcctttcgagctacagttgctcgccctgatccattttgttgcagagaaaagaggctcgatccttgtgctgacaacaccatctcgcccaatttaccatatgatattccagaacaagttatctatgtgcgctgcagcagctacatttcggctgttgagtacaattacttgtacaactcaagcaatattgtgagggattggtctatcctgaagatggtgatcaatatttcgcctcatttctcgcaccctgaagccaatcgggggagttacagtagtcggggagcaactgataagtgtatgtatgctagtctgcacgaaatgcaggagatggcagtgttagtgcccaaggtaatggattgcttcgtctgtcaacctgacttggggttttattcactgtcttttcattcagttcatggttatggatacctttgtctgatgaagccgcgcatccggagctgcaaaaccaattctagttgcagatccaaggccaggagagtatcaaagacaagacataactagtgtaagttttggtaggggcggacagtttaatcatgtattatgtatatgcttactgaagatgttccccttcaaattaaaagatgtataatattgtactagtacgagccagtgtgtttaggtttagccaaggcccatcttagtcttgactcttgacaagccagtctatgttaattaatttcctgtatgttcaatgcaaatgtacatgtttt

SEQ ID NO: 27818 - DNA, 744 bp, Oryza sativa
  ref <308>: DATABASE ACCESSION NUMBER: AK103260
  ref <309>: DATABASE ENTRY DATE: 2002-08-28
ggctgtcaatcccaaattcacctctcgccgtcacgcgaattccggcggcgacccacctgcccggcggccggctacccccgccacgcaccaccgccggatcaagcctccctgccacaaaccaggagctcttcctcgccggcgctctcctcatccacccgtagcaggaatggagaagtatcacagcaactcccgatttgctcccttcagagatgctccatttgctctccgtggtgcccttggtagctcaggctcatctttcagcagcatcgacagcctcagacgctcctcaacccttgagcaagctagggggtacacatctcgtcccctaggagctgtgcggccaaagatgctcccatctggatgccgacccctgcacacaagccatcctctgtcggctcctgttgctaaccgccccctgtcaccccaccttcctctgaagaagccacagctgagtgctacattctctatctcgcaccgtatatttggtgctgcgttgggtgctgccattatatccattcctctcgccaccaagttcagcctcatgtttgatgtctgagagagaaatgtggtctgcatgatgagaaagaaatgctatatttctgtgactatctcagcatctgaatttgccttgcaatgcaactgtagctgccgttggaataatatctttgctgtgcttgtagacttgtgaataataaacaaaacatgcaatgaccatactccctgtgagatatgatgttttatgct

SEQ ID NO: 27819 - DNA, 2161 bp, Oryza sativa
  ref <308>: DATABASE ACCESSION NUMBER: AK103261
  ref <309>: DATABASE ENTRY DATE: 2002-08-28
gtctctccctccccctctctctctctcttccgccgcctccgccttgcgccgtctccgcctcccgctcacgccgccgcatccgccttccgctcgcgccgccgctgccgccgtcgtcgcatcggcgtccccgaacgcctcccccaaccctagccgcctccgccgctcacgccctctcctccctgtccctctcccaccgccaccgctccgcgccgccgtccccgcctccgcctcgcgccgccgccgtcgtcatctccgcctccgccgtgcgccgacgtctccgcctccatgtcgcgccgtcgccgtcgtcatctccgtctgcgcgtcgcgccgccgtcgtcgtcatctccacctccgccgtcacatccattgcgtccccgtcgccgcctccacctccgttgcgctccggttcggtcaccgccatcgccgcattgccggatctggcggggggtggtcaaatccgtgtcccccgaccatggaaggggcggcctcgggtggagcaggtcgacgctggccacgaaggtgcaaagcttggatggagcagttcgtgcagccgtcgccatcctcctcctcatccctcgaagccaagggttcggcaagcatcggcgttgcagagtgaggatgtcgagttggtcgccatcaacgactccttcatcaccgctgagtacatgacaagaacaagacgcagcaccgcggagcaagcagagcaagtgttagtagcaagaagcagtgacaattcggaggccatcgttgggagcaggagggaaagagagagagagagagagagagagagagagttgttgtggaggagagagaatccaggtgcagggaagggaagggtgggcaggccaagatggcaagaagaggaggaggaggaggaggaggttggtgggggtgggggggggatcaatggagatggagagcccgcggagcccggaggcggagatcgggcacagggtggaggacctgtgggaggtggcggagccgcagctgtcaccgtccgagaagctcaactcctgcttcgaggacatcaccgtcgcctccttccaccgcccgcttggctcgcaaggctggctggcatacatggtgatatatacgcctctcccagggaccatatatgtgcttctctgcataactgggctctgccaatagctgacccactattcaagacaagtttgcagttgcagaggatgcatatgctttggttttgcaatggcgatgcatgcacaaatgggcatgcaggtcagagattggagttggtctcttttcaagtgactttgatgagtctgatgacccagggcaggtcttacaacaaagatatgatctggtggtctactgaaggaaccattattcagtgttgcctacaaactgaaactgggcagcattaggaaaggaatcaaacatgagaaggcggctctattttttgacataatagttttcagtgaggtagatgtcgatgtcaaagagagcagcaagtgcctatggatctacctacatgtttactggaggttctcttcttcactccaggtgtatggctagatatcatataaatatgattgatcaatgctctacaatacatgctacttcgactacctctggccacattgtgtcgtccgaaaatacatgcaaccaggttaaataaatttatttggaaaaaaacaaatatacatgtttgtttggcatcgttttgagcctctttacaggtactggtttacgtttaattctaaaaaaaaatgttaatattcgttatagaattatcttgagctttctttgtcttcagcttagttattccaaaggtatagaattatcttgagctttctttgtcttcagcttagttattccaaaggtctaactgatttatttcatgaaactatatatgctgttatctatgttgataattagtttcatgtcctttgcttctatagcagcaatgcagtttcagcttctcccaaggtgaaaactgtagtaaaaaaagagaacataatatgatgcctgctatgatgcatataccctcatcaatttgttggcactctgccgcctggaacctgaagattatatagctgctattcatgtcatggtggcaatgtttactctccctatattatcccggtgtttgcaaacatacatctatatcataaaccgtctatactctttgcgcttgtct

SEQ ID NO: 27820 - DNA, 4032 bp, Oryza sativa
  ref <308>: DATABASE ACCESSION NUMBER: AK103262
  ref <309>: DATABASE ENTRY DATE: 2002-08-28
caccaccaccattcccctctcttctcctccttctccctagcagccaagccaccaagaacccaatcacccattgctagggttcctcgcttcgccgccgtcctcccttctctccacggcattgcctccaccacttcccctcctcccctgccgccgcaaccattcattcttttccttcattctccaaggtggtgtggttgcttgttcttaatgcgtcagagcaaccggcctcattgctgggttggaaggagctgaaaagttgggggttttatggtgatgtgtggtactgtggagatcagctgaaagggacaagtgttgtgggtattagtggcagcttgttgtgagagccttctggtagatacactctacacttccagtccatttttgctgcaagaaatgcttcaggtgctgtgtctttgaggctcagtagcttccaatctttgtctggagagcagcaatggggattcttgggagttttttggtgctgctcctgcttgctgcccctgcatttggccagctaccttcacaggacatccttgcgctccttgctttcaagaagggcatcactcatgaccctgctggattcatcaccgattcgtggaacgacgagtcgattgatttcaatggctgtccggcttcctggaacggcatcgtgtgcaatggcgcaaacgtggcaggggttgtgcttgatggccatggcatctccggtgtcgccgatctgtccgtgttcgtcaatctgactatgcttgtgaagctctctatggccaataacaatctgtctgggagcctgccgagcaatgtgggtagtctgaagagcctgaagttcatggatatctcaaacaaccggttctcggggccgattcctgataacataggcaatctccggagcctgcagaacctgtcgcttgccaggaacaacttctcagggccactgcctgactccatcgatgggcttgcgtcgcttcagtcactgggtgtgagtggaaactctttgtctggtccattgccttcatctctgaaaggtctccgcagcatggttgctctgaacctctcatacaatgccttcacaaagggcatcccatctgggcttggccttcttgtgaatctccaatctttggatctaagctggaatcaattggaaggcggtgttgattggaaattcttgattgagtcaactgttgctcatgttgacttcagtgggaacttgctcaccagtaccacccccaaagagctcaagttcctggcagatatttcagagacagttctatatctcaacttgagcaacaataagttgactgggtcattgattgatggagttgagctctcgacatttgggagattgaaggtgcttgatctgagccataatcagttatctggagacttgccagggttcaattatgtctatgatcttgaagttttgcgactggcaaacaatgcattcacggggtttgtacctagtggacttctgaaaggggattctctggttctcagtgagctggacctgagtgcaaataatctgactggacacatcaatatgatcacatcgaccaccttgcaagttattaatctttcctccaatgctctctttggggatcttccaatgcttgctggaagctgcactgtgttagatctgtcaaataacaagtttaaaggaaatttgtcagttattgccaaatggagcaatgatttggagtatgttgatcttagccagaacaatctaactggaacaattcctgatgtgagctctcaattccttcgcttgaactacctgaatctttcccataattccctagctgacaccatccctgaagctgttgttcagtaccccaaactcactgtccttgatctcagctccaatcagttcagaggtcctattcctgctaatttactcacttcgtccatgctgcaagagctctacatccacgacaatatgcttagtggaggtctatcatttccaggatcatcgtcaaaaaatctgagtcttcaagttcttgatatttctggaaatcactttaatggcagcctccctgatgaaatagcatctttatctagcctccaagctcttgatatatctacaaacaatttctctggtcctttgccagcctctatcaccaagcttgcagcgctcactgctctcgacatatcaataaaccagttcactgggtcattgcctgatgcacttccagatacattgcaatcattcaatgcctcttataatgatctatctggtgttgttccagtgaacttgaggaagtttccagaatcttccttccatcctgggaactcgagactagactatcctgctagctcttctggtctggcagttcctctggttcagctggtggcaggtcactcagtgcagcagctaaaatagcacttatagcagctagtatcgttgctcttgtcatccttatccttgttgccattgtttgccattacaagcaaatctcacggcagttccctagctcagaaaaggtttcagacaagaacctccacaagactagcaaagacatggccagtacaaaaggaaaggatgacaaaggtggtttggtggtctcagcagatgagcttggtgctcctcgaaagggctctacatctgaagcactaagccaagaagagaagctgtcaggtgtagggggattttccccatccaaaggtagccgcttctcttggtcaccagattctggagaggcatacacccaggaaggcctggcacggttggatgtcagatcacctgacaggttagcaggggagttgcacttcctggatgaaacaatcacactgacaccggaggaattgtcaagggcaccggctgaggttcttgggaggagcagccacgggacttcgtacagagcaacacttgagaatggtgtcttcctaacagtgaaatggctgagggaaggtgttgcaaggcccaagaaagagttctcgaaggaggccaagaagtttgcaaacattaggcatcccaatgttgttggcttgcgtggttactactggggtccaacagcacatgaaaaactgatcttgtcggattatgtttcaccaggaagtcttgcgagctttttgtacgatcgtccaggaaggagaggccctccactgacctgggcgcaacggctgaagatcgcagttgatgtcgcgcgtggcctgaactacctccattttgaccgagcgatgcctcatggaaacctcaaggctaccaacatcttgttggacggacttgacctcaatgcccgtgtcgctgactactgcctgcaccgcctgatgacccaggctggagttgttgagcagatcctcgacctgagagtgctaggctaccgtgccccagagctagcagcgtccaagaagccatctccctcgttcaagtctgacgtgtacgccttcggtgtcgtgctgctggagctcctaactggcaggtgtgctggggatgttgtctcgggttctgaaggtggtgttgacctgactgattgggtccgtctgcgggtggctgaaggtcggggatcagattgctttgatccagccatggcttcagattctgagaaccaagtttctgtcaagggcatgaaggatgtgctgggcattgccttgagatgcatccggccggtctctgaaagacctgggatcaagtctgtgtatgaggatctttcatcaatctagtttagcctcattgtctctagcattagatggatactcttctgtgtgttgagttgagtgcattattttgactgaaaactctagtgtcgctgtagcaaatgcaagtgtatggttggcctcgccttgatgcctccaagttcatatggcatgtctcaattgctcaagtgtcaatgctgccttaattgtttacataattttctcttgcaagttagagttgcaaattagatttctctgtaaatccagtcacttgaatctgtgatttggttgtcagtgagtcgtactaaccaggacggtactgaacatgacggtactgtcagggacttgtacatctcatgtgatgtttgtccaatgtactggcaagaaataggattcatgttgaacatc

SEQ ID NO: 27821 - DNA, 1686 bp, Oryza sativa
  ref <308>: DATABASE ACCESSION NUMBER: AK103263
  ref <309>: DATABASE ENTRY DATE: 2002-08-28
gagccaccaatggagggctcgccagcgacgcgcctcccggaggccgactcgctccccgacggcttcgtggagagctccgccgccgaccaggcgccccctcctcccgccgacgccggcgatcccgcgagccgctccctcggcctcgatcaagccgacgcaaccgtgggcggcggcggcggcgacgaaaccctaggggctcctccctcgaccctcgcctccgtcgctcaggacaccctggacgcctattcggccgccgacgcgctgcagagcctcaccgtgggcggctccgctgcggagccggagcgtgctctcggcgaacccgccgtcgacgcaggagatgctaaagagtcctcgaaggagagcagtgtggtggagcaggtggaatctatggccgatcagaaggttgtcattgctgaggggagtggtgagcagaagcgcaaggtcgtgaaaaagagcaaggtagagaaggacagagagctgtttgaacttgcgcaggcgtaccacaaggtggaggcggcgccggcgccggcgcgcgcgaggggcggcgaccggcggcgaagcgcctccctccgcgcccccacgacctctgcgccgccagatctggccccgcctccaccgccgcatccagagactgcatgtccggcgtccagaacacagcggaagatgggttgccagatggaggagcttctgaactgtcgacgaaaacctccgtcacgttgtactccgatgaaaccagaagatccctctacgcaattcttacagctttcaacatgtcggtcacctccgccatggatggcctctccttccccttggcgctcagacacatactccccaccttggcgacctcctggagcaggggcagcgcctccatgctggcaccagccaagcttgtgtccaagatgttctccaccctctcctccatcgcccgcaggaacgatcctgcgaggctctcgaagtcgccatcgccatcgtggcggtagatcgccttcttcccagtgatcagctccagcagcacgacgccgaagctgtacacgtcgctcttctccgtcagcttcctctcctgcaggtactccggatccaggtaccctcgggttccctgcaccatcgcaatttgctcgacagcttcattggacagccaccgtgatgccccgaagtcggtcaccttcaccgtgtagctatcatcgagcataatgttcagagactccacgtcgccatggatgataggccggttcgtcgacaggtgcaggtatgccaatgcttcagctgattcttgagcaatcctaagacgaagtttcagtgaagcataccgcctgctatcgccatggatcaggtaggagagagtgccattggagatgaactcgtagaccagtatgggcacttcaacttccaggcagcagccgatgagcctgaccacgttccggtggttgatctgcgagagcatgatgatctcctgcacgaattcctcggcgtctgtcacgtggaggaagttggagcgcttcacggcgacgacattgttgtccctgagaatgcccttgtagacaatgccatgaccaccggcgccaagcttttgtccgctgtcgaagttgttggtcgcattctttagtacctcttctgtgaatatttccactgtattgacttgccctgagataattttctggtataatatgtggccaccgttctgatcgt

SEQ ID NO: 27822 - DNA, 2260 bp, Oryza sativa
  ref <308>: DATABASE ACCESSION NUMBER: AK103264
  ref <309>: DATABASE ENTRY DATE: 2002-08-28
gatcttctcctcccttcgccgctcctctactctaccctccctccctctctccttcgcgctctcctctcgccggacctcctcggcggccggcctgccggcgagaacccccgcaacgcgcggcgtggggaagcctcccccctctccctgacccggtcctgatcctaccccgccgcgcggcctcttcctcctcctcctcgccggcgaggagagagtgggtgtttcttgaagcggctttgacctccttccaactggctcccgtctcgggtggggggatcgagttgaaggcgtccgccctcccttgcctcggctgctgcaagcgcgagctcgcttgacccacccccagcgggcggctgggcttcctcccccgcggcggcgcgcgcgcgatgagctgcggcagcgatggcgggtgtagggatggtggtggcagcgaggagttcaggcggccgcggccgagcaaggtcgcggcgggggacttggtggagccggcgcgctgctcggacgccgccgcatcgccggcttcttggattgacaagaagctgcttgttgaccccaagaatttgtttatcggatccaaaatcggggagggagctcatggcaaggtctacaaggggaagtatggtgaacaaattgtagcaataaaggttcttaacaatggcaccactccggaggaaaaggcaacccttgaagctcgtttcattcgagaagtaaatatgatgtgtaaagtgaaacatgacaatcttgtgaagtttattggagcttgcaaggaaccattaatggttattgtcagcgagttattgccggggatgtcactgaaaaactacttgaacagccttcggcccagccagttagatatccatactgcaattggctatgcactggatatagctcatgcaatggaatgtttgcatgcgaatggaataatacacagagacctgaaacctgataatttgttgctcactgcaaatcgtaagaagctgaagcttactgattttggtcttgcacgagaagaaactgtgactgaaatgatgacagctgaaacagggacataccgctggatggccccagagctatatagcactgttactcttcaacgtggtgagaagaagcattacacaaataaagtggatgtgtacagctttggcattgttctgtgggaactgttgactaataaaatgccatttgaaggcatgtcaaatctacaagctgcatatgctgctgctttcaaggtaagtgttaagcaatagtcaagactgtggtatgaaactattatttgctataaaaatgatatcactgcctcaaaaattgtctggtataataaacctgtcacacctcatgaattatgctatttaattgtaaaccattcctgttcagacaggtgataaattactactaataacgtctcctttgtggctaaaatgttacaacccctaaacaagttggtactatttcttatgttgtgaatttttatcaacttagttcaatgactcgtttttggcttccagaagagagaaggtcatggcaatttttgacacaagtaattttaagatttttttagcaccattcaactggtatacatgactgtatcacctttctttaattattttgacctgtgctttgaactttagctatcttgacggtcactatcttttcacttgcattatgcactgagctgatattttccctctcgtctctaatgacagcaagcgcgcccaccccttcctgaggagacccctcaggagcttgtgttcattgtgcagtcatgctgggtcgaggatcctgccatgaggcctagcttcagccagatcatccgcatgctggatgctttcctcatgacaatacctccaccacctccttcagaatcaaacgaagacgtggaatcggaagaaacagcgtcatcgctgaatggcaagaactctgctgtctcttctatcgtttctcgcgcgacaagcaagctctcggtcgtccgccatctctttgcctcaaagaaggctgggaatgggaggacataaacaaagctctcggaggtctcagtcgtcgtccgccatctcttcgcctcaagaaggcaggcaatgggaggacatgtgatgcatgtcctgagacggtttccctttggtgctgtaaagagttagcttaggttatgtgtaaaacaagagggatcttgttcagtgtaggatagctgttgtattgatgacacaaaggaaattaagttgaaatgcaactcatgcaagctatatgtatagctggcagctgctttaccact

SEQ ID NO: 27823 - DNA, 2225 bp, Oryza sativa
  ref <308>: DATABASE ACCESSION NUMBER: AK103265
  ref <309>: DATABASE ENTRY DATE: 2002-08-28
gcctcttctcttcctgcccaaaagggtggaagctacattctgtctgcgactcgtcattagtacaggattgttcttggatgcgcaaccagccaacgactcacaatacgctcgcgggaattaagggcttaatcccactcggccagcgcggaagtcgggagaaatttgggcatctgctgcagccattgctcgattcttggtgtggtggcttcttgatgggttggtttggttgtagaagcagcccaagacgcctaatttccttcctgctcacctcacatttggagtgatttgatgtcttcgtgcagcatttggccacttatatctggccttgctccttttttcagccacatttctcagttcttggtatccggttggcacctcgatgtgtccgcattgcttctggagtcccaattctaaattagctagtaggtcacatttgcagtgaccttggtctcctggagccctgggtgcagcagccttggaaatttctctgcatttgccaagtttcttgccctcagcgtgctcgttctttgttgatagatgtcctaaatcctgcgtgcccggttgatctgctcccatttctagcattttccatttcctggtgcaccattcttccaaacctctgttctcgttcggtgccgaaatccccaaaattttggtcttttactcgcactcttggttccaagtctcataaaccctacctacttcacttcacacccagtgtttggaagactcaagattgctccgccgtttgcatgagcagtgcttgtattggcttcagagctggatcttacaatgcggctcctgatattgtgcttatcgatttgggctgcgtctgcagccgctgccatggctggtacagacatggaggcactattggagttcggcagaggcatccggcaagactcatccggtcatcgggccactccttggaaccccactagcgcgttggattctgatggctgccctctcgattggcatggcgtgcagtgcagcaatggccaaattctgtcaattgcatttgatggagctgggcttgtgggtaatgttagcctgtcggctcttgcgagtatgccgatgcttcagaacttgtccctgtcgaataacaaactggtaggcgtcttgccccgtgatctcgggtctatgacttctttgcagctattggatctttcgaataacatgttctcaggtcaaattccggctgaattgactaaattggctaatttgggacatctcaatctctcttccaatggttttggtggtgcattgcctttgggtctccggaacttaaggaaactgaaatatctggaccttcgtggcaatggctttactggcaaattggatgacatatttgcagaattacagagcccggttcatgttgatttgagctgcaaccggttctcgggttcattgatatcaatatctgacaactcatctgtggttagcacacttcagtacttgaatgttagccacaatatgctgtcaggagcattatttgagagtgatccaatgcctctgtttgatagcctggaggtgtttgatgcaagttacaatatgcttgagggcaatattccaccatttaattttgtgatttccctcaaggtgttgcgcttgcagaacaataatttttctgggtccattccagaggcgctctttcgacagacctccatggtgttgactgaacttgacctcagctgcaatcaacttacaggtccaattagacgtgtaacatcaatgaacttaaagtacctgaatctgtcatccaacagccttcagggaactttgcccatcacatttgggagctgttcagttgttgatctgagtagaaacatgctttcagggaacctatcagttatccgaacttggggaaattatattgagacggtcgatttgacctcaaatcggttaacaggaacatggccaaatgagacaacccagtttttgaggttgacttcgttgaggatttccgacaacttgcttgcaggagaactaccaactgttattggaacttatcctgagctgatttccatcgacttgagtctcaatcagcttcatggaccattgcctggaaatctgtttacagcagtcaaactgacctatctaaatctgtcaggaaacagctttgcagggactcttcctcttcctaattctgaagcaaagagctcaacttttatagacttgttagttctccctgtacaaacttcaaacctctcatttgttgatctttc

SEQ ID NO: 27824 - DNA, 1562 bp, Oryza sativa
  ref <308>: DATABASE ACCESSION NUMBER: AK103266
  ref <309>: DATABASE ENTRY DATE: 2002-08-28
catgaacccaagccacatcttagcttaattacatagctcctcctcctttctccactgactgctcagtgtgttttgcatctctccattgagcaagaggagaagggaggctcagctagctagctagctaccatctatactagtatcaagtttttttgttcagatttttttgttggaggaagagttctagggagatcgatatggccttcatgtccatggaacgcagcacttgggccttcacctttggcatcttaggtaacttaatctcactaatggtattcctttcgccactgccgacgttctaccgggtgtaccggaagaagtcgacggaggggttccagtcgacgccgtacgtggtgacgctcttcagctgcatgctgtggatgtactacgcgttcgtcaagtccggcgccgagctgctggtcaccatcaatggtgtggggtgcgtcatcgagaccgtctacctcgccatgtacctcgcctacgcccccaagagcgccaggatgctcacggcgaagatgctgctcggcctcaacatcggcctcttcggcgtcatcgcgctcgtcacgctgctgctctcccgcggcgagctccgcgtccacgtcctcggctggatctgcgtcgccgtctcgctcagcgtcttcgccgctcccttgagcatcatcaggctggtgatccggaccaagagcgtggagttcatgccattctcgctatccttcttcctggtgcttagcgcggtgatctggttcttgtacgggctgctcaagaaggacgtgttcgtggcgctgcccaacgtgctgggcttcgtgttcggcgtggcgcagatggcgctgtacatggcgtaccggagcaagaagccactggtggcgtcgtcgtcgtccgccgtggtggcggccgggctggagatcaagctgccggagcatgtcaaggaggtgcaggccgtcgccaagggcgccgtcgcggcagcgccggagggcaggatcagctgcggcgcggaggtgcaccccatcgacgacgtgatgccctcggaggtggtggaggtgaaggtggatgacgaggagacgaaccgtacggacgagatggccggtgacggcgatcacgctatggtcagaacggagcagatcatcaagcctgacatggccattgttgtggaagtgtagtctgattaagcttagagaactagtagtaattctctcatgtgaggtatagccagctagctggtggtacacaaacataaacacgaacacatgttcatcgcgtacgtactagctactaggtgagacacctcttggcgtagtacgtacagtagtactccggccagatctagtagggactgtattggcgcgtgactcgcctggttcgtccagcttgcatgcagagaccgaccgagcaagcaagctaattaagctggcccgaccgaccgagtgcatgcgtgttttgtgaacctagctactgaggggggagtgaagggtgtgggtgtgcaatcgaccggcctgtcgcgtcgatgctcttgcttagcttcattcgattcatgcagttcaataataaaatttggattttactgc

SEQ ID NO: 27825 - DNA, 3572 bp, Oryza sativa
  ref <308>: DATABASE ACCESSION NUMBER: AK103267
  ref <309>: DATABASE ENTRY DATE: 2002-08-28
gactggcatacactactctctctctctctctctctctcttccccagctggtgcttgctattattacactccacccctcgcatttccaaaaatttgcatttctttctctcacacatctcttccccttctctctccctcagctaagcttctcacccccctccaatggcagccgccgccgccgccgccaccacctgctcccacgccgaaacctagctgtggccacccccgcacccgcatccatggccgcgctcctcgtgctggtggttttggtggtgttgggaggcggcggcgcggcgggcgacgacgtggcggcgctgctggagttcaagaaggggatttcggacagggggagggaccccgtgctgggatcctggtcgccgccggcgacgcccgacgccggcgggggaggcggcgggtgcccgtctgggtggagaggggtcgtgtgcgacggcggcgcggtggtcggcgtcgcgctcgacgggctcggcctcgccggggagctcaagctggtgacgctctccggcatgcgcgcgctccagaacctgtccctcgccgggaacgcgttctccggccgccttccccccggcatcggctacctctcctcgctccgccacctcgacctctccgggaaccgcttctacggccccatccccggccgcctcgccgacctctccggcctcgtccacctcaacctctcccacaacaacttctcctcgggcttccccaccgacgggatccggcagctgcagaacctccgccgcatcgacctccgcagcaactccttctggggcaatgccggcgatctgctcgccgagctccgcaacgccgagtacattgacctcagcgacaacctcttcaccggcgccgtcgatttggagctcgagagcttgtccagcatcgggaacaccgtcaagtacctcaacctcagccacaacaagctgcagggcgggttcttccggaacgagacggtgggggccttcaagaacctggaggttcttgatttgagcaacagtgggattgctgggatggtgccgcagatcgacgcgtggttctctctggcggttttcagggtcgccggcaatgcgctttccggtgtgatgccggaggcgatgctgcagaactcgatgcggcttgtcgaggttgatctcagcaggaatggcttctcaggatcggttccagttgtgaactcgacgactttgaagctgctgaatctctcttcaaatacgttctcaggttccttaccatccactgttggcaagtgtagctcagttgatctgagtgggaaccagctttctggggagctagctatattgcgtgcttgggatggtaccgtggagacgattgacttgagttcaaacaaactggagggaagctacccaaatgatgcttcacagtttcagaacttagtctccctgaagctgcggaacaatttgttatcaggatctattccttccgtgttgggaacctatcagaagttacaattcctcgatctcagtctaaatgctcttggcggacctgttttgcctttcttctttctgtcgcccactttgacagtgttaaatctttccggaaacaacttcactgggactattccatttcagagcacacattcaacagagtcgattgcactaattcagcctgttctcaggatcgttgatctgtcaagtaattctttgtccggtccgttgccaccagatatttctaacttgcaaagagttgagttccttactctcgcaatgaatgagttgtctggggagattccaagtgagataagcaaacttcaaggattggagtatcttgatctatcacataatcactttactggcagaattcctgatatgccccaggctagtttgaagatattcaatgtgtcctacaatgatctacaaggaactgttcctaaaagtgttgaaaaattccccataacctgctttagacctggaaatgacctattagtttttccagatggccttcctgctggaaattatgatgatactggagtcgctcagagtcaatcgtctcatggacataaggctggcgttcgagttgctcttattgttggctgcattggagctgcattgcttgtgatcttcatagcattggcaatctatgtggtcaggtctcaagagctttgcggaagaaatggatttagaggtcagattactattagagatctaaaactggggaggttaagccgaccaaatcttttcaagcctccgaaagataatgttataccaactaaaacaagtttctcaaatgaccatctcttaacagctgcagctagatcaatgtctgctcagaaagagctattagctgaagctgctgttgagtacggctatgctgatccaaaagaagtcactgaaccctcgagttcaggtatggctgagacctctgctgcagtccctgctatggagccctctccacgggttgtgctaccaacatcaccacattttattgatagtagattccatgaggaacctgtggcatttgaagtgtactcacccgatcggttggtcggagaattgattttcctagacagcactttggttttcacagctgaagacctgtcccgagcaccagcagaggttcttggaaggagcagtcatggcacgacatacaaagctgcactacaaagcggccatgtcctgacagtgaagtggctgcgtgttggcctcgtaaagcataaaaaggacttcactaaggagataaagaggattgggaccatcaggcatccaaatataatttcgtggagagctttctactggggtcctaaggagcaagaaagactcattatttctgactacgtcaatggcgacagcttggctctttatctttatgagtcaactccaagaagatactcccgcttgtcagtttctcaacggctcaaaattgccatcgacctggcacgctgcctccagttcttgcaccatgagaagggtctgcctcatggcaacctaaagccaaccaatatattcttgacgggtcctgatctctccccgaagctagtcgattatggcctgcatcggttcatgactccaagtggcactgctgagcaaatacttaacttaggggcattggggtacagagccccagaactggcaaacacagccaagccaatgccatcatttaaagctgacgtttacgcgtttggggtgattgttatggagatgttgacgcggaagagtgccggggacataatttcgggtcaatctggggccgttgatctgaccgactgggttcaaatgtgcaacagggaaggacggggaactgattgtttcgatcgagacatcacgggcttggaagaatctccaagggtgatggacgagctgcttgcgatctctcttaggtgtattcttcctgtaaatgagaggcctaacatgaagacggtctgtgacgatctgtgttccagaaccgtgtgagtttcgttttaatttcccgtgtacatgtaaccgatttttcgttcatcccaattttttctgtgggttttccagaaccttgtagccagggtttgtttggttggtaactcgagtagtgtaaagaggatttgatcccatccatcccattgattgattg

SEQ ID NO: 27826 - DNA, 2391 bp, Oryza sativa
  ref <308>: DATABASE ACCESSION NUMBER: AK103268
  ref <309>: DATABASE ENTRY DATE: 2002-08-28
gaccgtagtgactagcgagcgctgagtgcatcaccggccaagcagccaagcggcggcggtgccaaccggaggggcggcgaggcttggcgctcgcccgcgcaccaccctcctcctccccccgaagaacggcaagcgccagcgatggagtagcttggtggcggagggcttgatggcggaggagctcggtggcgagacggcccgagcggcgacggcgccgggcagcgacaacgacggcgacgccagcctcctcttctccttccccgctctcgcctcctcctcctccagcccgtcgactacctcgcccctttcccctctatcctctagcatagtgtgggtcccgcttgagacgtgaagaactcgtagccaaagttggctactcggacctgagcaagctgcacggtttgacgatgtggcatggaatattcgtttttgggtgtggaggctgaatgccacttaagcccactgtgaatggccatggcctaggaggacatgtctaccgcagcggataatcgaggccgttgattgctgatcccaatgacaggtggaaatatttctctggtcgatgattgcgttgattcgtgttcaggcaaaggccgctgaatccaaagcggatcacagaattggcacgcacagaaagataacagttaaaaacgaaggagaaaaaaaaagttgggagaaaagcggagcagggaaggagacaggggagaagcgtcgagaaacgcaccgccccctagccctaggcttgcctctttccgcgccggtgggtgggtggataggggagtaggagagggggatctcggccaccgcccaccgccaccgccgcgccgccgccgcgcgcgcgcgcgcatcgcgtcacgatctcgcgagaccccgaaccccacgaaccctcgccgcgtcgccgcgggccgtcgcggtgggggaggaggaggaggggtgggtactcgttctcccagtgggggagggttttgccgcggcgggaccagtggcgctgttccggggctgcttctccttcgggtcgggggggcggaggaggcccgccgcctcgcccctgccctcgccgccgcgggcgccgccgctagcctcctccgcctccgccgccgccgcggcgctagcggcagcggacgacggcgccaagatgaagggcctcttcaagtccaagccgcggacgccggcagacgtcgtgcggcagacgcgggagctcctcatcttcctcgacctacactccggatcacgcggcggcgacgccaagcgcgaggagaagatggcagaattaagcaaaaatatcagggagttgaagtcaattctttatggcaatggtgaatctgaacctgtgactgaggcttgcgtgcaattgacccaagaattcttcagagagaacactttacggcttctaattatttgtcttccgaaattgaacttagagaccaggaaagatgcaactcaagttgttgcaaacttgcaaaggcagcaagtctcctcaaaaatagttgcatctgagtatctagaagcaaataaagatcttttggacaccttaatttctgggtatgagaatatggacattgctttgcattacggctctatgctgagggaatgtattcgccaccaaagtattgcaaggtacgttttagagtctgaccacatgaagaagttctttgactatatacaacttccaaattttgacattgcatcagatgcttctgcgacctttaaggaacttctgacaaggcataaagctaccgtggcagaatttctgtcaaagaattatgactggttcttttcagaattcaacactaggttgctatcatcaaccaactacataacaaaaaggcaggctatcaagttcttgggagacatgctgcttgatagatccaactctacagtcatgatgcgttatgttagttcaaaagataatcttatgattctcatgaatctcttgagagattcaagcaaaaatattcaaattgaagcatttcatgtgttcaagttatttgcggcaaataaaaacaagccaactgaggttgtaaacatactagtcacaaaccgaagcaagcttctccgattttttgccggattcaagattgacaaagaggatgagcagttcgaggcagacaaagagcaggtcataaaggagatatctgcactttagtgtccttctgtatacctcgcggaggcttttggtcaatgcgtctgcctagtggtctctcgtggactactgtatttatcccaccccgagaggctttcgcatggatggattcaccgcgagtatattaacgcggtggccggtggctggatggtgttgctgggtgatttgttagaaggttcttgtgtaataatatacttctacatattgctatatgttacttggattcaggcaaatcatattgatggtgc

SEQ ID NO: 27827 - DNA, 1107 bp, Oryza sativa
  ref <308>: DATABASE ACCESSION NUMBER: AK103269
  ref <309>: DATABASE ENTRY DATE: 2002-08-28
gactcttcgctctcgcgtcgcgcacgacacgaccgagccagcaaagccgcccatccgccatcccgccgctcctgcaatctacagccgcgtcgccgcttgtccgcctgcgctcgttctcgctagggttcggaagggggagggtggggatcgcccggcgatggactggagcgcggtgacggcggaggacctggtggacgcgctgcgggaggtggactggtcgacgccgccgcgccccgtgccggagttcttctcccgcttcaccgtcccccgctcctactccaagtggaccagccgcctcaagtgcaacctctactactacaggacaaattacttcatcttgatcatgttcatccttgggataggcttcatttggaagccggttgctatacttgcagcctttatgactggaatcagcattgcatttcttaatgacagctttgcagtcactttcaatgagaaagtcacgaggactgtcagacaattttcaccacatttagctgcaaaaatgaggccaccaataacccctgttcttcgtggtagaccaagttcaaagaggtcgattcatatttgtgggcgacctcgctggctatttgtgctgttattttctgcagttagttgcatgctctggttgacttcctgcagtctcctcacagttctatgggcccttttaattgctatctttgcaactctgcttcatgctagcttcagaacacctaatctgaaagcacgtctgaatacattcagagaagaattccgagctgtttggaggaattatagtgagctttaaggttcatgtggtaagaagtgcttagtgctgaaacttcgtgctgtttgtgaattgtgtttgtgggagataccaagatatgaacaatggtgacaggcagctgcgttctattgtgattacttgctcgttttggaggtgggccttgactgtctaagtacatgatgatgttacacttggtacgccaccttccaaatcactataattgttcacatgggattctccctaaccaagcattggaaaaagaacagcatgtaaaggatgtaaacaagtattctaatcaacacagcatatattgtttgttgaaatgtttgtttcatgtttcc

SEQ ID NO: 27828 - DNA, 1577 bp, Oryza sativa
  ref <308>: DATABASE ACCESSION NUMBER: AK103270
  ref <309>: DATABASE ENTRY DATE: 2002-08-28
gacaggcaggaagtctccccacccacgacgaccacccccatctccttcccctttctagggtttcgcttcgtctcccccaatggcggcggccaccacgtcccggcgcggccccggcgccatggacgacgagaacctcaccttcgagacctcccccggggtcgaggtcatcagcagcttcgaccagatggggatccgcgaggacctcctccgcggcatctacgcctacggcttcgagaagccctccgccatccagcagcgcgccgtcctccccatcatcagcggccgcgacgtcatcgcccaggcccagtccggaaccggcaagacctccatgatctcgctctccgtctgccagatcgtcgacaccgccgtccgagaggttcaggccttgatactctcaccaactagagaacttgctgcacaaacagaaagagttatgctggccattggtgattacatcaatatccaagtgcatgcttgtattggtggcaaaagtattggtgaggatattagaaagcttgagcatggagtgcatgttgtgtcaggaacacctggcagagtctgtgatatgatcaagagaaggaccttgcgtacaagagccattaagctcctaattctggatgaagccgatgagatgttgggcagaggctttaaggatcagatatatgatgtctacagatatctacccccagagctccaggtttgcttgatctccgcaactctgccacatgagatcttggaaatgaccagcaagttcatgactgacccagtccggatccttgtaaagcgtgatgaattgaccctagagggcatcaaacaattctttgttgctgttgagaaagaagaatggaagtttgatactctttgtgatctttatgatacactgacaatcacccaagctgtcattttctgcaacacgaagagaaaggttgattggcttacagaaagaatgcgcagcaataacttcacggtatcagctatgcatggtgacatgcctcaaaaggaaagggatgccattatgggtgaattcaggtgtggtgcaacccgtgttctaattacgacagatgtgtgggctcgaggcctggatgttcagcaggtctctcttgtcataaactatgatcttccaaataatcgtgaactttacatccatcgcattggtcgctctggacgttttggtcgcaagggtgtggccatcaattttgtcaaaaaggaagacatccgtatcctgagagatattgagcagtactacagcacacagattgatgaaatgccaatgaatgttgctgatctaatttgagtgcttgagtggcacaatcatgtttttgatcatctggtctggcaacaagtgagcttgtttgttgtgattttggttgacatgttttgccgagactgttgctgtgaacctaaaaagggttgcgagtctaacactagtgattggtttcgtttcctctttggctcgtggcatgatctgtatatattttagcgccagctcatgtaacactattattgcatttcttctctgaacgcgtgactttgttaactatattcatggcaacaaggatttgatgttggtttctcgt

SEQ ID NO: 27829 - DNA, 3259 bp, Oryza sativa
  ref <308>: DATABASE ACCESSION NUMBER: AK103271
  ref <309>: DATABASE ENTRY DATE: 2002-08-28
gcgtcttccccagctatctatggcgtccccctgctcccaaccctagctcacccatgggatccaacactccaccctcccgcgccgccctcgagcccttcgccaccctcgaccccgccgccctcgccggcctcacagcctcctccccgctcaccgtccgctccgccgccatctcctccccatacctctacctcggcaccggcggcggcaagctcctcctcttcaccctcgattccccctcccccgacttcctccgcctcctccccatcggccccacccgccccgtctccgccatcctccccctccccgccgtcgcccgcctcctcctcctcgccgacggcctcctcctcctcgcggaccccctcctctcccgccccgtccgccgcctcggctccgtccgcaacgttgccgccgtcgccgcccgcgcctccgaatccgacgatgatcgcccctcctgctccctcgcggtctccgtcgggaagaagctgctcctcgttgacctcaccctacacgacgccgacgagttggaggtgcggacgcgtgacatcgccctcgtcgatggcgtcaaggcgctcgcttgggtcggggactccgtcttcgtcggcgctgcctcgggctactcgctcttctccaccacgaacgcccaaggtggcgatatattcacgctccctgagtcctccaggccacccagggctgaagcccctgtccgggggcgacgaggtcatgctgctcgtcgacaatgtcggggtcgtcgtggaccgatcggggcatcccgttggaagcagcttcgtctttaacaccacgccggattgtatagcggaggtgtacccctatgttgttgttgccggggactccaaggtagatgtctacagaagaaagaacggcgcacatttgcaggctattccttttgcaaggcctggtacaggtggactaattgtagcgagcgaggatgccggaattggcagcgacgtagttgtgattgctacggcttataaggtattttgctaccgtaaagtatcagcggtggaacagatcaaggcactactacgaagaaagagttatgcagaagctatttctttgttacaagagttcgaggccgatggggaaatctcaaatgacatgatttcctttgtgcatgcacaacttggattcttgttgtttttcgacttgcgtttcgaggatgctgtaaatcatttcttgctctcggaaactatgcaaccagcagaaatatttccattcatcatgcgggaccctaatcgttggtcagatctggtgccaagaaagcgttattggggcttgcatgctcccccaaagcctcttgaagaagttattgatgatgggctagtaacacttcaacaggcattgtttctcaaaaaggcaggtgtggacacagttgtggatgatgatttcctttcaaatccaccaagcagagctgatctgctggaagtagcaatcagaaatattatcaggtacctgtgtgcatcccgagagaaggatttatcttcttcagagatggaaggggttgatactcttctgatgtatctttatagagctctcaatcttgttgatgacatggagaagcttgcatcatctcagaatagctgtgttgtggaggaactagaatcacttttggatgactctggacatctgcggacgcttgcattcttatatggcagtaaaggaatgtgctccaaatcccttggtatctggcgtatcttagcaaggaattacagcactggtttgtggaaggatcatgcaatcctacctgaaactgactctcttgaaacttctgttggtaaaatgtctggtgaggaaattgctgccgttgaagcctccaagatacttcaagcatcatctgatcaggaccttgttctggagcatcttggatgggtggcagacattgatcaagagcttgcaactgcaattttaacatctgaaatgagggaaaaacagctttctcctgaaaaggttgttgctgccattgatccagagaaggttggcattcaccaaagatatttgcaatggttgattgaggaacaggaatgtgatgagcctcactatcacacgtcatatgcattgtccctctccagatctgccatggacgcagtccgtttgggatccaacaatgaagagagaaacaataaagaatttgattctgatatgcagttcatttatctattgagggaaaggttgcaattttttttgcaatcgtcagatttgtatgacccagaagaagtgctatatgtgatttcagaatctgagctatggctggaaaaggctattttgtataggaagatgggccaagagaacattgtacttcagatattagcgctgaaactggaggatagtgaagctgctgagcagtactgtgcagagattggtcgagatgatgcctatattcagctgttggatttgtatctggaccccaaaaatgggaaaggacccatgtttacagcagccgttcgacttctccataaccatggggaatcattggatccaatacaagtgttggagagattatctgctgatatgcctcttcagctagcatcagatacaattttgcgaatgctgagagcccgggtgcaccatcatcgtcaagggcaggtagttcataatttatcacgcgcaacgaaccttgatgcacggttgaccagattagaggagaggtcaaggcatgtgcagctaactgacgagagcatatgtgattcatgtcgagctcgccttggcaccaagctgtttgtcatgtacccagatgactcagttgtatgctacaggtgctaccgaaatcaaggtgattctgcatctccacatggacgcaacttcaggaaaggtggtatatttaaacaaagctggctcgttagtagataacaaagttacaagacaaggaaaccatggatgtgcgtgcctctgtttcagtgctatgcgtcatgaaaggagagcatatataatttggtggtgaagcctcccctttgcatttgaaggagcattcagcagcgatacggtctgaaaccatctgaaatgaagcattatcgttgatcatggcgattggagggaggcagagagagcagtggtcctggaaggtgataccgtagcttccggtggtcgaccagaaaccatgatgtttttttgtccataggattgttgttttgttttgataggataagatgggctacataattttaggtatcgctaggatttaatttacactgtagacaaaacataaggccttttgtgtctaatagaagaaagaaagatggagagc

SEQ ID NO: 27830 - DNA, 2191 bp, Oryza sativa
  ref <308>: DATABASE ACCESSION NUMBER: AK103272
  ref <309>: DATABASE ENTRY DATE: 2002-08-28
aaaaaacctcatagcctcatcagctgatcactgagtgccttctccttctcctcctcctttaagaaccctcttccctgcccatccttttcttcatcccctcaactttgcctaaaaggcaagaacaaagccatatgattctctgatcccttcttccaagctgcatcccaacacaacacattgtggtgacacagcaaacataatatacacacatcctcttcttcttctaccaccctccatattcctgcaagaaacaactggaggaagaatcactactccaacaccatggaggttgccatggtctgcacaagagttaacctgctcatcctcatcctttctctctgctccccatacaagtttatacagagccccatggactttggccctttgaacctccttcccaccaccaccactgcatccagtgactttggtagaatcctcttccactccccatctgcagttctaaagccccaagctccaagggatatatccctgcttctcagcttcctctctgcctcacctcttggcaaggtgacggtggcagccaggggagcaggtcactccatccatggacaggcacaggcccttgatggcattgtagtggagatgagctccttgccttctgagattgaattctacagaagaggagaaggagatgtttcttatgctgatgtgggtggtggaatcatgtggattgagcttctggagcagagcttgaagcttgggctggctccaaggtcttggactgattacctctatctcaccattggtggaaccttgtccaatgctggcatcagtgggcagacattcaagcatggacctcagattagcaatgttctacagctggaagtagtcacaggcaggggtgagattgtgacctgttcacccaccaaggatgcagagctattcaatgctgttcttggaggccttgggcagttcggcatcattactagggcaaggatcctgctgcaggaagctccacagaaagtgaagtgggttagagccttctatgatgatttcgccaccttcaccaaagaccaggagttgctggtgtcaatgccggttttggtggactatgtggaaggtttcatcgtgttgaatgagcaatcccttcacagctcctccattgccttccctacaaatgttgacttcaacccagattttggcaccaagaacaaccctaagatctactactgcatagagtttgctgtccacgattaccagaacaagaacatcaatgtggaacaggtcgtggaagtcatctcaaggcagatgagccacatagcatcccacttgtatagcgtggaggtgtcctactttgattttctcaacagggttaggatggaggagatgagccttaggaacagtgggctctgggaggtgcaccatccatggttgaacatgttcgtgccaagcgctgggattagtgacttcagggacctgctcatggacagcatctcaccggataacttcgagggcctcatcctcatctacccactcctcagacacaagtgggacaccaacacgtcggtcgtgttaccggactccgggtcgacggaccaggtgatgtacgcggtgggcatcctccggtcggcgaaccccgacgacgggtgctcccaccactgcctccaggagctcctcctccgccaccgccgcctcgccggcgccgccgcgtcgggcctcggcgcgaagcagtacctcgcccaccacccgaccccggccggctggcgccgccacttcggccggcggtgggagcggttcgccgatcgcaaggcccggttcgacccgaggtgcatcctcgggccaggccagggtatattccccagggacagcagcagcagcaatggcgcatttgcaagctatagctgacacgagaaagtgcagtgtagtgctgtgctgtgccgtgccgtgccgtgccgtgacagctggtggtacaataagagggggacataggataggcaggcgaggctaggagggagatcttgttctttcttttcgatagctttcttttctgcttcgatttgaggccggcatcgttttggttggttgatgtggttgggcgggggttgattttgaacggatcctcggtggtggtgatcaccatcatcactgggaattttggaactttgtacaggctgaggaagcaagaacagctctagggcgaaaggatagtgatagcgattctatttcgacc

SEQ ID NO: 27831 - DNA, 1215 bp, Oryza sativa
  ref <308>: DATABASE ACCESSION NUMBER: AK103273
  ref <309>: DATABASE ENTRY DATE: 2002-08-28
gctcgccccgccacgcccgccgctctcctccgcgccgccgcccgccgccgtctactcctctcccgcgccgccggccgccgtgttccatcctttccccggcgccacaagcttccggcccctagatagcccgcgaagccaagctgccggcccctcgctcgcccgcgcagacggccgagatggtggcagcggtggcgccggagtgggccaccaaggagccctgcctcatgggaatcgacgaggctgggcgcggccccgttctcggtccaatggtgtatggctgcatgtactgcgctcgttcctaccaagacactcttgcaacccttaaatttgcagattcgaagaccttgaaggaagaacaaagggaggagctgtttgaaagtctaaaagacaatagttcaattgggtgggaagtggatgtcatatgcccaaaggagctatctgctaaaatgttaaaaagatcgaaagttaacctgaatgaaatatctcataactctgcaatgggtctggtcaaaagagctcttgacatgggagttctactagcagaggtctacattgatacggttggagatgcggagaagtacaggatcaaattgactgaaaagttcccaggcatcaaatttgtggttgccaagaaggctgatagccttttcccagttgttagtggagcaagtatagtttcgaaggttaccagagacagagccttgagaaactgggtatttgatgaaacggctcagaatatgcacatgaacactgggtctggttatccaggagatccttccactaaacaatggttagaagatcacaaacatccgatatttggattcccgtctttggttcgttttagctggggaacttgcacgcccttcttcaatgacgcaattgaagttacctgggagtccaatgaacttgaagaagatgcaggtagcaacggtagtgttaagagacaggtcaagctatcaagcttaggctttactggattcaaaaggaagtctgaggagatcgactcaagtgggaaaggccgttgcaagttcttccaggctcgcaaacttgaacttatcaggaagtttcagtgatgcgtatcagcttcgttgtctgtactactaactttaagtcagagtagaaggctcttatggggttatggcttgtatttcagctgtgacacttgtgagttcagtataatgaaggctcttatggtgatattgtatttcagctatg

SEQ ID NO: 27832 - DNA, 1848 bp, Oryza sativa
  ref <308>: DATABASE ACCESSION NUMBER: AK103274
  ref <309>: DATABASE ENTRY DATE: 2002-08-28
ggctctacatccttttcatctcccacctcctcactcctcgtcagttcgtcacttgcttccaagaaccccgtgacaaggcgggaaggaatccgaatcgcagcgagatgatttgccgcagtctcctccttctcagatctaatgcggcctccaaggcaagcaacatagtaaaacatgtagctgccactggatgtttgccaaaatattcctcagaggcaccagccagatatttcagctctgaaccgtctcttcaggtcgactcgacagaagaaaatgggttcaaggggcatggcatgctggccccattcactgctggatggcagagcaccgatttgcatcctctggttattgacagatctgagggttcttacgtttatgatatcaatgggaagaagtacatagatgctcttgcaggattgtggtctacggcattgggtggtaatgagcctcgattgatcaaagctgcaactgatcaattgaacaaattacccttctaccactccttttggaaccgtactaccaaaccctcattggatcttgctaatgaaattctcagcatgttcactgcaagggaaatgggaaaaatattctttacaaatagtggttcagaagcaaatgattctcaggtaaagctagtttggtattataacaatgcattgggaagacctaacaagaagaaatttatcgcacgctcaaaatcatatcatggatcaacattagtgtcagccagtctatcaggtcttcctgctcttcaccaaaagtttgatctgccagctccttttgttctgcacacagattgccctcactactggcgcttccatcttcctgatgagacagaagaagaatttgcaactagacttgccaccaacctggagaatcttattctcaaagaaggaccagaaacaattgctgctttcattgctgaacctgtgatgggtgctggcggtgttatccatcctccaaagacatactttgagaagattcaagcagtcctcaagaagtatgacatcttattaatagcagatgaggtcattacagcatttggtagattgggaaccatgtttggatgtgatatgtatgacattaaaccagatcttgtctcaatagccaaggctctatcttctgcctacatgccaattggagctattcttgttagtccggaaataacagatgtaatttattcacagaacaacaagctcggttcttttgctcatggatttacatactcggggcatccagtttcctgtgctgtcgccatagaagcattgaagatttataaagaaaggaatatcatcgaacatgttcagaaaattgccccaaggttccaggagggaatcaaggccttctctggaagtccaattgtaggcgagatacgtggtttaggactgatacttgggactgaatttgtcgacaacaagtctccgaatgatccattccctgctgaatggggtgttggttcattgtttggtgccgagtgtgagaagcgcggaatgcttatcagggttgctggggataacattatgctttcgccaccgcttataatgactcctgatgaagttgaagaaattatttgcaaatatggtgatgccctgaaggccacagaggaaaggattgcagagctcaaagccaagaggggttagccattgccactgccgctgtcgttgttgtagtgattgatgatggtgatgacaaattgacaatgttcaatgtatacagagtggtttcatctgtagatgccaataatgaactgtaagcctgaagcttgttctagatgcgaacattgaaaatgatacaattgttatcttcaactgaatattggaatggggaatatggcaattgcttctctcaatc

SEQ ID NO: 27833 - DNA, 1437 bp, Oryza sativa
  ref <308>: DATABASE ACCESSION NUMBER: AK103275
  ref <309>: DATABASE ENTRY DATE: 2002-08-28
cttgaaacacctgcaccttccttgggacgcactgagccactactgcaccgcattgttacatgtttgtctattgcagcttcagcagaaggagaaaatggccaaagcggtcaaccagaagaatcatatattcagccagtcattctccggttactcattgtatggcttgtggattgtgctaatgccgtagattgccttttggaatcagcagtacatctgaactacattatcgagcttgcttcaagtaaacgctacagtgcttgtgttcgtggattggctgccgttgttttaggtgcttgtgtcctgtataatgcaagccgggagaagggccgagatgcctttgctgttgctgatgctataagtcagaagattggcctatccacatacttcttgaggttcgatgagttgcggaaaaggtttgcacattcatcatcagggcagcagaaccgcaagcagctttcacggtcaagtgcaaatagtatgtcagatttccaagagattgaagaggaagaaataaataaaggcgatcagcatccagtcctgtcagaaatctttgattcacattttgttagtttcctcagtaagcttgagactgatattagggacaatataatggatatatttagtcgaacaaagaccgcaactgcaattatacctgctgagttggagcagaagaatggggaagttgatggagaatacatcaagcggctaaagtcatttgtagagaaacaatgcaatgaaatgcaggacttgctaggtcggaatgcaatgctggcagaagagttagtgagaactggtggtggcaactccgctgattccttacagaaaccaagcagtggccgagaaagggtccaaatcgaatccctcagacaagaactcgaaggagcaacccgacgcatagaggcactcagagctgaacatacccagatcgaagccgaagctagcaaccaacgaaacctcgcagcgaaactggaatctgatctcaagagcctgtcagatgcttacaacagccttgaacaggccaacttccgtcttgactctgaagtgaaggccttgcggcagggaggcagtgcaccctaccccgatgtggaagcaatcaaagcggaagcgaaggaggaggcagagaaggagagcgaggcggagctaaacgatctcctcgtctgcctgggccaggagcagagcaaggtggagaagctgagcacgagactggcagagcttggtgaagatgtggacaccttgctgcaaggcattggcgatgacactgctttgccagatgatgacgacgatgaagatgaagatgatgagtaatataatgtgtgtaattctgtcatctcatggtgtaaccagttggggatcatgctgttgtagcaacaactgtacagtggatgatgatatttagacaaaggtttcaagttatttatgttggatgattgaattgcg

SEQ ID NO: 27834 - DNA, 2046 bp, Oryza sativa
  ref <308>: DATABASE ACCESSION NUMBER: AK103276
  ref <309>: DATABASE ENTRY DATE: 2002-08-28
gcggagaagagaacacaaacccaatccagaggagggaggagcgccgccgccgccgccgccgctcaggcgagaggttgccggagccgccgccaccgatgctgcgcgtggtctccaccctccccgcgctccgcccgctcctcgccgggagcacgctcctcctgaacgctagacctctgctccgctcccgcctgactcggcggccgtttcgcgccgtctcgtcctccacggcgtccccgtcgagctccagctccggcgccagggacttcgggggtgtggatttcggcgatgagcgccttctgcggtgcgcggcggcggggagagcgccgctgcgggtggcggtgctggtgagcggcggggtggacagcagcgtcgcgctccgcctcctccacgccgccggccaccgctgcaccgctttctacctcaaaatctggttccaggaagatttcaggaacttttggtctgaatgcccgtgggacgacgatttgaagtacgcgcaagctgtgtgtgacaagattgatgtaccgttggaggtagtccatctatctgatgagtattggaaccatgtggtatctcacataattaacgagtatcgcagtggccgtactccgaaccctgatgttctttgcaacacaagaataaagtttggagctttcttagaagctattgaaaatttgggatttgattacatagcatctggacattatgcacatgtagttcatccatcacctgacgatgttgaagggccatcagtcctccaactttcaaaagacaaggtgaaggatcaaacttatttcctttcacatctatctcagacccagcttagaaggcttctttttccactgggatgtataacaaaggatgaagtgcgcaggctggctgctcagatggacttgcctaaccaagatagaaaggattcccaggggatatgttttcttggcaaggtcaaatttagtgagtttgttgaaagacagataggagagatggaaggagtactgttggaagctgaaactggagactacctagggacacaccgtggattttggttttatacaattggtcagcgacaaggattgcgccttcctggcggaccctggtatgtggttgagaaaggtgttcaaaacaatgtggtttttgtctcaaggaattactactcgctggataagagaaggcggacatttcgtgttggatcgctgaactggtttagcaattctggaccaacaaacaatgagcaacttaaatgcaaggtacgtcatagtcctgaatttcatgattgcaccgtgacacaagagcaaacatcagaacatggagttattttggtggtgcgtctgtctgaagatgatcaaggtttagcagctggtcagtttgcggccttctaccgtgacaatttatgccttgggtcaggcataattctggattcttgggacgaaatgaattttccagtctgtgcaagggctttagaaattgctagaatggaggataagtccagactggggaagccagtaaagataatgaacttagaacatatcgtgaaatcagaaaaggaggctattgaagtggcatgataggcacagtccctgcagccttctcttgagtcttgactactccgtacattcgtggttctgcaaagttgcacgttaaccctgcaaaagcaagaatcgtgttgtccccaggaactccagctggttcttcaaaggaggtatggttggcgagcttgcatttctgaagagggttctctggataaaagaggcggatgaacatcattatccatgcaagaattgacctggcataaattttcagcggtaagctgccgatctggcaggaaatcacacgaagggtctcggaattccactcatgagccaaagcgtctagaactctagatccgatcgtcagttaagcattacagtatcctcttatagcagtgtatcaggagatgctcctttcatgctactactagtaccggttttatttacgttgtacaaatgttaaggttattgtaggcgaacatcgaatggtagaatttctaccattctgatcatatgttttatc

SEQ ID NO: 27835 - DNA, 978 bp, Oryza sativa
  ref <308>: DATABASE ACCESSION NUMBER: AK103277
  ref <309>: DATABASE ENTRY DATE: 2002-08-28
gggcgcaaacagtacacgctctcctcctcctcctcgctgtctcccactcccatcccaatggcggcggcggcggaggacgtggagttcgtcgactacgaccgcgacgaggaggaggaggaggacgccatggacgaggtcgatcggggcggtggccgcggcgggcgcgcgctacccgtaccccacatcgtctcccagggcgtgatgcgctcgcgcggccgcctcctcggccgcagcacctccgtgctcgcctccaaccgcgaccgcttcgactccctcgccgatgccggcaaccccggccacggcccacagcgctctattgaaggatggatactactggtctctggagtcaaagaagacgcggaagaagatgatctgtacaacactttcagtgattttggtcatgttaaggacctacatttaaatctggaacgccgcactggatatgccaagggatatgcattagttgaatatgaaagttttgaggaagcacaaactgcaatcaaagcaatgaatgggactcagctgttaacaaggactgtctatgttgactgggcattcagcagaggtcctatacagaaactcaccagtacaaggccattacatcggcgatctcggactccacctcgcaggcttgctgccttgacatgttgactgggagctactatgtccgcaatcctgaatgttctcggtctgtgttttttgatagatggtacgaacgtagtcttaaccgatgtatggtgtgatatatcttccagatccagcccccctgagtcttgattctgctatccttatatatctgcactaagtttgatcaactttgtttgttgaactatgttctcggttgctggcctgtggtagaggctgttgtactgactgagtacgctagctagaaggtatattgtgtagtgatgacgttgagatggaagtgtctgccgacttaaaagcctactactacattttaaggaaaacaactttcgt

SEQ ID NO: 27836 - DNA, 1200 bp, Oryza sativa
  ref <308>: DATABASE ACCESSION NUMBER: AK103278
  ref <309>: DATABASE ENTRY DATE: 2002-08-28
gagcccactcgccgcacatcctcggcgaggtcgccggcgatggcgccgccaccgccagggcggcagcggctgccctgcgacggcgaggaggacgcccccccccctctccaccgccgccggtgagggcctcctccgtccagcgatcgcttccggcgggacgtacggggcccgccgcgagcctgatatactggctgctgatgtagcagaagaacgttgattcatgagaaagtaatatggcagaaaaggtttgatttcagagaatcgtaattttgggacaattggagctgcatttctcagcgcctcctggctgcagtctctctctgggcattgaagtagacagcagccacaggaaggccaagatcattctcctcggcgaaccggcgggtgttgaaatggtccctgaaggatggcacaattacagtttgcctgcgcttctgcttgaagagcacaaaaatgaacctatggatgccaatgttcggctttggactctcatagcttatgacctcgcgtccttcaatcggaaagtggtacagttgtttattcacaaggagaaactcaatgaataagatggaaaaaaaaactgacacaaattagaggaaggacctaccaaaagaagcatccgttgtcccaggtatatcagtaacaatcctgcgtaaatgttaagaaaaaaatgcttcaccacctgcgtggaagtgtctgcgccctcaaatgttcatctttgcacaccttgtttatttaggtaagccccattcagcgtcctctttttctgataaggaaaagagaatttgatgagtttaattgctgttagattctttccccaaactgtgatactacttggattaccattattatctgtttattctcttctttggaggactatggcaaaacaccatggaagagaataaaggaagggaacgcagtgctgccaccacttcaatgtgtaggggtgctgtctagtgctcagatgtcatttcaatgtttaaagatcatatgttctccttaattgagccattaaaaaaactttctatatttccataagtagtggagccaagtacagctttatgcattcctctgttctggtgtaatgccatcatgcctacttgacactttgagcaactagccaagtagaggtagtggagccaagtacagcttgtgacattttccggttccattctaatgccatgataattgcttgacacc

SEQ ID NO: 27837 - DNA, 3432 bp, Oryza sativa
  ref <308>: DATABASE ACCESSION NUMBER: AK103279
  ref <309>: DATABASE ENTRY DATE: 2002-08-28
ggtcttcttccttcctcggcccggcctcgctcgctgcctgccagctgcagctgcaactctccatccatcgatcgatctcctcctactcccccgccgccgccccgtccaagacaagccaagccagccaccactccctgcatgccatggcctcacggaggccaacgcaccgccaccataccgaggctccagatcctggtggaagagggagagggagaggccgtgccgcccgatatgctcagcctcagcctcagcctcagcagcagcagcagcagcaaggacgaggatgccgtgctagaggtgcctcgccgccgccgccgccgcagcagcagcagcagcaacagccaaggtctactcctactcgtgctaccactgtcaccgtggcttcctcttcatctaccacggccaccgcatcatcaagccctctagctcccgagctgcgccaagcaataatggaagctccccgtcccagtgagctcgctcaaccctcacccactccgcctcaggaacaacctgtggatgccgctaccacgacgccgcaccatattccatcctcaagcaagtcaattaggtttcctttgcgcccggggaagggtaccattggcaccaggtgcatggtcaaggccaatcatttcttcgctcacctgcccaacaaggatcttcatcactacgatgtctccatcactccagaagttacatcacgcattgttaaccgagctgtgatcaaggagctggtaaatctgtacaaggcatcttatctgggtgggaggctgcctgcatatgatggtagaaagagcttatacacggctggcccattgccgtttacttcacaggagtttcagatcactttacttgacgacgatgatggttctggttctgagaggcgacagaggactttccgagtagtaatcaagttcgccgcacgggccgaccttcaccggcttgagttgtttttagctgggaggcacgcagaagctccacaggaggcactgcaagttcttgatattgtgctgcgagagctaccatcagcaagatatgcgccatttggacgttccttcttttcggcttacttgggtaggaggcaaccccttggtgagggattggaaagctggcgtggattttaccagagcattcggcctactcagatgggcttatcactgaatattgatatgtcagctacagctttcattgagccgttacctgttattgattttgttgcacaactattgaattctgacatccattcaaggccgctttctgatgccgaacgtgttaagatcaagaaagccttgagaggagtaaaggtggaagttacccaccgtggcaacatgaggcggaagtaccggatatctggtttgacaattcagccaactcgtgagctaacttttcctgttgatgaaggaggcacagtgaagtcagttgtacagtactttcaagagacatatggctttgccatccaacacacctaccttccatgccttacagttcagcgattaaattacctgcctatggaggtctgcaaaatagtggaaggacagagatactccaagagattaaatcagaatcagataagagctcttttggaggagacatgccaacacccacgtgatcgggagcgtgatattattaagatggttaaacataacgcttatcaggatgatccttacgcaaaagagtttggcattaagataagtgatcgtctggcatcagtagaggcacgaattttaccggctccacggcttaagtacaatgagactggtcgagagaaggattgcttaccaagagttggtcaatggaatatgatgaacaagaaaatggtaaatggtggtaaagtcagaagctggatgtgcgtcaattttgcccgtaatgtgcaggaaagtgttgttcgtgggttctgccatgaacttgctctgatgtgtcaagcctcaggaatggatttcgctccagaacctatccttccaccactaaatgcacatccagatcaagtggagcgtgctctaaaagctaggtatcatgatgcaatgaacgttcttggaccccagcgcagggaacttgatttgcttattgggatactacctgataacaatggctcgctttatggtgatttgaagcgcgtgtgtgaaatagatcttggaatagtttcacaatgctgttgcacgaagcaggtgttcaaaatgaacaaacaaattcttgcaaatcttgctctgaagataaatgtcaaggttgggggcaggaacactgtgctggtggatgctgtgtcaaggcgtattcctctggtaaccgacagacctacaattatatttggtgctgatgttacccatcctcatcctggagaggacagcagtccctcaattgctgctgttgtagcctcccaagattggcctgaggtgacaaagtatgctgggttggtttctgctcaagcccaccgacaagagctgatagaagatctatataaaatctggcaggatccacagagaggaacagttagtggtggcatgatccgtgagctgcttatatccttcaaaagatcaactggtgagaagccccagcgaataatattttacagggatggcgttagtgaaggccaattttaccaagttctactttatgaattgaatgcaatccgaaaagcatgtgcctccctggagacaaattaccaaccaaaggtgactttcattgtggttcagaaacgtcaccacacaagattatttgcacataatcacaacgatcagaactcagttgacaggagcgggaacatactccctggtacggttgtagattcaaagatccgtcatccaactgagtttgacttctacctgtgtagccatgctggcattaagggtactagtcgtccagctcattatcatgtcttgtgggatgaaaacaacttcacagctgatgcattgcagattcttaccaacaacctttgctacacctatgcaaggtgcactcgctctgtatcaattgttccacctgcttattatgctcatctggctgccttccgtgctcgtttctatatggaaccagatacatctgacagcagctctgtcgttagtgggcctggtgtacgtgggccactttctggctcatcaacatcacgtactcgggcccctggtggtgcagctgttaagccacttcctgctctgaaggatagtgtgaagagggtcatgttctactgctgaagctagggcctacatagctaaagctcttcgtttcttggcaacctgcctatgatggttgtaattatgtgtcaaaaaatcccataataatctgccagctgctatcttctccattgtactatgctggtcatgtttgccaaagttaccctatatgtatgtatattatgctattgttttttttttttttgcggggactattgttatcatgtattatgttttactgtcatgtctgtagttatgattcgaggagtttgcg

SEQ ID NO: 27838 - DNA, 3731 bp, Oryza sativa
  ref <308>: DATABASE ACCESSION NUMBER: AK103280
  ref <309>: DATABASE ENTRY DATE: 2002-08-28
gaggaagctgcaagaggaactgaggaaggaagcaagaaagcaaaccaaaccaaaccaaaccaagaagcaaatctcagttgcaactcttgagctcagaagaagttgcaacagaagaaggagggagaagggaagcatctcagctagctaggcaggaagcatgctcctagcctccctctccggctgcggcggcggcggcggcggtcggatctgccggagagcggcggccggggagcccagagctgagagctaaccgtgcagacctcgcggccgcgagatctgaccacgcgactcctcggatcaagcggtgtcgcctcccgcagcagcatttccccccccccccccccccccgaagatcacagcctttttttccactggttcttgctggtcttggaagtggggaaaaaaaattctcatcacctcgtcgatggagaagcttacgacgcttgctcggtagatttgatttttctttttcttcttcttccgggggaagcgtaattgcgaaacagcgaaagaagaagtgttggtgagttggcgaaactgagaaagcgatggtttttgggaaggcgctgtgatttggcctaaaaaggaggaatctttccttcgttctctccttccttccccagcttcgtgcacgctcttatattgcatttcagatcggtcttgtgattggtcttttggagagagagagagagagagaagaaaaatgaggctttcgtcgtcgtccggcagcgtcctcccggctcaggcggcgtcgccggaagctgtagaagaacaaaatgcctgaattcggagctctggcatgcgtgtgccggtccccttgtttcgttgcctgcagtgggtagccgagtggtttatttcccacagggtcacagcgaacaggtagctgcatcaacaaataaagaaatggagtctcagatccccaattatcctaacttgcctccacaacttatttgccaacttcacaatgtgacgatgcatgcagatgcagaaacagatgaggtttacgctcagatgacgctacaaccacttagcccgcaagagctcaaggacccatatctaccagctgaattaggttctgccaacaaacagccaacgaattatttttgcaaaacattaacggcaagtgacacaagtacgcatggcggattctctgttccccgtcgagcagctgagaaagtgttccctccgctggattttactcagcagcctccagcacaggagttaattgcaaaagatcttcatggcaatgagtggaagtttcgtcatatctttcgtggtcagccaaagcgacaccttctaactacaggctggagcgtctttgtaagtgcaaagagacttgtcgccggggattctgtcctatttatctggaatgacaacaaccagcttcttctgggaattcgtcgagctaaccgcccacaaactgttatgccatcttcagtcctatctagtgatagcatgcatattggtcttcttgctgcggctgctcatgctgcttcaacaaatagccggtttacaattttttataacccaagagcaagcccttcagagtttgttatcccactttctaaatatgttaaggctgtatatcatacccgtatatctgtgggcatgcgtttcaggatgctttttgagacagaagagtcaagtgtacggagatacatgggcacgataacaggaattagtgatcttgatgctgctcgttggccaaactcacattggcgttctgtaaaggttggctgggatgaatcaactgccggagagaggcagccaagggtgtcgctttgggagattgagcccttgacaactttcccaatgtacccatctccttttccactcagactgaagcgtccatggccaacaggcttgccttcattacatggtggtaaggatgacgacttgacttcttctctcatgtggctccgagacagcgcaaatcctggtttccaatcattgaatttcgggggtctcggtatgaatccttggatgcagccaaggtttgatgcttccttacttggtctgcaacctgacatgtatcaaacgatagctgcgactgctttccaggacccaacaaagcaggtctctcccacgatattgcagttccagcagccgcagaacataggtggcagagctaatacacttctgccaagtcagattttgcagcaagtgcagcctcagtttcagcagcagcaatacctccaaaacatcaacgagaccacaatccaagggcatgctcagtctgagttccttcagcagcagctccaacgctgccagtcgtttactgagcagaagccacagctgcaaacccagcaacaacagcaagaatcacagcaacaacagcagcagcaatcgcagtgtatgcaagtcccacaacatcagcaaatgcaacagcagaagaacatgaccaactatcagtctgtacctaatgcattgtcaccgttttctcaactctcctctccttctcagtcttcacctatgacactgcaaacagtattaccattctcccagccacagagctatccagacacgagtatgagctcattatcaccatccaacacatccaccatgcataatgcattgaggccattttcatcggaagcaccttcgcacctaagcatgccaagaccgactgcagtacctgtccctgacccatggtcatcgaagcgagttgcagtggagtctttgcttccctctcgtcctcaggttacatcgcagatggagcagttggactcaacagcacctagtataccacaaagctctgcgttggcgccgcttcctggaagaggatgcttggtggatcaagatgggaactctgatcctcaaaaccatctgttatttggcgttaacatagattcacagtcacttctaatgcaaggtggcatcccaagcctccagggtgagaatgattcgacggcaattccttattccacctccaatttcctgagcccgtcgcagaatgatttccccttggatcaaacactaagtagtgcagactgcttagatgaatcaggatatgtgccgtgttcacagaattctgatcaagtgattaatcgaccacctgcgacctttgtgaaggtttacaaatcgggaacctatggaaggtcacttgatatcactagatttagtagctatcatgaacttcgtagagaactagggcgcctatttggccttgagggccagttggaaaaccctttgagatcaggctggcagcttgtattcgtcgaccgagaggatgatgtcctcctcgttggcgacgacccttggcaggaattcgtgaatagcgtctcctgcataaagatactttcaccacaggaggtgcagcagatgggcaagccctttgagcttttgagctcggctcccggaaagaggctaggtagcagctgtgatgactatgtgagcaggcaggaatcaagaagcctgagcacaggaattgcatctgtcggctcagttgaattctgaagcaagggcgctaacgagcccttcaatcaaatctagcctgttacctatgtttctgcagtttttcttcccctagttttgagacctggaactgaaagaacatagatccatgcttagctaagttatgtaccatctaataattatgctatatgatatcaaattccaagtagaaactatcaacttttggtatatatatatataccaaaactttgttccatgaaacactaatcctgtgaatgtaggccatctaaattatcaggctcaccgcgaagtttagc

SEQ ID NO: 27839 - DNA, 1803 bp, Oryza sativa
  ref <308>: DATABASE ACCESSION NUMBER: AK103281
  ref <309>: DATABASE ENTRY DATE: 2002-08-28
gacgagctgcaaaaatggcggcacccgcctcgccactccaccctctcgccgccatagcagcagctctcctcctcctcctcgtcgcagccccctctgcagcagctgcagctagccccgtcttccccggagtccctcccctgcagctgcaagctctgcagcagcggcggccggcgagctccgccggcggcagcaggtatgtcgtcgccgcggcggcggcggcggccggagggaacggcacagcggcggcggcgaagccgttcacggcgcactacttcccgcaggagctggaccacttcaccttcacgcccaacgcgtcggccgtcttctaccagaagtacctcgtcaacgacaccttctggcggcggagcgccgccgccggcgagacgccggccgggccgatattcgtgtacaccggcaacgagggcgacatcgagtggttcgccaccaacaccggcttcatgttcgacatcgcgcccagcttcggcgccctgctcgtcttcatcgagcatcgattctacggggagtcgaagccgttcggcaacgagtcgaacagctcgccggagaagctggggtacctgacgtcgacgcaagcgctcgccgacttcgccgtcctcatcaccagcctcaagcacaacctctccgccgtctcctcccccgtcgtcgtcttcggtggctcctacggcggcatgttggcttcatggttcaggctaaagtatccccatgtcaccattggcgccgtcgcgtcctctgctccgatcctgcagttcgactacataactccatggagcagcttctacgaggccgtctcgcaagattacaagtctgaaagcttcaattgcttcagtgttatcaaggcagcttgggatttgatagatgagaggggatccactgatgcagggctcttacagctcagcaaaaccttcagagcctgcaagactgtgaaatcggtttactcgttcagaaactggctatggacagcatttgtgtacacagccatggtggactatccaaccccggccaatttcctgatgaatctgcctgcctatcctatcaaggagatgtgcaagatcatccacggcttccctgcaggagcagacatcgttgacaaagctttcgcagcggcgagtctgtactacaattacacaggagatcaaacatgcttccagttagaggatggagaagacccccatggcctcagtggttggggatggcaggcctgcacagaaatggtcatgccgatgacgatatcgaacgagagcatgttccctccattcaccttcacttatgaggggaaatctgatgactgtttccagagctacggtgttcgtccgagaccacactggatcaccactgaatatggtggaaatagaattgacctggtgctcaagaggtttgggagcaacatcatcttctccaacggaatgcgagacccatggagccgtggcggggtgctcaagaacatatcatctagtatcattgcccttgtcacggagaaaggagctcatcatttggacttcagatcagcaactaaagatgatccagattgggttgtagaacaacgaagacaagaagttaagatcatacagggatggatagatcagtacaacgaggaccttgcacagatatcaaaatgagaagatgcagttactgcgacagacaatcgaaacatgagactgtctacacagtaatcaactgtttttggctacatggaaaaaataaggaaaaggaatttttctttcttgcaggctgttagacagaaaattaaattaaggtaacatacagtggaaactcaataagtcaccc

SEQ ID NO: 27840 - DNA, 1650 bp, Oryza sativa
  ref <308>: DATABASE ACCESSION NUMBER: AK103282
  ref <309>: DATABASE ENTRY DATE: 2002-08-28
tggaccgttgcaatcgcggcttttctcctcctcctccgccgctaaaaccctcggctcaccgccgccgacgacttcgccgccggcgagcgagaaggcttcgacccaccaaccaagacaagttgtattagctagctagcaagccatggtgagcacccggggggccgcggcgaatgcgcctggtcggagggggcggccgccgaaggctgcggaggaggcggcgaggagccccgtgttgtcgtcgccggtggtggcggcggatgcggcggaggggtacgagagggagagggcggagaggatccgggagaacatggagcggatgcagaagctggggatactcgacctcgccacccgcttcaaccagtccgcgggcggcctcgccgggagcgggagcgggagaggccgcgggcggaggaaggcggccgtgacgccggggtccgtcggcgtggggaggatgatcaagcccgcctcgccatcgcctgctcgtcggtctctcaggctgaagaacgtagagcctgttagctactgtgaaattcggactaaaaaggacaaggacgacaatgaaggtggaaactctgttctaatcgaggctggatcaaaggaagaagtttacacggaagaggatgagaaacttttaggcccttgtgtggaaccctggactctctttgtggatggttatgggaaagatggtaagcgcatctatgatcaagtgaggggccaaacctgtcatcagtgccggcagaaaactcttggccatcataccagctgctgtaaatgccagattgtccaggggcagttctgtggggattgtttgtacatgaggtatggtgagaatgtgctcgaagctaagaagaatcctgattggatatgtccagtttgtcgtggcatttgcaattgcagtatctgcagaactaagaaaggatggtttccaactggtgctgcgtataggaaggttgtcagccttgggtacaagtctgtggctcactatctcatcgcaacacagcgtgcatccccagcaggctcagctgattcaaacaaggtggcagctaccaagtcagaagcctcatccgaatctgaccaggctccagttgctaaggaggatcaagaggatgcagaaatgagcggcaaagctatccagaaggtagaagctgaccaccaagtgaataatccccctgatgacagcgacaatgatgatagcaggagcgaatctgtcgtgacttctgactctcaggattgtcaagtaaatctggacattgggtgtgccactccatctaagccgacgggtccaaagaagaggaagtggatcgaacgaagccccgactgtgttgcgagcagactgaggtcccgttccaacaaatcatgaacagcctgatcttatgggcatgaccgtgctggtgcccagtgttctcggtggtcattaccttttgcgacggacaggtttactggcatgtgtgtttaaagttccatgtccgtgaagtttctagtgcattttgtgtttatagctgaattgcagcatttgattgtagtgctagtgccaactcttttgcttcaaacaatgatgcctatgtgcctatgtctagtgtggactccctattattatgctttctgatgtaagattagtgctccaatgaactgcaatattaataggctatc

SEQ ID NO: 27841 - DNA, 1404 bp, Oryza sativa
  ref <308>: DATABASE ACCESSION NUMBER: AK103283
  ref <309>: DATABASE ENTRY DATE: 2002-08-28
gacccgccgccgccgccgtcgtccacacgacctcaccgccgcctcctctccgctctccggccgccggtcgctccgccaacccgaccctctccccttcgtggtggagccaaccttaaccatcctactccgcgcggggcgaaggcgtccggcggttgcaggagcccgatggacagtggcggcactgccagtcctgccggcgtcgccggcgacggcgctggtggccggggttcggtcttccgcggagatgacgcgccgaagctgctcgccgcgttgaaggagatgaaagaagggctcgacctcgtcaccggcaaggtcaaggcgctcacccgcaaggtcaagaagaaccagctgccgacggcggatgggattgggtacctggaggcaaagcaccacctgctgctgagctactgccaggacatcgtctactatctcctccgcaaggcgaaggggctctcggtggaaggtcaccccgtcgtgcggagccttgtcgagatcaggctgttcttggagaagattcgtcccatagacaagaagatggagtaccaaatccagaagctcaccaacgccgcggatagcggagctgcccaggagaaggtgctaaatgcagaagcaaagagtaaggatcagcctaaggatgatgaagacctactgaagtatcggccgaaccctgatatgatggactctaagatcgatcctgcggggcaggacaacgatggcatctatcgtccaccaaaatttattgctgctaccatggatgatgaggataagcgccataaacaagcttcaaggaaagacaaaacattagcgcgaatggctacagaaagctcttacttcaaagagattattgatgacgctgctgatagacctgaagagttaaaggaaacagcaggtgatgaaagcagggaatttacaaggtatatgcggcagagagagttgcaagagaaacaagaagaggagctgttcactcgagctccgctgacaaaacgtgataagcagacggagaagtggatgagaaaagagcttcacgggctacggggcctaacagatggattcgatcttggaattaacatgttcgtcgatggagacaaggataatgatgtcggttcaaccgaacgccatttcaagagcggaggtcggagaaaacaccataaaggcaagaggaagaggcattagtgaacccacagatggcgtttcacacagcaatgtcacattcaaaaccaaaattttgatctgtgcgaattgagtagtataaatgagtgattttcttcggcatgagagccatgttggttagaatcagcaggttttgtgcatctatctgtcaacttgttcttcagtacgcggttaaaagatattgatcgtcgatacttaagtcaattggtaatctgtcgttatgattttgtttgt

SEQ ID NO: 27842 - DNA, 3082 bp, Oryza sativa
  ref <308>: DATABASE ACCESSION NUMBER: AK103284
  ref <309>: DATABASE ENTRY DATE: 2002-08-28
ggcttcccctgtccaccactattaaaccaacccccaccccttctctctcctcctctaccgtccttcccttcttctctctcgctacctttcccttcccacctcctcctcctcctcctcaccaccaccacgcgcctccgctcgcaagaagcacctccgaccgccatggcgcgcgcgggagctggcggcagtctctccctggaggcatgacgcggcggcgcccgtggccgtggctcctgttgctactactgcgaccaactactgcgctcggtcggcggtggtggtggccctggtcgtcgtcgtagcgcgtcggcggaggcgggagaagaaggagaagggtcgacggggatggcggcggcgatggtggcggcggtgcatggagtggggaggcaggacaggtcgtcgcctggcggcggaggggcgccgcaagtggacacgggcaagtacgtgcgctacaccccggagcaggtggaggcgctggagcgggtctacggcgagtgccccaagcccagctcgctccgccgccagcagctcatccgcgagtgccccatactcagcaacatcgagcccaagcagatcaaggtctggttccagaaccgcaggtgccgcgagaagcagcgcaaggaggcatctcgcctgcaaactgtgaaccggaagttgactgcgatgaacaagctgttgatggaggagaatgacaggctgcagaagcaggtgtcccgcctcgtttacgagaacgggtacatgcggcagcagctccataatccttctgtggcaactacagacacgagctgtgagtctgtggttacaagtggtcaacaccaccaacagcaaaacccagcagccacgcgtccgcaaagggacgcgaacaacccagctggtctactcgctatagctgaggagaccttggcagagttcctgtcgaaagcgacgggtactgctgtcgattgggtgcaaatggttgggatgaagcctggtccggattccattggaatcatcgctgtttcgcacaattgtagtggcgtagcagcacgagcttgcggccttgtgagccttgagcccacaaaggttgctgagatccttaaggatcgcccatcttggtatcgcgattgccggtgtgtggatgtgctccatgttatccctacgggtaatggtggaactattgagcttatctacatgcagacttatgcaccgacaactttggcggcaccacgtgacttctggatactccgttacactagtggtcttgaggatggaagtcttgtgatctgtgagagatcattgactcaatccactggtggcccatcaggacctaacactccaaactttgtcagagccgaggtgcttcctagcggctatttgatccgcccatgtgaggggggtggttccatgattcacattgtggatcatgttgatttggatgcttggagtgtgcctgaggtccttagaccactttatgaatctcctaagatccttgcgcagaagatgacaattgctgcactgcgtcacattaggcaaattgcacatgaatcaagtggggaaatgccctatggagggggccgtcagccagcagttctgagaacatttagtcagaggctaagcagaggcttcaatgatgctgtcaatggattcccggatgatggctggtcactgatgagcagcgatggtgctgaggatgtgacaattgcttttaactcatctccaaacaagcttgttggatctcatgtcaactcctcccagctgttttctgcaattggaggcggcatcttgtgtgcaaaggcatctatgctgttacagaatgtaccacctgctctcctagtgcgatttttgagggagcaccgctctgaatgggctgatcctggtgttgatgcttattctgctgctgcgttgagggctagtccatatgcagttcctggtctgcgagctggtggttttatgggcagtcaggttatattgccacttgcgcacaccttagagcatgaagagttcctggaggtcattaggcttgagggacacagcctctgccatgatgaggtcgttctatcaagagatatgtaccttctgcagctgtgcagcggtgtagatgaaaatgctgcgggtgcatgtgcccagcttgtctttgcacccattgacgaatcttttgctgatgatgcaccactgctaccctcaggcttccgtgtgataccactggatggcaagacggatgcaccatctgcgacacgcacacttgacctggcatctactcttgaggttggatcgggtgggactacacgggcttctagtgacacctcgagcacctgcaacacaagatcggtcctgaccatagctttccaattctcatatgaaaaccaccttcgtgaaagcgtagcggcaatggccaggcagtatgtccggaccgtggtggcatcagtgcagagagtggccatggcaatagctccttcacgtcttggtggacagattgaaacaaagaaccctccaggatctcctgaggcccatacgcttgcaaggtggattgggaggagctaccgattccacactggagcggatctccttcgcacagactcacaaagcacggattcttccttgaaagcaatgtggcaacactctgattcaatcatgtgctgctccctgaaggctgctcctgtgttcaccttcgccaaccaagccggcctcgacatgctggagacgacgctgattgctctccaggacatctcgctcgagaagatccttgatgatgatggccggaaggcactatgtacagagttccccaagatcatgcagcagggtttcgcctacctcccgggcggcgtgtgcgtgtcgagcatggggcggccggtgtcgtacgagcaggcggtggcgtggaaggtcctgagcgacgacgacacgccgcactgcctcgccttcatgttcgtcaactggtcattcgtctgagaaccaccctagtagaatcgatcccccctcttgtttgtctgtcctaaagaccttatgtagtattgcttttgtgtatcatcaccatgaacatgtcaagaacctccccagtttctatcatcatgaacttccgtttgaatctagtactgctaaatgatct

SEQ ID NO: 27843 - DNA, 812 bp, Oryza sativa
  ref <308>: DATABASE ACCESSION NUMBER: AK103285
  ref <309>: DATABASE ENTRY DATE: 2002-08-28
gacgtacgtacggcaatggagtctacgctgatcacgatcacgagatcgcccatcctcccctgtccattctcgagacggcccgcctcgcccgcgcgctgcttcgccggagctcgccgtagccgctgtgccgccgcctccgcttcgttcttctcccccgccggtggccgcggcggcggggatgcaggggcgggctcctcgctctcctccgccgcggccgcggccgcgctcggcgaggcggcggcggcgggtggcggcggatccgactccgaggccatcctgctcagcgtccaggggatgatgtgcgatgggtgcgcggcgagcgtgaagcggattttggagagccaacctgaagtcacttctgccaccgttgattttaaggaagcaaaagcagttgtcttgacaacagctgaggtcaaggcggctgaagattggcaaaagcaatgtggagagaaactggcaaatcacctgggcacctgtggatttgaatctcgccttcaagagtaaggagaagccaaatgaagtcaatcatggagatcgaagatgaagtgcagctggagacctgaagttctgtcctagggccactaatgagtgcaaggccaagtagaagttgccatgctggagaactcagcagttacagcgtttctgacattctgtgctttgtgctatgagctaaatcgaagtgtcaggatgctagcctcacattcacatttcccttgctcgtgaacttttagaaggttcatttggaggaaataaaaagaataaaaacatgaccaatcacaatgcaaggatcttgtaccccagcttctctcttc

SEQ ID NO: 27844 - DNA, 1787 bp, Oryza sativa
  ref <308>: DATABASE ACCESSION NUMBER: AK103286
  ref <309>: DATABASE ENTRY DATE: 2002-08-28
gagtcaagggtttaacccgtcctgcgacgcggagcaccggccgccgctcgccgacgcaagacaacgacgatgccgagcttccctccgcccggcgccgtcaccatctgcgagatcaaccgcgacctagttgcggcggatgcggtgtccgacgatcgagccaaggatgcctacggggatgtcctcggaatggtcttcagcccgattcctttccagccggatgcgattgttgccacccacgagcctcctgctgccactgaagctgctgagcctgctgagattgtccccagaacaagtttagcttccaccatagctgagtccttcaaacaaatgatcttcccttcatgcgatccaaatctgctacaagaaattgatacccagaaagtaagttggaatccgcacaagcattgcttggcatttgtatctgggaagaaccaagttacagttcatgactttgaggagccagataataaagaatcctacattctaacaagtgaccatcaaaaggatgttaaagctgttgaatggaggccaaatagtggaaagatgattgcagttgggtgcaagggagggatatgcctctggtcagcatcatatcctggcaacgttgcatctgtgaaatctggtgtcacctcttcttcctttggtgcctttcctagaggttctggtggtcaatggatactcgtggacattctccgtggttcttctgctgagctagttagcgcactttgttggaaacctgatggaagatacttggtgtccgcctcttgtaatagcccatcattcacaatttgggacgtttctcaagggttgggaatgcctataagacgtggattaagtagtatatcattagtgcagtggtcacctagtggagattaccttttaactgctaagcttgatggaacttttcacttatgggaaacaaatacatggacgtcagaaccatggtcttcatctaatggatatgtatctggagcaaattgggatccagaaggccgtattgtgttattgtccttttctaactcaacaacactgggctcaattcacttctcatcaaaaccaccatctttagatgcccatctcctaccagtcgaacatcctgaaatttcctctctgattgtcagccgaggcatagataaattagcatgggattcttcaggagagcgcttggcattatcgttcaaagatggcaatgaaatgtatcatggccttgttgctgtctatgatgtgaggagatctccacttgtctcagttttactagttggattcattagaggacctggagaaggagcaaagccacttgcatttgccttccatagcaaatttaagcaaggaccattgctttctgtgtgctggagcagtggctggtgttgtacgtatcccctcatacttcgcccgcattgactccctaaaaggagtaagtaaggtcaagagatgattggcatgctattgaattatcttttcagagagatgcattctctaggtgcctcaaaaatgctgctatgattgttatcctcttgtatgtaaaattcttctctctggaagcggtgctattcaatggaggcaaaaatagaaaaaaaaattctgaaatgtatttggtagcattacaaatgtctgtattatacttatttggagggggaaatgtattgtctgcgcttgtgtttatgcagttccccaaagcaaggacaccattgtcttaccatgtgtccttttagtgcatgattactgttcattaattggctgcactattgcatggtaagaaaccttgaatgaaaggtttaatcagttcc

SEQ ID NO: 27845 - DNA, 1521 bp, Oryza sativa
  ref <308>: DATABASE ACCESSION NUMBER: AK103287
  ref <309>: DATABASE ENTRY DATE: 2002-08-28
gtggatagagccattaaggcatccaaccatcaagtcaaagttcctgatggtgaacactcttttgaaacctatgagaaaatgaaagaggagtttgctgtcttgtcaagagatgagaagatgggtgtgctagacagttctgctcctgaactggttggattgttgtccgagctaaaagatgcccatgaagaactaatggcgataggaccagtcaccaatgaggtgacagctgggcgaagcaaggataagggtaaaatgcagcctttggaagtgaaacgagcttgcctagctgcttattgtcaggctataaccttctacctccttatgaaagctgagggattgtctgtgcaggatcatcctgtaattgctcgtcttgtagacatcaagagtgtagtagaaaagatgaaacatgccaatgtaaactttccaagacaaaaagaggacagtgatgactattgtatgcctgatagcaatatcatggatgtggcagacatgatttctttggacaagaagaatatatatagcaatttactactacgagacaaaggtgtggaagttgcagagttgacaaagaatgaccactctaacaaggatcaccatgaaattgccaaaagaaagggcaaggatgagcatattggttcgcaaagccttgaaatgttgaaggtgagagcaacccttgaagagaggttaaaagaaaaagggctctataatttgacgcgattgaaacgtaagaaggtttcaaacaccaggacaactaatagaagtgacctgcaaacgttggatgattttgatgatgaagtgctgaaaaatactcaagccatcaaacctagtaaggtcctggtagctgcggcaaaatccaataaaaacaagtttgtctctggtgatgacgagcttccaaagcgagatgatattggtgaaagacgacgaaagcacgaattacgtgttcttgcaagagtaggagctagtacacttgaagatgatgacttgccagaggaagatgatcatactgaagagagacctaatcaattaagtgaagaaaatggcagtgatgatgacattggaccatcagagtctgaagatgagttttacaaggatgttaaaaggcggaggactgaaaagctctcgagtaaagaacagaaatactcgccgaaccctgttattgaatcactggaggaagaaactgaaggagatggcaagaggaagatctcataccagatggagaagaaccggggttgactcgctcgagaaataagaagcttaagaatccacggaagaaatacagggttaagcatcaaacaaaacttgttaagcggggaggtcaagtgcgtggcgtgaagaagccctcaggaccatacggaggtgaaatgtctggtattaatccaaatgtgagccgtagtgttaggttcaagggctgatgtatcgaattgattacgcccaacatggaaatttttgtttgatggtaggaagtttcatggttgtaatttgccagtaacagttttgcctagagagagagagagagcatgc

SEQ ID NO: 27846 - DNA, 3346 bp, Oryza sativa
  ref <308>: DATABASE ACCESSION NUMBER: AK103288
  ref <309>: DATABASE ENTRY DATE: 2002-08-28
gtccagtttgttcagcaactgcccccttctcttccgactgcactgatccgcccgcccttctctcgctctgctttcgtccccccccactggccactctctccccatttgcgggaaaagccgacacctagacggaaagggcggagcggcgaagagaggggaggagggatcccgccttttccgtcggatttgacggccccccgcgctctccctctctctgtctctctctctccgggagcgagccagccagcagcaaaagccgaccaccaccatcgccacgcacccagtatatcacaccgcgcgcctggggtcgtcaacggctacctgcgccgcggccccctcccatggaacagcgggaggcgcggcaagaggaggaggaggaggaggagcgcgacgcgccggcggttcctcccggggaaaacgacgaggaaagagatcgaaacctatcctctcgtgtggtttctttgttatttggtggtgatatctcagcgcagacattcgagaaatgggtatcattggtacgtaaacgaagtggggcattccggccatcagggttcccacgccggaattcgaggattgaagtcatgccgagtgggagtttctcacttttcagtgcagcagacttaagtgagcaagtggttacagcagagctaataggcaaagaagatataccattgacaagcagtcagcctacagaaataagtttgtgggagagacttggaaatgcttctgcactagatattgaatcacctgacttttcatggaatatgctgtcatctctgcaccatacagagcatagtagtagttcggaccactctgaagatgaaatgtgcaaacctcttgaggtgactgtgaactctggtggtgtagtgttctttgctctatttaattcttcaagtaatgtcttaccaaaagaagcagctgctgttataaagttctcatcatcaaagatgtcaactcaggcagaacggttgggttatgaatttgctagattgcttggagttcagacaccacaagctagagtggtacacaattctagcctagagtggcaggatattagaaaggctgcagaaaatgcacgatcagtagcagtttcaaatagtgatgaggttggtgagatgacatgctcagaattgttggaagctcttgagctaagccgttgtcttcttctaatgagttatattcatggatctccccttcttgagagttcaaaggcatttagtccacgggaagctgcttgcgttactgcttcatcattgggtagggtcttgatgctagatctgatactcagaaatgaggacagactcccatgccgtcagcttggttggcgtggcaatcctgcaaacctgatgatttccgatagaccttctgcacccagtgtggacagattggatgattccaagtgcactacagaaagttctattccaacgattactcaattggtgcagagtgacaagcggactcacactgcaaatgcaaccataaattctccagaattggtgtccatgtcaccaaaaccagatgcattgaaaagtgtaagaggaaatgctgatagtttggatggccctgtccacattgtagcaatcgacactggagtgccacgtcgcccccctgcagggagacgggtgaaagatcatgagcgttatcccaaagttgtgcagcttatgttgaataattcagattactcctcgaatatattgtatgagatttctggtggtaagctagggactccaggacctgatgaagcaatcgctttcactgattcttgttgttccatttctgatgaagacaatactgctgcgattcatgaattccgaggggcatttcgtgcagctctgagggatcttgaggggttccatctatttcttctccagctataccaaaaactagatggtgttttgcgagttttcttgtccatagttactaaaggctctgaagaatccgacaacaatgatgctacagttcctgattttccatcacccggtgctaactacagtactccttgcgctcctagtaagcagcagaatagtgaattgcacggtgattctgaaatactgaaatcaacgacaaagccttcttctgcgggatcccgtggaagctcagactcagtatctcctctgtccagggagagttggagtaataagtatttcaaagggagtgcagagggtccccgaagtttaagaatgacaatgaagctccgtgatttttacaagactccgaaggttgatcctgaattagtcaaagaaatagaacaatggaatgaggcgcttaagtctgatgtgatcaatttttgcgaggagaacaattttcattctggattttttgatggcaatgagaataacatggtagctgatgcatatgaattgaaggtgcgtctagaacacatcattgaaaggatagccttggtctctgacgctgcaaataccgagcgaccttctcttgttatcaacaacttgttcataggtggggctctggctgcaagatctatgtacacccttcagcatctgggcattacccatatactatgtttgtgttcaaatgagattggtcaatctgattcccaatttcccgatctttttgaatacaagaacttttcaattagtgatgatgatgatgcaaatatcagtgatctttttgaagaagcctcagattacttcgatcatgtagatcatgttggaggcaaggttcttgttcattgctttgaaggaaaaagtcggagtgccacaattgtgcttgcctacctgatgctcagaaagggcctcactcttgcgaaagcttggaacttactgaagaaagtgcatcgtcgggcacaaccgaatgacggtttcgcaaaggctctgctagcgcttgacaggaagctgcatggaaaggtgtctatggattggcagcacaagcgacctgagatgaaggtgtgcccaatctgcagcaagaacgtcggactgagcacgagctcactcaaactgcatctgcagaaggctcacaagcggctatctgcaggtagtgtggacagcgccatgaccttggagattcagaagtcgatccagtcgctccggatcagccgcggtgggagcctgagcccttctcagaagcttaccaaggcgttcgctgatgagctcagcttctgaatctgttcttagtagttttttttttctctctcgaggatgctagtgttgtggcagtgtggtgatgtgcacggtacacgttttcaaaccgatgtaatttagcggtagatgtatcaagcagaccgaactttaggtgtggacagaataggtgtgatacaaggaaatgttcacttttaactgtatacaaccagtttattagcaggagaacgtttaggttttgtaatacc

SEQ ID NO: 27847 - DNA, 2313 bp, Oryza sativa
  ref <308>: DATABASE ACCESSION NUMBER: AK103289
  ref <309>: DATABASE ENTRY DATE: 2002-08-28
gacgcacgaaatatcccactcgcttcgacactctcttccccttcttctcccggagaaaacctcgagccaaggccccgactccgactccggtgatgtcggcggcggtggggggagccgagttccacgggttccgtgggggtggcggcggcgcggcgcagctgcagaggtcgcggatgctcggaaggccgctccgtgtggcgacccctcacgcggcggcccccgctggcggcggcgggtcgtcgtcggccagcatacgcgccgtctccgcgccactcaagaaggatgcatctgaagttaagaggagcaaggttgagatcatcaaggagaagagcaattttcttcggtaccctttgaatgaggaactggtctcagaggctcccaatattaatgacagcgctgtccagcttattaaatttcatggaagctatcaacagacggaccgtgatgttcgtgggcagaagaattactcgtttatgctccgaacaaagaatccttgtggaaaagttccaaaccagctttacttggctatggatacgctagctgatgaatttggtattggaacactccgattgacgaccagacaaacatttcagctgcatggcgttcttaagaagaacctgaagactgtcatcagcactgttataaagaatatgggttcatcattaggtgcctgtggagatctcaacagaaatgtacttgcacctgcagcaccttatgtcaggaaggatattctttttgctcaagaaacagcagagaatatcgcagctcttcttacaccacaatctggggcttattatgacctgtgggtggatggagaaaagataatgtcagccgaagaacctcctgaggtcacgaaagctcgcaatgacaacacatatggaacaaatttccccgattcccctgaaccaatatatggcacacagtatctgccaagaaagttcaagattgctgtcactgtcgctggagataactctgttgatattctgaccaatgacatcggtgttgttgttgtttcagatagtgcaggagagcctgttggcttcaacatttatgttggtggtggcatgggtaggacacaccgagtggagaccacattccctcgattggctgatccactgggttatgttcctaaggaagatatattgtatgctataaaagcaatagtcgtcacacagagggaaaatgggagaagggatgaccgccgatatagcaggatgaagtatctgattgataactggggaattgagaagtttcgggctgaagtcgaaaaatactatggaaagaagtttgaagattctcgtcctttgcccgaatggcagttcaacagctacctaggatggcaggaacagggtgatggaaaattattctacggagtgcatgttgataatggtcgtgtcgcagggcaagcaaagaaaactctacgagagattattgagaagtacaatttggaagttagcattactccaaaccagaatcttatcttatgtgggattgatcaagcatggaaagatcccatcacagcagctcttgctcaatctggcctgctggaaccaaaggatgttgatcccctgaatattacttccatggcatgtcctgccttaccactgtgccctctagcacaaacagaagctgaacgagggattctgccgattcttaaacgaattagagcagtttttgataaggttggcatcaaggaccatgagtcggtagtggtgaggataacaggctgccctaatggatacgctagaccatatatggcagaggttggctttgttggtgatggcccaaacagttaccagatatggcttggaggaacaccaaaccagagtaccctagctgaaacctttatgaataaagtgaagcttcaagatattgagaaggttttggaaccattgttttcctattggaacagcacacgtcaggaaggtgaatcttttggtagcttcacacgccggacgggatttgacaaattgaaagaggtagtgaacaagtgggcagagtcagcatcagctgcatgatggactgctttcgctgaacaagttgataacaattctgaccacgggtccaatgcgggcatcgtcaagggctctcaacataactatgtgagcattgcaggagaaaattttgtcaatttcgttgacaagattgaggactcgccgactcgggtttggaatcgttcgttcagataattaatcaaaatttttcgtgtactctggtttgagaaaaaaaaatgtgcttatgagaaaacaaaaggaaccctggctgtttactttggaataaattgcttggaaagtgtactgaataaatttttcc

SEQ ID NO: 27848 - DNA, 2148 bp, Oryza sativa
  ref <308>: DATABASE ACCESSION NUMBER: AK103290
  ref <309>: DATABASE ENTRY DATE: 2002-08-28
gagtagagagtagtcactcacaggagagaggagaggagaggaggctactagagaagagaagaggagggtggattggatcatccattccattcctccgcccaaagcctctcaagtctcaagcccttaccaaagaatccattccgctccgatcgatcgatcgatccccacttttcccatccaccaatccaaaccctagcttgcgctcaccatgtccacacccttcgacctcaactccgccgctgacccccaaaccctagcgccgcccaagcgtggccgcggccgccccaggaagaatcccccaccgccaccgccaccggctacggatccgaatcctcatcctccatcaggagcaggagcaggggcaggagcaggagcaggtgcatgccccttcgcccccggcgacctggtctggggcaagaagctctcccacccggcctggcccggcgaggtcatctccgccgcccccaccggcgcccagctcctcgtctccttcttcggcgacaaggccctcgcctggtgcgacgccgcccagctcaggccctacgagccctacttccccgtcgccgagctctacgatggcgaggccgacgacttcgacgccgccctcgatgcctccctcctcgagttcgagcgccgcgttgagcttgccctcaccgctcccggccgcatcgcccgccccttcctcccccgcgatttcatcgccctgctgcacgatttggccgcccaccgcatgggcttctccaaccgtgtccacgccgccgtcgctaaggcgcatctcagagccttcgacaagttcaggggcctacccgaccctcccgagtacaccctccacctcggcctacccaatgtctccgccgccgcagccactcccaacaactgcaactcctaccccccatccaggaggagggggaggaagaggaaggaggtggaggaggaaatcctcgatgactccgatgaggattgggacccacgcaagaagggtgccactgactccgattccgaagtcgatttcgaccgcaagagggtctccaagggcggcaggggcagcggtgcaccacgcgggaggccacgcgggaggcctaggaaaaacaatgctgggaggcctgcacacctcaaggacgaggacgaggtgatccaagaaacagtggagtatcaatatccaccagccgctgacatgtttctacagcttacatccgttgctgctgatccattcaacttcaagggctatgactctgtgcctgtcattcttagcttcttctcaaaatacaaggactcagaagtgccggccacatacgacgacaaggagctgctgcagacattgggtggcaagaaaggtagaaaaaatacggccagaagcttgtacccagctgcaaaagaagaaggtgacttagaggtggcggatggccataggggtcggaggaagtcagcagggagtatctactcagcaagaaaggcagaagactcatattggtgtgatattataatcagtgattttgatgatggagacacatcaagtgactatgagggccgcaaaatgaagcggctgtctcagaacaggagttttaataagaagatgaagcaggaggttgcacctcaagatgaggcctctgctgattcacctgctgtgaaacaggcagatggaccggcagctctgatcttacattttagtaatgcagaagccatcccttctgtggatgacatcaatagtatattccgtatgcacgggccaatcatggagggtgcgactgaaatcaacaagaaatcaaagatcgcaagagtagtgttttctaagagtgctgatgctgaacaggcatatagcagttcgggaaagtataatgcatttggtccagcccttctcaggtatgatctcaaatacctgccaatggttcctcaagttccttagatggtgcaggctaaactggatatgtcgccatttggagggaaatgcgtaatgaagactggagctaagggatcataagatgttcgcgttactgacttagagctaggaatgcccactggccaggccggacgacttgttcgctggtcgagtgagcaattttttaggttttatctggttaaatgcattccgaggactggttgtgtacttgagttcagaggtagtttatattattaaattatttagatggc

SEQ ID NO: 27849 - DNA, 1331 bp, Oryza sativa
  ref <308>: DATABASE ACCESSION NUMBER: AK103291
  ref <309>: DATABASE ENTRY DATE: 2002-08-28
gacgcaccttcatcttcgctctcgctttcccgtgtaagccggaggaacgggcggccggccttctctccccgcgagtccgcgaccccgcacgcgcggccggcgagcaagcccagaggcgcgtcgccgagcccgacctagcatcctcggttggcgcggcctactcgagcggcgcagggccagcgagagctcaggttcggaggggggctatgcgggaggcatccttccaccgccgacctccacctcggccggaatagaactgaaggagtcaaggtatatcagatgatggatctgtccacgacttcagtagtggctgctaaggcctacaagtacagagcagaatcacttgttaaggactaccttcttgcagattgttatgtttcatacactgctgtgcttggtgggatcctgatgtgcaaaatggtctatgacatcacacacttaatcagttcattgtactacaagggttatggttctcttacgaaaatccaaaagcttgagtggaacaacaggggcatgtccactgtccatgcaatgtttatcacattaatgtcagtttacctagtattcttctccaacctattctctgatgagctggatggcccagtaacagttcggagttcaaacctctccaattttacactgggggtttctctggggtacttcatcgctgaccttgctatgttatcctgggcttatccttcccttggcggaatggagtatgttcttcaccacttgctgtcaattatttctttagtctatgctatttattctgaagaaggacagttgtacacatacatggttctcatctctgaaacaaccacacctggaatcaacctccgatggtttcttgatactgttggaatgaaaagatcgaaagcctatcttgtcaatggtgttacaatgtttgttgcatggctggtggcaaggataattttgttcatctacttgttttaccacatatactttcacattgatcaggttaagcagatgcgcacctttagctgcattctgatattcgctgtgcccacaatactattagtgatgaacacagtgtggtttgtcaaaatcttgagaggtctcaagaagacgctagccaagaggcagtgaagagtggtgaattgctcataggcgcatctacaaccatcctttcgtacagtcacatacaactacatatattttctacgttaagctttatagtgcaactcatagcgcaagcaaaagatcccttgtacacatgttggaaaaatctcctcaacattgccgaaaatttttgtccctgtacggttctacattgtacatatatatatatgcacgtctagttatggctgagg

SEQ ID NO: 27850 - DNA, 2371 bp, Oryza sativa
  ref <308>: DATABASE ACCESSION NUMBER: AK103292
  ref <309>: DATABASE ENTRY DATE: 2002-08-28
gattatttcactatcatttccccaatctccacctcacctgagccgtcgccggagctccggcgaacccacggcggcgggcgggcgggcccgagcttcgcagatgagtggcgtgaggagggcagcggggcggcccaagatcggcgacctcgcgaccagcgacgtggtggtgcggctgcggacgccggagggccgcgacgagtggctctactgccactccggcgtgctcgccgccgggagcaggtacttcgccgaccgcctctccgacgactggcccacgtgccagatcctcggctcccgctactgcgtcgaggtccactgccaggagctggacctcagcccccacgtcaccgcgctccgcctcctctacgccgccgagccgtgctcccgcttcggcgtccgcggcgcgctcggcgtcctccaggccgccgcccacctcgcctgcccgcgcgtcgccgccgcctgcgtcgactacctggagtccgcgccgtgggacgaggccgacgaggaggagatcctcaggaccatcccttgcctcggcccccagtacgagtgcgtcctcgcgcggctccgcccgatcgatcccgcgccggtggccggcatcctcctctcggcgttccggcacgcgacgtcgacgcgctcgccgccgcaggagctcaagtccgcggctcaggagcagctggagtacatgctcaccgaagacgacgacgcgccattgttagccttcgatgatgacattgtcaggtctcaagtgaaggattgtgttgcagctttgctgagcaggttcagtgggttcacgagttcaatcctgatggaacagggagaggcgcctttaggccacggcgacgccgaggttcagcaggagctgcattctcttgtttcagatatctcctgggtctgtcagatcttgagcaagctggagatgatgaaatgtgttgttgtttactggattggggtttcatccgatgtcgttgaagctgtcgacaaagcttgtgggggaatcagctgcctgaagactagattgaaggtgattgaggtgtctgcaaaggtcctggaggcgattgcatttggcaacattgttctcccaaccgagaaacgttgtgatgctgtcaatgtttggattggctttgcaaggagaacaaagcctttggtcggacatcccgaacacgatgacgatgacggtgatgctgaagcacctaagatcaacctagacagtgaggtctggcagagcctggaatcagctattgtttcaattgtgctaacgctaccgtcgaacagtcaagctgacattttgtcagattggcttcagtcgaagcatgctaagtatccagacttgacggaggcgtttgaagtgtggtgttatagatcaaaggctgctaagagaagactctccttcttgagccatgccaatagggtatcttgattcttcacttgtccttcaaaatcaaacacaggggaaatgtcctggctgtttgtactcactacaggcagcacagagtgcctttgaccgacatcaaatatcatgaaattccaatttgtccttccttttatcactgttgtcatcggagttgcttgagtatatcactgttgtctaaaatgatagataaacaagatgccataacagtttggttgacaaaaaaacagtgagaatatatgttccaaattccaacaagcatatttccacatggatagcagcttctggaaggatatctgggtaggaaaagtacctttaaatcttgtgttggcaaatattttctcaacatgtgagggtcctgatttaaggtggctgaatgctgggacgatggctcttggagcataacttagaacctttggacaaatagttcatgtatgcttgcactcacagaagcggctaatgtttgcatgatctagctttgcaagtcttgaattatctacttacaagttacttggaaggttctaagttgtacaatcagccggccacatatatcttcctttgctacatggttctttaataacctgttcatccgctcaggatttcagcagcttattgaagtcttcttgaaggaaccgaagactgtccaaaaagaaagaaagaaagaaagaaagaaaggaaggaaggaaggaaggaaggaaaaaacagttgctttgggaaggacaaagagagagctctggcaaagctcaaatggcaacagaaatgccgaagactgaacaagagttctgtcaggctttgcatggcacctgaagacttagctccttttttttttttttgagatggtagacttagcttatactattttgtaaaccatctgaaactgaacatgagcaccaaattaatcgctgttctgtctctggtgtacattggcatgtggagttatggagtttcagattcattcct

SEQ ID NO: 27851 - DNA, 1791 bp, Oryza sativa
  ref <308>: DATABASE ACCESSION NUMBER: AK103293
  ref <309>: DATABASE ENTRY DATE: 2002-08-28
gcgaacccaactgcaaaaggcgccatttttttcccctctttccctcgtcttcttcctccaaatccttcgccccctcctataaatccacctcgcgcaaatccaaatccaaatccaagctcggagaagagacctacctacctacctacctactctaggcgggagagatggtggggaagagcggggtggcggaggagggcggagcggcggcggcggcggcggtgaggaggtgggtggaggccggcggcgggaggctggtgatggacggcgggctggcgacggagctggaggccaacggcgccgacctgaacgacccgctctggagcgccaagtgcctcctctcctccccgcacctcgtccgcaaggtccatttagactacctagaagcaggtgcaaatatcataatcacagcgtcataccaggctacaattcaaggctttgaatccaagggattttcaaaagaacaaagtgaagacttgctcgcaaagagtgttgagattgcacgtgaagcgcgtgacatgtttctgaaggaacattcagatcgtcccatacaacatcctatcctggttgcagcttccattggaagttatggggcctatcttgctgacggctctgagtacagtggggattatggcgaagctggcacgttagaattcctgaaagattttcataagcgaaggctggaggttcttgcggaagcaggtcctgatttgatcgcctttgaaacaattcccaacaaattggaagctcaggcttacgttgaacttcttgacgaatgtaacatcagtatccctgcatggttctcatttaattcaaaagatggagttcacattgtgagtggagactcgttaattgaatgtgctactattgctaatgggtgttcgaaggttggtgcagttggaataaattgcacacctccaagatttatccatggcctgatactctccattcgaaaggtatgtagttgtacatgcttttcaggttctgaaacatgtttgagctcagtgtcctatgtcctggtgaaagaatcatgtttcctgcttgtttgtgcttgtacaaattatataaaacatgctgattgagcaagccgtatatctcttcacttgactacttgcgcattatcacaggtcacagataagccaattctgatatatcccaacagcggagaaagatatgatgctgagaaaaaggagtgggtggaatcaactggcgtgtcagacggtgattttgtttcctacgtaaacgaatggtgcaaagatggggctgtcctcattggcggctgctgcaggacaactccaaacaccatcaaggccataagtggatcacttaaccaacgccactcttcgctgcatttacctgtggcatagagttgcacgctccttcaggtgtgctactcatgctggtacctgaacctgatgaacatatcctggaggtccttactagcagcatgatgttctctgctgcaaatgagatggctctgcacttacacttgcgaataactgtgcgtttcgtctgagttcttaaagttgcccaatctggaggtacaacctaccaagaaggattagcaagcagaaaacagtgatagtgaactgttctactaagtaagtaacaagtgagtgaaaacaatctgcggcaaagttgatgaagcttgtaagctatcaagagttgttgtgcagacctgagcctgttataagagcctatgttgtgtactactactactgctgtactactactaccctgtgaactcttgttttgctatacaagtctataacaataagttttgtttgttaatgg

SEQ ID NO: 27852 - DNA, 1361 bp, Oryza sativa
  ref <308>: DATABASE ACCESSION NUMBER: AK103294
  ref <309>: DATABASE ENTRY DATE: 2002-08-28
gggccatgaacaaagttttcgctttttttttatgcgggagagatggggatgattatgcttgaggggggatcttgagcgtgtgtataggatcgagggttttgaacctgatttctgaaagcgcctggtttgtgaggctcaagagtctctgctttttgccggtttgagcttttaacgaaagaggcgatgggctctgttctgctgaattagccacctcgaggatggggaggttgaaggattgaagctctcttttcctttcgcagaaggtgtaggatcctgattttgttcttgaggtatgtcctcaaccagttcttcacagccaccagcatcgtcagatagagaatctacaccagccagtgataatgcaacatctcctgattcagatggcacgaattctgctggacccgcaagaagcagaattgcactgcagttggatcagcggtcattgcatttttctgttactgcttgggttcttattgttgcattgattggaatccttccactgacaccacgacaactgcaatataagggatatcgtttgtcacttctcggcacaacctgcaccacaggctatgctttgtttgctttttatcggctaccaagagcaggaaacatgcatgctgctcagatctttcaccatgtagcttcgtcaaaggattttataccattcatgtactgtcttatgtttgtcatgtctaaactgcacttgaagcttgttttggtaccagtgatttgctgggcacttgaacatgtggccagatttctacggcgccattttactaattcctctctatacaggacatatctggagaaaccttgcacatgggttgagacaaacacaactgcagtcaaattcctgagttcaaatgcggagattttgttgggatttcttttgattttgtctctgttctcgcgacaacgcaatcctatgcaaacgttcatgtactggcagttactgaagctcatgtatcactctcctttcactgccggttatcacagagctatctggcttaaaattggccgtacagttaatccctatatccatcgctacactccttttcttcatgacccgataaatgctggcatgagatggtggttcaggtagcatggatatggctcaattaatcatgtaaaggtgtttttggttacagttcacagttaacacatggaggatcttttcagtaagttgtagtttgcgagcgacatgtttagtaccttttcttttttgcgatgttgcgctgatattacttttagttactgacaagtaattcttgtaactttaccttgactgtagaactagtgtagaccttagtaatatggccaataccatgaagtgaaaaatggaaaagcaatttattactatg

SEQ ID NO: 27853 - DNA, 1317 bp, Oryza sativa
  ref <308>: DATABASE ACCESSION NUMBER: AK103295
  ref <309>: DATABASE ENTRY DATE: 2002-08-28
gactctcatcactgattacacccaacaacaacacaatccaaccatcaaccatactacaccagaacacaacaatggcgtcccaacgccggcgatcatccgccgccaccatcgccgtcttcttcttcctcctctccttgttagcggtgttcttccagccggccgccgcctactaccaccctcaggggaagaggcagaccgtcgccgtcttctggggacgcaacaaggccgagggctcgctccggcaaacctgcgacaccggcgactacaacatcgtcatcatctccttcctcagcgtcttcggccatggcaagtactggctcgacctctccggccacgacctccgagacgtcggcgccgacatccgccactgccagtccaagggcgtctacatgctcctctccatcggcggcgacggcgacggctactccctcccttcctccaagtccgccgccgacgtcgcctacaacctctaccactccttcctcggccgcccacgcgccggcatcttccgccccttcggcgacgacaccatcgtcaacggcgtcaacttcttcatcgaccacggccccggcgaccactacgacgacctcgccaaccgcatcaacgactacaaccagaacatccacgaccccatcggcatcatgctgacggcgacggtgaggtgctcgtaccctgacccgaggatgaagaaggcgctggacaccaagctgttcacgcagatccacgtgaggttctacgacgacccgaggtgctcgtacaaccacgcggggctcgccggcgtcatggcgcagtggaacaggtggtcggcgaggtacccaaacagccggatcttcctggggctcgcggcggcgaacgtgacggggaagaacgacatggtcggcgtcggggagctcagccggaagctgctgccggcggtgcagaagacggagagctacgcgggagtgacgctctggaacagctactacgactccaagactcactacggaagatatgtcaagcactgggcttaatttaatcaattaatttaagctcagatcaaccagctataataatctactacagtgcatgcagctcaatcactatcgcagtaatcacggtgtcatgggtttaatgtagtaaactacccccacttaattacatgttgtttgttgttttttgatcttggtctcgagagcaagtgttttttttatttgcacaactctagtgtgtcatatatgcatgtgtgatcgatgtatctgtacttttctttttcccttttttcctttttgcaactgtgtatgtattgatgtataatgaagttgtacatgatgtttaatg

SEQ ID NO: 27854 - DNA, 1873 bp, Oryza sativa
  ref <308>: DATABASE ACCESSION NUMBER: AK103296
  ref <309>: DATABASE ENTRY DATE: 2002-08-28
gactgctgccaccaccgctccggtcacctcccccatcgccggcttccccttcgcgcacggtgccactccccgagccccgccccgcccgccgcggccatgctcctctccgggccgtcgccgcagcagcccaccccgccgctgctcctcccggagagcagcggcgaggacggcggccacgactcctcctcccgcgcggcggcgtcgggcggcggcggcggccccaagaagcgcgcggagacgtgggtccaggacgagaccctctgcctcatcgcgctgcgccgggagatggactcccacttcaacacctccaagtccaacaagcacctctgggaggccatctcggccaggatgcgggagcaagggttcgaccgctccccgaccatgtgcaccgacaagtggaggaacctcctcaaggagttcaagaaggcgcgcagccacgcgcggggcgggggcggtggtggcgtgggcggcggcggtgcgggcaccggcggcgggaattgccccgccaagatggcgtgctacaaggagatcgacgacctgctcaagcgccgcgggaagccgacgggcggtggcggcgccgccgtggggagtggcgccgtcaagagccccacggtcacctccaagatcgactcctacctgcagttcgacaagggttttgaagatgctagcattccgttcggccctgttgaagcaagtggtagatcattgctaagtgtcgaagatcgactagaacctgatagtcatccacttgcattaacagctgatgcagttgcaaccaatggtgtaaatccatggaactggagagacacctctaccaatggtggagataatcaggttacttttggtgggagagtcattttagtcaagtggggtgattacactaaaagaataggcattgatggtactgcagacgcaattaaagaagccatcaaatcggcatttggtctaagaacaagacgggccttttggcttgaagatgaggatgaggttgtccgttccttagacagggatatgccggttggaacatacacccttcatctcgataccggaatgaccatcaaactatatatgttcgaaaatgatgaggtccggacagaagacaagacattctacactgaagaggacttccgagactttctctcgcggcgtggttggacactcctcagggagtattcaggctacagaatcgccgatactctggatgaccttcgtcctggtgtgatttatgaagggatgcgatcacttggtgattgatttggtgacattgcctgaccaaggcatataatatatccaaagtagatatggagcatactcctaccttttaatgcaatttgaagccaagcaaatcatgggttcctggttattgtaaatttagcttttggcatcttgacctaagctaattttaaatgtccatgcagccgaaggggaaaagttatactggatatacattggttacccgaagtaaatagccttggaagttggaacttgaaagttggaaatatgatcattcaagctctctgaagatccaaggtgctttggctgagtacaaagattacagcctaaatgaggacctgttagttgctgccaacaggtcctggggttcctctggtttatatgtaaatgtaaatgtagctctgtagcatcttggtgttagttagtttccaatgtgtttgttacccatgctgatactgggttttacatttgtcacaaatagtcttggaagctggaaacaaatacattcatcagaagtgtaatttgtccggacaacgaaggttgtctggcaaaatgtaagatttctgatggattgttgcaaacagccttggaagttccgaagctggaataaattcattcagcagaagtgcattttgtcttg

SEQ ID NO: 27855 - DNA, 2909 bp, Oryza sativa
  ref <308>: DATABASE ACCESSION NUMBER: AK103297
  ref <309>: DATABASE ENTRY DATE: 2002-08-28
gggcgacgagaagacgaaactgccccgtgcgccgccaacatctcccctctccggctaccgccgccaccgcgccgccgcgctcctcgctcctcgctccagggcttccggccatggccggcggcgacggcgatcgtgcccgcgcgccgaagcggcacaagtcctcggcgccgtcgaggtcgactgacgagaccgccgaactggactacaccgatgacgtcgatgacgacgtccgcgatgccgatagggaggtgaagaagagggacttcaccaagctagagctgaagccggatcacgcgaacaggccgctctgggcctgcgccgatggccgcatcttcctggagacgttttcgcccctatacaaacaagcctacgatttcttgatcgctattgcggagcctgtttgcaggccagaatccatgcacgagtacaatctaacaccccactcactatatgctgcggtctcagttgggcttgagactagcactataatcagtgtcatgagcaagctctccaagactaaactgcctcgtgaaataattgattttatccatgctcaactgccaattatggtaaagtgaagcttgttctgaagaagaatcgatattttgtggagtctccattccctgaggttttgaagacgcttctgaaagatgatatcatttgcagagcacggatatctcctgaggattccgttggggcaccttcatttactattagcaaaacagctggtgaaatggctagtggccatgaggacttattagatggaatggaactggctgctgcaactgaagacaaggaaacacattcttttgaaattgatccttctcaggttgagaatgtgaagcagcgttgcttgccaaatgcactgaacttccccatgctggaggagtacgattttagaaacgacacagtgaatccagatttggagatggaattaaagccccaggcacgcccaaggccatatcaagaaaagagcctcagcaagatgtttgggaatggcagagcaaggtcaggcattattgtgttaccttgtggtgctggcaagtccttggttggtgtatctgctgcatgtcgtatcaagaagagttgtctatgtttggccacaaatgctgtatcagttgatcaatgggcatttcagttcaagctttggtcaactataaaagatgaacatatcagccgttttacatcagataacaaggagaaattccgtggaatggccggtgtagttgtgactacatataacatggttgcatttggaggtaaacggtctgaagactctgagaagataattgaagaaattcgaaatagggagtggggcttgctcctaatggatgaggtccatgttgttcctgcacatatgttcagaaaggtcatcagcattacaaaatctcactgcaagcttggtcttactgctacacttgtgagagaggatgaacgcatcactgatttaaattttcttattggaccaaagctgtatgaagcaaactggttggatttagtgaaaggtggatttattgcaaatgtgcagtgtgccgaagtttggtgtcccatgaccaaagagttctttgctgagtatttgaaaaaagaaaattcaaagaagaagcaggtcctctatgcgatgaacccaaacaaattcagagcttgcgagtttctaattcgattccatgagcaacaacgtggggacaagataattgtgtttgccgataatctatttgcactaactagctacgcaatgaagctccgtaaaccaatgatttatggttccacaagccatgttgagaggacgagaattctgcatcaattcaagaacagctcagatgtgaatacaattttcctttcaaaggtgcagtaactgatattctgattcaaaacatacttttgtaaattcaaccatcatcatcttaactgcatatctactgtcacttaggtgggtgataactcgattgatattccagaagcaaatgtgatcatacaaatttcatctcatgctggttcacggcgtcaagaagctcaacggttgggacgtattctcagggcaaagggtaagcatcaagacaggatggctggtggaaaagaagaatacaatgcgttcttctactctcttgtatcgactgacactcaggagatgtactactcaactaaaaggcaacaatttcttattgaccagggatatagcttcaaggtgatcaccagcttgccgccacctgaagaattacctaacctgaaatattacacacttaatgatcagcttgaacttttggcacaagtaggtgttttctgtacctgttgtttgtaagctgctacttctttatttctaattgtgcgagcttgcttgtaaactcacttcgccacttaaaccagttgctgagtgcaagggatgacatgattggcattgagcacttggaagaggattctgatggcaaggctcttatgaaagcacggcgatctgctggatcaatgagtgccttttctggatcggggggaatggtctacatggagtacagcactggtaaggggaaggctggagcttccaagaaaccgaaggacccttcaaagaggcattacctgtttaagaagcgttatcaatgatcttgataaccggcgttgtttccttcctttgcctatctcatctgcaaaaatactgaatacgagttatggttaaggaattccaatgattaacgtggagtgggggaggttcccattagcgcatcgaccagcatttttgttaacttgccgagatatttgcatcaacatccaacggcaataagcacttatttggtcgcacgcccttgtgtttgctaatgagaaaaaacttggcatttgccttggtcctgaagatgtaaatactgttgatgcaaatacttctgtaaggcttatatgacatctagttattttccggacgtgaacgc

SEQ ID NO: 27856 - DNA, 1510 bp, Oryza sativa
  ref <308>: DATABASE ACCESSION NUMBER: AK103298
  ref <309>: DATABASE ENTRY DATE: 2002-08-28
gatccatcctctgttgagattttagaagtgaagtccgcggccatgagcgaggcgaccgccggccactcctccgcggcggcggcggagtctgcaccggacgacgtcatcgcggagatactcctccgcctcccgccccacccttccttcctctcccgcgcctccctcgtctgcaaccgctggcgccgcctggcccgcgacccgggcttcctccgccgcttgcgcgcattccatcgaacaccccccgtgctcggcttcttccacaactccccggacctcccccgcttcgtccccgccgagggcgtccccggccgcgtcgccgccgaggccgcctccctcaggagggacggggatgacggcatgtggtggtgcgtcgactgccgccacggccgcgccctcctccgcagccgcgactgggccgagttgctcgtctgggaccccatgaccggggagcgccgctgcatcaccgtctccagccagatccaggagggggccctcgacctcaacgccgccgtgttctgcgctgcctccggcggcggtgaccaagactgccactctagtcccttccatgtcgtcgtcgtgttcaccaccggccaatgccatggccgcgtgttcgcctgcgtgtactcttcggggatcgacgcgtggggggacccgatctcgacgccggtgacatcaccatgtgagctctatgaggagccccctgttcttgttggggaagctctgtattggcttcttgatgggagccgtatacttgagttcgaattcggcaaccaatgtttatgtttagctctgattgatcatcctgtggagaatcatgccatcctcaagcggaacatccgtcttgtgaggatggaagacgatgatgtgcttggccttgctttcgtcaaggatttcagcctgcacttgtgggcgcgggaggttgccgatgatggtgcgtcgcaatggattccgcgcagagccattgagctggacatgatcctgccgctggagggctatcggtgccgtgcgatgcctatttggatatgtggatttgctgaagatggagatgtggtgtttatacggactgttgctggagttttcctggtttggcttgatacattgaaattcaagaaggtgtctggctccttactcatgaagactgtttactcctatactagcttttatgttccaaatggataatgacggaaatttccacagaagcccatgacatcccatgtgttgatagaagcaaggaactactgacattttcaagcagatgatggtgcaaatcatggaatcggatggctttagaatctcttggctgcagtggtgttgaaggatcagttatgcatctgcgctgctttctcctgattgcagagggtgttgaaggatcactccatgtttcaatgaaaaggttaaagtggcattttgttgtcgttggagataacagctactaatactccaacgcatatcagattactccataattcaataaaaaggcgaaattgacattttctcgcctttggagatt

SEQ ID NO: 27857 - DNA, 725 bp, Oryza sativa
  ref <308>: DATABASE ACCESSION NUMBER: AK103299
  ref <309>: DATABASE ENTRY DATE: 2002-08-28
ggaccactgcttcctcccacctgcggagacggaaccctaaaaaatttcttcttccccttctcgtccgggcagcggaaggagctctaagccagaagaagcatcatgcctaagataaaaacaagtggtgtgaaatatcccgatgggtgggagcttatagaacccaccctctcagagctccattccaagatgagagaagctgagaatgatccgcatgatgggagaaggaagtgcgaggcactgtggcccatcttcaagatcaatcaccagaggagccgatatctttatgacctatactacaacaggaaggagatatcccaggagttgtatgagttctgccttgaccagggacatgctgaccgtaacctcatcgccaaatggaagaagcaaggctatgagcgtctctgctgcctgcgctgtatccagacacgagaccacaactttgcgaccacctgtgtttgcagggttcctaagcacctaagggaagaacaggtgatagagtgtgtccactgtggttgcaaaggttgtgctagtggtgactaagtatccactattgggattacttttcaagttacatcaggagcaagttgatgaatgtaaactgaataactgatgtagtgatatctctgatgtacttggaaaaatgcctagcctgtctagagagtagactgaatgtactcgtaagatgatggatgtggtaatgtgaaaaaaacttgagttcttctacc

SEQ ID NO: 27858 - DNA, 933 bp, Oryza sativa
  ref <308>: DATABASE ACCESSION NUMBER: AK103300
  ref <309>: DATABASE ENTRY DATE: 2002-08-28
gagtttggtaaagaagtgtaatatttctgtcgcggaggggcttttttgcaaaataggaaaggtagcggggggcgaagccgagaaggtcaccgccgctggtcgccgtcgtcgtcgtcgccgccgccgccgccgccgttgtgctcgcgggagctcgaaaccccacgctggtcgcgcggcggaggagggaggtaggagggatgggtcgatctgtttacgtggcggcggccgtcgccctggtgctcacgagctgctccgtgctctgccttggcgcggagcggttcggggcgagggagtgcgaggagctggggttcaccggtctcgccctctgctccgactgcaacgccctcgcggagttcgtcaaggaccaagaattggtggaggactgccgtaaatgttgtacagaggattcagatgattctatcagcaagctcacattctctggtgcaattattgaggtgtgcatgagaaagcttgtgttttatccagaaatcgtgggcttcctcgaagaggataaagacgacttcccttatgtggaagctcgttatgtctatggctctccaccaaagctcattatgcttgatgacaaaggcgaccagaaggagactataaggatcgacaactggaagagggagcacattcggcagtttctcaaagagaaggtgaagccagtgaagtcagacagctgagcaactgtcctgagccaatgcagaaggcattcccaatggtatttggttatctgctagcaaaaaaactcgctgtccatgctgatctgttcctaattctgaaatctgaatagcatatgtagaacacctactgtttccacaagagaggctgttgtatggcgtgcattggtattcagtagtcacccaaacataatcagtgtaattcaggattcttacatatgcctccatgaggctatattttttttacctc

SEQ ID NO: 27859 - DNA, 1636 bp, Oryza sativa
  ref <308>: DATABASE ACCESSION NUMBER: AK103301
  ref <309>: DATABASE ENTRY DATE: 2002-08-28
gaattcaaaatcccctccgcttctcctcctctccccattcttctcctgtctctctcgccgcctccaattcctccaaaccctcatcctcctcctccgcggcggcggtggcgacggcggcggccgcatcatgggttgcttcctctcctgcttccgcggcgcgggatccgatcccgccggtagcctccgcgatccgctcgtgcgggagagccggatcggggaggcgttcctggacgacgagacgaaggttgaagcgagcgggacgctggatggggatcgcggaaatggcggaagcgtcgacgaggagctctggcgagaggcaaattatctgaaatcatgtggtgcgataggagaaaccccaccagaaatgctgaaagggtcaaaccaaatcactgaagaagaaactaatggggagcttaaaggagcagcggtgtctgaagaaaacttatctgaagggttcaactgtgatgagcatagtgctttgaaacatgaacaaagcgattcacctcacccaacccctctggttctcagaggtgatatgcaaactcctggtacactgaatactgcatataaggagtctttaaggtctgggaagcgtgcaaggaccaacaagcaattcatatatcctgtcctcagacctatcgagaacaagttacaatggatggaactaagagacgactcttcacctatcctgtcattcaatcctccaaagagaagatacttgagcacagattgtagcgcgaaacctcaagagtccatcacaaattcaatggctacgcaaacagcgcgaataactcctgcttccttctcatttcatgacattactgcagggcaagatcaaggagtgatatctccggaggaacataagagtgagaatgacagcagaaagctgttagatgatgcagatcaattgaaatacaacgcagacagtgagaggaagggtgttgcaagcctttcttgctggcttaagcctccatcttcagctggtgggagtcaaagtgacacggagggcaaggtggtaaagcaaagatgctacgagaatagtgttttcacagacctgcctatctttacagcttctggtctgaactgggacaatgacaagcctactcctgtgttgccaaaggtgtgggatggtaacggtatcccaaacacaactaccaaatacaaggaggaccagaaagtcagttggcacgcaacgccttttgaggaaaggctgatgaaagttctgtccgatgagaaaccgcatcatcaaaggaaaatcagcggaaagctgatccaacttgatgaagagaccaactgaagacccttgcaagaagaccatcatcctcgtagcatttgcatcatcatcatcatccttgaaacagtgaattttttgaaagggccccagctttggctaatctgatatggactctagctacaagctgcgcatcttgtcatctgtacagcattcgcaaatagggtgtctgagctacattctcgtcaaatttcatttcggaccgttattgccaagttgtcaccttaagttgtcgtttgcaactttttgttttcctctgtaaagaagatgatactttatctgctgtgaacatcaactgccgactggagtttgatagtagtatcaatgaaagaaaacttctcgtgt

SEQ ID NO: 27860 - DNA, 668 bp, Oryza sativa
  ref <308>: DATABASE ACCESSION NUMBER: AK103302
  ref <309>: DATABASE ENTRY DATE: 2002-08-28
ggagatccagagggagatgatgagatgagacaatggtgatgctgctgaggagagggctcatcagtgctgcctttctcctaactctggtgctactgttcttgctgcaactggggatcatcagtactactgtagggtgctgttcttgctgttctttctgtggtgatgaacagcagaagcagcagcagcagcagcatggagtaggagatttgaggcctgggagaaggctgctgatagggcatcatcagcatcaggtggtgcttgcaaagggatcaatggaattgaagcatgcagaggaaggaggagatgtgcttgatgaggagaaaagggaggttctcacaggccctaatcctcttcacaacagataggatggcataaatatatagctggctagctagctacttcagtttgtttttcacatttcttctgaatttgtttaggtcttgatctatctcctctacaattttttgatgtggcctttttgccctgcttgtcaattctttcttagctaggtgattacgaataaatagttgtttgtttttgttcagttgtttagattttgccgcgaggcgtgtaacgcttatgggtacattgtttgagcctcaccatccaattgagctgagcaatttgctgttccaaacaataaagttgttcttagtcctttctcatcc

SEQ ID NO: 27861 - DNA, 1809 bp, Oryza sativa
  ref <308>: DATABASE ACCESSION NUMBER: AK103303
  ref <309>: DATABASE ENTRY DATE: 2002-08-28
gcagttgaaagtttattttgctattttcttctccggcatgatcgctccatccggcaagttgatacaagcaaaccggccctccgattgtttaatcgtccacacgtcactctcctttgatccgaagctcattgactcaaacgccataaaacaacttcgccacaattcactagcaacaaaccacagccatggacgacgacaccgccggccacgcctccggcggctacacgacgacggcggcggcgcacttcgtgctggtcccgatgatggcgcagggccacgccatccccatgaccgacatggcgcgcctgctggccgagcacggcgcggcgcgggtcagcctcgtcgtcacgccggtcaacgccgccaggatggccgggttcgccgccggcgtggaggaggccggcctgccggtgcagctggtggagctccccttcccggccgccgagttcggcctgccggacggctgcgagaacgtcgacatgctcccgtccaaagacctcttcagcaacttcctcttggcctgcggcgcgctccgggagccgttcgcggcgaggctccggcagcaacggccgccggcgagctgcatcatctccgacatgatacactcgtgggccggtgacatcgccagggagctcggcgtcccatggctcacgttcaacggctcctgcaccttctcctcctttgccagggacatcatttatcgcaaaaatctattggagaacctcacggatgatgagatcgtcaaagtctcagggttccctacgccgctagagttgccaaaagctagatgccctggaacactgtgcgttccaggtctgaagcaaataagtgacaagatttacgaggctgagacgcgaagcgatggcaggatcatgaatagcttccaggagatggaatctctgtacatcgagtcgtttgagcgaaccataggtaagaagatctggacgatcggcccaatgtgcctttgtcacagagacagcaacgccatggctgctagaggaaacaaggcgtcaatggatgatgcgaaatgtttgcaatggcttgattcaaagaagcctggttcagtgatctttgtcagctttggcagcctctccagcaccgaccctcagcagcttgttgagctggggctgggacttgaagcttccaagaaaccattcatctgggtgatcaaagcaggaaaaaagtttccagaagtcgaggaatggcttgcagatgggttcgaggagcgcgtcaaagacagaggcatgatcataagggcctgggcgccacagatgatgatcctgtggcaccaggccattggagggttcatgacgcactgcgggtggaactcgacactagagggcatctccgtgggtgtgccgatgatcacatggccacactgttcagagcagtttgtgaatgagaaattggtggtggatcacctgaaaattggggtggaggttggagtgaaaggagtgacacagtggggaactgaacaaaaagaggttaaggtgacaaggactgctgtggagacagcggtatccatgttgatggatgaaggggaagttgcacaggagattaggatgagagcaaaagattttggcatgaaggcaagaagggctttggaagagggaggttcttcctataacaacataaaactattaattcaagaaatgggaaacaagcaaaatgcatctggttgatacatatggaaataagctttattttttcttaattgtaaatctgtaagcaagaactggaggatcctattgtgcttaccctgattttcatccctcaaactataaagaactgtactctccctctgattcc

SEQ ID NO: 27862 - DNA, 2320 bp, Oryza sativa
  ref <308>: DATABASE ACCESSION NUMBER: AK103304
  ref <309>: DATABASE ENTRY DATE: 2002-08-28
ggaagcaacactgcacagatcatccatcacctgcagcatttgccttctctggttggtgttcagccatggctaggggaggaggagcagctggtgtgtccatggctcatcacctcggcattgccttggtggtgcttgtctttgccgccatggcgcaggtggcgcgcggcggcggcggcggccatgactatggcatggcgctgagcaagagcatcctctacttcgaggcgcagcgctccggcgtgctcccgggtagccagaggatcgcatggagggccaactccggcctcgccgacggcaaggccaacggcgtggatcttgttggtgggtactacgacgccggcgacaacgtcaagttcgggctgccgatggcgttcacggtgaccatgatggcgtggagcgtcatcgagtacggcgaggagatggcggcggccggcgagctcggccacgccgtggaggccatcaagtggggcaccgactacttcgccaaggcgcacccggagcccaacgtgctctacgctgaggtcggcgatggtgactccgaccacaactgctggcagcggccggaggacatgacgacaagccgtcaggcgtaccgccttgatcctcagaatcccggctctgacctcgccggagaaaccgccgcggccatggcggctgcgtcactcgtcttccgtagctccaacccgggctacgcagaccaactcctgcaacactctaaacagctgtttgatttcgccgacaagtaccggggaaggtacgacaacagcatcaccgtcgcgaggaactattacgggtcattcagcggatacggggatgagctactgtgggcgtcggcgtggctataccaagcgagcgacgaccgccgctacctcgactacttggccaacaacgcggatgcgctaggcgggacgggctggtccatcaaccagtttgggtgggacgtcaagtaccccggagttcaaatcctagctgcaaagtttctcctccaaggcaaagccggcgagcacgccggcgtcctgcagggataccggcggaaggcggacttcttcgcgtgctcgtgcctcgggaaggacgccgccgacaacgtcgggaggacgcccggcggaatgctgtaccaccagaggtggaacaacatccagttcgtcaccagcgcgtcgttcctcctcgccgtctactccgaccacctcgccggcggcgccgtgaggtgctcgggcggcggcggggcggtggccggggcggcggagctcctggcgttcgccaagtcgcaggtggactacatcctggggagcaacccgagggggacgagctacatggtcggctatggcgccgtctacccgcggcaggcgcaccaccgcggctcgtccatcgcctccatcagggccagcccgtcgttcgtgagctgcagggaggggtacgcgagctggtacgggcggcggggcggcaaccccaacctgctcgacggcgccgtcgtcggcggccccgacgagcacgacgacttcgccgacgagaggaacaactacgagcagacggaggcggccacctacaacaacgccccgctcatgggcatcctcgcccgtctcgccgccggccatggcgcccgcgcccgcggccggcttggccagtcacttcaacacggaatcgctgcaaatcacacttcactgcctcatggtgccaatcaccagcatgcgtcgccggtggagatcgagcagaaggcgacggcgtcgtgggagaaggacgggaggacgtaccaccggtacgcggtgacggtgagcaacaggtcgccggcgggcggcaagacggtggaggagctccacatcggcatcggcaagctgtacggcccggtgtgggggctcgagaaggcggcgaggtacggctacgtgctcccgagctggaccccgtcgctgcccgccagcgagagcgccgccttcgtctacgtccacgccgcgccgccggccgacgtctgggtcaccggctacaagctcgtctgaaatcaatcaaacgtgcaacgaaccattaattagttcctactaaaatttacatttacaagttcgtgtgtgcacgtttcaccagtttgtgtgcgtgtgtgagattgttaattaggtttacatgtcgagaggtaacatggagtgatgtggccagttacaatataatctcggccatcctccatgtcctgatccatgtccatgtaagatgcaaggtgtatggctagtgtttggaataatatgggttatcaatgtatcatccaggcagtagagcaggttgataccaatggattcattgagattgcaaagcatatctatgtatttgggattaccaatcg

SEQ ID NO: 27863 - DNA, 1170 bp, Oryza sativa
  ref <308>: DATABASE ACCESSION NUMBER: AK103305
  ref <309>: DATABASE ENTRY DATE: 2002-08-28
gacacgacgcgctcctccctctcgctgctgctgctgcggagagcgaaggagaggggaggacgagctgcgcgggcgccatccagcagcggctgcgaacagcaacgtcgtagccgacgggagcccgccacctacccgcaccaacccgtccccgaggttggcttttggtcgagcagttggtgggcacctaacccggcgaactccggctgaagtaagtgcgagtgagtagtagtagttgggggtgaggaggatgaagaagttgtaccaggggaagggacggagggtgcacccggcgccggcgcagcaggcgcaggcggatgctgctgcggcggcagcggttgtgctgccggccgctgtgctggccctggcgtcggcgctcacggcggaggagcaggaggtgctcgcctacctgctgtctggaggtggggcggccgggggacgccgccgccgccgcggggctcacccgccggagatggggtgcgggtgcttcggctgctacaagagcttctgggcgcgttgggacgcgtcccccaaccgccacgtcatccaccgcatcatcgacgccgccgcggcggcaaacgcggaggcggcgactgcgaggaggatgcaagtgccaccaaggaggcggatgccagcgtggaacaccaccaccacgcctgtggcttcgatggcgaggaggacggcgactacgagggcgatggcgacgacgaggaggaggaggaagagggcgacagcatggacggcgatgcggacgacgagacgacgttgagcgagggcgattgcagcagcagcagcagcagcaacgccgagaagagcacggtggggaggctggtgcgcttcatcggggagaaggtgtggggagcttggaactgagctcctcctcctcctgcagctgctgctccccatgttcttgtagattaggagaaggaagaagacgaccaagaaggtcaggtcaaggtcagtatcagtagttgttttgatcaagagcacctcagctctatgctccttttgctgttctttcttttgatttcttgcactctgatgagcactgaggtttggagggaaaatcaagatggtgtagtgtaatccaatccaaattacagttcttcccttcaatcaacctcactgtaccatatttttgctcctttggttcaacaatgaacttcttttgct

SEQ ID NO: 27864 - DNA, 2026 bp, Oryza sativa
  ref <308>: DATABASE ACCESSION NUMBER: AK103306
  ref <309>: DATABASE ENTRY DATE: 2002-08-28
gcgagccgcgcgagcgcgacacacacagaggaggaggccgcgcgcgcgacgcgagctcgccctctgcgtgcgccgccgcgaggtcgccgccgccgccgccgccgtcgatcggcgcccgatcgatggggagctgctactccgcctacgcctcctcgcgcaagctgcgcggccgcatcagcaagatctccctcgtcatccccgacccggtccccgacgccgaggccgcctcgccgcgcaaggacggcgtcgatggcgacggcgacgacgtgaggggtggtggtggtggctgtgacgatggcggtgacgtcgtcgccatcgcgacgacgacggcggacgagttcgcgcggcggtacgtgctggggaaggagctggggcgcggggagttcggggtgacgcggcggtgcagcgacgcggcgaccggggaggcgctggcgtgcaagacgatccggaagcacaggcgcctggcgccgccgcgggtgaccgcggcgaaggcggcggccgcgcacggggaggacgtgaagagggaggtggccatcatgcggcgcatgtcgtcggcgtcgtcgtcgcgcgggggcggcgccgcgtcgtccgccgccgtggtgcggctccgcgaggcatgcgaggacgccgccgacggctccgtccacctcgtcatggagctctgcgagggcggcgagctgttcgaccgcatcgtggcgcgcggacactactccgagcgcgccgccgccaacatcttccgcaccatcgtcgacgtcgtccagctgtgccactcgaacggggtgatacaccgcgatctgaagccggagaacttcctgttcgcgaacaaatcggaggactcgccgctcaaggtcatcgacttcggcctctcggtgttcttcaagccaggcgaccggttcacggaggtggtggggagcgcgtactacatggcgccggaggtattgcggcggagctacgggccggaggtggacgtgtggagcgccggcgtcatcctctacatcctcctctgcggcgtccctccattctggggagacaacgacgagaagatcgcgcaggcgatcctccgcggcgccatcgacttcaacagggagccattgccgagggtctccgccaacgccaaggacctcgtcaggaggatgcttgatcctaacccatccacccgcctgacggccaaacaagttcttgagcatccatggctgaagaacgcggacacggcgccgaacgtgtcgctgggcgacgccgtgcgggcgaggctgcagcagttctccgccatgaacaagttcaagaagaaggctctcggagtggtggcgcggaacctgccgggggaggaggtggacaagtacgtgcagatgttccaccacatggacaaggacaagaacgggcacctgtcgctcgacgaactcttggaaggcctccacatcaacggccagcccgtccccgagcccgagatcaggatgctactcgaagccgcggacacggacgggaacgggacgctggactgcgacgagttcgtgacggtgtcggtgcacctgaagaagatgagcaacgacgagtacctggcggcggcgttcaactacttcgacaaggacggcagcgggttcatcgagctggacgagctgcgggaggaggtgggcccaaacgagcaggccatcctggagatcctccgcgacgtcgacaccgacaaggacggccgcatcagctaccaggagttcgagctcatgatgaagtccggcgccgactggaggaacgcctccaggcacttctccagggccaacttcagcaccctcagcaggaggctctgcaaggatactcttactccctgatgatcgatgatgcccaacaatctcatcaactttgtttcatcaaggcttataaactgcacatctttcaccttcaccagacagggataactagagagagatacaagaccaacttagagaaatgtattggagtggcaacacgatgcgatgctgcgcttggattgtgaaatgagaaatggaactgaaatggggatcgtaccggttttgct

SEQ ID NO: 27865 - DNA, 1928 bp, Oryza sativa
  ref <308>: DATABASE ACCESSION NUMBER: AK103307
  ref <309>: DATABASE ENTRY DATE: 2002-08-28
gatataatgccagatgaacactcctcttgcctccatccacaggtcaacctgcaggcaacccagcttgctaccaagtcgatcaatggcaatggacacttactactattccatgctcttcgtcctccctccgatactctacatgtcctaccacctcaccagaatcctcgccgacaagaagaagcccaccacccatggcctcaaggcgcacccgctgctcggccacctcccggcgttcgtcaacaacagccaccgcttcctcgactggacgacggagctcatcgtcggcagcccggagatgaggatgggcttctggatccccgggatgcgcaccggcatcatcaccggcaacccggccgacgtcgagcacatcctgcgcaccaacttcgccaactatcccaagggcgagcacgccattggcatgctcgaggacttcctcggccacggcctcttcaactccgacggcgagcagtggctctggcagcgcaagaacgccagctacgagttcagcaaccgctccctgcgcaggttcgtcgtcgacgtcgtgcaggccgagatcgccgaccgcttcctcccgctgctccgccgcgccgccggtgatggtggtggcgatggcgatgtcgtcgtcctcgacttgcaggaggtgctccagcgattcgggtttgataccatctgtatggtggcgttcgggcacgacccgcggtgcctcgccgacggcggggtcatggaggatgccaggtcggagttcatgcacaccttcggcgaggcgcaggacctcgtcgtcggccgcttcttcgatcccatcgaggtctcctggaagatcaagaagtggctcaacgtcgacaccgagcgccgcctcaggaaggccatcgccgacgtccacgcctttgccatggacatcgtccgcgcccggcgccagagcgcgtccgtgaacgacagagacgacgtcctgtcgaggttcgtggcgagcgacgagcacagcgacgaggtcctccgcgacatcgtcctcagcttcctcatcgccggccgcgagacgacggcgtcggggctgagctggttcttctggttcttgtcgtcccggcccgacgtcgtggcgcgcatcgccgacgaggtccgcgcggtgagggaggcgaccggcacgcgccccggcgagccgttccggttcgacgcgctccgggagatgcactacctccacgccgcgctcaccgagtcgatgcggctgtacccgccggcgccgatcgactcgcagtcgtgcgcggcggacgacacgctccccgacggcacgctcctccgcgccggctggtccgtgacgtacagcgcgtacgccatggggcgtctcgccgccatctggggcgaggactgcttggagtacaggccggagcggtggctcggcgacgacggcgcgttccagccggcgagcccgttccggttcacggtgttccacgcggggccgaggatgtgcctcgggaaggagatggcgtacgtgcagatgaagtccatagttgcaaacgtgcttgaggagttcgaggtcgacgtggtcaaggacgtcgccggcggcggcgtgccggagcacgtgctctcggtgacgctgaggatgaagggtggactacctgtgaagattaggagaaagactgaagcttactagagaaggccacaagggaactttgccgctgaatggtataattagttaagcttcaagttttgctcttttcgttttgagcttatgggttaagaataacgtttgtgatttggttgttttgcccattttccatttcctactagactacagcggcagaaaaatgatttgccctgggttgaattgatgccagttaatcaataaaaggatggcgtatcactgtattgtacaaatttaacaagttgaagtcagccatgtaagacacaaatagacctatttaagtaactatttgacc

SEQ ID NO: 27866 - DNA, 2567 bp, Oryza sativa
  ref <308>: DATABASE ACCESSION NUMBER: AK103308
  ref <309>: DATABASE ENTRY DATE: 2002-08-28
gtctcctcttcctctgcctgccgcccccaatcgccggcgatgccgcgccccgccgcctcctcctccagccgccctccgccggaaggcgagccggcctcgagccgcgcgacctcctctgcggagtcctccatcgcgtccctcatcgaccgcgccacctccaccacctccccctccgtcgacccggccctcctccgcgccatcaagtccgccgcccgcgcctccgacggcgccatccgcgacgccttccggatcctcctctccctcatgtccaagccccacgcccacgtgagtaagctcctccctgctggtttgattcccttgacgaattcgcccaaaccctaactcgcccaatcttcaggtgcggctgctcgcgttcatcatcgccgacgagctcttcatgcgctcgaagctcttccgctccctgctgaccgacgtgctggacggcttcctcccgctcgccgtcggcttccgccgcgcccacccgctcccgccgcccgctgcctccgcgaccctgctccgcaaggccgccgtccaggcgctcgagcgctggcaccacctgttcggcgcgcactaccgccagctccgcctcgccgtcgagtacctcaaggagtccgcccgggtccagttccccggcctccgtgccgccgtcgaggctcgtgccgcgcgggaggctcgcacgcaggagatcttaactgcaaaggtcgagcagttgcgccgaaacctggcagcgattaaggctgaaatccgctccgcgattgatgagatccgcaatgggttggatatcattcgcatcgagagtgaaaaatttaacaattatgcaaatgatgaggatgaggagcaggagattgcctctttggcgatgcggagtattaggatggcttctttgatggctggggagtgggttcctgagactcaggagaatgaagcagttttcgacgcgttgagggagtcatatcggctccttgtgtcaaagcatttggtcacagttcaggaatggatatctgtgctggttagggtcaatctcgcagataatcgtttcagagattctgctttgaaggaattcattgatgttaagaatgaaatacgagcggtgagaaatcggtgtagtgagcttggtcttaatcttgacaatgtccataggcggaagggtgttcaggaggaagaggatgatgacttttgggttgaggggaatattgaggttcctagccctggtagagtaggtaccagtgcagatgttgcaagtagcagcaaggacactagaaagggaaagaagccagtaggtggcacggatactgatgatggcaaggcacctaatgctggcaatagtcctcaagagctggatccagagagggcaaagctgcatgcagaagcccctgtgctgccatggagctctgttttggatcgttggggttctaacagggatgcacttgtaaaccaaaggggacttgagctcgagagccattggggaagggtggataatgatgctgttatacctgctgcaaagattgcagaattaaatgttcatagttcaatatatagagaagatccagttgagattctaccatgccttgcacctctgaagaaaggaggcctttgccagagaagagatctcaagatatgcccgtttcatgggcctattgttccacgagatgccgaaggaaatccaattcatcagagtgatggccattgtgatgcagaaggaaatccagttgggcagactgatggccattatgatgcagcagtaagtcctattgatccgaatgaagacagttctgatgtaagagaaaatatgattatgccagatggaagcagtgatggtgaatgtatttatgagtcctctccttcaagaacggcaaacataaataatgacattagcgacagcgatgtaggtcatgacctcggtaaaattacagtggagcagttggcgagacaggcagtgcagaatgtccggaaaagagacagggatgacaaaaaagctctggaaaaagcccaacgagcgagaattcgtcagcataatcaagatgttttgcgggaagcggctcttgcttcaacctcgcgctcagcggcagactatgacctcccttcgccagcagtgtctcgacggggacgccgaggtaagacaaagggaccaacactggcatcgatgctgaagaagaaagttacttccaaagatagaattgcagagaggcttctgaatgctcgagctagggatgcgacaataagagaagtttcacatactgaagatatgagctacagagaagcattcccaaatcaatggtagtataagaagcctaatttttgctgaataggttggtgaatcgtcatgataagagtgaatcaataattctttctgtgcgcagttttcagttaaccacatgtcttcttgagttgcccagatacaagtaaaattgtaggttttcattgtgaagtttagtttttgtacagtacagtagattgaataagtttcttttatttcttttgcatgttcattttccctttgtaaacatgtatatgtaccactccatacttgctggattaataactatatacgctgaggctgcagttcg

SEQ ID NO: 27867 - DNA, 996 bp, Oryza sativa
  ref <308>: DATABASE ACCESSION NUMBER: AK103309
  ref <309>: DATABASE ENTRY DATE: 2002-08-28
gaagcgatagcaaaacaaaatacaaaccagaacagtctcaaagcttcgcccaagcagagaagaatggccgccggaggaggaggaggagacgagctgaagctgctcggattgtgggcgagcccgtacgtcctgcgagcgaaattcgcgctcagcttcaagggcctgagctacgagaacgtcgaggaggacctccacaacaagagtgagctgctcctgagctccaacccggtgcacaagaaggtgccgtgctcatccacaacggcaagcccatctgcgagtcgcagatcatcgtggagtacgtcgacgaggcgttccctgacgccggcgagtcccttctcccctccgacccttacgaccgcgccgtcgctcgcttctgggccgcctacatcaatgacaagttcatgccggcgtggcagaaggcgtcgttgggcctcacggaggaggagaaggcggaggcggtgaagcagatgctcgccgcgatcgagaacctggagacggcgttcaaggagttgtccaaggggaagcccttcttcggcggcgacaccgccgggtacctcgacgtcacgctcggcgccgtggtcggctgggcgcgcgccggcgaggtcctgttcgggaggaagctcttcgacgccactaggagccctctcctggcggcgtggatggagcggttcgtcgcgctggacgctgtcaaggcggtgttgccggacaatgccgagctgatcgagtatggcaagatgaggatggcgcactacgccaagcttgctgccgccttggctgctgcgaacaagaagtgagccggcgaagcaaacctgtagttggtgtgtgtccgttctcgttgctcgtggtctcgtggaggatgaaagctggtgcaccatagtccttccacaccgtgaggttgagttgtgactttttttttcttccagtgatccgttcgatcggatcgtcatgtgattctggcgcatttaactcaataaaagaaaggaagaagttcaaatt

SEQ ID NO: 27868 - DNA, 2834 bp, Oryza sativa
  ref <308>: DATABASE ACCESSION NUMBER: AK103310
  ref <309>: DATABASE ENTRY DATE: 2002-08-28
gaaggttcctggcaatgccgagcatccgagctccggcttccaagcagacggccacgctacaggtggctgtgaagtgcaggccactgacagacagcgagcagcggcgttcgcggcatatcatacaagtcattgatgataagaatgtcgttgtgctggaccctgatctgtccaaggactaccttgaactcatccaaaacaggaccaaggagagaagatacagcttcgatcatgtgtatgcgcccgggtgctccaatgcggatgtatataagaatatatcttctacaattgctggtgtagttcaaggccttaatgcgacagtctttgcttatggttctactggaagtgggaaaacttatacaatggttggaacccatagtgatcctggtcttatggttctgagctttcgcacaatctttgatctggtaaagaaggatgacagtaaagatacgtttgaggtctcatgttcatatcttgaagtgtacaatgaggttatctatgatttgcttgaaaaatcgtcaggtcacctggagcttcgtgaagatcctgtgcatggtataatggttgctggtttaagaagcattaaggttcactcagcagataagattcttgaactcttgaacataggcaacagtcggcgcaagacagagagcacagaagcaaactcaacttcttcacggtcacatgctgtcctggagataactgtgaagcgaaaacaaaaaggacaatatggtagtcaggttcttcgtggaaagcttgcgttggttgaccttgcgggcagtgagagggcctctgaaacaaacaactttgggcaaaagcttagagatggagccaacattaaccgttcacttctagcgctagcgaactgcatcaatgcccttggcaagcaaaacaagaaaggtcttgcatatgttccatatcgaaacagcaaattaacacgaatcctgaaggatgggctctctggtaactctcgtactgttatggttgctacgatatcaccagctgatgatcagtatcatcacaccaccaatacactcaagtatgctgatcgtgcaaaggagataaaaacacatgtccataaaaacattggacatcttgacacccatgttgaagactacaaaaggatgattgacaatctccaggttgaggtttctcagttgaagaaggaattagctgagaaggagcatcagttaagtgtaaaacctactgaaaaagctgcagacaatgagctatcttggctaaatatcttgagccaggaaactggcgagaatgttcaagaacgcattaatctgcagaaagcactgtttgaacttgaagaaaccaataagcgcaatcgaatggagctccagcatcttgatgatgcaattgcaagacaacaggtgaaagataaggattcggctgttctgcaagcattaacatcacggagacaagttattcttgacaacatacgcgacaatgatgaagctggtgctggctacagaaaggatattgaactgaatgagagtcgcaaacgtcaactccaagatatgatcgaggaagccaccagtaacaatggcaacagaacctacctccacattctcagtcagtacagacttcttgggatgactaatgccgagcttcaaattgagatggctatgagggatcaagtaatatataaccagagggaatctctaaggagtctgtggaacattatttatggaacagggctaaaccagaaacagatttctaaactagctgcgaagcaaggcttaactatagaaggctgtcctttgcctgtgtcaagtcctgatgttactaccccaccttccttttcaccccatggaaggctatcaccattcatgtcatttcctagcccgcaatcacagccttattccccgtctgcttgctttgtccaacatggtttcagcaccatgtcttatctcagaaatcaacatgagacgcctacagtatgtaggcaggagcacctcagttcttactacatgatgtctgagtgctcgccttttgatggtgatggaaaacagaagacaaatggaaggtcaatgccatacttttctaccccgggaaaaccaaaagaaatgtataacttttctcctggaactgaaagcgagagaactccctgcagtaaggaataccccacctcatattctcgcaatggagattcgcttgtacaaataaaggtaaacagtcttcccttatacacaaaaacaatgattggaaatctgtaatgcacgtggtcccaagtagacatggtttttcatgtagtaagagaacctaaaatgaaaaaggaagtaacatcaacttaaataagcatagcattccaaatgtgttactagcgcaccaattaaggtaaaaagaacaatgttatctcaaacaacagaatatttcagaagtgaaattgcaacttgtcttaatctgcaggattcctggtatacagaagaaaggcagtgaggaaggaaggacatcatcagcactcttccattgcacattatcaggccggacgtttgccactggagcccgttcctacatcttctgccaacaggcccaacaccaatgttaccctgagttcatgaaaatgcttcagtttagatgttaggatatcagccaaagctgcggccatgaggccacggccattttgatcttgatgcctctatgatgaaccccaagatggctcactccaccctgtacagtagctgttagtctccagtctttcttgagtttcttctcctttgtacagtagcttttctgtaggatgaatccgatttttcagaatgctgtaagcatgtaaatctgctgtgattgtaacccctttgcacccatcaaatcaacagaattattcc

SEQ ID NO: 27869 - DNA, 3534 bp, Oryza sativa
  ref <308>: DATABASE ACCESSION NUMBER: AK103311
  ref <309>: DATABASE ENTRY DATE: 2002-08-28
gattcgtcttccccctcgggcacgcggcgatgtttcccattatttccagcctccgccgacacaacgctaccgcagacccatccccaattccccatttcccatccaggagagaaaaccgagcgatctcgctctgacctccgagaggcaccattgaggagatggcggaagtgagcgcggcaatggggtcaaatcgttccgtccgcaagaagcttgcggcgttgctgtccgacgagcgcaaggatttcatacgggtgcgtagcaaggtaaagcctctgattgatgctcttgaatctgtccatgcctgctttgagaaattgtcgctcgaagatgagaagaatcttgatgcgttacaagaagcctggatgatggatttacgggagctgtcctatgacatggaggatagtcttgacaggtttcttgtcaaatctgctgctgaaccgggtagctgtaagaagctcttcaagatcttgttaacgaagatcaagggtagcaccaatgggattgttaaggtgatccaagatatcaagatgccagtcgaggagctcaacgaaaggatgaacagattcaagctcagtgatgaccgtcatgtaacatacgacccgatcaagatcgactcaagggtaacagctttatatgtggacgcttcacatcttgtaggtctggatgggccaaaactagaactaattaagatgttgcgcattgaagatgaacctgaaccatcaaagaagctggtggtggtctctattgttggtcttggaggattgggcaagacaactctagcaaaccaagtctatcatcatctcaagccggagttcgactgctctgctttcgtatcagtgggacaaaatcctgatgttctaaagatcttggataatatccttagtggactcacccatcaaccttatgccaccaccgggtcaacagtgcaagtactcgttgagaaaaccagaagattcatcgcggacaaaaggtaccttgttcttcttgatgacatctggaatgcaagagattgggatatattgaggtgttctctgcctaacaatcacttaggcagcagaataataacaacaacacgcattgtcgatgttgctagatcatgttgcagccacaaagaggatcacatctacaaaatgggtcctctgagtgatttggattcgcagagactattttttagaagaatattcggctcagatgatggttgtccgactcaacttaaaaggatttccatggacatattgaaaaggtgtcgaggtttgccattggctacacttactttagctagtattctagccgacgtacccatgttagcagaaaaatggaagcaagtgcataattctattggtttggcaactccaggggagaatatgaatcgtatattatctttgagtttccatgacctccctaatcatttaaagacatgtttattgtatttaagcatatttccagaagattatgtaattgagagagaacagttagtatggagatggatagctgaaggtttcattcctgaaacacgtggcattcctttagagggagtcggaagtgcatactttaatgagcttatcaatcgaagtatgattcagcctgctgatgttcaatatgatggaacagtgcaaagttgcagagttcatgacatgatacttgagcttattgtgtcaatatcaaccaagattaactttgttgccgtactacataaagatcaagatgaaacgagatttacagattacaagaccaaggttcgccggttagcccaccagtccaactgtattgagaaattattggaacggatgagcagggatgacttgtctcatattcgctctatcatctccttcgattatgtcaaaggaatacctcatcttggtgatttccaagcactgcgggtgttggatttaggatcttgtagatcaattgaaaaccaccatattgagaatctagagatgttgtaccaactcaagtatttggatctaagccgtacaagcatcagtgagcttccaatgcagatagataatctcaggtatttggaaacactagatcttcgagggtgtgccatagaaaaattgccagccagtactgttagattacaaaacatgcaacgcctgcttgttaacagaagtgtaaaatttcctgatgaaattggacacatgcaggccttacagacgttgttgtttgtctcaatgtcctgtaactccatcaaatttgtggaagagctcagcaagctgatcaaaatgagggtactcaacataactttctctaaacctgttgacatggttgatgaagtaaggaagtacacagattctttggtctcatcactcaacgagttgttcaaccttgaatctctaaagattgatcctgaagaaggttgttccctggactcactaatgggagtgtacctaacttttggctgtctcaaaaaacttgtcattggctacatttctaggatcccaaaatggatcaacccatctatgtacaatctagtccacctggaactgaaagttgacattgtgcgagaggaagatctccattctcttgaactcttgccctgcctgctatatcttcagctggaaatgacagatggctccagcaaaatgctcactgttggcagcgagggattccgatgcttaagagagtcgcaattcatatggaagaatgatgggatgggactagtgtttctagaaggtgccatgccagagcttcaaacattgcatctttacttcagaactcacgaaacaatagccaattattctggtgttgatggcaatggcatcgagaatctttcgcgcctcaaaaaactctgcgttgatgttgattgtagtggttcaactagggaggaggttgaggctgcggaggattccatcaggaaagcagcagataggcatagaaccaaactcactcttgaaatccgaagatggtgtgaagcatgcatgatagaggaagaagcacatgatggtaatgcggaatttccaagcagatccgtgaataggagagcaaatccagtcagagttgccttcagggtgagggcagatcggagaaacaggaataggactaggagaaatagaatcactgcaccatccgcatcaacttagggtgataactgaaggagattatgattcatgaggttcattcttatgagtgttctgagtctgaattctgaaaagaccatcaaatacagaggaaaaaagatgctgtaatcttgtatcgattggttccgtttatatatcgatttgtcagtgatgcattttttgacctgtacactcaagatcaagaaggaagtcacgaagcattagaattcagaactcagaagtgaaccaaatgaagataagccttcagtgcataggtgtccttgcaaatggatgcagattgagcattttcatcagaccgattacaatcagaaggatattatatgttcgtgttataagaaggcacggtctgtgccagaaataccagtacatagatattcttttggtgtgatttgcttttctattggagaatgcacttatttgaatttgtgataataaatatatgacattgcaatcc

SEQ ID NO: 27870 - DNA, 3550 bp, Oryza sativa
  ref <308>: DATABASE ACCESSION NUMBER: AK103312
  ref <309>: DATABASE ENTRY DATE: 2002-08-28
gtcagcatcaccaccaccctactctctctctctagctagggttgcgctgcttcggtctcggtcttggcgccgcctgcctcgcccttcttgctcgcccctgctcccctgtccctctcgtgtcggggcgacggacggacatcctcacccgcgcgcacgtacgggtgatcgatcgattgattcctgctccgacgaagacggcggcggcgccggtgacctcgccggacatgcgcggggcccgctgaggtctttgttgccggcgaaaggggtggagtgattgactcggtcggtgtctgcctgtctggtctgaggtcatgatgaagcaggcgcagcagcagccgccgccgccaccggcgagctctgcggcgacgacgaccaccgcgatggcagccgctgcggcggcggcggtggtggggagcgggtgcgaaggggagaagacgaaggcgccggcgatcaactcggagctgtggcacgcctgcgcggggccgctggtgtcgctgccgccggcgggcagcctcgtcgtctacttcccccagggccacagcgagcaggttgcagcctctatgcaaaaggatgttgatgcacatgttccaagctacccaaatctgccttcaaagttgatttgccttctgcataacgtcactttacatgcggacccagaaacagatgaagtgtatgcacaaatgactcttcagccagttacttcatatgggaaggaggccctgcagttatcagagcttgcactcaaacaagcgagaccacagacagaattcttttgcaagacactgactgcaagtgatacaagtactcatggaggcttctctgtgcctcgtcgagctgcagaaaagatatttcctccactggacttctcaatgcaaccacctgcacaagaactacaggccagggatttgcatgataatgtgtggacattccgtcacatatatcggggtcagccaaaaaggcatctgcttaccactggctggagtctatttgtaagcggcaagaggttatttgctggagattctgtcatttttatcagggatgaaaagcagcaacttctattaggaatcaggcgtgctaaccgacagccaactaacatatcatcatctgtcctttcaagtgacagcatgcacatagggattcttgctgctgcagcccatgctgctgccaacaatagcccatttaccatcttttataaccctagggccagtcctactgaatttgttatcccatttgctaagtatcagaaggcagtctatggtaatcaaatatctttagggatgcgctttcgcatgatgtttgagactgaggaattaggaacacgaagatacatgggaacaataactggcataagtgatctagatccagtaagatggaaaaactcgcagtggcgcaacttacaggttggttgggatgaatccgcagccggtgaaaggcgaaatagggtttctatctgggagattgaaccggtcgctgctccatttttcatatgtcctccaccattttttggtgcgaagcggcccaggcaattagatgacgagtcctcggaaatggagaatctcttaaagagggctatgccttggcttggtgaggaaatatgcataaaggatcctcagactcagaacaccataatgcctgggctgagcttggttcagtggatgaacatgaacatgcaacagagctcctcatttgcgaatacagccatgcagtctgagtaccttcgatcattgagcaaccccaacatgcaaaatcttggtgccgccgatctctctaggcaattatgcctgcagaaccagcttcttcaacagaacaatatacagtttaatactcccaaactttctcagcaaatgcagccagtcaatgagttagcaaaggcaggcattccgttgaatcagcttggtgtgagcaccaaacctcaggaacagattcatgatgctagcaaccttcagaggcaacaaccttccatgaaccatatgcttcctttgagccaagctcaaaccaatcttggccaagctcaggtccttgtccaaaatcaaatgcaacagcaacatgcatcttcaactcaaggtcaacaaccagctaccagccagcccttgcttctgccccagcagcagcaacagcagcagcagcagcagcaacaacaacaacaacagcaacaacaacaaaaattgctacaacagcagcagcaacagcttttgctccagcaacagcagcaattgagtaagatgcctgcacagttgtcaagtctggcgaatcagcagtttcagctaactgatcaacagcttcagctgcaactgttacaaaaactacagcaacaacagcagtcattgctttcacaacctgcagtcacccttgcacaattacctctgatccaagaacagcagaagttacttctggatatgcaacagcagctgtcaaactcccaaacactttcccaacaacaaatgatgcctcaacaaagtaccaaggttccatcacagaatgatggacttctacatcaaaatttccctatgtccaacttcaaccagccacagatgttcaaagatgctcctcctgatgctgaaattcatgctgctaatacaagtaacaatgcattgtttggaatcaatggtgatggtccgctgggcttccctataggactaggaacagatgatttcctgtcgaatggaattgatgctgccaagtacgagaaccatatctcaacagaaattgataatagctacagaattccgaaggatgcccagcaagaaatatcatcctcaatggtttcacagtcatttggtgcatcagatatggcatttaattcaattgattccacgatcaacgatggtggctttttgaaccggagttcttggcctcctgccgctcccttaaagaggatgaggacattcaccaaggtatataagcgaggagctgtaggccggtccattgacatgagtcagttctctggatatgatgaattaaagcatgctctggcacggatgttcagtatagaggggcaacttgaggaacggcagagaattggttggaagctcgtttacaaggatcatgaagatgacatcctacttcttggcgacgacccatgggaggaatttgtcggttgcgtgaaatgcattaggatcctttcacctcaagaagttcagcagatgagcttggagggttgtgatctcgggaacaacattcccccgaatcaggcctgcagcagctcagacggagggaatgcatggagggctcgctgcgatcagaactccggtaacccttccaatggttcatatgaacaattcgaatgaccaaattcaccagtccatattgtcatgctgcgccggtgtaagtagacaatcaccggagtgttgttgtagatgttatcagcttacatccgggagcgcaaatggctcggcggatcagtagtgttttttttgtctatatgtgtagtttctcacacatcaaaagggagtagggatggtaaatgaaacttacctagagtttcttaaggttaggcgaaagatgattgtactgttggaaaggcagttctgtagtaaaatgattcttctcc

SEQ ID NO: 27871 - DNA, 1511 bp, Oryza sativa
  ref <308>: DATABASE ACCESSION NUMBER: AK103313
  ref <309>: DATABASE ENTRY DATE: 2002-08-28
gagattgcatcgaaaattacaacacagcgagcgcggagatgatccgccgccgccaccgccccacctcgccggcgccgccgctggacaacgacgacctcctctccgagatcctcctccgcctcccgccgctgccatcctccctcccccgcgcctccctcgtctgcacccgctggcgccgcctcgtctccgaccgcggcttcctccgccgcttccgcgcccgccaccgcaagcctcccctcctcggcgtcatccaggtctgcgcctaccccatcttcgcccccgcgctggacccgccggaccggatccccgccgcgcgcttctcctggcggctcgacaaccgccacgacctcaacgacttgctgggagtccgccacggccgcgcccttgtccacgtcaacacctgccgctattctcagcgcaggctcatcgtgtgggaccccgtcgccggcgaccgccgcgccgtggctattcccggcgggttccgtgacaggggggtggtcgtccgcgccggggaggtgcgctgcgtcgccggcgacggcgacccgggccacgtgcacggcggctgccattcgagtccctttgaggttgtcatactaggcactaataagaatcggacacacgcgttcgcttgtgtttactcatcggagaccggcatctggggcaatgtcatctcagccgcagttaattttggggattgcatatgcaattttactaccttggttgggaattccctttactgtttgctcctaggtgagcagaggaccagcttctttcagttcgatttggataaacagataacagctcagatcgatgttccacccgatatgcatcctgatgggaatggccaccacagatttggggatacaatctgcagatttgcgcctgcagagaacggcgggcttcttttccttgttgtcacacattatactctcaatgtatggaagagtgagaccaatgctgatggcgtcgctggatgggtgctggagaaaactattgaactggacaggctcctttctttggaaccagggcctcagaaaacggcaccgatgcttctgggcttctctgaggaacataatgtggcttttgtgtgcacgtatattggtgtctccatgatccatctggagtcaaaggaatttaagagtgtttcccaaagaatgagtctaatctatcatccattcactagtttttatactaaagaactgtcgccccactgatggatgatcatgtaatttgaccatggagatcacaagagcgccattcctggtgattttcgtgagttttaagatggctaactatatttcccaagtattaccaagtcggatatgatattcgttgtcagtcctagcaggttttgtacggtcacatgttcctaatacttggatcgatataatttagcgacaataatgtaaatcatgttcaagtgctgcatagataccttcatctgcaattcggtattgtcgcctgtgtctggaattgtgatgtcacataatagcggtcattattcttgctcc

SEQ ID NO: 27872 - DNA, 1509 bp, Oryza sativa
  ref <308>: DATABASE ACCESSION NUMBER: AK103314
  ref <309>: DATABASE ENTRY DATE: 2002-08-28
tagaaccaggcgattgcggcttcgtcgctcgtcctgccgcttccgccgcatcctggtgagcacatcctccgccaccgctgcctgctccgatccccattcatcgcgcgagcgagtacggcttcgtcgctcgtcctgccgcttccgccgcatcctggtgagcacatcctccgccaccgccgcctgctccgatccccatccatcgcgcgagcgagcgagggtcgccgtcgctcatcctgctgcttccgccgcatcgacaagatgccaaatagagccacgcattggtgttatgcctgccgacgtccaattcgtgttagtggacaagatattacatgccccaactgcaatgatggttttatacaagaaatcagtgagataggtggttcattgaacacttatggtatctttgacccgagctttgatgagcgtcgagatagaagttttggaatggtggaggctatgtctgaccttatgcgacaacggatggcagaaatgggcagaaatcgtgtgttggatttccatggtacgagaggggcaagttcccatcaaggaaggcagccaactgttagaccaatgctcatatttggcagcaatgcacctgatcgtgtaagcagcagtagtgaagaagcagatatactcctcaggcaaggccgcagaattggcgcggaccgtccaaatttcagtcgtttcctagtcggtcccagtcttgaagctctattcgaacagctgctcctgcataataaccgtcaaggaccaccaccagctccacagtctgcaattgactccatgcctgtggtaaagataaacctcaggcaccttagagatgatcctcactgtccagtttgcacagacaaatttgaggttggaacagaggcacgggagatgccatgcaagcatctgtaccatgctgaatgcatcattccctggctggttcagcacaattcttgtccagtttgccgccatccactgccgtcatcttcccaccgttcaggcagcacccgttcatcgtcaacccactctaacgaagctattagccatggggttgccagatctgatgctgatcctgttcctgttgcaagaagcgacgacagcagaaaccatgaaatgcacggttctttctcgtttctctggccatttgattcacctactcctgattccagttcctacacgcacgaaggaggtgttggtgagcctacagttcatgacgatgctggccagatgacctattctgagtggcattacgactactgaacttcctgcagcaagaccccccaacatatcagtgtccactcctcttggcttcaacctcttaaagaggaggtggataatttatgggtgtcgtgttgggtgtgtgaggctttcgcctagaacaaaccttgtgttgcatgtgccgttctatcccatatgctggggctgtgtataactgtacatcaactattgagcaatgagctatatgctgtactgccagggatgctatggtaaactacaagtgaatatgtgatatgtctgacc

SEQ ID NO: 27873 - DNA, 2007 bp, Oryza sativa
  ref <308>: DATABASE ACCESSION NUMBER: AK103315
  ref <309>: DATABASE ENTRY DATE: 2002-08-28
gatcttctcgctcgcctctcgctgtctcgcactcgccgccgccgccgtcgccgcgcctctctcgccggcggggaggtgaggtgtacggatttgatggcggtggcgtcgcggctcgctgtggctcgggtggcgccggacgggggagcggcggggaggaggaggaggagggggcggccggtggtcgcggttccgacggcggggagggggcgaggtggggccgtggcggcgagcccaccgacggaggaggcggtgcagatgacggagccgctcaccaaggaggacctcgtggcctacctcgtctccgggtgcaagcccaaggagaactggagaattggcacagaacatgagaagttcggttttgaagttgatacattgcgtcctataaagtacgatcagatccgtgacatcctgaatggacttgctgagaggtttgattgggacaagatagttgaagaaaataacgttatcggtctcaagcagggaaaacaaagcatttcactagaacctggcggtcagtttgaacttagtggtgctcctcttgaaacattacatcaaacttgtgctgaggtcaattcacatctttaccaggtcaaagcagttggagaggaaatggggattggatttctcggaattggttttcagccaaagtgggcactgagtgacataccaataatgcccaagggaaggtacgaaattatgaggaattacatgcctaaagttggctctcttgggcttgatatgatgttccgaacatgcactgttcaggttaatcttgacttcagttcagagcaagatatgataaggaaattccgtactggtcttgcattacaacctattgcaacagcaatatttgctaattctcccttcaaagaagggaaaccaaatgggtatcttagcttaagaagccatatttggactgatactgacaacaaccgctcagggatgcttccttttgtgttcgatgactcatttggatttgagcgatatgtggactacgcattagatatcccgatgtattttgtctatcgtaataagaagtacattgactgtactggaatgtcatttcgggattttatggtaggaaaactcccacaagctccgggggagctgcctactttgaatgactgggagaaccatctaacaacaatatttcctgaggttaggctgaagcgatatctagagatgagaggtgctgatggtggcccatggaggagattgtgtgctttgccagtattttgggttgggctgttgtatgatgaggaatcactgcaaagtatttcggacatgacctctgattggacaaatgaggaaagagaaatgctaaggcgaaaggtacctgtaaccggtttgaagacacccttccgggatggatatgtaagagatctagctgaagaaattctgcagttgtctaagaatggattagaaagaagagggtacaaggaagttggtttcttaagagaggttgatgcagtgatcagttcaggagtgaccccagctgagaggctgctcaatttgtacgagacgaagtggcaacgcagcgtcgatcctgtcttccaggagttgttatactgatgctgagaaacctcttacacagcaaaactggacagtctgtagatgtactcccccatacagaaaaaacctcatatccattctatttcatgcctcggcagctaatgtccgccatccgttcttcttgagcctgaagagggaaaaataaccgccgtgcagcaattcagcttcacggactcaattgtttctgcctcctggaacatttgaggtcggaagcctttgtaggtgctgtctttgttggggccttttacaacttccgatttccctcgtcaacagggagatgggacaaaccactgtttgtaccagaccctcttttgttcctgatgatttttgtatgaaaaataagcccatctggtgcatgatggaaactatatatatatatggttccagaaaatgttggaataagtatttgacaagcacgtggagtgagttccatcc

SEQ ID NO: 27874 - DNA, 953 bp, Oryza sativa
  ref <308>: DATABASE ACCESSION NUMBER: AK103316
  ref <309>: DATABASE ENTRY DATE: 2002-08-28
gacacacaaaacgcagaagcagctagcttcactgatccacattactaccagcttcttcttccaatcttcttctccgacgagcagctagccagctagcggcgccggccggcaatggcggacgaggtggtgctcctggacttgtgggtgagcccgttcgggcagcgttgccggatcgcgcttgcggagaagggcgtggagtacgagtacagcgagcagagcctcgccgacaagagcgacctcctcctccgctccaaccccgtccacaagaaggtccccgtcctcctccacgccggccgccccgtctgcgagtccctcgtcatcctcgagtacatcgacgagacatggccgccggagccggagaagaagaaggagtcgccgcgtctcctccccagcgacccctacgcccgcgcgcgtgccaggttctgggcggactacgtcgacaagaagctgttcgactgccagacacgcctctggaagctcagggccggcgacgccgcgcacgagcaggccaagagggacatggcggaggcgctggggacgctggaggcggagctcggggagggggactacttcggcggcgaggcgttcggctacctcgacgtcgtgctcgtgccgttcgtggcgtggttccacgcctacgagaggctcgcgggattcgccgtggcggagatctgcccgcggctggtggcgtggggggaacgatgcaaggggagggacagcgtcgccaagacgcttactgatcctgagaaggtgtacgagttcgcgctctacctcaaggccaagtttggcgccaagtagagtgagaattccagatttggtttggttaacaatcgcagcgtatgatctatatctattgttactgtatttggttatcgcgttgtgattttgctcctacctatcacctgtatgtatgtgcttgagcttcacgaataaattagaaagtgcagttgtgt

SEQ ID NO: 27875 - DNA, 857 bp, Oryza sativa
  ref <308>: DATABASE ACCESSION NUMBER: AK103317
  ref <309>: DATABASE ENTRY DATE: 2002-08-28
gggaagaagcaaagcaatctccgtgagcggtgatggcgcagcagtggcgatctctcctcttcctcctcctcctcctcctcgtgcccttcgccgccgccgccgggcaggatgcgccgttcgtggtagcacagaagaaggttgcgctgtcccgcccgggtccaggcgtggagcgcctcgccgtcaccctcaacctctacaaccagggttccgcgaccgcctatgatgttagcttgaacgacgactcttggccacaggaggcttttcaacttatctctggaaccacatcaaagattgtggaaaaacttgatcctggtgctactgcttcccacaacttcatcttggagaccaaagtgcagggcaagtttcagggctctcctgccattatcacataccgtgttcccacaaaggccgcacttcaggaggcttactcaacgcccatgtttccacttgatattcttgctgagagacctccccaacagaagtttgaattggctaagagacttgtggggaaatatgggtcgctggtctccgttgtttcctttgtcggtgtgtttatctacctggttgcaagcccgtcaaaatccactgctgcaaaaggaagcaagaagaggcgctaaatctgttttgttgccttttttttgttgtatttggttttacaagaatgtactctctcaggttttataaggttctcctatgtactctaagggattaactagactaaggcatcatctgtcattttggccttctgtagttgagcatctcgggtgaggcctgagctgactgacttaaaatcagaggtgtagatttgatacatcttaaatcattttagtacattcaaccttttgtgcctggttctc

SEQ ID NO: 27876 - DNA, 2320 bp, Oryza sativa
  ref <308>: DATABASE ACCESSION NUMBER: AK103318
  ref <309>: DATABASE ENTRY DATE: 2002-08-28
gggcgatggtcgccgccgtcgtgcgccattgccggagccaccgctgctctgcgcccccaacctccaacagccaccaccgccgccgctggctcccgtccgatctagcgcatgcccccgcactcttcgccggacctagcgaagggggggaagtcaagactggatccatccccaatcgtggctacggctgctgacgacatccacgccgccgctgcgtgcctcgatccgatccgcgacaaccaggtgctctctctccgtatgcatcggttgaattaaatccggaccctggatggattccctcgatttctcctcgtggtttcctttttcttttattgtttttttttgttgtagcattcttctcgtggttttcgatcatgcataggaagaatgttggttttaaaaaaaattatgtgttcactgattgcaatgcttcaacatcccttgacccaaaagtgaaatgatgctgcagatgtcgcatgagggcaagtactataatgctagatgaattgcccctaaactaaacatgtcacataagattagatgtggcaaccacccctactataaaacttgacttgagagactaattgattagcactgaactcagctgggagagcgaccatgtgaacaagtaatctgggggtatgtactactaattcaatagaaaagtgacgtggtgacttttccatgtgaattgcagagattgattttatgatatttttggtgtagtttctttttcaacgttggttttaagtcgctaaagacacttaagtataaattattattttttgtcgctaataggctgttatggcttgtaataatcagatcttggccaaccaatggggttctgcttaaataaacgcttgtctgtgtctcatttgcttggtccccacaagatggatggggacaactgaaaatcgatgtgaagcttcctgcccccctttttctcttttgtgcctttgggtgtggttcgcgaaatgaaaatttttggttatcacatcagacgtttaaccggatgtcggaaggagtttccggacgcgaatgaaaaaactaatttcataactcgtctggaaaccgcgagacgaattaattaagcctaattaatctgtcattagcacatgtgggttactgtagcacttatggctaatcatggactaattaggctcaaaagattcgtctcgcgatttccatgcaaactgtggaattagttgatcttttcgtccatatttaatgctccatgcatgtgtccaaatattcgatgtgatatttttgggaaaaaaaatttgggaactaaacaaggcctttgtttcgtattatgttgcattatgataaccttgtttagtgcaacagcttttggctatttggcaaatgacttttgttctaatctatgttgcaaatgatgatattattatgtatgaaaatatgaaacagttagaagagacatgatagttggataataacatattatatctaagcgtttttatctgtaaaacagattacatcaattataactcctttttatacaacaattaaaagaataagcacaacacggcagaagaaaacaaccacaaactgagtataaaactttattcaatccatttcaaagaggaaagtggtttaagcatcacctgtgtttgttttctctctctctacattatctccactcatagctacttctgcagcttcaacagccctagcaaccagcagttctccacgctgccatggctacttcggctgcagtggtgtttgcagggaaatccgtggcagctcctgtcatcggggagattatcaccagggccttaaactaccttgatggctaaatcagcgctaaaagcatggaagagatgaagaacaagcttggggaagggatgctgcacatccaagcggtgcttgatgttgtcaacccagatcacttcaaggaccacagcgtaatgttggatcggtggttctggaagcttagggatgcaatcgaggaagcagaggacgccatttatcttcacaagaatataaagagtaaacaaagccctcaaaaaaatatatataaagagtaaagaaaaattggactattgatcgaagtgagaattttaacagtgaggttgctccctttgtagttgtgaggatgaaaaaggtgatatctgacgactggtgattttgatttagggttgggttcattgtgttatttcaattgtagaacccaaattagtcagggtgtaatcaatagtttggtttcgtagctctctctcttaaaaaaatcttgtcaggtaatactactgtgctaaaaatcttgttagaaattaatgtactagcatatactgtcgatcttggg

SEQ ID NO: 27877 - DNA, 2602 bp, Oryza sativa
  ref <308>: DATABASE ACCESSION NUMBER: AK103319
  ref <309>: DATABASE ENTRY DATE: 2002-08-28
gacattttgcagtctcctctcctcctccgctcgagcgagtgagtcccgaccacgtcgctgccctcgcctcaccgccggccaaccgccgtgacgagagatcgagcagggcggggcatggacgagccttcgccgcgcggaggtgggtgcgccggggagccgccccgcatccggaggttggaggagtcggtggtgaaccgcatcgcggcgggggaggtgatccagcggccgtcgtcggcggtgaaggagctcatcgagaacagcctcgacgctggcgcctccagcgtctccgttgcggtgaaggacggtggcctcaagctcatccaggtctccgatgacggccatggcatcaggtttgaggatttggcaatattgtgcgaaaggcatactacctcaaagttatctgcatacgaggatctgcagaccataaaatcgatggggttcagaggggaggctttggctagtatgacttatgttggccatgttaccgtgacaacgataacagaaggccaattgcacggctacagggtttcttacagagatggtgtaatggagaatgagcctaagccttgcgctgcggtgaaaggaactcaagtcatggttgaaaatctattttacaacatggtagcccgcaagaaaacattgcagaactccaatgatgactaccccaagatcgtagacttcatcagtcggtttgcagtccatcacatcaacgttaccttctcttgcagaaagcatggagccaatagagcagatgttcatagtgcaagtacatcctcaaggttagatgctatcaggagtgtctatggggcttctgtcgttcgtgatctcatagaaataaaggtttcatatgaggatgctgcagattcaatcttcaagatggatggttacatctcaaatgcaaattatgtggcaaagaagattacaatgattcttttcataaatgataggcttgtagactgtactgctttgaaaagagctattgaatttgtgtactctgcaacattgcctcaagcatccaaacctttcatatacatgtccatacatcttccatcagaacacgtggatgttaatatacacccaaccaagaaagaggttagccttttgaatcaagagcgtattattgaaacaataagaaatgctattgaggaaaaactgatgaattctaatacaaccaggatattccaaactcaggcattaaacttatcagggattgctcaagctaacccacaaaaggataaggtttctgaggccagtatgggttctggaacaaaatctcaaaaaattcctgtgagccaaatggtcagaacagatccacgcaatccatctggaagattgcacacctactggcacgggcaatcttcaaatcttgaaaagaaatttgatcttgtatctgtaagaaatgttgtaagatcaaggagaaaccaaaaagatgctggtgatttgtcaagccgtcatgagctccttgtggaaatagattctagcttccatcctggccttttggacattgtcaagaactgcacatatgttggacttgccgatgaagcctttgctttgatacaacacaatacccgcttataccttgtaaatgtggtaaatattagtaaagaacttatgtaccagcaagctttgtgccgttttgggaacttcaatgctattcagctcagtgaaccagctccacttcaggagttgctggtgatggcactgaaagacgatgaattgatgagtgatgaaaaggatgatgagaaactggagattgcagaagtaaacactgagatactaaaagaaaatgctgagatgattaatgagtacttttctattcacattgatcaagatggcaaattgacaagacttcctgttgtactggaccagtacacccctgatatggaccgtcttccagaatttgtgttggctttaggaaatgatgttacttgggatgacgagaaagagtgcttcagaacagtagcttctgctgtaggaaacttctatgcacttcatcccccaatccttccaaatccatctgggaatggcattcatttatacaagaaaaatagagattcaatggctgatgaacatgctgagaatgatctaatatcagatgaaaatgacgttgatcaagaacttcttgcggaagcagaagcagcatgggcccaacgtgagtggaccattcagcatgtcttgtttccatccatgcgacttttcctcaagcccccgaagtcaatggcaacagatggaacgtttgtgcaggttgcttccttggagaaactctacaagatttttgaaaggtgttagctcataagtgagaaaatgaaggcagagtaagatcatgattcatggagtgtttttgaaaatgtgtataatttcaccgtattatgtactttgatagtgtctgtagaaactgaagaaagaaagatggctttacttctgaattgaaagttaacgatgccagcaattgtatattctgatcaaacattggcgtctactactctactagcaagtgatcttccttagctccaggtcgacaagaatcaagaatgtgtgtgttgtacccaatttatttagccaaaatgaaaaggtatattttctaagttcaaaaattcaaatc

SEQ ID NO: 27878 - DNA, 735 bp, Oryza sativa
  ref <308>: DATABASE ACCESSION NUMBER: AK103320
  ref <309>: DATABASE ENTRY DATE: 2002-08-28
gggtgaatttcacactgtactgtctgatcgctcgccgccgcggccgctctcccgccggcgccgcccccctccgccgccgccatggggaagttccgcaagctgggccgccacgccgcccaccgcgtctccatgctcaggactatggtgtcgcagctggtgaagcatgagcggatcgagaccaccgtcgcgaaggcgaaggaggtgcggacgaaagcggatcagatggtgcagctcggcaaagagggtacgcttgatgcagcaagacgtgcctcagcctttgttcggggtgacaatgttgttcacaagttattcacagaactcgcctaccgctacaaagatcgagctggtggatatacaagactactgcggactaggatacgggttggcgatgctgcaccaatggcatacattgagcattcaaaaaaaaaatcatccgtttctttcactaaatcaagaattgcagaaggtttgtcgaccgggagaatgaacttcgagaggcaaaacctgcaacaccacagccacctcagcgggtccctcttgatccatggaccaagtcactcgccagcaaacaatgggcaggtcctaaaatcagccagaactccggagcagaaggcttatgacaaaccagagcgttctctagctttattttatgttgttgagaggttcttttgatctttagaacatgaataacattatgcaagatacttgttctatatgataattctgttagcgatc

SEQ ID NO: 27879 - DNA, 1001 bp, Oryza sativa
  ref <308>: DATABASE ACCESSION NUMBER: AK103321
  ref <309>: DATABASE ENTRY DATE: 2002-08-28
gacttcgatctacacgctgctttcaactctctgagagctagctagcatgtcttgctttggcatggcgagcgggagcagcgccgggtggccgctgtcgccgtcgccgtcgtcgacgagggggaggaggagggtgagtgtgaagccgtggcggttgtggtggcggaggtgcgctggagttgcggcggtgatccagtccaagatccatcgccgcgccgtgcggtggccgggcgggcatggtggtgggcgccggcgccgcgaggccgccacggcgtcgacgcgggagcgggaggggtggtgccatcaccggagcttcgcgccggtctacgtcgacgagctctacagccatcccaagacccaccacgtcgccgtccgaggcgcaggcgcagcagccgaacaccaccgctgccaagaccaacgccggcgccgccagcggcaaggcgcgcgccgtcgccgccgccgccgccaacaacaacaacaacgctgtagccgcgaccaacgctagcgccatgttcgccgccaagaacgctgccgctgatgctgcgaccaacgccgctgccggggccagaggcaaggggcgggtgggcggcggcaagaaagctgctgccgctggcgcggcgaccaacggcggcggcgccaaggcggcgcgcggcggcgtgaggagcttgctgatgagcccgctgagaggaggaggagcgtgtgggatgggggaggtggatgtgagggcggaggtgttcatcagaaagttcagggaggagatgaggctgcagaaccagaaatccgccgaggaattccaagccatgctcgcgagaggcctatgacacatcatcatcttagtttattattagttatttgtataataatcataatctaagcatgattattaagagttattgataggtagctatggtttggagtttggaagatttttaggggcttaggtaggaggagattatgtcgtgttcttaagattgctatagtttgaatttggagtcttttcgtgt

SEQ ID NO: 27880 - DNA, 1784 bp, Oryza sativa
  ref <308>: DATABASE ACCESSION NUMBER: AK103322
  ref <309>: DATABASE ENTRY DATE: 2002-08-28
ggtcgtcttcgacttcactccaactccacctccacctccaccacccctctctcgaagccatcgccgcctgtctctcctctccagctcgcccggtcagagtccgcgggggattcgattgattggtagctagctaggcttccgcgcgcggcgacccaacgtcggtggaggcggtgctgaaggccgggcggcgtctcgttcgtggtgcggtggagatgggccaggacctcgccgagatccaccctcgcgagctccagttcacctttgaggtgaagaagcaaagttcatgtactgtccatcttgtcaacaaatccaatgaatatgtcgcattcaaggttaaaacaacatcacctaaaaggtattgtgttcgaccaaacactggagtcatccttccaaggtcaacatgtgatttcacagttaccatgcaagcacaacgtactgctccaccagacatgcaattaaaagacaagtttttggttcagacaacagttgtcccttatggaacatcagatgaggaccttgttccttcttatttttctaaagaaagtggcagatatatcgaggaaagtaaattgagggttgttcttgttagtgcatctcatccttttggagagcagccaattaatggaattccaaacactgaggcagctgttgaggttccttcattaaaggacacgttgaacattaagaatgaaattccagttgcagagaaagaggttcattcccctctggaagaagacccagttgttattcctgcacccccttaccctgtcaaggaggctccaattctcagagaagttcctgtgcatatttcccctgtcagggagacttcattcctgagagaagttcctgcacccgtatccccagtcaaggagactccaatcctgagagaagttcctacaccattgaaggagacacctgttatattgacagaatctccaccccctccaacagatacctcttccattactgtcgaatctctccatcctttcgaacaaaacctagcaagtttgaaggaatctcctctagaagaaactcttccaaaagcagctgtcgtgttaagtgagcaaggggctgtcaatgtgcagagtcgtcaactatgccatgtaacggaagatgttcagaacctgaagtcaaagctcaatggtctcgaagtaaaattggaagaggctgaaaaaatgataataaagctgagagaagagagcagaactaccacccaggagcgggataagttacagcaagaaatgatgtttctacgaaagaagggaacaccaaggaatcaagttggtttccccttgctgtttgtggtttatgtggcacttcttggtacttctctgggttacctcctgcgcttatgaggtcaagttcttccaaaaacccatcagctggacacttcagtttgtcacaagaattggagggcagctacgcatcaatcttgaaaggggagcattccttagcatcgtatttcactagccattatggttttgcatataacaaaggtaccaattgcctgcgtgcatagaacagcttttacatctgtacagaaccgtccaagagatgctgctggctcagtagactaacccgggatttcttttctctcccctcactggggtttttatagtgtgttggattcggttctttcttagaatcggtgcagttttcttcgttgttttccttttcacctgggctggtgtcagtttgaaaactgtcaggttgtatttgatttgacatttgtaaggcatcaacgaggtaccaaagcagaaccatcattatatcgtcgagttgct

SEQ ID NO: 27881 - DNA, 844 bp, Oryza sativa
  ref <308>: DATABASE ACCESSION NUMBER: AK103323
  ref <309>: DATABASE ENTRY DATE: 2002-08-28
ggcaaaagtggatctggatcaagcgaggtgaggttcgccctcttctagggttcccggcgagagacgacgagatccggcgttttggcgacggagctcgtcggatttggaaggtgcccgagaagaggtgtgatcaccgcaccttcgcccaggttgtgatggagcgtcgtcctcccaatcgcctggattggcaagccaacaagcgacgagcgacagagcaaggcggcggcgattggggtgcacgaggcggaggtgactggggggcgtgcggagctcgcgaggaggaggaactgcatcggcaactccttgctcaaaaccctagggcgaatcaaggtgctcaatggaaacctcaagggctccctggtaccgatggagagaggggggcaagagctcctaagatcaagtgcttcaagtgtggtcgtgagggccatcaccaggcggcgcgccctaacccttccctctgctactcgtgccatagctcagtggaagaagctttgtcgtcctggggaggcaactaaactggaaacactagcggaggagatgaagcggatggtggcgactcttagaccttccaggacgggtgtgggctgatactagaagtccctgggaagctgctgttttctgtttggtttccgaagagttggtttttggggttgcttgtctcctgtagcttacttagagtttcttgttgtttatctgcccagtctcttggatgttttaattgtgaactttgtttccctgtttctgcctccctgcgtggaggatacaaaaatgtttgctggcaaccccagcaggaagatgccgtatttggctttctttaaaaagccgggccctgggccttttgtct

SEQ ID NO: 27882 - DNA, 1512 bp, Oryza sativa
  ref <308>: DATABASE ACCESSION NUMBER: AK103324
  ref <309>: DATABASE ENTRY DATE: 2002-08-28
ggcatcatcgctcgcagtcgcagcacaaaaacatttctctcgcgagtcgcgagttgcaccgatcgaattaagggtcgaagatgtttgggttcgggcaccaccacaaccaggcaccggcggcgccgtcggacccgaaccagatcttcaagatcttctgccgcgccaacgagaactactgcctcaccgtccgcgacagcgccgtcgtcctcgcccccgtcaaccccaaggacgagcaccagcactggttcaaggacatgaggttcagcaccaaggtgaaggacggggagggcatgccggcgttcgccctcgtcaacaaggccaccggactcgccgtcaagcactccctcggccagtcccaccccgtgaagcttgtgccgttcaacccggagtacgaggacgcgtcggtgctgtggacggagagcaaggacgtcggcaagggcttccgctgcatccgcatggtcaacaacacccgcctcaacttggacgccttccacggcgacaaggaccacggcggcgtccgcgacggcaccaccgtcgtgctctgggagtggtgcaagggcgacaaccagagctggaagatcctcccctggggccccgaggctcactcctcctcccccggcgccgccaccgcctgcaccatcggcggcgtccccgtccacaccgtccgcgtcttctccgccgcaggcgaggactactgcctcaccgtccgcaacggcaccgcctgcctcgcccccaagaaccccagggacgactaccagcactggatcaaggacatgaggcacagcaacaagatcagggacgaggaaggctacccggcgttcgcgctggtcaacaaggtcaccggcgaagccatcaagcactccaccggacagggccacccggtgaagctggttccctacaacccagagtaccaggacgagtctgtgctgtggacggagagcaaggatgtgggcaagggcttccgctgcatccgcatggtgaacaacatctacctcaacttcgacgccttccatggcgacaaggatcacggcggcatccacgatggcaccgagatcgtgctgtggaagtggtgcgagggtgacaaccagcgctggaagatcctcccctggtagattccggggagggggagctgcattgcattgccatcgtcgtcgcgtctgctctgcttctactctagctaataatttgatcgatctgctaccgaaataagaccgtgttcgttcgttcgatcgatcggagtatggcagtcaatggtgtccgtccgtcctcgagtttgtgtcagtgtgtgtccttttgcgagccagtgattgctatgagatgaaacagtgggtgatgtaagtgcaggaggaggggccatatgattcagaaatctgatgcaactcatcttgctttcccctgtactctctacttttcgtatgcctaatgaatgaattatgaatggctcatttgtctcgaccctgttgtttccccttcttctgtttgtgacgtgtaattttgctgaaaaaaaaggcc

SEQ ID NO: 27883 - DNA, 1317 bp, Oryza sativa
  ref <308>: DATABASE ACCESSION NUMBER: AK103325
  ref <309>: DATABASE ENTRY DATE: 2002-08-28
gagcgccgccaccgagcggctcgcgccgccgccgccgccgccgccacccctcgcgccgccatctccaccatcgccgtcgccgtcgcctcgcctcgtcacggccgcctccgccatcgcctccgccacctccaccatcgtcgtcgtcgtcgtcgtcgccacccctctcccaccatcgtctccgccatcgttgtcgccgtcgcctcgcgccaccacggtcgctgccgcctccgacttccccgtcgcctcgcgtcgtcgtcgccgtcgcccgcccccgccaccatctccggccccccaaaccctagccgccgccgcccgctcgttccgacggggattcggagggggtcgaagggaggaagaggcggtggcggtcggcgaagaggacgacgatggcgacggcggcagcggcggaggaggcagacgcggcggtgggagatggagacggtggtgatggcggtcggcgaagaggacgacgatggtgacggcggcggcggaggaggaggcggatgtggcggcggagagcgagacggtggtgatggcgacgacccccgcactctctcatggcaatctcgggggaggtgtcggggaccacggcaacgctggtggtcatcaatggattcacggtcacggtggagtcagtcggggactcgcggtgcatcctggacacgcagggtggtgaggtgcagttgctgaccgtcgacaactgcctggagaagaatgccgaggagcgggagcgggttagcgccagtggtggggaggtcggccggctcaatctcttcggtggtcaggagttctaggttggccctctccggtgctagacaggtggcatgtgcctttcaagatctattggggacctcttcctgccgctcccatcatccctcgttgcccgccccacatcccatcatcgacggcggcgtggattttggtggtcgcgcaggtctggctgacgagctccatggcggctcgaagcagatggcgacctcaacggcaacgtggatccaggctagagcttgataatggcactaatctgccaacgagcttggcggcaacatgcccggcggccgccgttagttccttacccagcgccgtctccaccgtcttcgctgcctccacggtcatggccagcggcggttgaccatggcatatgctccggcaggcaaaagcagagagatggccttcctcccctttctctcccatctctccttagattaatctttctctctctcaggctgccattgttgttcttttcatggataaaattgttagggatcggcaatatttcctattctaattgtgtcttgactgaaaattagttcgatt

SEQ ID NO: 27884 - DNA, 1025 bp, Oryza sativa
  ref <308>: DATABASE ACCESSION NUMBER: AK103326
  ref <309>: DATABASE ENTRY DATE: 2002-08-28
gggcattggccaattccaaaagcgaaagcagaagccaaccattataaccacccaaaatcgaatcccccaaccaaaaaagaagcaacaagaagaagaagagaggagaaagtgagagtgcactcactctatagcatagcactactctcttcttctttaggagagagcacacagttccaagaaaagctctgagcttcttccatcgatctctcggccatggcacggtggctacagctgccgtgcagcctcctgctcgtcatcatgctcgtcgccgccacggccgccgccgccgacgtcgtcgtccgcgacgacgagaagtgcgccgcgtgcggcctgcccagcccctgcggcacgacgtgcacgtacgccagcccgccgccgcccgacgtgctgccgactccggtctactacccgccgccgccgcccgtctactaccccccgccgtccccgccgccggtggcctaccctccgccgaccacgccgtcgaccaactgcccgccgccgccgtacggaggcggaggctacaacccgacgccgagctacaacccgacgcccggctacaacccgacgccgtcggggtggttcacgccgcagaacatgccgtcgtgcctcgagccgcggggaacgctctacccgcaggaccccggcttccggcccaacgcggcggcgggcggcgccgcgtcgtggcgcgcggtggtgctcccggcggcggcggtggccggagccttggccttgtgatcggcgacgtatggtaattaattacacggcgtttttaattccctttattatgtgttcataataagattagaggagatatattccggtaagataatctctttttttttcgtttttacggttcatgttcacgttgttgttgttgtcgtcatcgtcgtcggcaaattaattgttcttgtcatgtaatgctccgttgatagatcccttttggtgataggaaagatgtacatcagactctgtaataatccatatatatgtctaatcaaatttcaattacatgtggcaattagctc

SEQ ID NO: 27885 - DNA, 4166 bp, Oryza sativa
  ref <308>: DATABASE ACCESSION NUMBER: AK103327
  ref <309>: DATABASE ENTRY DATE: 2002-08-28
gggcttcctcctccacttgcttcgtcgtcgtcgtcctcctcctcctctctctactctctctctccgaaccatccttcccacccggcacgccgccgcgcgctgttcccgacggcggccggtggccggagtgagaggctgggtgtactgtccgctgatgctcgtgggaggcggcggcggcggcggcggcgtgtgatgagcggaggccgcgtgggcgagaacctgtcgcgtcggcacggcggcggcggcggtggcgagggctcgtcaggcttggccacgctttgctcccttcgcagtggcgctcccctggtgccgaatattatactcgccgccgcctcgtgccgcctactttaggcggaaagggggagagctctcctatcctagctgctgctgctgccactggctaagttggtaaaaggtggaggaggcggatattcgtgtatccggaggagagatttggatcgggatctcgccgggatgaaggatcagggatcatccggtgtgtctcccgccccaggggaaggggagaagaaagccatcaattcggagctatggcatgcttgtgccgggcctcttgtgtcgctgccgccggtgggcagtctcgtcgtgtacttccctcagggtcatagcgagcaggttgctgcttccatgcacaaggagctggacaacatccctggttatccctctcttccgtctaagctgatctgcaaacttctgagtctcaccttacatgcagattctgaaactgatgaagtttatgctcagatgacacttcaaccagtcaataaatatgatcgagatgcaatgctggcatctgaactgggcctgaagcaaaacaagcaaccagcggagttcttttgcaaaacgctgacggcgagcgacacaagtacccatggtggattttcagtgccacgtcgtgcggcggagaagatatttccaccactagactttaccatgcaaccaccagcacaagagctcatcgccaaggatctgcatgatatttcatggaaatttcgacacatttaccgaggtcaaccaaagaggcaccttctgacaactggttggagcgtctttgtcagcacaaaaaggcttctagctggtgattcagttctgtttataagggatgagaaatctcagcttctattaggcatacgtcgtgctaccagaccccaaccagctctatcgtcatcagttctatcaagtgatagcatgcacattgggattctagctgctgcagcacatgctgctgcaaacagtagcccatttactattttctacaatccaaggtattatagttcttacttgatatcccattatcccaatgcactctctgctaccctttgggactatgaactcattgttgttattctgatagggcaagtccatcagaatttgtcattcctttagcgaaatataacaaggctttgtatacacaagtatctcttggaatgcggttcagaatgctgtttgagacagaggattcaggggttcgaagatatatgggaacaatcacaggtattggtgacttggatccagtgcgctgggagaactctcattggcgaaaccttcaggttggttgggatgaatcaacagcatctgagaggcgcactcgtgtttcaatatgggagattgaaccagtcgcgacacctttttatatttgtccaccaccatttttcaggccaaaacttcctaagcagccaggaatgccagatgatgaaaatgaagttgagagtgctttcaaaagagccatgccatggcttgctgatgactttgccctgaaagatgtgcaaagtgcattatttccaggtctgagcctagtccaatggatggctatgcaacagaatcctcagatgctaacagctgcgtcccaaacagtgcaatcaccgtacttgaactccaatgcattggctatgcaggatgtgatgggtagtagcaacgaggacccaacaaaaagattgaacacacaggcacaaaatatggttttacctaatttacaggttggctcaaaagtggatcaccctgtaatgtctcaacatcaacagcagccacaccaactatcacaacagcagcaggtccagccatcgcagcaaagttctgtggttttacagcaacatcaagcccagttgctgcagcagaacgccattcacttgcagcagcagcaagaacatctccagcggcagcagtcacaaccggcacagcagttgaaggctgcttcaagtctgcattcagtggaacagcacaagctgaaagaacagacttcaggtgggcaggttgcctcacaagcacaaatgttaaaccagattttcccaccatcttcatcgcagctacaacagttaggtttacccaagtcacctactcatcgccaagggttgacaggattaccaattgcaggttctttgcagcagcccacactaactcagacatctcaagtccagcaagcagccgaatatcagcaggccctcctacagagtcagcaacagcaacagcaactgcaactgcaacaactatcacaaccagaagtacagctgcagctgcttcaaaagattcaacaacaaaacatgctatctcagctgaacccacaacatcagtcccagttgattcaacaattgtctcagaaaagccaggaaattctacagcaacaaattttgcaacatcaatttggtgggtctgattctattggtcaactcaagcaatcaccatcgcagcaagctcctttaaaccacatgacaggatctttgacgccccagcaacttgtcagatcacattcggcacttgctgagagtggggatccatccagttcaactgctccatccaccagccgtatttctccaataaattcgctgagtagggcaaaccaaggaagcagaaatttaactgacatggtggcaacaccacaaattgacaacttacttcaggaaattcaaagcaagccagataatcgaattaagaatgacatacagagcaaagaaacagtccctatacataaccgacatccagtttctgatcaacttgatgcatcatctgctacctccttttgtttagacgagagcccacgagaaggtttttccttccctccagtttgtttggataacaatgttcaagttgatccaagagataactttcttattgcggaaaatgtggacgcattgatgccagatgccctgttgtcaagaggtatggcttcaggaaagggcatgtgcactctgacttctggacaaagggatcacagggatgtcgagaatgagctatcatctgctgcattcagttcccagtcatttggtgtgcctgacatgtcctttaagcctggatgttcaagtgacgttgctgttactgatgccggaatgccaagccaaggtttgtggaataatcaaacacaacggatgagaactttcactaaggttcaaaagcgtggttctgtggggagatcaattgatatcacaagatatcgagattatgatgaacttaggcatgatcttgcatgcatgtttggtatccaaggtcaactcgaagatccatataggatggattggaagctagtctatgttgatcatgagaatgatatccttcttgtcggcgacgacccttgggaggaatttgtgggctgtgtgaagagcatcaaaatactctcagctgctgaagtacaacagatgagcttggatggtgaccttggtggcgtccctccacaaacacaggcctgtagtgcctctgatgatgcaaatgcatggagaggttgaggttcctgacagtaaatactaaattatccttaccattctttttaaggatacttgagagactcaaggatcaaatacacacctagggatctagagccaactcactgacaaattgatcaaaatgcttcgattaggcggaggatgttcagtgaaccgccttgttatggagctcttgacattttgttcacactaaaactggcaacctatcctcatagtcagattaatttcttcttttcttttcggcatacagaactgattttcagtttcataagctacctatgtttatctgggacttgttcattgtaatcttacaagttcataaacaatctgaccgtatatacatgctgttgtatctcccaatgtaatactcggatgattctattggtgtttacactacagaagtaaaaagttgtatggccaaaggcgttctattgtctg

SEQ ID NO: 27886 - DNA, 2095 bp, Oryza sativa
  ref <308>: DATABASE ACCESSION NUMBER: AK103328
  ref <309>: DATABASE ENTRY DATE: 2002-08-28
gaggagaacgagagaaaacgcaccgttggccgcgtatcagggattcggggcatcaaggtccaatagctgaatagcacatcgccatcacaatgccagcgcctctcccaggtgtcggaaccggagagagggagagatagagagacctggaaggctggaaatcgagagcagcgaggcggcgaaacaagcaggcggcccggctctcagtctcatcccgtgcctcctccgcctccctaatcgtcaaccatctagatgtctcagtcggtgcaagggtctttttgttagttactttgcaaagttaaacttgaaaatttaaaggataaaaaaatgtccaggactgcaataattttgcatcgatttcgtcaagcagctgccagtcagagcctcgtagagacttctcttcagtcatgcccatattttggtgttcctctgagatggttaagctgcacagagcaaacttcaaaatgggaaacttctacatcttatcagattgatgacgtagatcaatattcaccaattagtagtgtagcaaaaatctgcacacatcccctttcatctcacgtaaaccactgttatcaccacagtcgttcactgggtttctcaagtgtctcaagttctcgtcgcatgtattcctctgatgctagagccaagccagaagattacaaaaatgctatggccaaagtttcttctacagaaacttctgaagtcggcgccacagatcacagtggcaacacttggattgatattttagatagtgcccgtcactctaccatagatgctactgcagccgcacttaagaaactgaaggcgatgactgatccaattgtaccttgcatccaggagttatatgctacctatccagatctacagaggatggtcatcccacttggtgggacactgatgggtacagcagttgcatggtttgtgatgcctattgttctaaggaagctccacaagtacacttcagaaaatcctctcataacgcttgaaggggagtcaactaagaaatacatgtcctatcaaacaagcttgtggagtgcattggaagatcctgcaaaatgtattatcacttttatggcattttcacagatggctgcaattgttgtgccaagtatttcagtttatcttccacaggcatggagaggaacatttgttgtatctcttctgtggtttcttcagaagtggaaaactaacttcattgctaatattatgaccaatcaatctgctatagggatggacagagacagattgttaacatttgataaggtgtcatcgttagcactaattgcacttggaggaatggctcttgctgaagcttgcggtgtacctgtgcagtcaatattgactgttggtggtgtcggaggtgttgctactgcttttgctgctagagatgtcttaggtaacatactgagtgggctctctctacaattttcaaagccattcttggttggggataacataaaggctgggtcaatagaaggaaaagttattgaaattggactgacatccacgttattgattaacccagaaaacctccctgttgtagttcctaactcactgttctccagccaaattatagtcaataaatcaagagctgtgtggcgtgctagggtggtaaaaattcctgttataattgaagaccttgaaaagattcctactatatcagaggagataaaagtgaagttaaggtccaacccaaacattgatgctccttactgctatctctcacggttagaaagttcacatggagagcttaccattggttgcaacatcaaaagcatgagaagagacgaatggacaacagtggaacaagatattcttttgaaagctgccagcattgtcaagcaatacgaatcttgaacttgcgagcacattacagttctgttctatccctctccattttactgcgagaagaggttaaagtggttactctttttctagtttggtatgggtatatgggactgtaaatagagttctcatgtcccatactctaatgttttgatcacatgtgccatatgcctttcctatttaaggaagtgaccctttgtcatcctactgttacatggatacaagaaaaggagatgaaagatgaatcacc

SEQ ID NO: 27887 - DNA, 1335 bp, Oryza sativa
  ref <308>: DATABASE ACCESSION NUMBER: AK103329
  ref <309>: DATABASE ENTRY DATE: 2002-08-28
ggggtggtgagagtggtaccggtgcagtcccaagttgccgtagagtaacacaccagtacaccacgaaacgcgcagataaacccaagaacgattaggacacacgaaaccatggcgacgcaagcgacggcgagagaaattgcggtggtgggagtgatcggcgcggggcagatgggctcgggcatcgcccagctcgccgccgccgccggctgcggcgtcctcctcctcgactccgacaccgccgccctctcccgcgccgtcgactccatctcctcctccctccgccgcctcgtcgccaagggccagctttctcaggcctcctgtgagcattccatcgagcagattaagtgcgtctccagtgtgcaagagcttagggatgcggatcttgtgattgaggctatcgtggagtcagaagacataaaaaagaagctgtttgttgagctggataagatcactaaaccttctgctattcttgcctccaatactagctcaatctctataacccgattggcttcagccactaatcgcccctgtcaggtgattggtatgcacttttttaaccctcctccgataatgaaattgattgaaatcatacgtggggctgatacatcagaagaggttttcactaaagtcaaatctttttctgaaaggcttgggaagacggtaatatgctcacaagactaccctggtttcatcgtgaaccgcatcctcatgccaatgatcaacgaggcgttctgggcactttacactggagtagcgactaaagaggacattgatacggggatgaagctaggcacgaatcatcccatgggacctctgcagcttgctgatttcattggtttagatgtctgcctttcagtgcttcgggtacttcataatggcctaggagatagcaaatacagcccttgccctcttctcgttcaatatgttgatgctggccgacttgggaagaagcgtggacaaggcgtatactcgtataggacaaggtcttcatccattaaaccgaggtcatctctgtgaaaatcgatgtgcctgctgagcagagaaaagaatgctctttatggactttgtgtatcaatgtgaaaaaataagaaatgtgcagtttacaggtccaacataaacacctacaagttacgcctttgcaagttgcaacaacaggatactgcaggccatgtttgggctatgtaaacaaagtactcgggaaaaatggcggccgtgtgatgtaagctaatatgaaatgtatagatactgagcagatcatgccttaggacttctgtaatctcctatgcagaacttctcgcacggtttgcattttcagtcagcacatatacgcaccgg

SEQ ID NO: 27888 - DNA, 564 bp, Oryza sativa
  ref <308>: DATABASE ACCESSION NUMBER: AK103330
  ref <309>: DATABASE ENTRY DATE: 2002-08-28
ggatctctccttcgccgctcccggaagggatggtatgggagaagcagcgccggagaagatggaaggaatgaagcggcggcctcggtgacgaggtggtggcggcggcggctggtgcgtcggcggccgtggtggccgtggtatcgaggtggtcgtggagtcgtcggagccggcgatgtggcggcggcggcgggggctttggcggctgcagcggtgagggcacgacgccgtgagcttgtttgttgccgccttattctgcatcgatggcctctgtattcatcgttagcttatgttagttgcagcagtagaaaatttctttttttttttggctgcatgctcttcttctgcatttcttcttggatttgtgttgtctgatttattaggtgttttcatgagctcaattattgcttggtctctagctcctgtgaattgtgaatttatgcgtggtgttcgtgtaaaaggcatctttaagctagcttcttgtcttcagaatgtatggatgtgtttattatttcagaatccatgtcaaggtgccgctcaaatctaagctattgaaaatttcgactg

SEQ ID NO: 27889 - DNA, 2662 bp, Oryza sativa
  ref <308>: DATABASE ACCESSION NUMBER: AK103331
  ref <309>: DATABASE ENTRY DATE: 2002-08-28
gcctcacccctccccaccacatcttcaacccccaactcacgcatcgcccccctcctctctcctggactccccatcgtgcgccgttaggtcgccgtcgccgcatgccgctcctctccccactcacgggaggaactctctccaaaccctaaccctaacctcctctctctccacgaatacgcgctgcacgctgttgcgcgctcccctccccactcgccggttcctccgcgtctcacctgatctccacctcgaaatccgccgccggagcagcgttaggtcgtcgccctcggtggctcatgtcgcactgtcgcccaccttcgcgccgccaccggtctcctccgcacggtttgttttttcttccgttgtccagtttcaatctcttctcccttctagttcattatttttctttggcctgattgattttttttaacaaactggccaatttgattttggctgtgatataccagcaaggtatgtttttgaacatgcacatgatgttttctattgaatgctgcagaaacagtccgccaccctgttcgtcaagcaattttgttatcgatggttggaatgtattacgccaatgtgttagtgccaactaatttttgggtttctgcctgaaatgctaacatactattcgatgcattcatgatagtctggggacaaaaggaaaaaaattatctcgtgctttaggggtcaaaataggacatgtgatatttggttgttcacaaacagctagcccagcattaatccactgatggtctgcttgctgaatttatttctaagtaattagcaatctttatttaagcctgaatgatttgtactaaaaatttccccttgtttttcatggtatcacaatagattggaacaggataatcttctgctcaagaaaacaccaatgttggagatgatcacaattgtcctccactgctcttgatcattcaagcaggcacatatacatacatatacaaaaagatatgccatggtgtggatggaaatcgtggaggaattctgcatctgcactctattgacagagttctacttatataaacattgcaagggatgcatctttcggtaattcaccattgataggcattgtactaaactactaatactataatctgcaggtaatatatatccatctattttttcccttcaaatctactagacttcaacatacaattttctcaaccccagatatgtgggtatatgcagctgatttgcaatcaccaaccccagatattttaacccttatagcttaactttgaagtccatatgttaggcgcagagtggtaaagtggtttatgtctattttgatcgagcagtttggcgagcggagacgtggaattatacaatggtagttcaggagaattaacataggcataggtactattttttactgatagatgtattttgaaatcttcatggattatggagcggaacagctaaactttgctctgctgtaacttagacccaattgtgcagtgttcatggtatgtccgacgttgcttactttgatatgcttatgctcttagtggaatcactaataaacatcgccggatatgtgtccttttagatatgcttgtgtgtttgcttcctggagatttggttgggttggaacaaaatgttatttatttgctttagaatgcagtgccctatgtattacgaaattatacttcctttaattgagtctaatggcttagaatccctataatattgtttaattgtgtggagaacatgaccaaaaatatataaaatggacatataatatactgctgcttccctgtatttcttgggagattctttttcaagatcatcactgatcagatgctacgagtctaggaatctttaaagtttgattttctttttggcatgtatggatgtatattttggtttaatcttgccataatttatttatttattactactaggtcaggagataaaattctccttcaaagctcattatacaatacaatgttacaataaggataacataaccttatccaaacttgtgattagtcaatgcttaattaattacatcattttgagtcatcgtgggtgaaacatggtacatttgtgttaaacatattattgatagcacttccctttgatgcacatgtaggcagctcttaccctgaattcatataattggattagctgaactcagtgcctccaatgatgattgaataggaagggaactaactagggtagtattgttttgtgcttgagatcctggttgcggaactgagatgtactattgacttgagtcatatttagttttttgctatataatgttgatttttttactcatttttgcagaacgaaggatggcgcttgaccgtggatgaggagcggatgtcctgctcaatgagaactactgtggatgcagtttttctttcagttttggtgacttcagtgctgctattttatgagattttccattgtttgtgatcagtaagcaagcatgtactaatcagttggtggcactgagcatggctctttctttttagatcagactagcaaaactgcccgtgtgctgcaacgggtgaaaaattccaatgacaatatatgtttttcataaataaccatgtgaataataatgtttgtgttgattgttgtagctaagacatatcataaggaaaaatagaacatcttccattctttgccc

SEQ ID NO: 27890 - DNA, 1643 bp, Oryza sativa
  ref <308>: DATABASE ACCESSION NUMBER: AK103332
  ref <309>: DATABASE ENTRY DATE: 2002-08-28
ggcaccaacacagcattcttcctgctccagttctagtcttctagggttagaagtgatgagaggtcaagataagctgtgggtaaacaagctcaatcactatggtgtgggtgtagagatctgatctatatatccaggttttgtaaccaggggcaataagctagaggcagcaactgcataacttgcgagaaacttgtaagatttctttacaacctatggaaaagataggtttacttgtcttaattttttgctgttcttgttaactaggaaaccagaagaattattaacaagagagaatttataacaaacaaatttgatgccaattctatccttgactctttttttttctattttttttatctcttgagtcatctagtcatttcactgtttgaaagttgggaacatctgcatcacctaagatatgatcctacctatccctgtggaatgtgttatctgtgtgttcagtttacaggctgtgttactaaaataatgcatgtatttgtgagtagtagtgttctgatgtgatgaccttcaagctagacctccacatttgcgagaactttcaccatcaagacaaaaaaacatgatgaaacaacctatccaatacatataaagcgccataggatgaactcactcataccaaactggcactctcatggtatggtatgacatgtggaaatgggtatacgcatgagatctcccggaactgaattcactttgatataataacaccttggcatgtaatagcattagtaaatgacgtccaaggaatattagagtaatcatagcgttaatactgtaaaaggaacatattacttgtactagtccttgattgacattcagggtctgtttagttcccacaccacaccctgtcacatcgaacgtttgaacacctgcatgaagtattaaatataggctaaaaaaataactaattgcacagattgcgactaattttgagatgaatcttttaagcctaagtgctccatgatttgacaatgcgggattaattaggcttaataaattcgtctcgcggtttactaacggattttgtaattagtttttttattagtgcccaaacacccatgcgacaccctatataatatccgatatgacacgctaaaactttacacctctagatctaaacaccccctcaatacgtactgaaacagctaccggaatccagaagtaaaactttttcacctgagtatcacataagctcagccatttcgctatggtactctagggtctaaacatggcaaatagtctaagtctgtaacaattattatagatatcagtacaaacaacttaatggtgaggagacagttatatcatgattttcatgctgattattattcctatatatgatgtgcttccttcaggttggatgatgatcttgccaatgattttgccgcaagttatgcagttgctgcctcaagcttactgcctttgtttgctaaaccatgaaaccagcacaacaataagagactccaattgcaagagaccttccaggaaatctttagtaggcatcatatgttcaatacaaatatacctgaggttgttagagcaaattatctgctcatgtacgattacactatctctattatcagaaaatcacaagaacttttgttgctgggttttgcattagc

SEQ ID NO: 27891 - DNA, 1620 bp, Oryza sativa
  ref <308>: DATABASE ACCESSION NUMBER: AK103333
  ref <309>: DATABASE ENTRY DATE: 2002-08-28
ggaagcagcacaagcccaagtagggtttcctcgctcccaccttcacccacgaggtctccgacgccgccgcggccgccgacgacgacgactacctccggcgaccgccggggcggccttagcgccgggtaccctgccgcctccgcgtagccgagccctatcgcgtacccgtccctctcgcgcctagtgcgccgggctggccggtggcggagtaccggaaatggtgatctcttctccctctcagagattccagctttggttagtggctcgtgtgtcgtttgcatgtgctaagattggattgagtttttgtttgagcaatcccatccgtagggtaagggaaccaggtgcagctatagagggaattttccaggtgttgcactgattgctaatgtgaaatgttgagcaattttggagtcaggggtgtgtgtggtagatgtaagattgggaactttgttggtaaatctgttattattccgattgaaagttaaagctcagattactctgctctgtggatttgttgagccagttgcttatctgggacttcggtaatccaattagagtagaacttggtgggcatagtcaatctgcacgaattgttactaatgatcatggaaacatcttagtataacttacatcatttctcatcctcctattactattggtatgaaattacattttgggtgcattcactgcatggttttaagtattaatcagcgggttgtccgaaactaagaatgagtgtaaattggcattggtttgatttatgtttgcaatgcagcggcagttttctaatgaccgtgttgttttcggttatttttgtagttcgcaaaacaatttcctattgtcttctccatgcatcctaccagtttgtgcttatttactttctagcttctggataattttatgatctctaaatgtttgatttcagtttaatgcatgaatacagagtgccaataacaaagtagaggccaaaaatggatgcgcaacacgacaaagttagttataaagttatagcgatttaatacttccatatttaatttctgcaggctacaccactcatagcaggactcacggttgcagcggcggcccttgctggtagatatagtatccaagcttggaatgcttataaggcaaggcctgtagttcctaggatgcgcaaattctatgaaggtggctttcaacctacaatgactcgaagagaagctggtttaatcctaggtgtcagggaaaacgcccatcctgagaaggtaaaagaggcgcataagaaggtcatggttgctaaccatccagatgcaggcggtagccattaccttgcttcaaagatcaatgaggccaaagatattttgttagggaagacaaaaggaggggggtcagccttttgattattacaataataatgcaccatatgttctttcaatgaaatggtgaattttggtatctgtagtctgaggacttgaaaggtaggcttaaatcttgatgcgtgactagaaatttatggacagaaaatgttagcaggtctgtccactgtttgacatttcagtgcccggtcgtgttcgctcaactggttatcgaataactgatatacatggaaatggtaatacctgtacgatgtatcatatctct

SEQ ID NO: 27892 - DNA, 2297 bp, Oryza sativa
  ref <308>: DATABASE ACCESSION NUMBER: AK103334
  ref <309>: DATABASE ENTRY DATE: 2002-08-28
ggttaacgagttgatcgcagtcgccattacccgttctagagactctctcctccgtcggcgaatcaaatcccccaccgaatccgatcgaagcagcgagatttcttcttccgcaatccaaatcgccaccgatggcggccgccgccatctcccacctccgccgcggcgcgccgcgccacgcccgcgcgctcctctacctctcgacccgccgcttctcctcctcctccgccgcgggggtggctcccctcgccgcggtcgccgcctcagcccgccgccttctctccacgtcggtggactccggcgcgtcctcgacgggggagagctacaagccgccgctcttcgaccccttccgcgccgccagcctcgcctcgtcggccccgccgctggagtcgccccccatcgaggagctccccgatgacgcgactcctcccccggaggaagagcctgggctacccgcgcccgagaaggatccggtggcgacggcgtgccagcacgagttggagggtctgaaggcctgggtggagacggtgaggagcaggaaggagtcgacggaggagaaggaggcgtggagtctgctcggccgctcggtcgtgagctactgcggcaccgccgtggggacggtggcggcgaacgacccatccaccgcgaaccagatgctcaattacgatcaggtgttcattagagactttgtcccgtcggccatcgcgttcctcctcaagggcgagggggacatcgtgaagaacttcctgctccacactttgcaactccagagctgggagaagacagttgattgctacagtcctggtcagggattgatgcctgctagtttcaaagttagatccatacctctagatggaaacagtgaagcatttgaggaggttcttgaccctgactttggagagtcagccattggacgtgtagcaccagttgattcgggtctttggtggataatcctgttgcgggcatatggtaaaattactggagactatgcactacaagaaagggttgatgtgcagacaggcatcagactaatcctgaatttatgcttgtctgatggatttgacatgttcccaacattgttagtcactgatggatcatgtatgatcgatcgacggatgggaatccatgggcatcctcttgagatccagtcgctattctattctgctttgcgttgtgcccgtgaaatggtcagtgtaaatgacggatctaacagtttgatccgtgccatcaactacaggctcagtgctttgtcgtttcacataagagagtactattgggttgatatgaagaagataaatgaaatttatcgctacaaaactgtagagtactcccatgatgctattaataagttcaatatctatccagaacaaataccttcttggcttgcagattggattcctgaaaagggtggttaccttataggaaatctacaaccggctcacatggatttcaggtttttttctcttggaaatctctgggcaattatctcttctctagctactcaaaggcaagcagagggtatcctgaacctcattgaagccaaatgggaggatataattgcaaatatgccactcaagatatgctaccctgctctagagtatgaggaatggcgtatcatcactggcagtgaccctaaaaacacgccctggtcgtatcataatggtggatcttggcctacattgctatggcagttcactctagcctgtatcaagatgggtaggcgtgacttagcacagcgagccattgaagtcgcagaaaagagactctcagaggacaagtggccagaatattatgacacaaggacaggaaggtttattgggaagcagtcaaggctatatcaaacttggacgattgcaggataccttagctctaaaatgcttttagactgtccagaattggcatccatattgatttgtgaggaagatctcgagctgctggaagggtgtgcatgcagtgtgaacaagagtgcccgaaccaaatgctcccgtcgtgcggcaaggtcgcaggttcttgtgtagtaccacaattggtgcttgactaccaagatgggcactgcacattctacttcgttgtattttttacgttgctctagttagcatagttacttcaccagggtggccacctatgccggttattttggcaatcttgtggttaatccatcgataacgcttgtgtgtacattctaccaaattatgattgcatactacactaaaagccgatcaaaagttgattggtcggttgtaaactgacaggatgtaaatattgccactttgtaatcaatatatgggagaatgtttctg

SEQ ID NO: 27893 - DNA, 1397 bp, Oryza sativa
  ref <308>: DATABASE ACCESSION NUMBER: AK103335
  ref <309>: DATABASE ENTRY DATE: 2002-08-28
ggccttcctttcatttcctttctcttttctctttctttctctctctttcttggtgttggaaggcgaaggcaacccagggggggaagcaccggaggagccgcagatcccgccatgcgggtgctcccggcgtcgtggtcctccgccgcctcctcctccgcctccgcctccgcggaccgcctcaactcccccaccccggcgccgccgccgccggcccctcctcctcctgctccaaaaagcagcagcagcagcagcgcggagctgtacctcaacatctacgacatctccccaatcaaccactacctctactggttcggcctcggcatcttccactccggcatcgaagtgcatggcatggagtatgggtttggagcccatgaatacccaaccagcggagtcttccaagtagagcccaaaagctgtcctggctttatcttcagacgctccgtgtgcgtgggttccactgatatgtctcgttcggaagtccgcagtttcatagaggatcttgcagaggattatcacggggacacttatcatttgattgcaaagaattgtaatcattttacagcagacatctgcaagcgtctgactggaaagccaattcctggatgggtcaatcgacttgccagattaggttctttctgcaactgtgtactgcctgaaagcatcaaggtttccgctgtcaaagatgtaaccgatccccccgagtttcctgatgatgatatggagtctaatgcatccattgttgacggaagtgatgcggatgatttagaccatcttctaataaccccaagtagcgatgttgtatcttcaaaagataagatattaactcctggcagggatagcttgtaattgcatgtattctccattgatatagttcaagtattacttgtggggttgttttctgaggatcaatctgatgatttcttgctgagtggcgatgtggctggaggaggggtatgctgtgggcagtcaaccttgaatagttgaatgtataatccatgaatggtaattctgtgtgtcttacactagaggtagtgaatgtgattgtctaactgtggcgaagggccatgtttccattataagtatatgctgttttgagagaggggaggggaggggaggagtgcgttgacagtgtggtatgtatatgctgtaactagttggagaatgattgacttcatttgagttacctaggtgggcttcctgttttgttttgttgtgtgtaactgatttgtttgtacaaatgaatgatttgcagttgtggaagttgaatagatgttcggtccgtctctctgttgttgttctgcctgctactctctctctctctctctctctctctattgtttgagagggctgatgctttactggagtaatgtagccgtcttaattgttggcgaacc

SEQ ID NO: 27894 - DNA, 1617 bp, Oryza sativa
  ref <308>: DATABASE ACCESSION NUMBER: AK103336
  ref <309>: DATABASE ENTRY DATE: 2002-08-28
gagtgcaagctagaagccttgttccatacttgctcactagttagctaggacatggaaaagtctgagctcttgctaggatcgtattcatatgcagctctatgtggtgtcacactcatcataggatggttagctcactgggtatacaaatggatgaatcctccatgcattgggaggcttcctcctggctccatgggcttccctattattggtgagaccttccagttcttcagagcaagcccatcaatagacatgccaagctactacaagcaaagactggagaggtatgggcctctattcaagactagcttagttggacggccagtgatcatttcccttgacccagaggtgaaccgattcatatttcaacaagagggtaaattgttccaaagttggtatccagaaactgcaattaatatctttggcaagaagagcctcaccacatacaacggaaccattcacaagtttatccggggtgtcgcggccaagctctttggccttgaaaacctgaaagaatcactccttcctgagctagaaaactctatgagggagagcttcgcatcatggactgggaaacccagcgtcgaggtacaggacggcgtgtcagacatgatctttgacctagttgccaagaagttgatcggactcgatgtcaccaactcaagagaattgagaaagaactttcaggacttctttcaggggatggtttccttcccaatatattttccagggacatcattctaccgatccatgcagggtaggagaaatgtgcggaacacacttactgatataatgaaagagaggctaagtgcacctggaaagaagtatggtgaccttgtagacctcattgttgaagagctacagagcgaaaagccaatgatcgatgaaaactttgctatagacgcacttgctgcgctcttgtttacgagctttgcaacactgtcatcaaccttgactgtagcttttaagtacctaaccgacaatccaaaagttgttgaagagctcaaggaggagcacgggacaattctaaagaagcgagaaggtgtgaattccgggttcacatgggaggagtacaggtccttgaaattcagtactcaggttatgaatgaaattactcgaattagtaacgtcacacctggagttttcaggaaaacattaacagatgtgcaagtgaaaggatatacaattccatccgggtggttagtcatgataagccccatggcagttcacctaaacccaaaattgttcgaggatccacttaaatttgatccatggaggtggagggaggagaagagaagctcgatgctgaaaaattacatgccatttggaggaggcgtcaggctgtgtctcggggcagagtttagcaagcttttcattgcactcttcctccacatcttggtgaccgagtatagttggacggagattgaaggaggggaagtactgcgcatatcagagatcatgttccctcaaggctatcacatccaactagttcctcagacttaatatacctattggatattccactgttgtaataataaagaaattgtgaacccaataacttgttgcgtatgatatctatattgtaactatgaaataaacagctcgtgtgtcttcagtttc

SEQ ID NO: 27895 - DNA, 919 bp, Oryza sativa
  ref <308>: DATABASE ACCESSION NUMBER: AK103337
  ref <309>: DATABASE ENTRY DATE: 2002-08-28
gcctctctcctgctcgtctcgtctcccttcctcctcgtcttcggcggcggcgcggcggagatgttgtccggcgacatacccccgaaccagacggtctacctcaggaacctcaacgagaaggtcaagaaagaagaattaaagagatcactctatgcgttgtgctcccaatatgggaggatactggatgtggtggccttaaaaacacctaaactgagggggcaggcatgggtggtcttcagcgaaattaccgccgccacaaatgctttccgtggactgcaggaattcgatttttatggcaaaagaatgcgagtacaatatgcgaaaacaagatctgactgtcttgcaaccgaagatggttctactgctccaaaagagaaaagaaagaagcaagaggagaaagcagcggagaaaaaacgacgagctgaagaggcgcaacaatctggtcctaatgctgctgcccaaagcaatgggactggttatcaagcctcacgcctgggcaagacttcgcaagagccacctgcacctccaaacaatatccttttcatccagaacttaccagctgagactacaagcatgatgctccagatcctgttccagcagtaccctggtttcagggaagtccggatgatcgaagccaagccaggcattgcttttgtggaatacgaggacgacagccagtctatggttgcaatgcaagctctgcagggtttcaagatcaccccatacaacccaatggctatatcctacgcaaagaagtgaatgatccatgggatcccacaatctggcaagaaaacctctgtacttgtaagactttccgcccttagctttcaaactgctgtatcagttttctaacactgtatttttggaaagcaattgcttagtttagaagtctttgttgcttaaatcatatttggtcttc

SEQ ID NO: 27896 - DNA, 679 bp, Oryza sativa
  ref <308>: DATABASE ACCESSION NUMBER: AK103338
  ref <309>: DATABASE ENTRY DATE: 2002-08-28
gagtcgagtgagtctcttagcgaggagagacgaggcgagaggagaggagaggcgccgccgcggcgaggagagcgagaatcggaaggcgatgggcaacgccgggagctcgccggagcaggccgccggcaataataaggaggacgcggaggcccgccgccagccgccgtccaccgtgcgattctaccccagcgccgaccagcccaaggccaggcagccgccgcccatcaagctggaggaggaggacgtgccccctccgcccgtcgccgacgaggagatggccccccgcaacctctggcaggtttatgctcttggagcgtttattgtgttgagatgggcctgggttaagtggaaagaaagcaaggaaagagatgattcgcctgatggccgatccccggacgggtcttcttagtttgctccagaaagctttagtctctgctttaaatcctaagaagataaagatgttgtgcgatgatggtgcacctctctaatctatgtccatctgattagagtttttcttccccgtcattgttgccttgtgtttggattctgtatttgcccatcatgcgcaagtgacttccttttccttgctgtcatgttagaacttgcaatatctttaagtgaaaggcttgtagtaaaagtaaaagacctcttttaatactaccatccatgatccaactgc

SEQ ID NO: 27897 - DNA, 1024 bp, Oryza sativa
  ref <308>: DATABASE ACCESSION NUMBER: AK103339
  ref <309>: DATABASE ENTRY DATE: 2002-08-28
gtccctaacaacagaaccgccgccgccacggaacccacccacgccggaatgtcgccggcggagccccggccgcccgccgccgccacccgcaagcggaagaagccgcacaaacccaccaaaaccctcgccaagaaccccaccaatcccgtctccacgaaggcgaagaagaagaaaccgccgccgccctccaaggcggaccaatccgcctccgccgccgccgccggtggcgtcctcctgtcggccgagatgccccctgcgcggcagctcgagttcctcctccgcagcttcgagcgcgccgccaagatgcgcctctccccgctcgagctcgacgcctactccgagggatgcatggtgccgctcgcggagggggcgagccaggacgtggagggattcggtgaccatgtgaaaggggcctttggctcctcttggaaggaggagctttgtgagggggagctcgatggcggcgccgtggacgcgggcagcccggcgctcctggttatctgctcagctgctctgagatcgttggagcttcttaggggtttaaagatgtttactaaagagtgccgccctattaagctctttgctaagcacatgaaagtggaggagcaggttgcgttgcttaaaactcgagttaatattgcttgcggtacaccaagcaggatcaagaagctaattgacatggaagcattatctctgtcacgggtgaaactagttgtacttgacatgcagagagatgcaaagtcatttaccttattcacgttgccacaagtcagcaacgagttctgggacttatacaagggctatctcgatcagaaagttcgaggaggagatacaagattatgtttttatggtgctgtctctgagaaagatgtgaaaaaagcccttccatctgcggagtaaaaatggctgatacgatgaatttgtgtcatgtgcacattgtagtcaatgtactagatatgtatttttgacatactagaagtttgtagaagcaggctgggcaagaaaattttggaattttgagtgc

SEQ ID NO: 27898 - DNA, 1566 bp, Oryza sativa
  ref <308>: DATABASE ACCESSION NUMBER: AK103340
  ref <309>: DATABASE ENTRY DATE: 2002-08-28
gatcttcccaccttggcgtaaaagaaaagaaaatctgcagtctgtgtcgtctcctccggtccttgcgcgcaagaccgagtcgcggctgccgatctccatctgccgatcgagcagagcatagcaggggatcctggaaatggctgacggtgaggacatccagcctcttgtctgtgacaatggcactggaatggtcaaggctggtttcgctggggatgatgcaccaagggccgtgttccctagtattgttggccgtcctcgccacaccggtgttatggtaggaatggggcagaaggatgcctatgttggtgatgaggcacagtccaagagaggtatcctcacgctcaagtaccccatcgagcacggtatcgtgagcaactgggatgacatggagaaagtctggcatcacactttctacaatgagcttcgtgtggcgcccgaggagcaccctgtgttgctcactgaagctcctctgaaccctaaagccaacagagagaagatgacccagattatgtttgagactttcaatgtccctgcaatgtacgtcgctatccaggccgtgctttccctctatgccagtggccgtactactggtattgttcttgattctggtgatggtgtcagccacacagtgcccatttatgaaggatatgcgcttcctcatgccattctccgtttggatctggctggtcgtgacctcacagactcccttatgaagattctgactgagaggggttactccttcacaacctccgctgagcgggaaattgtaagggacatcaaggagaaacttgcgtatgttgcccttgattatgagcaagagttggaaaccgccaagaacagctcctcagttgaaaagagttatgagctacctgatggtcaagtaatcacaattggtgcagagaggttcaggtgccccgaggtcctcttccagccatccatgatcggtatggaggctgctggtattcacgagaccacctacaactccatcatgaagtgcgacgtggatatcaggaaggacctttatggcaacattgtgctcagtggtggtacaaccatgttcccaggcattgctgatcgtatgagcaaggagatcactgcccttgccccgagcagcatgaagattaaggtcgttgctccacctgagcgcaagtacagcgtctggatcggagggtcgatcctagcctcactcagcactttccaacagatgtggatatcaaaggacgagtacgacgaatctggcccagcaattgtccacaggaaatgcttctgattttctcaagtgctctgctcttgtcatctgtagtatcgagttatgtttgattcgtttttctagcgatgtattggagatttgcaggctatgtttgttttctttttggagacgacttctctatgtgttcgatcagtgtaagaatgtcctatgtttgtgtcatctcagattgtttgtttgagttcacttgtcaaacttggttcgtttgattggtcagaactgtctgtatgagcttattgttctatacattgctccaagggtataattatgttaaattttggatctatttcaatgtgggt

SEQ ID NO: 27899 - DNA, 2279 bp, Oryza sativa
  ref <308>: DATABASE ACCESSION NUMBER: AK103341
  ref <309>: DATABASE ENTRY DATE: 2002-08-28
gtctgtgtcttttttacttgcgagctcaactgtcgccgcccccacctctcgtactccccacgctccagccatggcgtcgccgccgaccacggccgccgccgaccccggccgccgccgccgcctcctcctcgtcgtcgttgtcctcctcctcctcctcctcccgctcgtggcctccgctgccgccgtgccgcacaggcaccggctgccgtcccaccacctggcctcgctcaaactcaacgcatcggcgccgccgaccacttacttcgaggtggatcgcccgatccgcccgccgcgcggcagcgtcgggccctgctcgacgctgctcctctccaactccttcggagccacctacggccgtccccctgtcaccgccgcctacgcgccgccttcctgcctcgccggcggcggtggcggcggcggcggcgcgtcgtccatcgcgctcgccgtgctcgagtggagcgccgactgccgcggccgccagttcgaccgcatcttcggcgtgtggctctccggcgccgagctcctgcgcagctgcaccgcggagccgcgcgccacgggcatcgtctggtccgtgtcccgcgacgtcacgaggtacgcggcgctcctagccgagcccggcgagatcgcggtgtacctcgggaacctcgtcgacagcacgtacaccggcgtctaccacgccaacctcacgctccacctctacttccaccccgcgccgccgcctccgcctccgccgcagcaggccgatctgatcgtgcccatctcaagaagcttgccgctgaacgatggccaatggttcgccatccagaactccaccgatgtgcagggcaagaggctcgccattccgtcgaacacctaccgggcgatccttgaggtgttcgtctccttccactccaacgatgaattctggtacacaaaccctcccaatgagtacattgaagcaaataacttgtccaatgtccctggcaatggcgcattccgggaggttgttgttaaagtcaatgatgatatcgttggagctatttggcctttcaccgtgatttacactggcggtgtcaatcctcttctgtggcgaccaatcaccggcattggttcattcaacctacctacatatgacattgacattacacctttcttgggcaagctgttggatggcaaggagcatgattttgggttcggtgtgactaatgcgctggatgtgtggtatattgatgccaatttgcatctatggttggatcacaagagtgaggagactactgggagcctgatcagctatgaagctcaaggactggttctgaatgtggactcgggattcagtgggctggatgggcagtttgtaactagcgcaagccgtcatatctccgctaccgggttggtgaaatcgtcttatggggaggtcaccacgaatttttaccagagattcagttatgtgaatagcaatgtgtatagcaagaacggctcggtgcaagtggtgaaccaaaccattgatgcaaagtctggtgtttttgccaaggatgctttggctgtgctgctctctgaggaacttcaccagatcttccctctgtatgtttatactggtacttcagatgaagaagctgatgagtacacattgatttcacacgtcaaattgggcgtcaacgagaaggagacatcgggcgggaagatggggttctcatacaactccctgcggaacgcgcagtcggcccatggcagtatgaaggtgaagaagaatttggtcgttggtggattgggggagacccatcaggcgtataaatatgttggtgctgatggatgctacttcagggatgttaggagcaagaactacacagtgctttcagaccactctggtgattcctgcacaaagagaaatccttacaatggtgctaaattctctctcaggaacgatcaatcagcaagaaggaagttgatggtgaataatctttagtgttgtatagcttggaacaaatagggaactgaactgtccatggttctctccattttactctgtctcttgatctcttcaataaagggagtttagcttagcttatctttgatgtgtagtcagtaagaaacttggaaatttctctataaccgcttcaaattgaatccccctagagaaaaactttgaacttcccctgctagatagtggaaagtaagcaataggctattcagatcaagattctgagggatgcaatctctcccttttcttttatctttcatgttgaattgttttagtgtacagatccgagtccaaactccatatgaagcatattgaccattcc

SEQ ID NO: 27900 - DNA, 1270 bp, Oryza sativa
  ref <308>: DATABASE ACCESSION NUMBER: AK103342
  ref <309>: DATABASE ENTRY DATE: 2002-08-28
ggcgcacttctttcccctccaaataagctcgtccagtccaagcacacaagccattccaccgctcgccgtcgctgtctcccatcccatcccatgcatcactagcggatttgtggagtggttgcgccccctgcgagcgagctctgttcgtaccgcgcgctccggtgcggagtggttgctggccggcgaggcgggcggacggacgcgtcgatgcgcgtggcagtagctgcgtgcgggtgacgaagcaggggcacttgctatatccgtcgcctcttggcggatgtgcgggattctgcgcgcagtacgcggcggccatggacgcgtcctcgcccttcagcttccacgagctcaggcggcaggcctcgtcctacctcaccgacaagatccgctccgcgcggctcgcgctcaccgatgttaccccgacgcagctgatgacggaggaggcgacgagcggggacgcatcgccgccgaacgtgaagacgatgagcctcatcgcgcggcaggcgttcgagatcgacgagtacgtcaggatctccgacatcctccacaagaggttcgcgaggttcgacaggcggcagtggcgtgaggcgtacaaggccctcctcctcctcgagcacctcctgacgcacggcccccgtagcgtcgcgttggagttccagagggatcgggaggtcatcgagcagatggtctccttccagcacatcgacgagaaaggtttcaactgggggatgacggtgaagagcaagtcggagcgcgtgctgaggctgctggagcggggccccttcctggaggatgagtgtgagcgtgcgcgcaagatagcgcacgagatcaagggattcggcagcttcaacctcagcagcgcgcatgcgtcggggtcggcggcggcagccctccgcgcgggggcgatggagcaccagtgctacggccggagcaactcgcggtacgagggcaggtggaggagggaggcctgcgtggacgacggcgacaaggagaacctgctggtggtgtcgatggccgaggcgaaggccgaggcggcggcggaggagccgcaccactaccaccacccgttctacggcttcgggcagcagcggccggaggcgatgctgctcctgagccagtagtgatcgtttgggtggatggttcttcgtcgatcgcatcgttcgttggtttgtgatgcgtgagaaaaaatcctgtaaagtcagtggcttgctggcatcctctttgtgatgacccttttgtagtcgtcgtccttaatttcagttctgatttctgt

SEQ ID NO: 27901 - DNA, 1361 bp, Oryza sativa
  ref <308>: DATABASE ACCESSION NUMBER: AK103343
  ref <309>: DATABASE ENTRY DATE: 2002-08-28
gttggcatcagcagcagcaccgcggccgcatgtgggccgcctcaccggccttccgcaggcgcctcttcctcctccgttccctttccccctccccctgcgccgccctccccggcaacgccgcctgctcctcctccccctcgccgtcgacctccattcgggtcaacgcgatgtcggcatcgggccccgtgtacgaggcggacgctgaggcggtggtccgccggatcaccccgccgctcgaccgcgcgcgccacaagggccaggcagggaaaattgctgtaattggtggatgtcgtgagtacactggtgctccctattttgcagcgatttctgccttgaaagttggtgcagatctctcacatgttttctgcacaagagatgctgcaacggtaataaagagttatagccctgagctgattgtacatccaatactagaggaatcttacagtgtaagcgatggtgagagagaatctgtttcttctagaattctcacagaagtagcaaagtggatggagcgctttgattgcatcgttgttggtcctggccttggaagggactcatttcttctggactgtgtaagtaatatcatgagacatgcacggcaggcaaatattccaacagtcgttgacggggatggccttttccttataaccaataaccttagtcttgttgagggtaacttgcttgccatcctaacaccaaatgtatacgagtacaaacgtcttgtccagaaggttcttaactgtgaagtaaatgaggaaaacgcttctgaacaacttactgcactatgccaaaaaaatcggtggcataaccatcatgcggaaaggaaaagcagatataatcagtgatggcaaaactgtaacacaagtaagtacctttggttccccaaggagatgtggtggtcaaggtgacattctttcaggaagtgttgcagtatttgcatcatgggcacgtcactttctcctgacgaatgagtaccctacagagaagagcgtgaatccgatgatgcttgggtgcattgctggctctctactacttaggaaagctgcatcacatgcttttgagaagaacaagagatcaactgtcaccactgacatcattgagttactgggcaaaagcttagaagatatatgccctgctggtcattagtttagatctttaccatcattggtggtacggcgccttagcacctgtaataatggtaatccatatgttcggataccagtctctccctgcttaatgtacatgtttcttgactgaaaagatggtgttacaatgcttggttttgtttagcctccgttttgctcagaagaattctacagaatgaataatgaattgccccataaatggggctttgattttgg

SEQ ID NO: 27902 - DNA, 1407 bp, Oryza sativa
  ref <308>: DATABASE ACCESSION NUMBER: AK103344
  ref <309>: DATABASE ENTRY DATE: 2002-08-28
gcaaggccacgctcccctccctcccaccaacccaccaccagcgtcacccatggcggcccagcgactcgccgccctccacgccgccgcgccgtcggccttctcctccacctcctccgcctcgcatggccgccccgcggcgcgatccagcaccaccgctctcctcccggtggccctcccgcgcgcctccgccaccctccgcgccgcaccttctcggctcctcccccaggaggcgaaggcggcggggagcggcaggtcggtgatgtgcatggcgtcggcgtcggcgtcggcggcgtcggcggcggtggcgtcgggcgcggcggagctgaaggccgctcgcgaggacatcagggagctcctcaagacgacgcactgccaccccatcctggttcgtcttggatggcatgattccggtacgtatgacaagaatattaaagagtggccacaacgaggtggagctaatggaagcttgagatttgatgttgagttaaaacatggagccaatgctgggctggtaaatgctctaaagcttgtccaacctatcaaggacaaatacccaaatatctcatatgcggatttattccagctggcaagtgctacagcaattgaggaagctggtggtccaaagattccaatgacatatggacggattgatgtcacaggtcctgagcagtgtccacctgaggggaagcttcccgatgctggcccaagtgcacctgcggatcacttgaggaaggtattttacaggatgggtcttgatgacaaggagattgttgtgctgtctggagcacatacacttggaaggtccagacctgaacggagtggctgggggaaaccagaaacgaaatatactaagaatggccctggtgcacctggtgggcaatcgtggacagctgaatggcttaagtttgataacagttatttcaaggagataaaagagaaaagagatcaggatctcctggtcttgcctacagatgctgcattatttgaggacccaacattcaaggtctatgcagaaaaatacgcagaggaccaagaagcattctttaaagactatgccggagctcatgctaaactgagcaatctgggtgcaaaattcaatcctcctgagggattcacgttggacggttaatgcgatgcgcatgagccagatcgctgaagtggccaaccacttttacagaaaggatcaagagagaaacactacacaatccaatttcctgctccaacgttgtgtcatcattccagatgaagcttttcctgaccacgagtcatattggatttggaaactgagtattcgaataaaaaaacagactggctagagaggcaaatttgagccgaacttgcggaccaaattcgacgagaaaccaaaaagaaaaacattttaatactattctttacttattatgcttt

SEQ ID NO: 27903 - DNA, 3587 bp, Oryza sativa
  ref <308>: DATABASE ACCESSION NUMBER: AK103345
  ref <309>: DATABASE ENTRY DATE: 2002-08-28
gtagtgttttttttgggatcttatattgctacaccatatttacaagtttagcatggtacattcactcactaaaaacactacgaaaggtactcatctgggtctgctcccaagcaacagctataacatttgaattcaaatgaaatatactacgaaaattctgtactttacaggttgagaaacaccctcacggaacagcctactatcttgtaatttggatgtctgcaactcagcatgtgatgtagcttctacaacacaagaacacaacgttgcacgtcctatgaggaattcttagctcattcaccgatatttgagggttgacgtttacaaaggacaaggaattcatcagattgatattgcaagatccttcaactgaacccagccaaatgcacatctgtctcggattttctgaacctccattaatgccaagttaatagtttggcttaatgccgcaaattctttctcaaaaggaagccgcgccttctggtccaacttctcaagacatcgagttgcatcaactacatagcaaaagtatgacaattgcctgtatagatctgcctccgtatactgtctcactaggtggccattgcagcgtgggtagttggggcagatggttcctctctcagagtcccccatcactctaaggttcacactgtgcgttgagtatttgcaaccctcatcatcacacatcagtaaacctttataatatagattgatgaaactatcagcctgccttttcatctggtttgcaagtactgcaggagaaactctggactcatcagtgtcatctggacatcttgggcaccgcatccgacgccaaaaattaatggaagcatcatttccttcatttggatttgatacatttccagagctagaaccaataatcagactagacacaggggggcagtcaaaggtagtagaacagcttgggcatgataatcgcaggggctcacaaccacgatatctctcatcttcatcatcaattacagacaagagcatgctagacgtatcttgattatcagactcagtcaatcttgattggaacttggatgaatcaagcccaaggcattcagccaggcgagctgggctggtgccctggatcgaagcacacagacgggaaactacaggatgaatctgctgcgataaatagtagtcaatatcaatcatccatttgtcagggtttcttttcagctcctctggatgtctagctctttgagctattcctcctgaatgtgtactctctgaatcctgttgagagcaaattatatagggaactgtatcacctgcagagcacccagaataaccattttgcttcagtcttaaagcaacctgaacatgaggttggtttttagcatctggataatcttctggtgcttttgttaagctctttgtaatgatatatttttctaattctgtttggccacctctcatctgctcttgcacctgcacgagagaactatggattgactcgataacgtcatcacatgaccctccagacaaaatttgattcaggcaaaaatctccaatttcttttgacagcaaactccagtcacgtctgaccatatcaagtcccttgcgctcaatgttctctcgtaagctaccatctaatgcaactttaatggcagcatatttcttctttttgagaagcagcattcttttgtatataccatcaagatcaatctccagacagcggtattttttattcacctcctgaatgacttttcctgcaattccttttgccctggagatgtcatccagaccagtatgtatcattatagagtctgtgtcaccgtagataacctccaaatttaagttattctgaaccagatcaacagtgttttgcaatatctctcttccttgcagtgtaataagctcagcaagtggctttgcataaaacctggaattggaaaagcccaagcagccatacatgctatttgcggtaagcttcaaagcttgctgttggatgtcaaactgctgccttttgagaccagaagcagtcttaagccatgatttaaccattcttctcctctccaccaaactctttagcaactcaggcaaaacaccagtggtctttgaagcgggcaaattagggacattgccatcagcagaacggtcaacagtagtaaagcagatattgtattcctgaattatcgaagggtaaaggctgttaaagtccagaagtagcacatacttgtcatatagaccctttttaggctccaaaaccaagccaccagcatatgaaggaccttttttcgttttaccttgatcaacatgatgtccctcgtcatcaattgaaggatcagcttcatcaggttttgcagcctcggtatcagggttcatttttcgttttgtagagttaaactctttactgcgtgcaaacttgtccggtacaataaattttcttgcatggaatgcatgcaacagcagatactctaccctttgagctctagaaccctggagagtttttccccacaggttaccgctgatatttgtcaattggcgtgtaagcgggagaacactcaaatgaaacatgagctccaaagcaagacatgcatcagtctcgccatattcaaccagcttgagaagtgctcctgaagattggaacattgggggaatatcatgtggagagacctctttcctctcctttttcaattgtgtttctgcaagttgtgtcaaagaataactcacctccttcaggagatcgcgagagcataagtaggtatcacagaggagacgaccagcaatgcaggacataattcctggacttgccccagacccataaagtgtgttccctttggtgagtctgggcattactgagcgcctaagacgaccaatcttggaccacatattgcttggtactttgcaagtctgtgcacggtgcaaaaggacgtccaagtcaaatccagaaatattgtgtcccacaagtacatcgcaatcaagtttgctaagctcgatcatcaagcggtttaacaatgcacgttcactgctctcgagtgccagcacattgctaccagccttctggttcctatcagaggattccttggagaggcctataggaaatatactgccttcaagcttgcgcataacagtaaaatggctgagcattccccgtttctgccaatcttcagaacgcattggactatctattttcacacggtgacagcatatgactgatgctgacacaatttcatgcacattgtgtttctcatttatgatagttttaagattaactgctgcaaccacgacaggaggaacttctaacgtggtacttgtcatcaaaacagatatgtctttgggactatcaactgtaacttcaaatttacaccagctgacccgctgagtagctggacatgccaaaaatttggagatcgaaagccatgaaggccccttgatcttccttttgatgagaagcaattcaagagcactattgttcgtcccaagtaatgcatggaaatgttgacctcgaaggtctgtaggtagcgccggatccttatatgggtaatttatcttcaagacatactgctccccatttggtagatcagtcctctcaaatgcatagttcctcttgactggagtcattgcaaaatttg

SEQ ID NO: 27904 - DNA, 1629 bp, Oryza sativa
  ref <308>: DATABASE ACCESSION NUMBER: AK103346
  ref <309>: DATABASE ENTRY DATE: 2002-08-28
gagcgacgattaacaaaaaccacaaccattattaatcctcctcctcatccatcctcttcaattcctctccgtattaatcgaaaccacaagagcgagctagctagcgatatatccccctctctctctcgtctcaagaagatcgatctccaaaatcgaacaaaagcagtattcgatcaggtgttcgtcgtcagaagaagaagaagcgagcggataggtgatcgcctgtgaggagatgtcgtcggcgacggacggcgcggcgtcgaggctcggcgtcgccggggctctggggatgtcggtcacgtcgtcggtggctattgtcatctgcaataagtaccttatcagcaccctgggcttcttcttcgcgacgacgctgacgagctggcacctgatggtgaccttctgcacgctgtacgtcgcgcagcggctgcggttcttcgaggcgaagccgatcgatgcgcagaccgtcatctccttcgggctgctcaatggtatctccattggcctcctcaacctttgccttggattcaactcagttggcttctaccagatgaccaagctggctatcataccattcaccatgctcttggaaaccatctttcttagcaagaagttcagccggagcatcaagatctccctcatggtcttgctccttggagtcggtatcgcgtcggtgaccgatctccagctcaatctcctcggctcgatcatcgcagtgctcaccatcgccgcgacgtgcgtcagccagattctgacgaaccaaatccagaggaggctgaaggtgtcgtcgacgcagctgctgtaccagtcgtcgccgtaccagtccgccgtgctgctcgtcaccggcccgttcgtcgacaagctcctcaccaaccgcgacgtcttcgccttcacctacaccttccaagtcgtggcgttcatcgtgctgtcctgctcgatcgcggtgtgcgtgaacttcagcacgttcctggtgatcgggacgacgtcgccggtgacgtaccaggtgctggggcacctcaagacgtgcctcatcctctccttcggctacgtcctcctcagggaccccttcaccttccgcaacgtcgccggcatcctcgtcgccatcttcgggatgggcctctactccttcttctccgtctccgagtcccgcgacaagaagctcgccgacggcccctcccctcctctccccatctcttcctcccagatggcggagatgaaggactcggagccgctgctgggcggcggcggcggcgcggcggcgaagagctcgccgtggaacgaggtgaaggggttgcagagcttcgacgaggtgccgaggacggcgaagagcgcgttcagccggccgtgacgacgacgacgacgagggcggacgcgtgcgcgcgtgacagctaggactgtagctagtgcaatttgggctgcgacagcacaaggagaatttggggggaaagaacatatcatatgcgtctcatctcaccgcagttctttctgttctttttttgttgtagatgatgacgtaatgtgttggtttgttgaaatttttaatggttcttgggaagcatcgagaggttctgacagatatgctaactccgttcacaaatataagcacttctagaaagggttaaggttattacc

SEQ ID NO: 27905 - DNA, 1825 bp, Oryza sativa
  ref <308>: DATABASE ACCESSION NUMBER: AK103347
  ref <309>: DATABASE ENTRY DATE: 2002-08-28
attgcgagtgttgtgtcccaaaaattcactttctgcgtttctgtcaccgaaaggagcttgatgcagaggaacatcgcgtttcaagtcaatagcattgaaacttctttggcagacaaggcactattccacaggttagggatcagacattgcaactcacatcatctgtcatttcaccttttgctggtggttcaagtatatgtagagaaagtgagtgtcctgatcatacttcgacaccgcctgcttcttctaatacccctgtgggtgatatggagaaagcccatgctgatagcaggaaacgacgccccattatgcgccttcctctaggtgcatcgaagaagctaacttttgaggtgggcgcgtccgaaggaaaggatatagatacagctgttgtttcagaaagggtgcagaattagcctccattgatgggaaaaaaaagggcaccgtcaatcctgctggtgctcagaggacaagagcttcctatatgaaatagaagctacaatttcacgccatcggtcttcactggcaatggacgcgtttgaatcaagtccttagttatgtgctctgctcttgttctgtgattcttgttcacgcgaagtgcaggtcactgactttacggtattggagttggagtagaagatcagctgctccatcatcgacgatggcctgatccacaaagatgaattttggtgctgatacttccagggagatacagccatgaatccacctaggtttttcacggttagactaaccacagcaaaccagcgctatgtgaccagctgcaatcgcacaaggatatcagctggaggatggccagagactcaaattagtaacaacccataacctaatggtctacattgaactaaagagagcatctggcaaaatatacatcactacaggatggccccagttcatagaagccactggtttgcagcttaaagaatatgtggttttcaaagtcttatcacgctccaagatgcatgtcatcatataagccaagagtggttatcttagatgtccagtgccaagcaaaccaagcaactcacagctaaagaaaaacgcgcttcagaaaccaaaaccaccagaaaaaaagaaccaagactaagccacacatgcaacaccccatgcaacagaaattaaaagccgatatagggtcagcttgtacaggcaacaccaaacgcactatcaatgaaatgtgcttctgcaccggggagggacatcaatctatcaactgaactcaaagactacttcaaagatattgcgcaatttctgcacccctcaaacgaattctatgtcacaaccataaatccaactttcatgaagcaggataaggtgcacttttcaaagcaattctctatgacatacattgcactaatcgtgcggaagaagacatcgcagatcgaagtacggattccagggcactcctcaaccaccatggttcttcaccactccacagaaaagcgctttaacctgaaatcaggatggacccattttccaacaagcaacggcatacaagttggaacaatctgcatctttcacttccaccagactaatcagctgcaagcaacaatagatgtgctgtgagcaagatgctcatgcaacacaagctgttatccttttaatatcgtaggctatattttcactctgctacttctatagctgttagtatcattctttgtatgctttgcatgggtactcaatttccatgtaaaaatcacgcccaaactattatgccagcgtgctgttacagaacaggagctgacggtaccttacgtactgtctttggttgttttgcttgtacttatatgcaaccaaagacaattcaccc

SEQ ID NO: 27906 - DNA, 1799 bp, Oryza sativa
  ref <308>: DATABASE ACCESSION NUMBER: AK103348
  ref <309>: DATABASE ENTRY DATE: 2002-08-28
ggatcgcgtaaaagaaaaagaaatctccccgtctcgttctcgttgtctcctccgctccttgcgccgccgccaagacgagtcgcgtcgcggctgaacaggggagggccgggcggcgatctccatctggcgagcagagcagcggaggggaggggatcctgaggaaatgcaagttaataaagaggcacctctggggtgcctcaagccaatttctcagtataacctgcaagagcagagaagcaacgggtttcctgagaatagtgaaaaaaagaatgatagtattgcaacagaaagagtcttggaggcatctcctcttccaaatcaaggctttttcagacccgttcaacggacagaatattatgcctatccatttatttatgctgattaccaaatgccgggacagccacaaccttacaacttagataaccaattttatcaaataaacagggaccacagttttcctattgagagtagagttcaatatcttccattcaagatgccccctcaaggttaccctcctgatgcacaacttcaggaatttcaatattttgtggttattgactttgaagcaacctgtgacaaggagaacaatccacatccacaagaaatcattgagtttccatctgtcttggttaacagtgcaactggacaacttgaagcttccttccaaacgtatgttcggccggcatataatcaacttttgactgacttttgcaaggagcttacgggcattcaacaaattcaggtagacagaggtgtgcctctaagtgaggcattgctcatgcatgataagtggttggaggaaaaagggattaagcacaagaacttcgctgttgtgacatggtctaactgggattgccgtgtaatgttggaatctgagtgcagattaaagagaatcaggaagcccccttactttaacaggtggataaacttgaaggttcctttccaggaagtgtttgggggtgtccggtgcaacttaaaagaggcagttcagttgtctggccttacatgggagggccgtgcccactgtgggctcgatgatgctcgcaacaccgctcgcctccttgcattgctgatgcaccggggcttcaagttttcgatcaccaactcgcttgtgtggcaatctgccccgcagtcaataacgtgccagtcgtcccctgcgcactctccgtatcccaaccaatcacaccataagccaatggaagtgatgggatctcctgtgcaggttaacccatacgccggcatcacagtgaagaagccgatgtactgccactgcggcgtgctgagccagatcaaagttacctacagaccaggcccgatgcacggtcgatatttctacggatgcggaaactggacatccacaaggggggcaaactgtgactactgggtatggttgtcatgaaagaaaatgaaatcctgcctccatgcgaaatccgaaatccgaaggagggcaaagacctggagcttttaacaagggaggctactagtttgcagttggtttggcttgctgcgcctccctcgtcgtatatatgatataactttgctcataagactattggaagtttgaactaggtagtgtctaacctgtcaatactgacttctgttgatagaagagaatgggggggatcagatgctgcttaggatgctttatccatgaataatcttaagtttgtggacgcttggttttaacttaaaagatgggaccatcgtaggtgtgatttgtgcgacaagatgtctgaagtttgggcttgcaggttgttttgctcacattgtgccagtaagagtgattgttagaacagagt

SEQ ID NO: 27907 - DNA, 2005 bp, Oryza sativa
  ref <308>: DATABASE ACCESSION NUMBER: AK103349
  ref <309>: DATABASE ENTRY DATE: 2002-08-28
ggcttccgctaccatggccttcgccgcctccccttccctctcctccctcgccgccgcttcctcctcctcctccgcggcctccgccgccgccgtcgcgatctcctcctcctcctcctccccatcaaacccctctcgcgagctctcacccaggctattctccccactgccccccaaaccccattccctctcctgctccgggccacaagccccacgcgccaccaccggcgacggatcgggcgccgcgggggaccgcgggagcggctccggaggaaacagcggcaagggtggaggcggcggcagcggcagcggcggcggcgacgacgacgacgactacgaggaggccgagttcgggcccctgctcgggttcgatgaggtgctgcgcctcgccgcggcacgcggcgtctcgctcccggccgacatgatggaggcggccaaggatgctggcatccgggaagtcctgttgctccgctacttcgatctgcaggcagggccatggcctctagccgcgatgatccgggcattctcgatgctccgcaaccgaatgctagccgacccatcattcctcttcaaagttggaacagaggttgtgattgactcgtgctgcgccacgtttgcggaggtgcagaagaggggggaggatttctgggcggagtttgagctgtacgccgcagaccttctagtgggagtggtagttgatattgcacttgtggggctgttggctccgtacgtgagatttggaaaggcatctgcttcgactggtccttttgggagattcaacaggatggctggatctttgccaagcagtgtttttgaagctgaaaggccaggctgcagattcacagttcagcaaagaattggaacattcttttataagggtgtcttgtatggctcggttggatttgtatgtggtatcattggtcaaggaattgccaatatgataatgactgccaagaggagtgtcaaaaaatcagatgaggatatccctgtccctccactaattaaaagtgctgctctatggggtgtgttccttgctgtatcatctaatacgcgctatcagatcatcaatggtctggagcgagtagttgagacatcacctattgcgaaacgtgtgccacctgttgcaatggctttcactgttggtgtccgttttgccaacaatatctatggtgggatgcagttcgttgattgggcacgatggagtggtgttcaataatgcttatgaaacagcattttatttttgcctcaagcatgaaaaatgggcgaagcttttgctttctgttctttacattctttgggacagaagaagcagcaacagcagcagctatgtggaacagtggaggctaggaactcatttgcttgtttgaagagcgtatgaagcacgtcgcatcacaaggttggcatgcatgtgccaaaaaaaatattttattttaactgctccctcccttgtttagctgtttgggacaaacatgaaagttgttcatcaaatgtgcattaatgattgatacaacacttttgtcttacagcaagtaaggaccggatatgtccctcaaataatttctctgtttcgtgctatacatgtgtggagtacatctatgtcttggggtattgccaaattttgggtccacctgttcgtcgaatttgtaggtgacgagtgaggcggagaggcataagactgatgatgaagcagataggggagaaactggataatcagattctggaggcagataggtcatgctcgtgcacattttgtacatgcatggctcgcctggcgctggagcacctgaatcagtgctagtgttgtgcactctctttcagtttcaacttcagacgagtactcgagtgaaggacacaggtacaattgacaacaatcttactgcaacttaagcctatcatcatgcatatgcatccagagcagatcagatcgcagagaataacgtaaacaagataatttattcccattcttgtctctgtacacacttatttatctactatcgtatagtatgcc

SEQ ID NO: 27908 - DNA, 935 bp, Oryza sativa
  ref <308>: DATABASE ACCESSION NUMBER: AK103350
  ref <309>: DATABASE ENTRY DATE: 2002-08-28
gaaccttcagattcacatctgtgagataacaatggctagaagcaagtttgttgctcttagcttcgtcgtcctccttggcattggactgaccaatgctacaagggtagctaggtatgtgagcgctggaggaggcggtgggggaggcggaggtggtggtgggtcagggaatggttctgggtggggatctggctctggctcagggtatggccaagctggaggctctggtggagcatatgctagtggaggtggtggcggtggaggtggtggaggtggacaaaacggtggatctgggtatggttctggatctggttcaggttatggtcaggctggtggatatgggtcccatggtggtgcgtacgctcaaggaggcggtcaaggtggtggtggaggtggtggggcaaatggtgggtctggatatggttccggatctggctctggctatggtcaggctggtggctacggtcctcatggtggagcatatgctcagggtggcggacaaggtggtggtggtggcggtggatacaatggtggatcaggttatggttctggttctggatctggttacggccaagctggttcatacgggccctacggtggtggctatgctcatgcaggtggtcaaggtggcggcggcggcggagggcagagtggcccaggtggccatggatatggaagtggctctggaagcggttctggatctgcctatagtggtgggcacccataggactgttatctaaatgaactatgtgaatgatgtgtgccaacatatatggccctaaaataaatatgtaccaaataatacgtcttgtaccaaaataatatgccatggcatagttgtcatagctggatagttgtaataaaagtagtagtctttaagactactaaatacaatatatgtacactttctccttaattgatcggtaacctattcaatt

SEQ ID NO: 27909 - DNA, 1152 bp, Oryza sativa
  ref <308>: DATABASE ACCESSION NUMBER: AK103351
  ref <309>: DATABASE ENTRY DATE: 2002-08-28
gctgtttctagttgaggggaagtcgatcgggattaggaggaagccgggcccacatgcaggcgcccacacccacacttcaatcctcacgccccagcagttaatgccttgacgaccctcctcccctctccccaaccaagcatagaataggcggacacacagggtgatagagagagagagattcagatccacccgcgtcttctcttctcccctctcgtccacccatccctcgatcgatccggcgatctccgccgccgccgccgccgccgctagcagcagcaactgcactaggtaaagaggaggagaggagaggagagggcgcgcggtacagaggaggaagaggcgtggggagagaagatgttcctgtgggactggttctacggcgtgctcgcgtcgctggggctgtggcagaaggaggccaagatcctcttcctcggcctcgacaacgccggcaagaccaccctcctccacatgctcaaggacgagaggttggtgcagcaccagccgacgcagcacccgacgtcggaggagctcagcatcgggaagatcaagttcaaggccttcgatctcggcggccaccagatcgcccgccgcgtctggaaggactactacgccaaggttgatgctgtggtatatttggtagatgcttatgataaggaacgttttgctgagtcaaaaaaggagcttgatgcactcctatctgatgattcattggcagctgtcccgtttcttatccttggcaacaagattgacattccatatgctgcttctgaagaggagctgcggtatcatctaggccttagcaacttcacaactgggaagggcaaggtcagcctaggtgaatccaatgtccggcccctcgaagtgttcatgtgcagtgttgtccgcaagatgggctatggtgacgggttcaagtgggtctcccagtacatcaagtagatcccttgtcaagacatacttgcatactctgcccagcgattttttttccttctcgtttgtttcagttggttgttcttcacgacaacaatcatcatgacggtatggagggtatgaagagaaaacagtgctttaacaattggggacgatgttccatgttggatatttagcctcaaaccatttgttatgtcgagcttctaaaatttttttgcttttcct

SEQ ID NO: 27910 - DNA, 1997 bp, Oryza sativa
  ref <308>: DATABASE ACCESSION NUMBER: AK103352
  ref <309>: DATABASE ENTRY DATE: 2002-08-28
gaagaaggaggagggaggagggatggtgaagaagaaggaggccggcgatgcggaggccgacgagcggcgccgcctccgctccctcgccttctctaatggcttactccagcgcggggagcctgctgcgccgcgctcggcgctcgcgccctccactgccgtgtcgcggctgcagggccgcgacatcgtgcgccgcggcgggcagcgcaagagccgcttcctcttctcattccccggcctcctcgcgcccgcggctgctgcctcgggcggccgcgtcggcgagctcgctgatcttggcaccaaaaatcctctgctctacctcgacttcccacaggggaggatgaagctgttggggacgcatgtgtaccccaagaacaagtatctgacactgcagatgagcaggtccaccaagggcgttgtctgcgaggacgtcttcgagagcctgattgttttttctgaagcctggtggattggaacaaaagaagaaaacccacaagaactgaaactggattttccaaaagagttccagaatgatggggctgttgcagattctgattttaaaggtggagcaggtgcttcctgtgatgaagctgttaccatcaataaaccgccaaaggaaaccaccacaggatccctttccccaaagattgaatctgacattgattcttccgaggattcagaccttaaggacgaggataacacacaaagcactagtcaagcaccttcagttaggcagtctgctagaactgctgggaaagccttgaagtatactgagatatcctctggagacgattcatctgataatgacgatgagattgatgtccctgaggacatggatgagaaggtgaagagtccggcagttaagaatgaatcccaaagtgaagacattaaacctgcagattcatctgcgcagcctatctcagctaagaaggagccactcgttcaggctactctgtctagcatgtttaaaaaagcagaagaaaaaaagagatgtactagaagcccgaaaggatctccagcaacaaaaggacctgctgctaagaagcagcgagcaagtccagaggaaaaacatccaacagggaagaagagtggtaagtgcagtagcaagtctgttgttagaagcgtctaatagaccttggtgcgattacatttgttttaagcctctgaaggccttcttcaatggagaagacttgttctaaaataatccaaaggctttgggaggcttacttgagaagctttcagcttttgtctatgtaaggggcatttaaaatattaatccatttcatgaagctttaggaccatctcaagcctgtcgaatcggaataaatgatggaattaacatctattgtggtggctctatactaaatatgctatttgaattttacaagacttgatattgctgggtaaaagctgtgatgcatggggggaaacaaatgcattttagtggctcttagtgcaatgtgcaacgatctatcagcttttctttaactgagtacatcagtacatgttagtgttcttcatatgaagctgacaattgtatttacatggatgtagctggcagaagtcagaaaaagagaaaaacacaggtagaagatgacgaaattgaagtgctctcaagttcctcccaggataacaatgtggacgatgatagcgatgaagactgggctgagtgatgtgcagctgaagttgaaaggaatgtagcactcggtgatgaagagtgaaggatgcaagattgtgggcaattgttttcttttggggcaatatcacaattgatgtgtttgaggagcttaggttctgacctgaccattgatgagatatatcatcatagtcttttcatcgtactggtgaaattgaaaaccgagaagtgtgatctgttagcactagatttattatttatttgacttgttgtaatgtaacataaacaagagctgataaatcattgttagggtctgcaatgcaaattagtacggcaattgcagatataaactataccattgatg

SEQ ID NO: 27911 - DNA, 1528 bp, Oryza sativa
  ref <308>: DATABASE ACCESSION NUMBER: AK103353
  ref <309>: DATABASE ENTRY DATE: 2002-08-28
gttcttcctcctcctcgaggctcgagctgccaccgccattggagcgccacgccacgacacgcgccaccgccgcagaggagagagagagaaaatccggaggcaggcggcttggtgtgggttgatgggcgcggcgggggcgatggagagggagctcctggaggcgttcgaggcggcgaggaaggcggcggacgcggtcggggaggcggcggcggcggccggggccggggaaggggagtcgccggaggccgcgcgctgcgtcgacgcgctgcggaggctgcgcggggctcgcgtcaccaccgccgccctcgtctccactcagatcggcagacgtattcgctatctcaccaagcatcctcactcaagcataaaagcaacagcttcagacctgttaggacactggaaaaaggttgtcattgaagaagacaagaaaaatggggcactgcagaatggaaaatcgagttctactgtggtaaaggttgagaaggtggagcctatgaaagttgaaaaggcatcaccaagggctactgtcaataataataatatggataccagagttgtgaaccacaaaggtggaaaggttgagaagttttctaatgctgagctgagaacccaatctatcaaggttgagaaagtacaaaaggtagttcacaaagtatcttctgttgagaagccgtctcctgtccaaggtggtcctccaagactgacatccgttgttaaatgtggtgatgctagtcgagacagaattcgggcgatacttggtgatgccttctccagagtttctgaagagactagaaaggatgacagggaggaagtgaggaacatcatagaagaagtaaaagcatgtgacccattcaggattgctgtgatggtagagtgtgccttgtttcagaagctggggaattttaatggacctaataagcaaaggtacagatcattgatgttcaatctgaaggatgatcacaacacagacttccggagaagggttcttctaggacaagtgcagcctgagagaattgctgacctaaccccgacagaaatggctagcgacaccaggaagcttgagaacaagaagatcgaggagaaggctctgttcgagtgcgagcgtggaggagcaccgaaggccaccactgatcagttcaagtgtggcaggtgcggccagcgcaagactacctactaccagctccagactcggagcgccgacgagccgatgacgacgttcgtgacctgcgtgaactgcaacaatcactggaagttctgctaagctaggcacatcctactgagaagtgttagtgtagttgaccctggagtttgacaggcaggttagtttcgggccctgcttatctgggcccgtttcatcttttttccccttaagttagcttgttccgaattcgatttgttctagtgccatttgactgcataatggccggccgttgggcttgcattgtcaggctactgctgttgtacttatcagtcttgtttattgtaccattggatgcaataatgccataatggtcatgctcatgagctg

SEQ ID NO: 27912 - DNA, 1005 bp, Oryza sativa
  ref <308>: DATABASE ACCESSION NUMBER: AK103354
  ref <309>: DATABASE ENTRY DATE: 2002-08-28
ccttccctcgcgtcgtcctcccccaggggcggcacgggaggcgacgactcggccaccccttctctctcccccacctccctcctccgcctcgccgctgcccgagtggccgccggcaaagccgcgcggccacaaggacggcggcggcggggctcctctctcgcgccactcttaggagaccgggggtctctccggagaggcggcggcggtaaaccgccagattcgcgccgcttcggccggatctggcggggcggcgatgggcgacggtggcggggatggagatggcggcggtagtggcggcagcggccgatggcggcggggttggagacgggcggcggtggggtgaacagatccggcggcggcgcgtctggatccggcggtggcgcgacgtccggtggtgtttggagcgtgcggcgccggcagccaacctcgcccgtggctggcgatggtggtgaaaggaggacggccgatttgggctttaggtctagatccggcgcgttctcagtcggggtcaagggtggtgcagaatccggtcattgtgcaggtggtgtccatagtgcaggtacccttcggtgtgcaggaggcatttggaagcttccgttttggatgctttggttgacagggtctccgaggtgaaaaccttgctccgcttctggtgctactaacggcagcgccctcggacgccgttcaccttcttgaaggcgttgcgtttggagccctcgtttcaactccacttcaaggaaactcttcgggtgaaaaccttggattcgttaggatcggacgttgtcgccgttctgtcagcgtaaccttcttgaaggattcgttctaggagtttttttccttgttggacaattgtcatttggttcagttttgtcaatgccgggttttcgccagttttcctttaattaactgtgcagttgtaaggtttttgggtccggttttccttataaactggatcaactctctttttctatagtaaattgcaggagctccctgcctgtcccctcg

SEQ ID NO: 27913 - DNA, 1708 bp, Oryza sativa
  ref <308>: DATABASE ACCESSION NUMBER: AK103355
  ref <309>: DATABASE ENTRY DATE: 2002-08-28
gattttcacacgattttgctatcccgcagtccgcgcgcgcacccgtttcctccaacgactgatctgctgcgagaagcgtggccatggccatggtggagaagacggtgctgctctacccttgccctgcggtgggccatctcaaccccatggtgcagctcgccgaggccctcgtccgccgcggtgtctccgtcaccctcgccgtcgccgacccgcctgacaagggcgctgtgctggccggcgcgatcgcccgcatcgccgccgtgtgcccctccatcggtgtccgcctccttcccatcccgtcctgcgagggcaagacgtactcccaccccgtcatgtggatcgtcgacgcgctccgcctcgccaaccccgtgctccgggagctcctgcgctcgttccctgctgccgtcgacgctctcgtggtcgacatgttctgcatcgacgcgctcgacgtcgccgccgagctcgccgtcccggcctacatgttctacccgtctgcggccagcgacctagcgatctacctccaggttccgcatgtcgcccgctcggctccatcctctttcaaggacatggccgacacggtgctgagcttctccggcgtgccgacgattcgcgcgctggacatgccggacaccatgcaagacagggagagcgacgtgggcacgacccggattcaccactgctcccggatggctgaagcgagaggcattctggtgaacagcttcgattggttggagacgagggccctgaaagcgatccgcggcggcctctgcctgccgtccggccgctcggtgcccgcgatctactgcgttgggccgctggtcgatgggggcaagctcaaggagaacgacgcgcggcacgagtgcctcgagtggctggaccgccaaccgaagcagagcgtggtgttcctctgcttcgggagcaggggcactttctcggtgtcgcagctgagcgagatggctcgggggatagagaactccggacacagattcctgtgggctgtgcgtagcaacctcggcgaggtggacttggaggcgttgtttccggaagggttcttggagaggacccaaggcaggggattcgtcgtgaagaactgggcgccgcagtcggcggtgctgcagcacggcgccgtcggcgcgttcgtgacgcactgcgggtggaactcgtcgctggaggcgatcatgtccggcgtgccgatgatctgctggccgctgtacgcggagcagaggctgaacaaagcgcacctggtggaggagatgaagcttggggtgttggtggagggctacgacggcgagcttgttaaggccgacgagctggagaccaaggttcggctggtgatggagtcggaggaagggaagaggcttagggagaggtcggcgatggccaaggagatggctgctgatgccgtcaaagatgggggttcgtctgacatggcgttcgccgaattcctgaacaatttggggacgaacaacgtgaaaagcggcccgagagatacacccgtgcatgactgaaacactgtagccgagttggttttagcaggaccgagaataatgttcttcagtatatttagatttcgtcagattttagagttgttcatgtcgtgatgtggccgaatctgtatgagactacggtgcaactatgctagcgcatctcatgcaaagtccgggcatccttacagagaacacactaatttatttcccagttttttctc

SEQ ID NO: 27914 - DNA, 4064 bp, Oryza sativa
  ref <308>: DATABASE ACCESSION NUMBER: AK103356
  ref <309>: DATABASE ENTRY DATE: 2002-08-28
gggttcccttcttgagaccccaaaacccaactaggaaggacaaggacacatccctctccctcttccaccaagagagatagagccaagaaccggacgaggtagaagagattgagccgccacggcagtgggagcgcgcgcgcgagttccccgagatccgcgagatctccgtcgccggctcatgccactggtcggttcttggggcggcggcggcggcggcggggggtggtgagtctgtggccgtttcttgcggcgtggtgaggtgaggggagggagaaagagaggctgcacatgtccgtcatggcgcggccccgcttcgaggaggatgacgaggatgagttctttgactcgagggaggtcatgtcgccggcgtccgtctcttctccggcgagctccgggcgctacgacgggcccatgctcgaggtgtgggccaccgacccgtgcagcgtccatgagcgccgtcagaggttcatcaagtccttgggcctctcggattcgagcccctccgccggcggcggcggcgaccggcccgacgaggagccgtgctcgaggtccagtgccgcagaagagatcctcccgtgcagccccaccgtcgagctggtctcagccgtccccagttttgcgtgcagaggcgaggagccgggagcgtcaggcggcggcggcggcgcggaggtgttggattgtgtattcaagaacttggacgatggtacagtgtttgtcgtcgacgagatgggaaaagatgggagtttcaggagcctcagggacaggcgatccaaccggacagttactgcagcggaattcgaacggacctacggctcgtccccattcatctgtgagctgatgcggcgggtggatgattcggatgagtcctctgctgtggagaaggctctggtcaggggaaggagaaggaggaggagatttggatggctgcgcaggctcggcatccgtggctgcgtcgtcgatgtggaggaggacgatgagacgaattcaacatcctcgagttcttgtcggagttgctctgggaaggttgatagggtcaaggtgaggcattacaagaagaggtcaaaggaattgtccgcggtgtacaggggccaagacatcaaggcgcacgaaggcgcaattgtgaccatgaagtttagctctgatggacagtatctggccactggaggtgaggatggggttgtgcgtgtgtggcgggtggtggagggggagaggcccaatgaacttgactttgccgaagatgatccttcatgcgtgttcttcacagtcaatgaaaactccgaattggcccctgtcaactccagtgaagggagtaagagcaagcactacaagaactcaaaggtgtcgacagatccagcctgtgttgtgatccctcataggacctttgcattatcccaggagcctgtgcatgaattctatggacatgatgatgcgatcttggatctttcatggtcaaaaaatagggacttactttcttcatccatggataaaactgtacgattgtggcaggttgggtgcaatagttgcctgaaggttttctcccatactaactacgtaacatgtgtgcagtttcatcctaccagtgacaattattttatcagtggttgtatcgacggattggttcgcatttgggatgttcgtagatgccaagtcgtggactgggctgataccaaagagataatcactgcagtttgttaccgccctgatggaaaggccgcagtggttgggaccataacagggaattgtcgccactacgatgcatcagaaaatcacctggagctggaatctcaagtcgctctcaatggaagaaagaaatctccacttaaaagaataatcggtttccagtactgcccatctgatccaaagaaattgatggtaacatctggcgactcgcaagtccgtattcttgatgggcttcacgtaatttccaactacaaaggactgcgaagttcaagtcaagttgctgcatcattcacaccagatggagatcacattatatctgctagtgatgattccagtatctacatgtggaactatgcaaaccaaatagctcccgtcacaaaccatgtgaagactgtatggtcaaatgagcacttttcctgccatgatgtggccattgcgataccatggaatgcctctcagacaaggaattctatttcactggcttgcagtatcacttcttcacagcaagaagtcttggatgagttccacaatgaacatgatagctcatcatgttctcatactgaggattcccctgatggtgatagtctgtaccaattaccatctggaaatttcactcttagcagtgccttctttgcggaatctgctccaaggggatcagcgacatggccagaggagcagttgccatcaaattcgacaacacagtctaccttgaggaaatctcagtacaagttcctgaaggcttcttgccagaatgctgctacgcacgcctggggccaggtaatagtggctgcaggctgggatggctacatcagatccttccagaactatggcttacctgtgcaagtgtgacatggtactagacatgcatcatttaccattgatagtccaaggcaaaagcttgggtatgccttgagaagtctggctggccctgacgcccgtcctgattcattatttcagcacaaagcgtcacatggctggtgcgtgagctgaattgcttgtggaccagaagttgtatgtagtctgagtggtccttcaagatcttgacagcgtcaacacatcgtagcaggcccgcggaagatgaatcgcctcgcagaattatgcaaaggcatgtggggatttaggcagcaacacgttggtgttctttctttctttctcttctttgttttggctcctgttagggccatccgtaaatatatataggagacatacatatttttgccgagttgaaacttccctcgcccgaaccggatagtcgatggacaatgggcaagtggagagctagaaatcactgttggataggggggaaaaattcagagtggtgggggtgcacatactactggattcgtttcatttgttcacatttcatgattcatagcctggctgagtctatgatggacattgatactggagttgtatgtgttgggatggatcatggatggaaccctgtggttgtggttggacatggtcaggtgggtgtggcctgtgggggacctttgtgcaggcagagggcaggcctttctggatagggatggtgcagttggttctgatgggtttcctaactccaggggccaggcctttgggtatgggactatactatcactcattgctgctgttaatgcctttgtttaaaagctgggtccatgtccatgctcagatcttggccttttatctcctgcttgcactgtcacgtcccttttcttccagatccctccccaagtccttcctattgaggtgatattcccaggaaggtgaaattgccattacaggtttacacttattctttgcagtttactggtcttgtttgtttcaagaaccattgcccagcagtcacagaaataatcttagtactaccgtccatacgaatcttttcaaggttttttttagtactcttatctcttttcatcaaagatctctgcagtaaaacgatggcatcaaaagtacagccatggatgggacaagctcagcgatggctggttctgccgttacaagtactctccccccgttcctgtctggccatcttgtactagtagcaatgggcatagcagcggagtacaactacactcctccagtatcgttgttcaaaaaatgcaggtgccaggacgactgagatcctgacagggctgcccagtggatgatggtgcccatgccatgccatgctctgcagcagcaaggtgatgaaatggaatcatcagcctggatgctgccttgcctcattttatgcaacagtggatgttattttttcggtgccagtccagtctggtcaaggagtaaagatcatcaagccaagcccccctgaggacaatggctctctggtccatcacctcacctgctgtaatttcagaaatgcactgctcattccgtccaaaaaaacaacttagaagtgg

SEQ ID NO: 27915 - DNA, 3716 bp, Oryza sativa
  ref <308>: DATABASE ACCESSION NUMBER: AK103357
  ref <309>: DATABASE ENTRY DATE: 2002-08-28
gattctccccctcctcctcctcctcttccacctccaccctaccactctccaccacccacccgcccgtccgcctccctccgctccgctgctgcagccagccaacccagccttgctgcctcgcgggcgaacaaaaacccccagaattctccgcgtcgatctcgccccgccgcgtcccggctcgacgcgggccggcgccgtgagggtggggatcgcatgtgaagcgcattggagcggataactcgtctctatttgggggaattttttttagttttttgtttggggtttccaatcctttttcttcggcggagccgcgagcgtagcacgatatgctgcggcaacctgcaagcacctctggagatgttgatagaattgcaaacaggaagcatcgtcacatagtgcctaggcgttcaacagaaaagaagaaccctcataacatccagtttgaacgtcaagtagctgcgcttgaatacaggcaggaagaacagaggaagagagccaatggtggtcgtttattcttcacattgtctttatcatcccatctcgtggaaaatggagatgaacttgagacatccgcatcaccatcattgttactttttcacttcaatgatccagaggatttggcaagatgtttaacttcatcaagggcgttgctagaggactcccaacaatcagacaaagcccctgataatgatttctcagtcaacaccttcagcaacgcgagtgtggacgtgaagcgaacttcacgaaagaaaagcaaaaagaaaaacaagaggcacaaaagagtgcatggcaaaaaagtatctgaggcatctgacacacagtctatgcagagcaagggtgcttctcattgcatcgatgttgctggtggtgaatccttgacactttcatccaaccatgtggctcatgctggatctgaaatgcggtgtagaaaggagacttttccttctatggctgatggaggtgaaactttgacactgcctccaaaccatgtggctgacaaattgtttggggatttgtcttctgattcttcagtgagagaagtttctgcggagagacctgatagtgaaactggtaacgatggttctttcataactctgatatcaagtacatcttgtagtgatgagatagaattgtctaggcatgcttcttattttgaatgctgtgagcaatctaacagcaataactccagatgtttggacagtgcctccacttccactcttactgattcctctttggatggccattacacagatagcagttggaacttcagtgatgataccgagaacttgttgattgacaaaaatgagtgccctccgtgtgttcagtcaaaagtgacagatctcaggggttctaaatgtggtggcagtgaaggttggctaaacaaagcaaatcatgataaattctcctgtttcagaaacagtgctgatgctagcagtggtacacaagaaatgcaatcatgcagtaatgctagtagcgatggtgatttcctcccagtaatttctagaaaaagagcccggaaaaatagaaaggtccaacctttggggggttgtaatgtggaacatatttgtggtgttgagcatggtcaaagtggaaaacaatccaaaatttcttctagaccaagtaattcttgcacacaagttgcatcaaaagattccactaaggatttcattcacccaattaaagttcgcacatggactccacatgaagttacactaaatgattacatgataggagcaaatatgaatcacctccaggatccaaaacaaaaccgtagggggaaaccacataagtactcttgtttgagtgaagtggcaaactgtggttttattgaagagaagagtgcctgtacagcgaaaatgcttcctggaattacacactcaacagaaacaggtgttggtcagatagcatcgagttcagcttctgatgtgacggtccgagagatatctgaggaaatttgtacaccaataggtcctgtgcagaaaggagggctgcagattttgcttcgagaagaaaatgttgttggcacaggttctcttgatgttttgaatcatgtttcttctgttgattccgaagaacagaagaaagtagataatgctgtaatgagcagatctcatggcatggaaggtcaccatctacaatcccaagattcaggttctcagttccctggatgcaccacagattactggaaaacttccaggcctactgaaagtggtttggaggttggctatcatggtgtatcagcttttgaagggcgctgtaacacgaaccagcaaagatctgttagttctaaattgcaattaggtgagatgatcaaggctgcaaatgatgcctgcaaagtgcaaggtgcatcagatgttcatctgatttctggtcacccccttgctgattttgagacttttatatattctgcaagtccagtcattgctaagacatcttgcatgaggaatggcaactgtttgcaggacccgcaagctggcagctcaccatatcaatatcagatatcggatgtctccttgagaaatgtgtgggaatggtatgaggaacctggatcctatggattggaagtagaaatccatagaagtctcaactctacgagatcagcttgtggtgtctcagagttctgtgcttactttttaccttctctatctgctattcaattgtttgaacagtgcaagaataacttggaccataagtttgacagtgatgatgatttcttattatcccaaccaaatggtgtgtatttaccaaaaccatctttatctgtacaagaccatggggaacccctgtttgaatattttgaatcagagcatccttcttcacgtcctccactttttgagaagatcaaacagcttaccagtggtgaaaatctctctacttgccaaatatttggggatcccaagatgttggaaaatcttaaattgcgcgatcttcatcctgcttcctggttttgtgttgcgtggtatcctatttgccgaattcctcaaggaaactgccgtgctgcattcctgacttaccactccctgggcaaagtagttccccaaattcactctccagacaaggctgatgaacctactcatttggtttgtccagttgttggtttctggagttacaatgacaagggagagcaatggtttcaactgagaaacccagagatcaagccaatgtcattagacgttggccccaaaactgatcgtgctgaagtcctgaaacagaggctgaagactttaagacatggtgcatcagttatgtcaagcatggtgatacccaaggccaacggggagaagtctatcaaccgtcatccagactatgaattcttcctatctcggtctaactgaatggttgcatgatctccacggcatcgaaatacatcatgttctctccattacctgtactgtatgggtcctagaaccagaagcacctccatagtcccaacattcagagtttcagactatgctctagcgcggtaccatcataccaaggctggaagttgatgagctttagctctttctagtagtagactggtagcagaacacccgaagggttttttttttggttttttgaaagagcgactcggcccgtgggttttcgacttcagatgcttgcccctttaagtaaatcctttaagacttagagcgttgcttctgggtacctgcagatgggttcaaggcctgtagtgtatgctgttgcttgcttgaaatgggaatttttgtccatgc

SEQ ID NO: 27916 - DNA, 944 bp, Oryza sativa
  ref <308>: DATABASE ACCESSION NUMBER: AK103358
  ref <309>: DATABASE ENTRY DATE: 2002-08-28
gactaccaaagaacaacacacaactcggtctctagttgaaaagctatagccatggcggaggagaaggagctggtgctgctcgatttctgggtgagcccgttcgggcagcggtgccggatcgccatggcggagaaggggctggagttcgagtaccgcgaggaggacctcggcaacaagagcgacctcctcctccgctccaaccccgtccacaggaagatccccgtcctcctccacgccggccgccccgtctccgagtccctcgtcatcctccagtacctcgacgacgcgttccccggcaccccccacctcctccctccggcgaactccggcgacgccgacgccgcgtacgcgcgcgccacggcgaggttctgggcggactacgtcgacaggaagctctacgactgcgggtccaggctgtggaggctcaagggtgagccgcaggcggcggcggggcgcgagatggcggagatcctccgcacgctggaggcggagctcggcgaccgggagttcttcggcggcggcggcggcggcaggctcgggttcgtcgacgtcgcgctcgtgccgttcacggcgtggttctacagctacgagaggtgcggcgggttcagcgtggaggaggtggcgccgaggctggcggcgtgggcgcggcggtgcggccggatcgactccgtcgtcaagcacctcccctcgccggagaaggtctacgacttcgtcggcgtcctcaagaagaagtacggcgtcgagtagatcggtggatgcgaagttgcagggatcgattggcggttgcgttcgctacgtgaacgattcgtccgttgtttcagtggccaagtgtgtgtgagtttgttgttaccgttgagtgcttgtgtgtgggatggttggtggcagcagagagttgcctccgattctctgagattgtcactaaataaagtttgtcctttgaaact

SEQ ID NO: 27917 - DNA, 2643 bp, Oryza sativa
  ref <308>: DATABASE ACCESSION NUMBER: AK103359
  ref <309>: DATABASE ENTRY DATE: 2002-08-28
ggggcgcgcgtagcgagtgccagtggcggttgcatgtagagccgcagaccgcagtcgagatggtgtgctccgtggctgccaccgcctcgctcctcccctctcctcctcccaaacccaccgccctcgccgccgacgaccaccacgcccgcctcagggcggcggccgcgcgctccgacctgccggccgcgctggccgccttcgtcgccatgtcctccgccggggcgccacccgtcctccgcaccttcacctccctcctcaagctctgcgccgcccgcggcgacctcgccaccggccgcgccgtccacgcgcagctcgccgcccgggggatagactccgaggccctcgccgccaccgcgctggccaacatgtacgccaagtgccgccgccccgccgacgcacgcagggtgttcgaccgaatgcctgtccgggaccgcgtcgcgtggaacgcgctcgtggccggctacgcgcggaacggcctcgcccggatggccatggagatggtcgtcaggatgcaggaggaggaaggggagcggcctgactcgatcacgctcgtgtccgtgcttccggcctgcgcgaacgccagggcgcttgctgcctgccgagaggcgcacgcgttcgcgatccgttctgggctggaagagcttgttaatgtcgctacggccatccttgacgcctactgcaagtgtggggacatccgggcagcaagggtggtcttcgactggatgccaaccaagaactccgtgtcctggaatgccatgatcgatggatatgcacagaatggggattcaagggaggctctggctcttttcaataggatggtcgaggagggtgtcgatgtgacggatgtctctgtcctggcagcactgcaagcgtgtggggagcttggctgtcttgatgaagggatgcgtgtccatgaactgcttgtgcggattggcttagactccaacgtgtcagtgatgaatgcactcatcaccatgtattccaaatgcaagagagttgacctggcatctcatgtgtttgatgagttggacagaaggacgcaggtatcgtggaatgccatgatccttggatgcgcgcagaatggatgctccgaggatgcggtgaggctttttactaggatgcagttggagaatgtgaaacctgattcattcactcttgtcagtgttattccagctcttgcggatatttcagatcctctgcaggcaagatggatccatggatattctatcaggttacacctagatcaggatgtatatgttctgaccgcccttattgatatgtatgcaaaatgtggccgtgttaacatagctagaattctgttcaattctgcaagggagaggcatgttatcacatggaacgctatgatccatggttatggatcacatggttttggcaaagctgcagttgagctatttgaagagatgaagagcattggcatagtgcctaatgagacaacattcctttcagtcctctctgcatgcagtcatgctggtttggttgatgaaggacgggaatattttaccagcatgaaggaggactatgggcttgaacctgggatggagcactatggtaccatggtggatcttcttggccgagccgggaagctagatgaagcatgggctttcattcaaaagatgcctatggaccctggccttagtgtttacggtgcgatgttaggtgcttgcaagttgcacaagaatgtggagttggcagaagaatcggctcagaagatttttgagctagggccacaggagggagtgtatcatgtcctcttggcaaacatttatgcaaacgcttccatgtggaaggatgttgcaagggtgagaactgctatggagaagaatggcctccaaaaaactcctggatggagtatcattcaactcaagaatgagatccataccttctactctggaagcacaaatcaccagcaagcaaaggagatatattcaaggttggctaagttgatagaagagatcaaagcagtgggctatgtgccagacactgattcaatacatgatgtggaagatgatgtcaaagcacagctgctcaacacccacagcgagaagcttgccattgcttttgggctcattcgcacagcccctggcacaacaatccagataaagaagaacctccgagtttgtaatgactgccataatgcaaccaagctaatatctttagtgacaggacgggaaataatcatgagagatattcagcgattccaccattttaaggatggcaaatgctcatgtggagactactggtagtgaagtgttgagacagtttgaatctgcacccggagatgagggagcttcagaaagatcagagtatcagatctgacaattaggtgaaactaattggcaaagttcttaagggctgtgcagctgcctcttatatcaacactaaatggctaaacttgtgaagtatctgaaaattgttatagccacttcaccttttcaggaaacatactgcaaattccagtcagtcattgtaaaattgaaatgcttctatttacattaagatactagtgcatagggaacctgttcttcatagcaaccatgactttctcatgtcttatctttggcctgagattagattcacatgttcggtcgaactgtcaataactgaaagttatcattttcttct

SEQ ID NO: 27918 - DNA, 1607 bp, Oryza sativa
  ref <308>: DATABASE ACCESSION NUMBER: AK103360
  ref <309>: DATABASE ENTRY DATE: 2002-08-28
ggcaagcacaacagtaagcactaagccactaacgagccaatcttcagattaaggctaagctagctagctagcctgcaacctctctccaacaacccaatagtgacgagaggtatatattcctgcagagaagcagtgcaaaatttcccaaggctttctctcatcagagaactggttttgatgaagagccggggagaagaaggcgaggctggatcgtcgttgtaccgttttcgacatcgccggctgatggatacaacacccgcgactgattcaggagggcactcgagccacaatgggatgccgataatggtgtcgattctggtggtggtcatcatctgcaccctcttctactgcgtgtactgctggagatggaggaagcgcaacgccgtcaggagggcgcagatagagagcctgaggccactgtccaactcggacctgcctctcatggacctctcctccatgtacgacgccaccaaccaattctccaaggagaacaagctcggcgaatgcggcttcggccctgtctacaggggtgttctgggcggtggcgcggagatcgcggtgaagcggctgtaagcagaggtcgcggcagggcgcggaggaggacacgaacgatgtggagctgatcgccaagctgcagcacaggaacctggtcaggctgtttgcctggtgcttggagaaggacgaaaacatgctcatcctacgaatatcctcctaacagaagcctctatgccttcctcttgaaaggcagagagacggctcagttgcactggaagactcggcagagcatcatccttgtgatcgaccggggtttgctctaactgcacgaggattcatgtttcaaggtcattcacatatacctcaaggcgagcaatgtgctcctctacaacaagatgaactctaagatctccgactacggcatggccaagatcttcgaggaggagagctacgaggtcaactccggacacgtcgtaggcacatatgggtacatggcgccggagtacgcgatggagggcgtcttctcggtgaagtctgacgtgttcagcctcggcgttcttgtgctcgagatcctcagcggccaacgcaatggcgcaatgtaccttcagaataaccagcaaaccctgatccaagatgcatggaagctgtggaacgaggacaaggcggcggagttcatggacgcgtcgctcgccggcgactactcgaaggaggaggcgtggcggtgcttccacgtcgggctgctgtgcgtgcaggagagccccgagctccggccgaccatgtccaacgtggtgctcatgctcatcagcgaccagatgcagctgccggagcccgcgcagccgccgctgttcgcggcgcgggagatgaagaaggtctcggcgtcggagttctcgctggcgatgaagacggagaccaccaagacgcagtccgtcaacgacgtgtccatctccatgatcgagccacgataaaaaagaagaaagaaaaaaaaacgtcgttttttttcttctttttttatttctctctctctctctctcaaactgtgtttattacgagagttttgataagctagtggtgatggagattgagagaaataagaaacaaataacagcgtggag

SEQ ID NO: 27919 - DNA, 2286 bp, Oryza sativa
  ref <308>: DATABASE ACCESSION NUMBER: AK103361
  ref <309>: DATABASE ENTRY DATE: 2002-08-28
tgctcccgaagattttgctcgctttctccaacctctcctccgctccgaagcggaggtcggcggcggtggcggcggcggcggcgcgtttccccggcgagtaaggagaaatggaccttgcatctcaaggtgtggtaacacaacgacaaaaaccaagtggacggagaccggttggaagctcacaaatctggacgcgatatggtgttctgcttcccagccagcagacacggaagctaaaagaatgggttctaactgacgaacagcaacaactagttaatgctagtggtcttggacatcttgccctcaccacaggatttactattgatcgttctttgcttacagccttttgtgagagatggaacaatgaaacaaatactgcacatttcatgggatttgaaatggccccatcactccgtgatgtttcatatattcttggaattccagtgactggtcatgtggtgactgctgagccaattggtgatgaagctgtgaggcggatgtgtttgcatttcttaggagagagccctggagatggagagcaactgtgtggcttaatcagattgacatggttgtacaggaaatttcatcaattgccagaaaatccaactatcaacgagattgcttacagcacccgggcataccttctttaccttgttggctccaccttatttcctgacacgatgaggggatttgtatcaccaagatatttacctcttctggctgattttagaaagatacgtgaatatgcctggggatctgcagcccttgctcatttgtacagaggactatctgttgctgtaacaccgaatgctactacccagtttctcggcagtgcaactttgctcatggcttggatttatgaatatcttccattaactcaaccccaacaaaagaatcagaacaccttgctgccccgggcctgtcgatggaactttggaggagcaacgcgtggacagagaaagaaagtcatggaatggagaaaagttttcgatgagcttcaattttctgatgtcaactggaatccttacaaggacatgaatcctgcaattattccagaatattgcattgcagcagataacatctgctattctcggacatggctaatcagctttaacatagaagaggtgtatgtacctgatcggttttctaggcagtttgggagggaacaaggtcgcctccatggggtgcccatgtgggcaagaagaacttggagcaagtggaaggactggagggttgagtatgctcgtgaaatcgaggagttccatcaattggttggctgtcgtttcactcctgcagaaaccaatatcaactccctcccaattgagtctataactaaacaagatgctgcaggatgtagtcggagcacatctcagaacttctcttcaatggttgaagatctgaggaatgattttccagtaattgatcgttacctggagggacagttactccctgtggaagttgcaagctttctagagagagtgggtatgatgatcaagagttactccccaccacagagtagccgaaagaaagatcaagcagggcagggccaggacagcaatgtcaggtcaaagaacccaagaaagagggggaagccgtcattctttcaagatccttcaagccctccgaactcaagggcggaccgattcccagccgtgctgataccttatcaggatagcaagtgcgacatggttctggatggcaccgtccctctgctcgatggagcggaggagttcaaggaacaaggggtcatggacctctggcagaactcccacctgacgacgccgtcctgttcctcgctggactcgagctcgccggaatcaaggaagcggaggcagcaagaccgcgacgaaatccggctccccagggacaccgagaacctccgaaggagcgggcgtctctgtgtgcagctgaaaatgttcaagcacagggacggggtgggagccgaggcgaccaacccgatcttcctctgatcatccatggtttatgtacaaagtagcagaaaaacttgggctgctgacagttaactggtttatgtagcgtcgtagactttttgctggtagcgccttgccattcactgcgcagagcttgcaagctttatctccttgttaatactatctctctctagtctctaccatgtagttgggcaaaatgtagatgatgccaccaagacccttttaactgtgttgctcgtgaactggattgtgccctctcccgtttaatctgcagctcttgcaacatggtgaattggtgattttataatgatgctaagctttgactgcttgtagaatg

SEQ ID NO: 27920 - DNA, 2101 bp, Oryza sativa
  ref <308>: DATABASE ACCESSION NUMBER: AK103362
  ref <309>: DATABASE ENTRY DATE: 2002-08-28
gtccacccgacgctcagcaactggagcaagcacgggcaacgagtcgcagtaaaacagcagtgcggactcggagacagtacggggaaaacgcacatcgagcggtggagagtggagtggagtcgaatgcagcgcgagtgagtccaaaacgactcgtctcgtaacaccgaagcgaccgagagcgcctactgccgcctactgcgcctgcgctgccgccgcgcaagcccaagcgcaacgcatccgcctctgcctcatcctctcctccacttgctggtcgctgccattgcctgcgcctccactccacttctcgcggctcgagaggctgacggcggggcgcctcgaatttcgccctctccgacgagcggaggcggaggagggagcccaggaagaggatgcgaaagcagtgaagagaggaggagaagaggggggaacggaaatctcagctgctgcgtcagtctcgcagatctgctccgttgagctgctgtttcacggaatcaccatgggtggaaatcatcgccatgggtggtaggattggttgggtgtcgccgatcttctcgcttcacgccaactaatcgagtgaattgtgggaagaagaagaagaagaagaagccgagtagacgacggcaatggcgtcgtgggagaacctcggggatgtggcgaccgtcgtgcagctgacggggctcgacgcggtgcggctcatctccatgatcgtgaaggcggcgtcgacggcgcggctgcacaagcgcaactgccgccggttcgcgcagcatctgaagctcatcggcggcctgctggagcagctgcgggtgtcggagctcaagaagtacccggagacgcgggagccgctggagcagctcgaggacgcgctccgccgcgcctacctgctcgtccactcctgccaggaccgctcctacctctacctcctcgccatgggctggaacatcgtgtaccagttccgcaaggcgcagaacgagatcgacaactacctccgcctcgtcccgctcatcaccctcgtcgacaacgcccgcgtcagggagcggatggaatacattgaaagggatcaatgtgaatattcttttgatgatgaagacaaggaggttcaagatgctctgttaaaccctgatccaagtacaaatcctacggtagtgctcaagaagactctgtcatgctcttatccaaacttgccatttaacgaagcgcttcgaaaggaaagtgagaagctccaagtagaacttcaaagatcacaaagcaacatggatatgggccaatgtgaggttattcaacacctcctaggagtgactaaaactgtggcaagttcgattccagagaaatgtgccactcctaaggtttctgaaaaagctgactctaatcacacaaaagtcagtgaagatagtgcaaaaacatatcatgatgactctccaaagaagcaaaaggatgcctgcactgcaccacgaagttctccgccatcttcttatggccatgatctggtctcaagcagaggatcatacagcgacgagtggcatgcagatttgcttggttgctgttcagagccatctttgtgtttgagaacattctttttcccctgtggaacattctcaaagattgcttcaattgcgaagaacaggcccatgtcatcgtcggaagcatgcaatgatattatggcatattccctgatattatcctgctgttgttacacttgctgtgtgaggagaaagcttcgtcaaaagctaaatattgcgggaggttgcattgatgatttcctatcacatttgatgtgttgttgctgtgcgcttgttcaagaatggcgggaagttgagattcgtggagcttatggagagaggactaagattagccccccctcatttcggtacatggaacactaagcagcgatgcaaggcttgagcttctgtgaagataatgacctaaaggctagagcaacccggtatcgtactacaatagtaatgatgacacagctacaacattgttgtatttatgcttaccctgcattgtttgtgttggtactctgtttatagtaacatcagttggtgttgggcacagtatgttgtatgtagtactttgtaagaaaaaacacaagttacatgcc

SEQ ID NO: 27921 - DNA, 1202 bp, Oryza sativa
  ref <308>: DATABASE ACCESSION NUMBER: AK103363
  ref <309>: DATABASE ENTRY DATE: 2002-08-28
ggtccggctcggctcgtcggcgacgcctcgcaccgtcgccgctcaccggcgctcctccgccgccgctcgccgccggaggagggatagagtgctcgtcggtgcggtttgatggaaatggcccccgcggcgcaggtggcgtcgaacccgcggacggtggaggacatcttcaaggattactcggcgcggcgcggcgcgctcgtccgcgcgctcacctcagatgtggacgagttcttcgggctctgcgacccagataaggagaatttgtgcctgtacggcctcgccaacgggagctgggaggtggcgctgccggcggaggaggtgccgccggagctgcccgagccggcgctcggcatcaacttcgcccgcgacgggatgaaccgccgggactggctctccctcgtcgccgtccactccgactcgtggctcgtctccgtcgccttcttcttcgccgcgcggctcaacggaaacgaacggaagcggctcttcaacatgatcaatgatctacctactgtatatgaagcattggttgacaggaagcacgtcagggataggtctggtgtcgatagcagcggaaaatccaaacattcaacaaagagaacaggcgaagggcaggtaaagcgctccagggttgtcgcagaggagtacgaggacgacgacgaagaacacaacgagacattctgcggaacttgcggtggcctctacaacgcgaacgagttctggatcgggtgcgacatctgtgagcggtggttccacggcaaatgcgtcaggataaccccggctaaggcggagcacatcaagcactacaagtgccctgactgcagcagcagctcctccaagaaaactaggctataggttaaattgtggtgtgtgcaatctcctctgaccaatctgatcaaacgacaatctgtcctgccactaggaaaaaaaagatggtgaagctgttcttcggtccaatgtcgtagcttagctagatgtgaagtcatctagacattgtgctgtgtggtagatgaggcaaaaaagagtgaactgaaaagacgggaaaaacgtattcgatctttagctttgttttataaatgttttcttcattgtcaccgatgtgctttgggttttttcagacttcagagcatgggtatcgttgttgaattgtagctgcatgcattgcatgatatatttgtcaagtgctcaacaactggagcattccc

SEQ ID NO: 27922 - DNA, 3626 bp, Oryza sativa
  ref <308>: DATABASE ACCESSION NUMBER: AK103364
  ref <309>: DATABASE ENTRY DATE: 2002-08-28
gactccaaatcccttcttaccctattcccctccccccgcagcttctcttcctcctgcagtactcgccgccaccaccaccgcgccgccgccgccggccgcgttccgagacccactcgatcggaatccaccgcggcgcgcccgcgcgcctgcgtcctcttccttccccgggagccgaccgaccacggcgaccagtcgatctccctctccgggcgccaaccgcgtcttagcttcatcgaatccaccgccccaccccgcatctcctcctcctcctccgacgacgacgactactactagtcttctccaataagcccccctcccgctccccccgcctgaagaagaagcagcagctagctccggggagaggtcgacggcgcgccgggtagatcgcgccccgccccgcctgcgtcgcggctgtcggagcaaacgcaaaccccccaggttgttctagcgtgtgcagcggctagctgattgattgtcttctgtgatatatccagagctcgtgttttgtggtttgtggtttgtggtttgtgcttggattgttgatgtgctaattcgcggcgttacaagatcactgctggattgatattgagttgtgcctcggctgtgctagctgtgtgttgattctctcctcgtcgtggtgatcgatatggagattgttgcagtagatcaggagggagctcgtgttgttgggacgaactgtatgcttgctcgtggtggaactggtgctgtagcgccagtgttggagctgacagcgacgcctcgtcaggatgcagccgctgaagctggtgtagacgaaccggcacaacaccaatgcgagcatttctccataagagggtatgttgctcttcttcagaagaaggatccaaaattctgctctctatctcggattttccatgaccagaaaaaatgtgatgaacacaaagctagttcaagcccattttctgtagcaaagtttcgacgatgggattgctcgaagtgcttggataagttgaaaacttcagataatggaacagcaccaagaactcttcccgcaaagcagaatggcacaagtgatggttgctccatcacatttgttcggagcacttttgtgcctgctagtgttggttcccaaaaagtgtctcctagcacacaatcatctcaagggaagaatgctgatagatcaactcttccaaagagtgtgcaagaaggcaatgactccaaatgcaatgcgccttctggcaagaatggagctgctgaggccaatactgattcaccaatgaaagatttgcaagggccagcccaaaattatgatgtggcagcaaatgtctctgaggacaacacttctgttgatgttggggctttacctgaagttccccagattacatggcacatagaagtaaatggtgcagatcaacctccatccactccaaaactttctgaagtggtcctcaaaagaaatgaagatgaaaatggaaaaactgaagagactcttgttgctgagcagtgcaatttgaccaaagatcctaacccaatgtctggaaaggaacgtgatcaggttgctgagcagtgcaatttgaccaaagatccgaaaccagtgtctgggcagaaatgtgagcagatctgcaatgagccatgtgaagaagttgttctcaaaagaagctccaaatctaagaggaagacggataagaagttgatgaagaagcagcagcacagcaagaaacgcactgcccaggctgatgtttcagatgcaaagctttgtcggagaaagccaaaaaaggtgcggcttctatcagaaattataaatgctaaccaggttgaggattctagaagtgacgaagttcatcgtgaaaatgccgctgatccctgtgaggatgatagaagtaccatcccggtcccgatggaagtaagcatggatattcctgttagcaaccatacagtgggagaagatgggttaaaatcaagtaagaacaagacaaaacgcaaatactctgatgttgtagatgatggatcatcacttatgaactggctgaatggaaaaaagaaaagaactggaagtgtgcatcacacagttgctcatccagctgggaatttgagcaacaaaaaagtgacacccactgcgagtactcagcatgatgatgagaatgatactgaaaatggtcttgacacaaatatgcataagacagatgtctgtcagcatgtatcagaaatctccacacagaggtgctcatcaaaggggaaaacagcgggtttgagtaaggggaaaacacattcagctgctagtaccaaatatggtggtgaaagcaccagaaatggtcagaacatacatgtactcagcgcagaagatcaatgccagatggaaaccgaaaactctgttctgagtcactcggcaaaggtttctccagctgagcatgatatccaaattatgtctgaccttcatgagcagagtctacccaagaagaaaaagaagcaaaaacttgaagtgactcgtgaaaaacagaccatgatagatgacatccccatggatattgttgaactgctagctaaaaaccagcatgagaggcagcttatgactgagactgattgttctgacatcaaccgtattcaatccaagacaactgctgatgatgattgtgtaatagtagctgccaaggatggttcagattatgcatcaagtgtgtttgacactaattcccaacagaagtccttggcatcccaaagtacacagaaggagttacagggtcatttggcattgaccacacaagagtctccacatcctcagaactttcagtctactcaggaacagcagacacatttgcggatggaagaaatggtcactattgctgcaagctcaccactattttcacatcatgatgatcagtatattgctgaagcaccaactgaacattggggccgtaaggacgcaaagaagctaacgtgggagcaatttaaggccactacaagaaattctccagcagcaacatatggtgctcaatttagacctggtatccaagcagttgacttgacttctactcatgtcatgggatcttccagcaattatgcatctcgccaaccagtaattgcgccactggaccgctatgctgaaagagcggttaaccaggtccatgcaagaaattttccaagcacaatagcaaccatggaagcgagtaagttatgtgatcggagaaatgctggacaagtagtcttgtatcctaaagaatccatgcctgcgacgcatcttctgagaatgatggatccatcaacattagcaagcttccccaactatggaacttctagcaggaaccagatggagtctcaacttcataattctcagtatgcacataatcagtacaaaggatcaaccagcacatcatatggcagtaacctgaatggaaagattccattgacattcgaagacttatcacggcatcagctgcatgatctgcacagacctttacgcccacatcctagagttggtgtgcttggctccttgctgcagaaggaaattgcaaactggtcggagaactgtggcacacaatctggttataagttaggagtgtcaacaggaataacatcgcatcagatgaacagaaaggaacattttgaagccctgaattctggaatgttttcagcaaaatggaatgcattgc

SEQ ID NO: 27923 - DNA, 1760 bp, Oryza sativa
  ref <308>: DATABASE ACCESSION NUMBER: AK103365
  ref <309>: DATABASE ENTRY DATE: 2002-08-28
ttgggggcaaaaaccctaaaccctagcaatccccaccctcttcctcgccgcacggttccaggggtcgccgctgccgtcgccgccggcggcgccgacgacgacgacatggcgaaccttttttgtctcgcgtcgctgcggcgcgccgtcgccgccgtcgcggcagcagccgcgccctgccccgagagctataagcaagggatctgtggctctactttccactgccggtatttctcgtctaaagccaaaaagaagacaaagtccagtggaactgactctggtgaagagaatctgtcaaagaaagacttggctctacaccaggctattgatcaaataacatctgcatttgggaagggcgcaataatgtggcttggtcgttctgaaggtcgtagagaagtacctgttgtgtcaactgggtctttctctttggatttggcattgggaactggtggacttccaaagggtcgtgttatagaggtgtatggtccagaagcttcaggcaagacaactcttgcacttcacgttattgcagaagcacaaaagcatggcggttattgtgccttcgtagatgcagagcatgccttagatccagctctggctgaatcaattggggtcaacaccagtaatttacttctctctcagccagactgtggcgagcaggcactcagtcttgtggacacactgattcgaagcggctctgttgatgttgttgttgttgatagtgtagcagctcttgtccctaagagtgagcttgacggggagatgggtgatgcacatgttgctctccaggctagattgatgagccaagctcttcgcaagctgagccactctctctcactttcccagacaattttgttattcattaaccagatcaggtctaaagtgaccacatttggaggatttggaggtccaatggaggttacttctggtggaaatgcccttaaattctatgcttccgttagaatgaacatcaagcgtattggtttggtaaagaaaggcgaagagactataggtagtcaagtgcttgtgaagattgtgaaaaacaagcatgccccaccgttcaagacagcacagtttgagctggaatttggtaaagggatatgccgcagttcagagcttattgaacttggattaaagcacaagcttgtcaaaaagttgggtggtgcattttattctttcaacgaagagtcatatcgtggtaaagatgcccttaaatcttacctcaacgaaaatgaaagtatcgcaaaagaactggagacgaatttaaggaaattgatgggaactcaagcacctaaaaagcaggaggatgaaggtgatttcctgagtgatctgcctgaagagagtctcgccactgaaacatcctccgaggaggaactggcagctgtaatagaagcttaatcagtgatgcttaatcagtgatgatagatcaacaagaaggaatatgcgctgagcagttattccactgaaccatacatattttggttcttggagatgtcattttggctgcaccgggcatatagaatgtgtggaattcgtatttgaacatccttcagttgtcaaatgcctggagcgaagtgaggtagagccggggaaggaccggggggcttacgtatggacttgtatggtggctatttagacattgaaagggttattagtagaatgtaaccatgtatatatgtcgcatatctgggattcctcgtcggttctggcttgagatacacttactaaatgcttctgatatttgattattccggttccattcc

SEQ ID NO: 27924 - DNA, 2415 bp, Oryza sativa
  ref <308>: DATABASE ACCESSION NUMBER: AK103366
  ref <309>: DATABASE ENTRY DATE: 2002-08-28
gtctcccaaagccaaaggagataccccctccctcccttctcttcctctcctcctcaccgcagctatcggggagcgccgccgccgccgccaccgccgccaccgctaggctttccttccccttcccccaccagaagcttctcgccggagaaggaaaggaggaggagagatggcggagcggctgacgcgtatcgcgatcgtcagcgaggacaagtgcaagcccaagaagtgccgccaggagtgcaagaagagctgccccgtcgtcaagaccgggaagctttgcatcgaagtaactccggcgtcgaagcttgcgttcatttctgaagagctgtgtattggttgtggtatttgcgttaagaaatgcccgtttgatgccattgagattatcaaccttcctaaggatttggaaaaagatactactcatcgctatggtccaaacaccttcaaattgcacaggttgcccgttccaagacctggtcaagttttaggccttgttgggacaaatggaattggaaagtcgacagcactcaaagtgttagctggcaagctcaagcctaatttgggacgatttaaaaatccaccagactggcaggaaattctgacatacttccgtgggtctgaactccaaaactattttacacgcatattggaggataaccttaaggcaatcatcaagcctcagtatgtggatcacattccaaaagctgtccagggaaatgttgggcaagtacttgaccagaaagacgagagaggcgtgaaagctgagctttgtgtcgaccttgaattgaaccaagttattgatcgaaatgtaggagatctttctggtggtgagctccagagatttgcgatagcagttgttgctgtgcagaatgcggaaattttcatgtttgatgagccatcaagttaccttgatgttaagcagaggcttaaggctgcacaagtcgttcggtctttgcttagacccaacagctatgtgattgttgtggagcatggtttgagtgtcctggattacttgtccgactttatttgctgcttgtatgggaagccaggtgcttatggtgtagttactttgccgttttcggtccgagaaggtatcaatattttcttggccggatttgttccaacagaaaatctacggtttcgagatgaatctcttacttttaagattgcggagactcaggaaagtgctgaggagattgagacataccagcgatataagtaccctactatgagtaaaacacagggcaatttcaagctcactgttgttgagggtgagttcactgattcacagattgttgtgatgcttggtgagaatgggacagggaaaactacattcatcagaatgctggctgggttgttgaagccagacactgtggaaggaactgagattgaaattcctgaatttaatgtgtcctacaagcctcagaagattagcccgaaattccagcattctgtgaggcacttgcttcatcagaaaatacgggattcatatactcatcctcagtttgtgtctgatgtcatgaagccactgcaaatagagcaactcatggaccaggaagttatcaatttatcaggtggtgagctacaaagggtggcaatatgcctttgccttggaaagcctgcagatatctatctgattgatgaaccaagtgcctatcttgattcggagcagcgcattgttgcttcgaaggttatcaaaagattcatccttcatgcaaagaaaactgcatttattgtggagcatgatttcatcatggctacctacttagctgacaaggtcattgtttatgaggggcggccttctatcgactgtactgccaatgcaccacagtctttggtatctgggatgaataagttcttatcgcatcttgacattacttttagaagagacccaaccaactataggccaagaataaacaaactggactccacaaaagacagggaacaaaagtctgcaggatcctactactaccttgatgactaatttgaaggcgtacagaatcttcttgtggagcttcccgcccataatttgcccaggccttcgatgtcctacgcattacttgttcagaaggttactttgaagctaccacagcttgaagcatgctaaataacttggctgcaggagtgaagtggtatcatcatcagttataaggctgagcatgtgatgctgacacttgagttcttttgctggtttgatatatatgatgatgggaaagagagatgttactgttaaactgagcaactttgtcaggatcggaagattgtgaatttttgtgtatttttgcattattgtatcgtggatttaccaactggcacccttaaatcgttggttttataggcataaagtttttgagctgttactcatgttaccaatgttatcaaagttctctgagttattactgttaattcactttatcg

SEQ ID NO: 27925 - DNA, 2920 bp, Oryza sativa
  ref <308>: DATABASE ACCESSION NUMBER: AK103367
  ref <309>: DATABASE ENTRY DATE: 2002-08-28
gcgttccgttccgttccattccattcggtgcctctgcccggagccgaactccgacgccttatcgactcactcaccaagtgctcgacgcaattccccaccggggagcccgcccgccatgccggagagcaacggcgccgcgtgcggcgctgcggagaaggtgaagccggcggccagccccgcgtcggaggagccggccgccatcgccggtaacatctccttccacgcgcagtacagcccccacttctcgccgctcgcgttcggccccgagcaggccttctactccaccgccgagagcgtccgcgatcacctcgtccagagatggaacgagacgtacttgcatttccacaagacggatccgaagcagacgtactacctctccatggagtacctgcagggccgcgcgctcaccaacgccgtcggcaacctcggcatcaccggcgcctacgcggaggccgtgaagaagttcgggtacgagctcgaggccctcgtcgggcaggaaaaagatgcagctctgggaaatggtggcttgggtaggctcgcatcttgctttttggattcgatggcaacactaaatttgcctgcttggggatatggtctgcggtaccgatatggtctattcaaacaatgcatcaccaaggaaggccaggaagaaattgctgaagattggcttgagaagttcagcccatgggaaattgtcaggcatgacattgtatacccaatcagattttttggccacgttgagattttgccagatggatctcgtaaatgggtggggggagaagttctcaatgctttagcatatgatgtgccaattcctgggtacaagacaaaaaatgcaatcagtcttcgtctttgggacgcaaaagctagtgcggaggattttaacttatttcaattcaatgatggccagtatgagtccgctgctcaacttcatgctagggcacaacagatatgtgccgttctctatcccggtgatgctacagaagaaggaaagcttctcagactgaagcaacagtatttcctttgcagtgcatcgcttcaggatatttttttcaggtttaaagaaaggaaagctgacagagtttctgggaaatggagtgagttccctgcaaaagttgctgttcaattgaatgacactcacccaactcttgcgattcctgagctgatgaggctactcatggatgtggagggacttggttgggatgaagcatgggatatcacaaataaaacaattgcctacaccaatcacactgttcttcctgaagcccttgagaaatggtcgcagattgtaatgaggaaattacttccacgacacatggaaattatcgaggaaattgacaagcggttcaaggaaatggtaatctccacccggaaggaaatggagggaaagattgactccatgagaatcttagacaactcaaatcctcagaagccagtagtgcgcatggcaaatttgtgcgtagtgtctgcccatacggtgaatggagtggctgagttacacagcaacattttgaaggaagagctttttgcagactatctctctatatggcccaacaaatttcagaacaaaacaaatggaattacacctcgtagatggctccgtttctgcaacccagagttgagtgaaatagtaacaaaatggctaaaaacagatcagtggacaagcaaccttgatcttcttaccggacttcggaaatttgcagatgatgaaaagcttcatgctgagtgggcatcagctaagttggctagcaaaaaacgcctagccaagcatgtgttggatgtgacaggtgttacaatcgacccaaatagcctttttgatatacaaattaaacgcattcatgagtacaagagacagctgctaaacattttgggagctgtttacagatacaagaagttaaagggaatgagtgcagaggagagacaaaaagttacgccacgcactgtcatgatagggggaaaagcattcgcgacttacaccaatgccaaaagaatagtaaaattggtaaatgatgttggtgctgtggtgaacaatgatcctgatgttaataaatacctaaaggtggtgttcattcccaactacaatgtatctgtggccgaggtgctcattcctgggagtgaactgtcacagcacatcagtaccgcaggcatggaagcaagtggaacgagtaatatgaaattctctctgaatggttgtgttatcattggtactcttgatggagctaatgttgagataagagaggaagtgggacaagaaaatttcttcctttttggtgccaaggcagatcaagttgctgggctgaggaaggatagagagaatggcttgttcaaaccagacccacgttttgaagaagccaagcagcttataaggagtggtgcttttggcacctatgactatgctcccctcttggattctcttgaaggaaattctggatttggtcgtggtgattatttcctcgttggctatgatttcccaagctatattgatgcacaggcccaggttgatgaagcctacaaggataagaaaaaatggatcaagatgtctatactgaacacagctggaagtggcaaattcagcagcgaccgtactatcgctcagtatgcaaaggaaatatggggcattactgctagccctgtctcctaaatacgagatgcaccaagacgaagctcatcaagatggacgctatattatgcaataataaggattagataacgatccacggtgaataacacttgcttccgttgtaagctggagcgcggagaacccagcaacgagtgaagctggcactttgaagtgcgctggaaaacgcaaccctcttttgctttatgctaatatatatgtatttggtctggaacaaggtacttgtgagatgtactggatggaatcttccgtcacaaaataaaacgattcaaatttttggtt

SEQ ID NO: 27926 - DNA, 1787 bp, Oryza sativa
  ref <308>: DATABASE ACCESSION NUMBER: AK103368
  ref <309>: DATABASE ENTRY DATE: 2002-08-28
ggttggaagaaaatgacaagcttgtgcttacaccctttgagaagaacattgacatctggagacagctttggagagtccttgaacgtagtgatctgctggtgatggtagtcgatgctcgagatcccttattctaccgctgtcctgatctcgaggtatatgcaaaagaaattgatgaacacaagaggacaatgattcttgtcaacaaggctgatctgttaccaatgaatatcaggaaaaaatgggcagactattttaaggcacatgatattctctatgttttctggtccgctaaagctgctactgccacattagaaggcaaaatattaagtggatactctgaacaagattctgcttcacttgatttggacaccaagatatatggcagggatgaactcttaaagaaattgcaaactgaagcagaattcattgtagcacaaaggagggccgcagccatcaaagaggacagcagagccacttcctctgattctgtttcatcagtggctaagcatgttgttgttggatttgttggttatccaaatgttggaaagagttcaacaatcaatgctttagttggtgagaagaagactggtgttactcacacacctggcaaaacaaagcatttccagacgctgataatctcagaggagctcactctatgtgattgtcctggtctggtcttcccttccttctcaagctcaaggcatgagatggtgtcatgtggtgtcttgccaatcgataggatgactaagcaccgggaagctattcaggtggtggcagatcgtgtcccaagaagtgtccttgaacagatttacaagataactctgccaaagccaaagccatatgaatcgcagtcgagaccaccaactgctgctgagctgttgcgagcctactgtgcatccagggggcatgttagccatgctggacttcctgacgagactagggctgctcgacagatactgaaagattatatcgatggtaaaattccacacttcgaacttcctcctggcatggtagatactgaaaatgaacacgaagaaacctccggattagaaggtccaactacctcagcatacaatgaatcaggtggttccgattccgatgaacgggatgatacagttgatccagcacaaccagatatgaggcatgtccttagcgacctcgaatcgtttgacctggccactgaagggtctaaacctgctgggaagaagaagaaagaggcatcccacaagcagcacaagaagccccagaggaagaaggaccggtcatggagggtcggcaacgatggcggcgatggaactgcggtcttaagggtgtaccagaaaccagctgttaacctctctgccgtcagtgcaagcgacaagacctagtaccctgatggcatattgtgttttcaactacacttggcacacatgggcaataaggtctttgctcccttgagttttctggagaccctgacctttgcatatgcaaaatcaagaaatctggtttacgcctgccgtgttgagtggtaggggaaattttgccgcctgtgagcaaaattgccgaggcttgcttgctctggtggatgcgagatcggagacgaaagctatatagaagaagaaaattttctgttttatttcagcttttgttcccctggcattatatacagccagtgtgaattgtgtgtgatatgtgtactgtttgttcctccatgaatgatcaagaaattaacatagaaattgtaataacttttcaccagttttgttcgtctcatttggttcaaaatgttgcacacaaacattacttgt

SEQ ID NO: 27927 - DNA, 816 bp, Oryza sativa
  ref <308>: DATABASE ACCESSION NUMBER: AK103369
  ref <309>: DATABASE ENTRY DATE: 2002-08-28
gaggcttccaattccaactaccaccgcttcaccatggccgctcctctcttcctcctcctcctcctcctcctcgtctcctccgcctccgcgggttacgaggaggaggcgctgctgcggcgcgcggaggaggagcgggactggatggtgggcgtgcggcgccgcatccacgcccatccggagctcgcgttccgggagcaccacaccagcgccctcgtccgcgacgagctggagcggctcggcctcaccgcccgcgcggtcgccggcaccggcgtcgtcgccgacgtcggctccggcctcccccccgtcgtcgccctccgcgccgacatggacgccctccccgtccaggaattagtggagtgggaacacaagagcaaagtggatggtgtgatgcatgcctgcggtcatgatgtgcacaccgcgatgctcctgggagctgcaaagttgcttagtgagcgcaaggagcagatcaagggcacagtgagacttcttttccaacctgccgaggaaggtggtgcgggtgcatcttacatgataaaagatggtgttcttgatggcgttgaagctatattcgggatgcatgttgactatcggatgccaacaggtgtaatagcagctcatgcagggcctacacaagctgctgtatgtttttatgaagcaaaaatagaaggtaaaactggaaaggctgaaactccacacttaaatgtggatcctattgttgctgcatcatttgtcatcctatccctgcagcagctcatttcaagagaagatgatcctcttcacagccaggtgctctcagttacctatgtcaagggtggg

SEQ ID NO: 27928 - DNA, 2065 bp, Oryza sativa
  ref <308>: DATABASE ACCESSION NUMBER: AK103370
  ref <309>: DATABASE ENTRY DATE: 2002-08-28
gtctccaccgcattgacacaaacacaaacagatcgatcgctcctatcctctttcccccttctcctcgcgtcgcctccacaacccaaccaaccatggcgaggccgccgcaggaggcgatcgacaccttcgtcagcatcaccggcgccgacgaggccctcgccgtccgcaagctcgaggaacatggtggcgaccttaacacggcaatcaatgcacatttcaatgaaggagacagtacagtgaacagagccagtcaaaacaatatacctgagagtcatgatgatatgatggacctggatggaccacttgataatgcatttagaagatctttgttccctgaaactttgcgtgacccttttgcactgatggacacaaactttcagcaaaattattttgacagagttggttccacagatactttcggtcatggcccacaggtttcacaccctagagaggtgcgagagatacctatcgaagttaaggatagcaacccgcaaacaggcccttctggtcaggcccctattatcgaggatgtcactgggcatgaatcttcatatggtcctgaagttcgtggggctattgtaattgatgatgatgatgatgagcagccatctgccccttctcttcatgctaatattgatagctcattgcagccgaacccttctattccaactgcacctccattggttcatgttactgactatgacaatgatatcgaagaggaaatgatccgggcagcaattgaagcttcaaaaagggatgctgaggcaatgacaattacagcagagcaaggaataacacagccgccagagggagtaaacattacagaacattcttttgatgaagaggacaagggaactgcaagcggaacagctggaaggcaaggattagctacagaaaaggttggatcatctaggcagccaatagatgaagataccctccaagaggagactgaagatgtagaagaacagccattagttagacgtcgttctagacgcatcccttctggaaacactgagtcagcacaacctgtgtacacggtcgatagtcctccctcaagttctcagcctcaaggaaatttgaatgatcgccagaataatggagatgaatttccatcagagtggggtggcatttcttctgaggagcatgatgaagctgttatgcttgaggctgcaatgtttggtggaattccagaaggacccatgtatccgttctcaatgccatctcatagaagcccaagtctttatccccatgtagagcatgctccatcaccagcattaactgaacagcggttgttacgtgagcagcaggatgatgaataccttgcatcactccaagctgatcaagaaaaagagttgaaggccctacaggaggccgagcttcgtcgcctggaagaaactgctgcaagagaagctgcccttgaaaaacagaagcaagaggaagaggaaaggcgtaaaaaacaactggaggaagaggagctagagtccagtcttgcatccaaacaagcatcattgccgtcagagccagctgcagacgaggaaggtgctgtcacacttgtagtccgcatgcctgatggtagtcgacaggggcgtcgctttctgaaatctcataaacttcagttcctttttgatttcttagacattggcaggacttataagccaggaacctacagactggtaattcgctactgtaaggtcgtacccaaggcgtgctttcaccactggtgagggcgatatgtcatttagtgatctgggcctaacaagcaagcaggaagccttatttctagaaaagattacagaatagtgaagaaagatttagtcatggttagggacaccctcagaaagttgtgtttttacatttttttttatacttgcatcttgcttttgttagtaaaaatagtacaactggtttatggttcagttgagagtcctcttctgcggtgtgaaatggcggtgatgccgtgatgttgatacttctctccttttgagttcgatgttaatgtcagggtaaaccataaacaacatggagccaggatatttataggatgatgatacctttagttaaaacc

SEQ ID NO: 27929 - DNA, 2991 bp, Oryza sativa
  ref <308>: DATABASE ACCESSION NUMBER: AK103371
  ref <309>: DATABASE ENTRY DATE: 2002-08-28
gataggaggagtccgagttgggcccaccgtcagtgtgaagcccttcgacgcttcactcccctttcgtcctcgtcgtcgccgtccgccgccgccgccgccgccggtggccggggatggcgagccgcgcgccgtgcctcctcgctgctcggggcatcgcctcgtcgcctcacctcgcccggaggttaaagcaaacagaaaatgagattgttcaaatgttccgaaccccatctcctcggaacgaggatgcggtagcagctctttcgccaaggtacacaaattccgttcgtgtgttggatgagagattcattaggatcctgaaaatattcaagtggggccccgatgctgagagggcattggaggtactcatgctgagagttgatcactggttggtacgagaggttatgaaaacagatgttggggtcaatgtgaagatgcagttttttagatgggctgcaaagaaaaggaattatcaacatgacacatccacttacatggccttgatacattgtttagagctagtggagcagtatggtgaaatgtggaagatgatccaagaaatggtacggagtcctatttgtgttgtcaccccaatggagctttcacaggtaattcggatgctggggaatgccaagatgattggcaaggcaattacaatcttttaccaaatcaaggcacggaagtgtcaaccaactgctcaggcatataatagcatgataatcatgttaattcatgaggggcaatatgagaaagtgcatgaactttacaacgagatgagcaatgaaggccattgccacccagacactgtgacttatagtgcactcatttctgctttctgcaaactcggtcgccaggattcagcaattcgtctgttgaatgagatgaaggagaatggaatgcagccaactgctaagatatataccatgataatatctttgttcttcaaactggacaatgttcatggagcattgagtttgttcgaagagatgaggtacatgtactgccgacctgatgtgtttacttacaccgagttaatcaggggccttggtaaagctgggagaattgatgaagcatatcacttctaccatgaaatgcaacgagaagactgcaagccagacacagttgtcatgaataatatgataaatttcttaggcaaggctggtcgtttggatgatggtttgaagttatttgaggagatgggagtgtcacactgtattccaaatgtggtgacgtacaatactataataaaagcactttttgaatcaaaatcccgtgtttccgaggttttctcatggtttgagagaatgaagggaagtgggatctcccctagtccattcacgtactccattctgattgatggattctgcaaaaccaaccggatagaaaaggccatgatgctactagaggagatggatgagaagggcttccctccatgtccagcagcatattgcagtttgattgatgctcttggaaaggctaaacgttacgatcttgcatgtgagcttttccaggaactaaaagaaaattgtggttcctcaagtgctcgagtgtatgcagtgatgataaaacacttggggaaggctggccgtctggatgatgctataaatctttttgatgagatgagcaaacttggttgcactcctaatgtttatgcatacaatgctctcatgtctggattagcgagagcatgcatgctcgatgaagctcttactacaatgagaaaaatgcaagagcatggatgtcttcctgatattaactcatacaatatcatcttgaatggactggccaaaaccggggggcctcatcgtgcaatggagatgcttactaacatgaaaaattctacaataaaaccagatgctgtatcatataatactgttcttagtgcgttgagccatgctggcatgtttgaggaggcagctgagctgatgaaagagatgaatgcattgggatttgagtatgatcttattacatattcatctatacttgaggcaattggaaaggttgatcaagaataaactgaaaaattcactgaagaactggattctttgcttttgttcatgttcacaagaaaaaatcttgatccaaggcttcttttgcatcacaagttttactctagaatttcttctggctgatatacatcaaaagttatgcctccttgtctccttgagtgcaaatctggcaaaccattattggagaaatcttagaagacagacttagaaggaacttactcaattttggacagtagtaagcttaccaaatcggcaatctggcactaccaatccaagagcaactgtgcggaacattctcagtccaagtgtccagatggggctttacatatggatggccattgcttcacaatgacggacctaggaattttctagagcttgtgcagaagcatgcgaaagcaatctacagtggagctatccaccggtggtgagcctcgcacagccttggatccaccctgtgcttcatggcaaagtacttctcgcttataaaactgtcatataattttggaagttcaaacattataacagcatcgaagcttgtttttctgaggaccaaagtcaagaatccagatgtggtggacatgtgctccatatatgttgttctaccttggtctcgaaatataagagaaccagatacttcttcaaaatcccttatattttggatagaggtaataaaaattatgtatagtggagatctgagatcctcaagagttaaggttcttgtcatgttgtatgatctgtttctcgctggccccctgtctgtgctcttttgtcattctatagaaagatatcattcttgtgaatgctgtcgctgttgcacctatagctcaactgtacatgataagggcatcatgtgtaaactatgatcttttttataaaaggtgaactgaatgtcatcacatgcaaatgtttatgtatctttctcaaaacatgatactagctggatcagctatttgaatatgaaagtaacgtgatagacttcctgagg

SEQ ID NO: 27930 - DNA, 1134 bp, Oryza sativa
  ref <308>: DATABASE ACCESSION NUMBER: AK103372
  ref <309>: DATABASE ENTRY DATE: 2002-08-28
ggctcaccgcacggcacacgcgcccgggggatttggaaattggaaatttcagatcccagatctcgtctcgccgatctcgccctccgctaagccatgggttcggttgtggatgctccaacagttgtggctggacaggaggaggtcactgacaacatgttgggtgacaagaaagttacagttgtatttgttctaggtggtcctgggagtggaaagggcacacagtgtgccaacattgttgaacactttggattcattcatcttagtgctggagaccttttgcgtgcagagatcaaatctggctctgagaacggaactatgatcgagaacatgataaaggagggaaagattgttccatctgaggtaactataaaactcttgcaggaagccatgattaaaagtggaaatgataagttccttattgatggatttccaaggaacgaagagaatcgtgctgcatttgagaacgttacaaaaataactcctgcgtttgtgctattcttcgattgttctgaggaagagatggaaagacgtcttttgggacgcaatcagggaagagttgacgataacattgagactatcaggaaaaggttcaaagtttttgttaatccagtttgcctgtcattgagtactataatgcaaaggacaaggttaaaaagattgatgctgcaaaaccaattcctgaggtgtttgaagatgtcaaagccattttcgctccatatgcgccaaatgccgcttagagcaatagaaaggaccacatgagtgataaattgcaccaactttagaaaaggctttgctctcaggtgtgactacaaatctgtgattacgaaaccgttgatatagaagagagttttggctcatatgagctacctgcatacccgtaggcaatttgatttgttacttgcaataattaattttgatccccatttcctgctagattaacttttacgagagttggcgtatcgtatgtaatgctgtacttgtaccaatgtatcatttacctcatggacgatgaaactttgtcctcccgccagtttctggtggtataatacagaaagtggaacttccgaatttttttttggttagtttctaaaacaatgttcactgaacagctaataattattcaatttgttattg

SEQ ID NO: 27931 - DNA, 1816 bp, Oryza sativa
  ref <308>: DATABASE ACCESSION NUMBER: AK103373
  ref <309>: DATABASE ENTRY DATE: 2002-08-28
gtgcgggcaacagaatggaaagttcatcagctaggagcaacacctcagagaggaatcgcgtagattatgcaagaagtgtgtccatggattctgcaggtcattctttaggtgctaggtctgcctcaatcctcagtaggagaagcagcaggcagggttcaaggggatccatcagcctctcccgtgagatgggggactcgatactgagctcgatgaggcattcgcttcaatcagcagaccagttgctaggtgatgtagatggctcagttcttgctcaggtcattgacagtggtgaccgagggctagcatttgaaaacgacgttgacgaagaggaagagaataatgtggaggatcatcaggctgttcctctcccagatgatacatcaatgcggattcatggcagaagctctcaaggcacaagtgtggtggcacccgtatctgcgatgaagccaaaagatactaatgttaacggcccagccagttcatctatcaaggttgaaccatataagctttcatggatgcaagattatgcttcttacctgatccatttagccgtatttggatttcttggggtatttacaaggtatgggctccaaaaactgtttggccctagctgcctggcactcacctcagaccaaagcccactgtaccttgaccttccatctaacatgctaggatctttcctgatgggctggtttgggatcatcttcaaggctgatatacgtcacatatctgatcatctcattgtcggaatcacgacaggctacatgggaagccttaccaccttcagtgggtggaaccagaaaatggttggcctatcttccaaaggccactgggtatatgctgtagctggcatagtactaggaatgtttatcgtcaatgagtccatcacggtgggtgcggaaactggtgagcgactgcgaggatggatcctgaaatgcatcatagagaagaattcaataggaagcaaatgcggctgggaggactggagggtggacaccaggaccaaacattatgcgcttcttggagttatggtgattctgatgtctttgatatggatcctgagcattgtgctggccatagtgaaggtgcatagccttggccatggcgcggttctgtggctgggttgctcggtagcacctcccggtgtttggcttcgctggtacttggcgaggctaaatggcggaggaattggaatcggcaagcggagacacctcaaatggcttcccgttggaacacttgcagccaatgttcttgcagcagcaatcatggcagctcttgctgtcacggctaaagcggaaaatacaagacgattgactactgttcttaatggcatacagctcggtttcctcggttgcttgagcacagtatcaacttttgctgctgaagtttacaccatgagaagaagtggtcagattgcaagggcatttgtatatgctgcagccaccttcgttctctcatttgtgctaggaactctgatatactcagtgccggtgtgggtagagcattactgatagcatcgtcaccagttgcagaattggaacctttgatggtttagcaatttgctaatccaagtagcttagataatacaatctagaaacaagcttgcaaagaaaagcttggaacgcgggaatttcatttcaactgccacgacggaatttagtactgcaccatagcaaaagaatgcattttttcttgttgtaaagtgagtatgtatacagcatttctggaattggagagttgggaatacatacagttgtagcatgaagaatattgtacaaacaaaattttgaagtgcaaaaacaatgtctattttcct

SEQ ID NO: 27932 - DNA, 1442 bp, Oryza sativa
  ref <308>: DATABASE ACCESSION NUMBER: AK103374
  ref <309>: DATABASE ENTRY DATE: 2002-08-28
gattccccaccgccgccgccgccgtctactcgctctcgccgccgcccgcgactcccccctcctcggccgctcgcaccctcgccgcgtcgacgctcgatcgctgttcgcgcttcgcctcctcccaatcctctccgccatgcatctaaccctcgaattcgggggagggctggagctgctcctggagaagtccaccaaggtgcacaaggtggacctccagcccaacgacggcgatgggaaggtgacgcccgcccgcctcgacggagccgcgccgcgtgcagctactgcttagctaatcacggacttagaattctgagctgtttgtgtgtgaacattttctttgttgtttgtttcgttttgcaggtcgtgatgaaagggttgctcgcttgggtgaagtccaatctgatcaaggagaggccggagatgttcctcaagggtgattcagtgtatgattttccctttccgtctcatggtttatgtgcatgatatgatttgatccgcttcaatgatcaatggtgtgtccaaagcattttatttgttttcggtccacttcggtatggatattgctaggtgatgagtggtgtcgcttctttggtgatgctggctgttatttctgctgaatttcaacttaaccatgcaaacttaagttataggagaaatgctcaaatattttatttctgttatttcgttaaaaatgtttgtcattgtttctggagctacttcctccgtttcacaacgtaattcataaatgtgggaaatgctagaatgacttacgttgtgaaacggatggagtaaatgttaaatatgcaaccttctaatgacagtttagttgatttcattagaaatatgcataatgaactagggttattgatccggtgattttacttgaataaggaaaccttctaatgacagtttagtatgtgcttatgaatgctttgggtggtatacaggttatttgctgttttctttgcagagaagtggatgctttgttagcgcaataagctgggggatatcactaaacttttgcaatgtcaaacttgaaggaaatttagaaattctctttctttaatttgtggacaaagttaagtccattagtcttgatgaggtgcttcttttcgtgcttgcagaaggcctggtgttctcgtacttataaatgattgtgactgggagctatgcggtggccttgacgcggagttggaggagaaggatgttgttgtttttatctccacattacacggtggttagtacaactattaggactaccgaaatcaccactgatatcatgttgctaaatgcatcttgtaccatcagaaacagaggttgtgtgccataaatttctggagagaatggattgtggagaggaatctgctgaagttgatatggtcaatttctgtaatgaaaaggcagttgtcagttatgaatattcaatatcacagatttgcagt

SEQ ID NO: 27933 - DNA, 1448 bp, Oryza sativa
  ref <308>: DATABASE ACCESSION NUMBER: AK103375
  ref <309>: DATABASE ENTRY DATE: 2002-08-28
gaaggtcaagagttcaattttactattaaaagaggggtgagcaccaaagacaccgtcagtgtgaattacgatgacttcataaacgatgttgaagttggggacatactgttggtggatggaggaatgatgtcactcgctgtcaagtctaaaacagctgatacggttaagtgtgaagtagttgatggtggggaactgaaatcaaggcgccacctaaatgtccgtggaaagagtgcgactttgccatctattacagagaaagattgggaggacataaagtttggtgttgaaaatggtgttgatttctatgccgtttcctttgtgaaggatgcaaaagttattcatgaactgaaggactaccttaaaagtgctaatgcagatatacatgtcattccaaagattgaaagtgcagattcaataccaaacctccagtccattattgctgcttcagatggggcgatggtggcaagaggggatcttggtgctgaacttccaattgaggaagttcctttgctgcaggaggagattgtcagaacatgccgaagcatgcagaaaccagttattgttgccacgaatatgttagagagcatgatagaccatcccactccaacaagagcagaagtttctgatatagcaattgcagttcgtgaaggttctgatgccatcatgctgtctggtgaaactgcccatggaaagttcccactgaaggcagtcaaggtgatgcacacagtggcacagagaacagaatccagcctgtataacccaactacatctcctagtcttgttgcacatcctcaggctctgctcaacgaggaattttcgcaaagccaactaagcaaaatgtttggatctcatgctacaatgatggcgaacaccctttgcaccccaattattgtgtttacacgaaccggctccatggcagtccttctcagccactaccggccctcgtctacaatttttgcatttacaaatgaggaacgagtgaagcaacgtctggcactctaccagggtgtggttcccatttacatgaagttttctgatgatgcagaggaaactttctctagagcaattagtagcttgctgaacgcccaattcgtgaaagaaggggactacgtgacccttgttcagagtggagtgaagtcgatctggagagaggagtctactcaccacattcaagtgaggaaagtccagggctaatgagcctgaccgtcataccgtcacagggatgtacctgttcaaattttgtttgttacttgatgtgctaaattacgagtaacttttacggggaacaagtttggattattatatgttatgttgattttacttgtaggctctggaattgaataagataatctatattaattttcacatggttccaattggactgaacatttcgtcagttttactcttaattactcccttcctcctataatataaggggttttgactgt

SEQ ID NO: 27934 - DNA, 2943 bp, Oryza sativa
  ref <308>: DATABASE ACCESSION NUMBER: AK103376
  ref <309>: DATABASE ENTRY DATE: 2002-08-28
gaagaagcacattcctccgcttcctcatttcctcccaccgaaaaaaagctagggtttggagctgtgcgccgctgctcgtcgccgcccccatcctccgtcgcggggcgtcggcaccggctccctcctttccgtcggctggccgccaagaaaatctagggtttgggctgtgcgaggcagcgccggggaagcagggaagcggcgaggcggcaggcaggcaggcaggggcaaggccagatccgccgcgcgcagcggcctcgtcgggccggtggcaacgagggctcgttggctcgtcagatccagtgccctttttctccctccctccccctcctcgatttggtttgcggggggtgctcgccaaaagcttcgggattggagtatgattttgaggatctgaataaaagaagtcagtaaaatcatttgtctctcacgatggagaagatacaatctgattgcccttatcctggatgtttcttctgtgttatgaaagaggcaaaccctagtaaacgaagagcaagtgtactgaagttctttagggaacttccttctcaagatgatgatggtcaagttctccctattagtggtctttggaatactgcgatggcacatccaaatgaccctgaattcatcaacttggggatatttgaatgcatgtcagctcttatatggaagggactgaaaaacaggcgttggctttctcatgatcagaatatttacatcccatattatgcagcacatataattggatcctacacaatgaatatggaggagtttgcggaacgtgctgttcgtgctggtgtaatacctccattggttgaactcttacgaggcaggctaacttgggtagagcaaagggttgctgttagagctttggggcatttggctacatatcccagtacatttcctgcagttgctgaccatggagaagtacttgaacttgctattcaacttgcttcaagttctctagagattgtgtattctcatttttaccagtttgtggaccgaaggattggctaccactgtgaccttctcacacgaggcatgggtggtgtggaaatggaatctcgcaaagctgaggaatgggcaagccaacttcagtgctggtctttgcaactcattaactgcttcgcatttaagtctgaatttctccatgatatttgcaaggctgattttctagtcaagttacctggaatgtggggtggactcgtaaatgagaactcacctgctggtgttggtttgctaagaactatctgccagagcaagcttggccgaggccatgttgctaatattcctagtgttgttgaagctctctgcaacattgcccgttcttcagatgactggcaatacatggctgttgattgtttactttggttggtgcaggattcaaatacatgtcataaggtaatagatagagttgcctcaacactgatagatttagcaaatatctcaatgctcggtgattataaaaaacttggtgacaccattgtcacagtgctccaagaatgtatgcaacaatatgcaaattcacggaattcaattagtactcacaccaaagaacaaattgatgaactcttgagttccaagcagagttttaaattggagaagaatatgccaaaggaggatcttcatataaaacaagcagcagcattggttgttaagttggaaggcaattcacttttctcttcagggaacatagcaggagctgcagcaaagtactctgaagcacttgcgctgtgtccaatgaagtctaagaaagaaagagtggtgctttatagtaatcgagctcagtgttatctactcctgcagcagccattggctgccataagtgatgctacccgtgcattgtgccttcatagtcctttgaatcgtcacgcaaaaagcttgtggagaagggctcaagcatacgatatgcttggtttagcgaaagagagcctgttggatgcaattctctttataaatgaatgctctcagtcgaatgatcctgacctgtcattaaagcaaaataaagttcctgattatgctgagcgtttggtgaagaagcagatgcgcacagcttggttattcagggaagcagctttgaaacatgggggaatccattgcgagggagaagctagtgatgcttttggtcaagaggcagatgactctgagtgggaaacagccagtgaaagtgatgctgagaatgatgcaacaggagaggcagatgatgaaactgaatggaagaacgataaccaagtatgagaaaagctgagaaccaggtttccttgccattcaggacgattgttggtgttgcttatgttagtagaaacaatggaaccacctgcttgtcttctgtacgagtaaactgaaacaaagttgtgaactggacggagccagcttacagaaagccttgcaagaatggctttcaaaagtgacaaatctggtgccactgtatttatcctattgagaacgaggctgaatttttcaatgccatttatcatctcatcaccatgttggatttgtcagggttgtgcttgtgattcgttcgatgtgttctattcggggagtagtttcatgtttggtgttgtaaaatgtgtttccaccgatttttcagcttttgaatggacaaaactgtgccttctttttttcctcctttcttgatgtgtgaagttttgccaagaggcaaactctggcactgttttctatattctgcagtattgaatgtacattttcttcagggtggatgctgtgttttcttattgtaaaactctatattggttgaggattaactggtttctagtttatgtgtccgtacgttgagtttactatgtgctcagtggttgtctgcctttgtctgggtgctcagatagcgacctgaaatgtaaggcttgagaacttgagtgtggtgctcaaaccatatgtaaatattgttctgcctattcttaatgttcatttagtacgccgttatgc

SEQ ID NO: 27935 - DNA, 988 bp, Oryza sativa
  ref <308>: DATABASE ACCESSION NUMBER: AK103377
  ref <309>: DATABASE ENTRY DATE: 2002-08-28
ggtcagatacacgatggatcacacaaagctctctcagctgcttctcttcacgggcagtagataagaagcagccacccctgctccgtgcctttgcatacacatggtcatctcccatttcacctgcaagcaagcaagcaaagcaagaaacccaaacttttggtccagactccagagaagccaagtagccaacccatgtgtgagtcctggaaagaatagaacagctgcctgcttgcattgtctccacggtacaagagctagctgagctcacacacgctgagagagtgagagtgagaggcagctagctagagagagcgatatttcagctaagctctcgtctcgtcttctggcagatgcccatgggagttttggttagtggtggcttgtgagatcggggagatcgaaggctttactgcaagctgattcttgcatggcaagagctcgatggattggagatggaagaagaccagctgctgcgctgccgcttctcggcctctgtgcgtttctctgcgccgttatgctcgtcgtgtcgctggctcctcctccgggggaagaagaagaagaagcaaaggtgaggtcgtcgtcgttgccagcggcggcgacgtcggtcccggccggtggacggcgccttctgctgccggcggcgaggacgaggaggttccggccacggaggtggaactcggccggcatcgacgacagcaagcatgaggttccgagtggcccgaatccagattccaatagatgatgatagatagatccatgtcgtgtcctgttcttcagtgctgcttctctcagcttgcagtttaggtgtattgttccctgatctctcttctattttagtatggtttttcttttcggctttgctttcgttcaggtaggatttgataaaaatccttggtaagataatgtacaaacagatgggcatttactctagattactactctctgctcatgttccattgcattggatgatatatatgtcatttctgcc

SEQ ID NO: 27936 - DNA, 1270 bp, Oryza sativa
  ref <308>: DATABASE ACCESSION NUMBER: AK103378
  ref <309>: DATABASE ENTRY DATE: 2002-08-28
gactctacaacagatcggaaacctcgcgggcggcggcggcggcggcgcgggtaagcgagcggacaccggcgacgagcgcgaggaggaggaggaggaggaaggagaagatggcggcgacgctgtcgcagctcgacgacgggatcgtccgcgggatggccatcggcgcggtattcaccgactacgctgggaagataaactgcctcgacttccaccgcaaggaggatctcctcgtcacctccagcgaggacgactccatacgcctctacaacatcaccagcgccacgttgttgaagactacatatcataggaaacatggtgctgaccgtgtctgtttcactcaccatccgagttctatcttatgttcatcaagatacaatctagagtcagcagagtcacttcgttatttatcactgtatgacaaccgttgcttaagatattttaaaggacacaaagacagggttgtttcactatgtatgtcacctgtcaacgatagttttatgtcaggatcacttgatcacagtgtcaggatatgggatcttcgtgtaaatgcttgtcagggtatactacgtttgcgtggtaggccttctgttgcatatgatcagcagggacttgtttttgccgtggcaatggaaggaggtgctattaagctatttgattcccggtcatatgacaaaggtccctttgacactttcttggttggtggagatacagctgaagtttctgacatcaaatttagcaatgatggcaagtccatgcttttgacaacaaccaacaaccatatatatgttctggatgcatatggaggggataagaggtgtggctttagtctggagtcatctcccaatgtagcaactgaagctgcttttactccagatggccaatatgtaatttcaggatctggtgatggtaccttgcatgcttggaacatcaatacaatacaagagattgcttgttggaacagtcacatcggtcctatcactgctttgaagtgggctccccgtcgagcaatgtttgcaactgcgtcaactgccctaactttctggattcccaacaattccagttcgaattaggtgcctagcaaaaaggatggaacgtgtgatatgctgattcaacaaacacttgtatcctgttctttcctgcacaagatgggtatcgtgtatgaagtatcaatctctttattaccatctgtggcaaaaaatgatgatgtacaccttcccattgtattctcttatggctattgttaatacacataaaattttctgcatcagtc

SEQ ID NO: 27937 - DNA, 860 bp, Oryza sativa
  ref <308>: DATABASE ACCESSION NUMBER: AK103379
  ref <309>: DATABASE ENTRY DATE: 2002-08-28
ggtcagtccacttctcactagctcgtagacagtgctgcacgtgggttagctacttagctctttctctgcattgctggcttaattttgcagctgcaggtgtgctcgatccccgtggctgatcagcacagaggagtgatcggcggcggcggctacggtgaccgtggtggccaggagcagcaggagaagcagcccttcatgatgacggctctgaagacggtgaccgcggcgacggccgggggctcgatgctggtgctgtccgggctgatcctggccggcaccgtcatcgcgctcacggtggccaccccggtgctggtcatcttcagccccgtgctggtgccggcggccatcgcgctggcgctcatggcggccgggttcgtcacctcgggcgggctcggcgtggccgcgctctccgtgttctcgtggatgtacaagtacctcaccgggaagcacccgccgggcgccgaccagctggaccacgccaaggcgaggctcgcgtccaaggcccgcgacatcaaggaggcggcgcagcaccgcatcgaccaggcgcaggcgtcttagggcggcctgccgcggcgaggcgccgcttctgctagctagctcgatcgggcggcgcacgggacggcgccggccggcgcgcgtgcgttcgccgtggccacgcccacgctggctactcctcttatctgctgagctctgtaaatgcatgcgtacatgtttaattaagcttggtcgcgtagtactctcctatgtaatatgtcccctagattatctaagaggcgatcgtgcatgtcgggcgcctggtacgtgtggtctggtggatgtcgtgtttatggtcatgatgaataaaatgcagtgttccttcg

SEQ ID NO: 27938 - DNA, 1233 bp, Oryza sativa
  ref <308>: DATABASE ACCESSION NUMBER: AK103380
  ref <309>: DATABASE ENTRY DATE: 2002-08-28
ggctgaaacaatagaggagcatccatggggaacatcctccggtgcttcaagggagacgacgatggcggtgatcactacccctactacaagccaacctccagaccacactaccagcctcctcactaccatggtcaacctgcagcccccccagctccaccccagcagcagcctctcggcccccatggcgtcacgccgtccaccgtcggcgtcgccgccctggcgcacgacctcctcaacttcgaatccacatccatggttcctgatggcctcagtcagcacgttgtatcatccaggaaagcacaggttaaatgggcattcttgaattttacaactttccgatcccatcactcccctcagcatcgtcaaactaccaaccatcctcgctaccagagggcgtgcagtttgtgctaaacactttgccggtttatgacaagtgcattggagatggtgatggatttactgcatatgtttccacaacagatccgagggaatctgcaaatgtgccattggaagtgcatgagttggtgatagcaagaactcaagcacgcaaatgtagggattaccagagtgctgatgctcttctaagcagccttgatgaagctggatacaagataatatcttgttcagatgatgaggtcctcgcaaggaaatacagaataagaatgaggggaattgatgcaccggagcttaagatgccatatgggagggaatcacggaatgcattggtgaaactaattggtgggaagagcgttaaaatttatgtctatgatctggaccagtttgggcgctacgttggtgatatctattgcaataatttgttcattcaggagcaaatgctgaagaatggccatgcatggcacttcaagacttatgataaacgcccagagtttgcaagatgggagagagaggcaaaagctgcaaaccgagggctttgggcgtcagggaatcctgagaaaccatgggattggagaagagaccaacgcaacgcaagacaggacgccattcaggtgtactgaaagttgagtctccagcactcatttggccacaaatgtgcatatatgtgtaattgggtaacgttgttgttgagtagctttgcttgcaatgaatgtgtcagaaaccaaaagccaaaatgtatgtgtggtttatgttgtacgaaagagattatatatccaggagtcagctgtgccgtgtgatgtggaggtgaaatgtggtcaatgcaagtgagctttgttc

SEQ ID NO: 27939 - DNA, 2794 bp, Oryza sativa
  ref <308>: DATABASE ACCESSION NUMBER: AK103381
  ref <309>: DATABASE ENTRY DATE: 2002-08-28
gtgtttttctccgcggcgctttcaccgctctctctctctctctctctctctctctctctctcctccgcttcttcctacaaagccgtgggcgctgctcgccgcggcgggtctctctcgcgcgcgcaacaacagcagcctcaaaaccctagctgccctcgcgaccgggtcagggccttcgattggatcggccattcggttcgttcctccaggatattgttggtacttgcattcctccgtctgttattcaagaaagccagtttacactgagagaaccttgctttatttggttcattggccttttgttttgcctgagtgaatgcaattggaaccttctgggtagaagctgaagcttagtttggaacttcatcatactgatttcatactcagaaagtggcgagaaatggatcgtgatgatatagctggtttcgtaagtggaggttgcaaggccttctgagttttctgacgaagcagatgataatagagttatgatatacagaagtcaggcaactggttcttttcatttactatttggttgacgtttgaagtttgttaactggaatggacaaagcatcatgtggccttgggtttggtgatagtatcaactccttagacacgtcccgtcattggagcactgttcagcatacttctgggcttaaagctactacaattgactattcaacgtattccagtttttctattgcaagctcaaaaacactaaaaaggaagcgaagtgctatggcaggaccagaaggtactggaaacccattacttactttgggtttagggcactcaccaagttcatctgacaatagcaaagttagttctgccacagcttatgcaatgtctccatcttcattgaaagaggctgatgaggagtcatcagctgatcttggcctgaattttgagctttgccttggcaatgatatggtacattgtcaaaagagatcccctgttggtgctgagaattcaccattgacaaactctcataaattggatcttcagctgagtttgtctactggatcacctgaatcagctgtcaccaacacaaatatggtgtcaccgattattcacggtggcttggagatacctgttaccaactgttcaccagctattataggggaaggatctgtaccctgtacttgggttttcgagaagtcagtgatttcatcttcgtatgcctctgaagcaacatataccttcccattttcgaaggtacccaaaacaggggatgctgctatgtcttctccagtcatatcgtcaaccttggtaacaagtatgaaaagcccagttgcctgtacttctgggtcaattaatccccaacaacgcaacagtatcactaaaaactgtcagtttccaggatgtgttaaaggagccagaggggcatcggggcattgcatagcccatggcggtggtaggagatgccaaaaacctggttgtcagaagggtgctgaaggaaggaccatatattgcaaggcccatggtggaggaaggagatgccaatttcttggatgcacaaagagtgccgaagggcgcacagaccactgtatagctcatggtggtggtcgccgctgcagtcatgatggttgttcccgggctgcacgtggcaaatctggcttgtgcatcaggcatggaggtggcaaaagatgtcagaaggagaactgtatcaggagcgccgaaggtcattcaggcttctgcatctctcatgggggtgggaggcgttgccaatttccagaatgcacgaagggtgcacagggaagcacaaagttctgcaaggcgcatggtggaggaaagcgatgcacattctcgggttgcaacaaaggagctgaaggcagcactctcttttgcaagggccacggtggaggcaagcgatgcttatttcagggtggtggtgtgtgcccgaagagcgtgcatggcggaactcaatactgtgttgctcatggtggtgggaagaggtgtgctatttctggttgcaccaagagtgctagagggcgtacagagtactgcgtgcgccatggaggtggcaagaggtgcaagtttgagggctgcgcgaagagtgcgcaggggagcaccgatttctgcaaggctcatggtggaggtaagcgctgctcatggggccaggttgacttgaacttcggtgtcggcgcaccacagtgtgataagtttgctcggagcaagactggtctctgttcagctcactgtgctttagtccaggaccattgtgtccgtggtggtacattaggcgctgcaaccttccagttcgcaactgatgccaaattcgacgagatggaagtcaccccagtgaagggagatcctcacgcgcaggcaagcagcgacgaccagtctcatctcggtggtgctcatcctcctgctgtaccggcgatcacctcggatcgattttctgaaggaagagtgcatggtggtgggctactggccttactttcacggggtggaaaccatgcgaatgcaggtaactcaaagaatggcgcccttctaccatgatgacatgggagtgagattctcttcaagaaattggtggctcgcagttttgatctgtttccaagagtttgtgctgtgacggacgggaaaaactagtgttttcacatttcaccacatgttcttgtgatgcttggatttgttgttatggccctctcccgtgtgctatatataaataaggagctcgtagagcgtggagtaccgggctttctgtcttccgtgctattgtagttgatgtcgttgaactgcccttctgtcagaattcatgtaatcttggtacttcgtgtttatttgtattgtc

SEQ ID NO: 27940 - DNA, 2631 bp, Oryza sativa
  ref <308>: DATABASE ACCESSION NUMBER: AK103382
  ref <309>: DATABASE ENTRY DATE: 2002-08-28
gagtgcctgagacaggcctgcgcagcggaggcgcgttgtctcgccgctcagtccgccgaccccgcgtggcttcagggggccaacgccgccaagaagtccctccgtcgacccacccgtgccgttctcttcgccgtcatgctcaccccctcggtcgccggttgaatgcgcggagcgtggctgcgcctctctgtcgccggcgcgcgcaaaccccccttcggagttcgagcatgttccacctggcgacccggagctccgggtaaacagggagatctgtgtgctgccgttctcggccgcgatgagggagcgggaggcgcagctccggcgggcggtggtggcggtggtggttggggcggctcgtacgccgtccgcggcccaggtgcacgacgagctatgctcggagttctctctgtctcctcacagcttctcggtacgccgtttcttcccggaggatttcctcgtcaccttccagtccgacgaaatcttcgaccgtgttgcgcgccgccgctccatccctctcggtcagttccgtctcttggtcgcgccttggtcgaggcagctgcatgcgagggaggggtcgatgcttttccgggtgcggctgcacctggaagggatccccggtcacgcctgggatgaggcgacggcggctgcggtgctcggttcttcctgccgtatcatctcctgtgatccggtcagttcctcagccagtgacatggcggtcttcaagctctacgcttggacctccgaccctgcctccatcccgaaggagaaatggctgcgcattgtcgaggatggtggcccggttgtcacgccgcagggcacctgtgagcgctacctcgactacgtcgttctcatccacctcaccgccatggaggatcacatctcgccgccggagccgtacctccctttcgcgccgtccagcggtgattctggtcgccctagctcggacgactcggacgacggccctcctcgacggcacttcttccacacctccagaggtcgacgagatggttccccccctccgccgcagtccggtcagggctcgacaggcggcggtggaggcggtgggcacagggccgctccggtggcggtgatgccggcggagctctgttccggccgccttcttcggcgggctggggcgctggcgccggagaagcctgtccgggctgtggccggcgcggaggcggccatggcgcggcggaggaggcctcgtggtcggcgacgtcagcaaaaggtgctaaagtggaaaagcaagttcttaaagcttagccctgttcgcagctgttgcaggtggcagccacgaaaaggacaagacacttctgagccggtctcggtcgcaaaggcaaaggagagttctgctctgcaatctctgtctcttggctctgtggtggggcaggaggacagggagtttgtcttgcctgtgagcgcggcgtctgaggctgattcggcagtctcttcgaggagagacatggtctgtcagtccccactaccccctgacgcctcgtgggagtgctgttggcgtacagactggcgtacggactgcccagttccggaggcgcacgatccgatgctcgaggaagcttctcgacgacccaggttgggctggccgcctctccagttgggttggaggcccaacaaggcggtttggtgctatcgactgtcgctgggccggctgttgagtcagctgggtctcggcctgaggtgcagtcacagcccagcccgctagcaatggaggaggcccaccatgacgcttctaccttccttcaagggtctgtttcagcccatgcagacccgttcctctcggtcgttctggcagcaaagccaagcatggcaatggcagcgccgggtgagtcagcgcttccgccgcctgactccgtgccagacgcgacacttggagtggaggctgtctctgctcctttggtgtgcccagaacagcatttggcggcgtcctcgacgccgttatcacaagttttctctccggtctcggctttgccgactgcctccgcggtggtcgtggtagctgagatcggggggccgtttcccgatgaggtcgttccggtagatgagatggccgcatctccgcctgctccatctactgcggtgttcgcagcggctgtggaggaggcttcagctccgccgccgacgcttatcaccttctccaggagagccaagaaagcaatccccccggcactgcttcccccaccagcccctcagcagccgccgcaaccagcgccgctgcagacgccgcgtcgcagtgtgcgtcaagcgcttcaagcgacacatggcgccccaactttctcccgctgccagtcagtgttagctaagaagatgggggagaaggatactgctgtcccagctgcgcctgcaccgactgtgtgtactatccagcagtacaacgagctgttcgagaaggagctgtctcaggatcagatgttggcgctggccgacctctttggcatttgtctaccgcctcctgccagcgcggtggtcatctcgccattgaaggcggcctgagccacagtctcgctgttttttggtcgcccccttttcttttttatgtcgaactgcaattttaatttccttgtctggaatgttcgggggctaaatgataggggtcgcagggattctgtgcgt

SEQ ID NO: 27941 - DNA, 1855 bp, Oryza sativa
  ref <308>: DATABASE ACCESSION NUMBER: AK103383
  ref <309>: DATABASE ENTRY DATE: 2002-08-28
gtctctccccccttcccgcttccctcgtcaaccgaatcaacgcctccgcctcccatccctcgccgccgacgagctctcccctctcctccccccctccccacctcgccgtcgcggatcgccccgggccggccctgaccgctcgatcgcccgccgcgcgccgcccacccccaccccccgggatggttcacagggcggcgtctcctgctcccgcggcggcggcggtggcggaggaggaggcgtgagccgagggggaactggagctcgagcgagatggatgccgccacgcgccccgccgtcgtcatcgacaacggcacagggtatagcaaacttggattctctggtaactctgagccatgtttcaccatccctactgtagtagctgtgaatgagtcttttctggaccagtcagagatgtgcagtagtgcaaattggatagcacagtacaatgcaggtgtcatggctgacctggatttttttattggtgatgaggctctatcactatttaaatctagtgggctgtacactagaaaacacccaattaatcatggtcaggttgatgactgggatacaatggaaagattttggcaacagtgcattttcaactatctacggtgcaatcctgaagagcactacttccttcttaccgatagtcctgtcagtacacctgaaagtcgtgaatgtgcaggggaaattatgtttgagactttcaatgttcctggactatatatttctgttcaatctgtcctcagtctttctgctggatatgcctttctgaaaagtatttctgatgaggactcggtttctgtggtgtagtagttgatattggggatggagctccacatgtggtgccggttgtaaacggctacgtaattgggagtagcatcaagtcttttccattttcaggaagtgacgttacacagtttgttttgcagcttttacaggaaagaggtgaacttattgcacctgaggattctttggatatagctcgtagggtgaaagaaatgtattgctacacttcttcagacattgtcaaggagttcaagaagcatgacaaaaagcctgataagtatatcaaacactggtctgctattaagcccaagactggagtcccatacacaattgatattggatatgagcgttttcttggaccagagatcttcttccatcccgagatttactctgccgacttctccactcctctacctgaactaattgatagctgtgttcaatctgcgccaattgacacaaggagagatctgtataagaatatagtattgtctggtggatctacaatgtttaaggacttccacaagagacttcagaatgacataaagaagatagtagatgagcgtgttgccgcaactaatgcccgtcaccatgtggaggtgaaacctgttgaagtcaatgtggtcgcccatcctatacagagttatgcagcttggttcgggggttcagtagctgcttctaaccctgaattttatgagagttgccacacaaaggaagaatacgaggagcatggagcaagcatctgccggaccagcaccgttttcaaagggatgtactgaattttttccacctgtccaaatctctcagtaggagttcgtttaggtttcaccagatagaaatatgtagtcaaaattgattctttttggcccatccaaagcatcgccggggccatcctgattagattggtagctcaggttgttgttagctctctctgtgttcatgctgtgtatagccagcagctgctgttcctctgtttctgttcgaggtgcatgtttgtagccaaaaccttgggcagcgaggccttttcccactttctacatactcctatttcacaacattttttttctac

SEQ ID NO: 27942 - DNA, 2653 bp, Oryza sativa
  ref <308>: DATABASE ACCESSION NUMBER: AK103384
  ref <309>: DATABASE ENTRY DATE: 2002-08-28
gagcgtcgcatcgcacgcgcaagcgcagcacgagcacagtgaggaggagcttagcttagcctagctagcttagctctaccaaaagctctctgtagcttgcttgctgcccagtattgggaggggccgaagggcaatggtgggaggcagccgtctgttcctcctcctcctcctacctttgctgctgctgctgctgggcgccggctgcagagatggccgccggtgcgccgccgcggccgcgcagactcagaggctgccgcagcaagaagttgaagcacttaagggaatagcacgcaagcttaacaagatggattgggacttcagtgtggatccatgcactgggtctaaaacttgggttaatgccagtgattccaatagttacccaaaatctagttatcctaattttccagtcagcaatctgacatgtgattgttcattcaagaacaacacagagtgtcatgttatcagcttggaacttatgcgtcagaatcttagtggagttctacctgaagaagttgtcaacctcacttatttgacaaatcttgacttatcacgcaatttcatccaaggaccaattccagcatcatgggctagcctacctgtttttaatctgtctctccagggaaatcgcatatctggaacagtacctaaggagcttggacgcatgcccttcttgaaatctataaatctagaaggcaatcagcttgagggtcatattccaccagaattcggtaacatcatcagtttggagagatttttcatttctgcaaatgacatcacaggagagttgccttcaaccttttccaggctcacaaatatgacagatttccgaattgacgggaccaatatctcaggaagaatacccagtttcataaaaaattggcaacgggtcaacagaatagacatgcagggtaccttgatgagtgggcctattcctccagaaatttctttgttgaacaacttaacagaactgagagtgactgatttgagtggaccgagcatgaaatttcctcccttacaaaatgcacagcaccttacaaaagtggtcctaagaaactgctccatatatggtgaaataccaccttaccttggacagatgcagtatctaatactcatggatctaagcttcaacaagttgactggtcaaattccacaaaattttgacagaatggtggcactacaactacaatatttgtacttaagtgacaacatgctgactggagatttgcctggttggatgttgaaaaacaaggcaagcaacaaagtaaacatggatgtgtcgtttaataacttcacgggtaaccctccaaatgaatgtcaacaagcaaacgtaaatatggtttcaagtttttcatcctcaaatgacaatcttttgcaaccatgtttacgaaagaatcttccctgcatggacaaaccacgctattcctccctatttattaactgtggtggcaaaagtgttgaggtcaatgggaatatttatgaggatgactcatctcgaataggaacatcaacttttgttttatcaaatgacagaaaatgggcctatagtagtacaggagattttgtgggtaatccagatgctgattacattgctagaaacacatcagaactcacactggatcaccctgagttatacactgaagctcgcctctcacccctctcactgaaatactatggagtctgcatggaaaatggtgaatattctgtagaacttcattttgctgagattgtgtttacagaagatcatactttttccagcaatggcaagcgcatttttgatgtttttatccagggtactaaagttttgaaggattttaacattcaagatgaggctggtggtgtccatcgtgtaattacaaaaactttcacaaccaacatcacagataatacattggaaattcacttctactgggcaggcaaaggtaccacaggtgttcctgaccggggtgtgtatggtccattgatctcagctatatctgtgatacaattaaacaggaaccatcatggaatctctactggattgatgattactataatagtagcagcatgtttgattgtcatacttgcgctaattctttgctatatcaaattcttccggaaaaagaatctgaaaggaaatggtttacaattcttttaccatggaaggaagaccgatacttcagatcttcagacacggacacagtacttctttagcttaaaagaaattgaatctgcaacgaaaaattttgatcctgcaaataaaattggtgagggtggctttggacctgtttacaaggacgtggagatcatcaattgaaactagactggccaaaacgatataatatctgccttggaacagcaaaaggcttgtgctatctccatgaagaatcaacattgaaaatcatccatagagatattaaaccatcaaatattcttcttgatgaaagactgcaaccgaaaatatctgattttggtttggctaaactgaatgatgaccgtgggcgtatgagcactcggatagctggaacagttggatacatggcacctgagtatgccacgagaggttgcttgacatgtaaagcagatgtatacagttttggagtggtgacattagagattgttagtggaatgagcaatacaagtagcatgtcagatgacgaatatctccatcttcttg

SEQ ID NO: 27943 - DNA, 2644 bp, Oryza sativa
  ref <308>: DATABASE ACCESSION NUMBER: AK103385
  ref <309>: DATABASE ENTRY DATE: 2002-08-28
gactgcaccacctccgccacgcgccgctcgcgctccgcctcgcgaggctccctcgcctcgcgccctcccctcctcctcccgccgcccgcctcctcctcctcctcgcgccgtcgcagcatccagctccgccctggcgcctcctctccaggccccgcgcgctcgccacggccgccgccgaggccgacgacgccggcgccgggggcaacggcgacggcgacggcttcttctcggaggagagcacgtcgtgggagtccctcggcgtatcggaccgcctcgcctccgcgctgcacggggcgggcctcgcgaggccttcgcttgttcaggcagcctgtataccacacgttctcacaacaaacgatgtaattgttgctgctgagactgggagtggcaaaacacatggttaccttgttccattgattgaaaaactgtgctctaaatcaatttccgcagaagatggtaattctcaggacgttacctcagggtcgcccaatatcgcgttggtcctctgtcccaatgtaatgctgtgtgagcaagttgttcgcatggctaattcgttggttgatgagtctggtgaaccacttaaaagtgctgctgcagtttgtggaccaaagggttggcccactgttcggcctgatattcttgtagccactccagctgctctgttaaattatctgtttgactatgacccagaaaagaggaggagggagagattcctacgtaatgtaaaattcatagtatttgatgaggcagacatgctactctgtggaagttttgaaaatcaggtcattcgtctcatccacatgctgcgatttgatgaaaagctactgtctaggatggaagattctggaaaggaaatatcacttggtgatactaatgaatatcgtgaggattcagactctcagagtgctgaacttagtgctgacgatgaggaaaatgaagatggtcttgttcaacatagaccagtcaatgtggagaatgctcatattggagcacacaagaaggattggagaagggtcaaaaagtttatagacgcagcaagcagtatgtctttgttgctgccacccttccgcaaagtggcaaaaagactgccggtggtgtgttgaagcgtatgtttcctaatgctgtatgggttagtggtgcatatcttcaccgccacaatcccagattggagcgaagatggatagaggtcactgctgatacacaagtatcagctcttctggatgcagtgaaatatggtctcaagaatgaagttcatgacacaaaacttggtccaaatcgaactatggtgttcacaaacactgtcgatgctgcaaattcagtttctgatatattgcagcgtgttggtgtcccatgcatcttataccatcgtgatagctcccttgaggaaagggctaagaatttacaatcttttcgggaaaatggtggtgtgcttgtttgcacagatgctgctgctcgtggccttgatgtaccaaatgtttctcatgtcattcaggtatgatctgacctgtaaaatatcatcctctgtcccatccttgaagagatatatacatccctactgctttagtgctaaagaaataaattgattaaactgattagaagataaatttatgattgacaatgacaaggttttccttattcttggaaggtacagggaggtatatgtacaatatagtaatatagtgttagttaggaggtatatatatacctcaaccctatagatatatacctcccaactaacatacatacttataccactcaaaaaacgaaaaaagaagggtcaataacatgtacaaaaacaagtttctaattccattccaaactttaacattagttttgataccttctttcatggaaaggtatatctcaaatataaggaggtatataactctcaaggatggaagaaaacctcgtctgatgttgttcttgtactacaattttattctcggtgacctgcaaattcctaaatatgctcctttcccactttattgtcaaagtgtgttcatatcatcctaggtatacatggaggatccttgctccgtagaaagtctatatcctgtcttttattagatttaccaactatccaatcacagttcttttttggtgttatctcattggatgtttccttctgttacctctaggcggagtttgctgcctgtgctgttgattttttgcatagggtgggtcgcacagccagagctggccaatctgggatagtgactagcctatacacagaggcaaatcgtgatcttgtgagagcggtccgtcaagcggaggagttggcccagccagtagtaagcttcatatagtcatcatcctttcactgataacatcttcctagaaacaatgaaacatgcttacagaaagctatctatatgtttgttcaggagaaagcattcagcagaaaaaggagcttccgcaacaagttgaagaagcaagcattacataaatctacagcattattatcttgatattgtgatattctctttttctatgaaggacaagttaatatatagtttattgagttcgacccattagtcttagttttctcccttctatttctggtggaaaatagtttgtatttttaggagataaatctgggtaaccacaaattgaacaagcaaagatgttatggaaattttgaccc

SEQ ID NO: 27944 - DNA, 2140 bp, Oryza sativa
  ref <308>: DATABASE ACCESSION NUMBER: AK103386
  ref <309>: DATABASE ENTRY DATE: 2002-08-28
ggccccgcgccgccctcggccttctccctctgccgcgtcctccaccgccgaggcgccgcctcctagccgccgtcgctgttacccgcgccaccctcgaccgccgacgcgggaggaggacgtcacgccgcgccatcaccgccgaggcgccgcctcctcgccgccgtcgctgcgaccactcgcttgccctctaatcgtgacaacagccaaagaggaatatacgcccaccgcctgcgccgattcctcgccgtcgttctcctccggcctctcagccaccaccaccaggaaggagacgccgccgcctttgctgattcctgctgccatatcaagcgaagcctcatcgccgtccggtcagggacgccgcctcgttgtggccaacctacccttgactggaagcgtcgccgccggttcaagctcaggttacataggccggctccaaccaggtacaatacacatgctccaaagaaacaaacgtctttgatcttgtgcaattgattcacacatgtatatttacaataaaaaaatagtattttgtagtatttatcagtgacatgcatatttagacacatttatatttggagtacatgcacctgtgattggtggcgtgcatctgtgataagtttgcttggttcagatccaatgtgttctttaccatggtcaattatgctagaaggctttgatctgtcagtaaccggtttcatggccgtcgttccacacgtcaaatactaaagtataggtgaaacttaactgcaggagatcaggccaacaaaactgaaaataatctatgcatcttatcttatgaaaatagtttatgtccacttccctgtatcccatgtttacagttttacagtaatcaggaaagatctggaagcacatagtctccaactctccatccttcaccatccggggcgtgggacgcggatctagggttgttctgtttttttgttgcggaggatggccgtggctcacggttttttttgttttgttttttttgttgcggtggtggagtgtgcgctttttttttcgctccgaacttgtcggtgtacgtttttacgttggatcccgtgtctgctctggcttcaccatcaccactatgtgttttttaagtagtatagatagattagtaatccgaacacagcctccgagtcaccccaaggactctctctctctctttctctctctccctgacttgggtggcccactccagaccagagtcgagtcaggctggccatggccatggccatggatgccttcggctccgtgttcggcgaggccaagccgccggtgacgatacggatgcgacccgtcctcttccacgcccacgcccacgcccatactgatgatgtctcccaactctgcctcctcgccaccgacctccactcccacgcctgggaccgctccctcttcctctccgacatcgacgatctcagagacgacgtcgggatcggcggctcctgctccgacttcctggattacctcaaatcttgcctctcctctggggaagtcaacctcctctttcctcacaatgggcttgatcgcgttcatcttgttgctacaaaggcaaagggtctacctcgcatcaccatttccctcaacacccttactcactccgcgctgaatgatgtcattgccaatttctcactatcactctatgccgcttttaggactacgcaggaccatgcatccagagaacaagagcgagcgtcaaagctgatggagactctatcatctgaaaaggaaaagaatgaaataatgcaaaagcaactcgaagctctttcttttctagacaaaagaaaggcaacaaagccaaagctggtggccaatcaggttccaagtgtgtctgatgtgactcagggctctgatcaggttattgttccagcacagcagcaaacaccagtagtttcacctatcaaagttcctccagctaaagccacgaagaggatagcctctgtatctcggagggcgagagtgcgaggagctttgttgcaagatactgaggaagatgtcgaagaatagtcagatattgccttttctctgtattgattagttacaaacttctaaagcgtgagtgtgtggtttgttagttttggggccatttttacttgtatcaaatctatgaaatcaagctaatgcatttattgac

SEQ ID NO: 27945 - DNA, 1158 bp, Oryza sativa
  ref <308>: DATABASE ACCESSION NUMBER: AK103387
  ref <309>: DATABASE ENTRY DATE: 2002-08-28
gacctctcctcgcccaagccttcgtcgacagaaagaaaaaaaaatccaaacctcagagaaaccctaggccgggtcgcggcgagtcggcggcgatggccgggtaccggagccggagccggagctacagcccgcagccgcgccggaggtacagccggagccccccgcggtacaagcggtacgatgacccgcgcgaccgctatcctcgcggcggaggtggaggtggaggtggaggcgaagggccccgccgcgggtatggccggccgcctgcgccgaccgggctcctcgtccgcaacatctcgctcaccgcaaggcctgaagatattcgtattccgtttgagcaatttggccctgtaaaggatgtctaccttccaagaaatttccatacaagggaattacgtggctttgggtttgtaaaattccgctatccagaagatgctgcagtggccaagcaagaattgaatcatcaagttattggtggacgagagatttcaatagtttttgccgaggagaacagaaaaaccccacaagaaatgcggatgaggacaagaacaagtggaagatacatggatggtagccacagaaggcggtcagtatcaagatctccaaggtctcgttaccattcttattcaccttcaccctctccagctagacgtgactacagggatcaccgtgatgattattcacctggggaatcactctctccacatggtcaggacaagcggcaccacagatcaaatggtcgatctgctagcccagatgagctcgagcgtcatgtatctccatccaataatggacatggtcctccagttgatgggaaaagctgataaagatctcgctccaaggcgaggcaagcgtttgaagtttggagttcttggatcaagagttggaagttggaactagggagcatgcaaattacaccaccatgaaatgtaccgtggtagtgccttttatgctattttgtagaatagataagcaaagcctggtagcgaagtaagtttgtacactccatatgcagtttgcctatcgatacttaggttagcgcctgctgcttttgcttttgttgatctgttttaaatgattttctatctgatctttcttagtttgtttgctgccatgccgacatgcatcttgtgcccacttatctatttgattatgttc

SEQ ID NO: 27946 - DNA, 1883 bp, Oryza sativa
  ref <308>: DATABASE ACCESSION NUMBER: AK103388
  ref <309>: DATABASE ENTRY DATE: 2002-08-28
ggtatcgcatcctccgccgccgccgccgccatcaccctcctctccgccgcattagcagtagaatcctaagccataatggcaacctccgccgccgccgccgcgagcaccttgccttacctcgtcgccgccgcctcctcctccgcggcggcgcgccgccgcggggcccaccggatccgggcgtcgtcggcggcggcggaggtggagggggcgatggacgtggtgtcggaggcggagctgcgggagaaggggttcatggggctccggaagacgaagctggtgtgcacggtggggcccgcgtgcgtgggggctttgccggcgctggcgcgcggcgggatgggcgtggcgcgggtcaacctgtgccacgggggccgcggctggcaccgcgccgtgatgcgcgaggtgcggaggctcaacgaggaggaaggcttctgcgtctccctcatggtcgacaccgaggggtcccagctcctcgtcgccgaccacggcggcgccgcctccgtcaaggccgaggatggctctgaatggctatttacaagtaaaagaaccgatgaatctcatccattcacaatgcatgttaactttgataagttttctgaagacattctagttggtgatgagcttgtaattgatggaggaatggcaacgtttgaagttattgagaaggtcggaaatgatttgcgctgtaagtgcacagacccaggtttgcttcttcctcgagccaaactgtcattctggaggaatggaaaattagttgaaaggaactttgggcttcctacattgtcagcaaaggattgggctgacattgaatttgggatagctgaaggagttgattgcatcgctctttcatttgtaaaagatgctaatgacatcaagtatctcaagacttacctctccagaaaatcattagaacacatcaaaatattcgcgaaggttgagagtcttgaatcactcaagaaccttaaagacatcatagaggcatctgatggagttatggtggcacgtggtgatcttggagttcagattcctttagaacaaatcccagccatccaagaggcaattgttgatctttgtcgacggttgaacaagccagtgatagttgcctctcagcttcttgaatcaatggttgagtatccaacaccaactcgtgcagaggtagcagacgtttctgaagcagtacggcaatatgctgatgccgtaatgttatcggcagagtcagctataggtgcatatccccagaaagctctagcagtcctccgtgctgctagtgagaggatggaatcatggagccgtgaggaaaacatgcagaaacttcttccacaacatcagcttgcaatagctttgcctgataggatctcagagcaaatttgcaccagtgctgcagaaatggcaaacaaccttgcggtggatgccatctttgtttacacaaagtatggtcacatggcgtcgcttctttcgcgcaaccggcccaaccctcccatttttgctttcactgataatgccaactcaagaaagagcatgaacctctactggggagtaattccacttcagctaccactgtcaaataacatggaagataacttcaatcaaaccatcaagcttatgaagtcgaagggttcagtgaaatctggagacacagtcttggtcgtcgccgactctgatctgaaccgaccccgtgctgctacctcagttttccaatccattcaagttcgaatagtggactaggttagtcattgctgagctagttgctagcagctgcagatctggatggatatttacaaattatacgatgattcttgaaattattctgatgcgaacttcttgtggtatttggattaggggtcttcatctgcaataagtatcgaatgaaagtgttgcttgtgcgc

SEQ ID NO: 27947 - DNA, 994 bp, Oryza sativa
  ref <308>: DATABASE ACCESSION NUMBER: AK103389
  ref <309>: DATABASE ENTRY DATE: 2002-08-28
gggtcagcactgacgagtcgagcactacatctctcgtccaacgccaaactctctctctctctctctctctctctctgcagatagataggtagatccgatcgcggcgaggaagatcgatgagtcggatacacccttcgtatcaacgccaagatgccgccgccgccgccgcctcaacggcagcgccgcgagcggcggtgtacacggtgtggaagaggtccagcatggggttccagggcaccgacggcttctccgtctacgacgacgccggcagcctcgccttccgtgttgacaactactcgcgccgccgcaagctcttctccggcgacctgctgctcatggatggacatggctcgcctctcctcgccctcaccccacagattatcagcatgcatgaccaatggaattgttacagagcgtcagaagaaggccaaggcaagagggcaagatcacaacaactcttctcaatgagaaaatgctcagttatgcaaagcagtcatgaagcagaagtgcacatgtcaggatgtacccatgcgtcgtcagatcgtactggccatgttcccgccttctcaatcgagggcagtttcaagagaagaagctgcaagatccgcaacagcggcggtgaggaggtcgcaaggataacgaggaagaaagctggagcagcatcattgtcactgactcttgctgaagatgttttcagtcttgaggtccaaccgaatgtagattgtgcgatgatcatggctttcgtcattgttctggatcggatctgctggaagccatacacacctatgatctgttcttcatagttcaaggtgatgagctctatttgacatgtaggaaatagatgtttcaattcaagtgaaatcgacgaattaactcaagaagctagtatgagactgtagtcactaattgtactgtcgattgactgggactaacataacatgtaacttgttctaaatttgactacttatgaaaggaagatcgaattagcagattg

SEQ ID NO: 27948 - DNA, 1892 bp, Oryza sativa
  ref <308>: DATABASE ACCESSION NUMBER: AK103390
  ref <309>: DATABASE ENTRY DATE: 2002-08-28
ggtctttcctcttccccttcctcctcctcctcctcctcctccacgcttccgcaaatttccgatctcctcctcctcctcatccagctcgctcgctcgctcgcggcggagaatccagcccgagcaggctggcttgtgcttgagctagaatctccggccccgtcgcaggctccgtatcaaccaagatataagctccacacggtttattgaacatttgtgccagactattggggtgaacattcagtcaagtcttcaaagtgtttattccaaaacaagtgcaatgagttgtcatacaaggggcttgttgaaggaatacaacatatatttataggcgatcacctatatttttctgactcatgggcgactgggttataggagcactgatcaacattgtggggagtgttgccataaactttggtaccaaccttctgaaattgggccatgatcagagagagaagctttcgacaaccaacaacaatcaaggcaatgacaaatttgttcagaagtcagttatgcattttcaaacttggagaataggcatactgttctttgctgcgggaaactgcctcaacttcatgtccttcgcatatgccgcacagtcacttcttgcagctcttggatcgattcaatttgtgtccaatattgcatttgcttactttgtgttgaacaagaccatttcagtgaaagtcatggtagcaacaacatttattgtatttggcaatatcttcctagtttcctttggtaatcatcaatctccagtttacaccccggagcagctagttgcgaaatacagcaatttagtgtttgttctctattgcatgtcactggtctttgtggttgcattcaatcagtatctctacaggagtggagaaactatcatttcggatagtgcgaaacatactggctcacattggcggacattgttgccattttcttatgctattgtatctggtgctattggatcttgttctgtcttatttgcaaaatcattgtcaaacatgctgaggctaacaatgagcagcagataccagttccatagctggttcacatactcaatgcttctgttgttcctctttacagctggcttttggatggcgagattgaatgaaggcctgtctctttttgatgcaatactgattgttccaatgtttcagattgcttggacctttttttctatttgcacaggatttgtgtactttcaagaatatcaagtatttgataccctgaggatagtgatgtttgtattgggcatgacatctgtctttataggcatctccttactggcacccgacgacagtaaagatggttctagtgccacccaggaacctgcaattgatgcaaacaggcctggaaagatgcagacggaggagacagaagttgatggtactaactccttcacaagttcagtaaaagtaaaagcaaaacgcatactgtccaaggcaaagtcggcttgctccatgtcacttggccttggggaggagaccatcagcgcttcatcggtgcttgcgatgccgatggtctcctcacgaacaacagggttcagaggaatcgcaaccgaccgatcaaagtacattcctttgcggtcgaccgattgggacaatctatagttgacgatgatttgaattacaggtatacaagccaaatgtcttacttggatgttgccaagcggatgccagtaaatttttgttgcttccggaaggcaactgtttattccacccctatagcttagctgtaacatgagtgtatagttcgataaaacttcccttgaaacactgtccatacccaggttgttgtatttcttcgaaacaggtgcctacaatacttgtataaacacgccacacatgttagaacaaacttcaatgattcaattcactcttcccattggtgtcccaagc

SEQ ID NO: 27949 - DNA, 1769 bp, Oryza sativa
  ref <308>: DATABASE ACCESSION NUMBER: AK103391
  ref <309>: DATABASE ENTRY DATE: 2002-08-28
gagcactccatcttcctccatctgcgtattttccaacacatctctcttgcagttcgtttcaagtctttcattaagtaaaactttctgaacatttgaagtgcaacggagctggcgttttatggcttttcctatgaggcaatccacatctctgatatagatgtgtactcgttctgaacatgacaagttctcaggtatttctctgttgatgaactgcctccacacctgcagtgacaagaagacactgaagaagtggtttttcatcgacaagacagttggctaaattcagcagtgcactcgtcgttaaagcgatcgatcatacttctttcttgatctcatcatcctaaattttcccaaatggatttgagcaatagctcacctgtcatcaccgatccggtggcgatcagccagcagttgttgggcggcctgccttcaaatctgatgcagttttcagtcatgcccggtggctactccagctctggcatgaacgttggtgtcagtaggctcaaaatcgaggaagtccttgtcaatggactgcttgatgccatgaaatcctcgtcacctcgcaggaggctgaatgtagcatttggcgaggacaattcatctgaagaagaagaccctgcttacagcgcttggatggcaaaatgtccttctgctttggcttccttcaagcaaattgtagccagtgcacaagggaagaagattgctgtgtttctagactatgacggcacactgtcgcctattgtggatgatcctgacaaagcagtgatgtctcccgtgatgagagctgctgtgagaaatgttgcgaagtacttccccactgcaattgtcagcggaaggtcccgcaataaggtgtttgaatttgtaaaactgaaggagctttattatgctggaagccatggtatggacataatggcaccttcagcaaatcatgagcacagtgctgaaaagagcaaacaggccaatctcttccaacctgcacacgactttctgccaatgatcgatgaggttaccaagtccctcttgcaagttgtcagtggaattgaaggtgcaactgttgagaacaacaaattctgcgtttctgtacattatcgcaacgttgcagagaaggattggaaactggtcgcacggctcgtaaacgaagtgctggaggcttttcctcgtctcaaagtaaccaatggacgaatggttttagaggttcgtccggtgatcgactgggacaagggaaaggctgtggagtttctgctccagtcactcgggctaaatgactctgaaaatgtgatccccatctacattggagacgacagaactgacgaagacgctttcaaggtacttcgacagcgaaattgcggttatggaatactagtttcacaggttcccaaggaaactgaagccttctactcgctgagagatccatctgaagtgatggagttcctcaatttcttggtgagatggaagaagcactcagtgtgaaaaaaagaagacagtctgagcaggttttactaatactactccggcagaaataactgtagtttccgaggcgacaattttgaagcattggacgctgtagatagatgtaataactctctagatatgtggttccaattcattcttattgatcgatgttattgtattgttcatgttctccaccgctgagaaaaattaatcagtgatggttgatccggtctcttgccattgtaagttgtaagcaagaaggccctcttcttagtatccatgctgatgaacgaaattaaaaccttcatttttcgtgt

SEQ ID NO: 27950 - DNA, 1487 bp, Oryza sativa
  ref <308>: DATABASE ACCESSION NUMBER: AK103392
  ref <309>: DATABASE ENTRY DATE: 2002-08-28
gagtcgccgctgtcttgcggcctcctccggtccaagccccctgatcccctgacctcaaagatggcggcggcgctgtccaagctcctccgccgtcggctgcgcggcggcgggcaccgcctgctcccgtcccgtccctccacctccgccgcctcccagccacctccgccgcctccttccgccgccacaccgccaccaccaggggcagggaaggaggcgggcgcgtggtccaagctcttcctcttcgcccccggcgccatcaccttcggcctcggctcatggcagctcttccggaggcaggagaagattgagatgctggactacaggacgcggaggctggagatggagcccattgcgtggaaccagatggccccgtctgatctcagtgccggggtcgatccggccacaccggagttccggaggatcgtgtgcgagggtgatttcgacgaggagaggtcggtgttcgtcgggcctcgctccaggagcatctctggtgtgacggagaatgggtattatgtggtcactccattgataccccggcctagtgagcatggcagttcgtggccacctatacttgtgaatagagggtgggttcctcgtgattggcgtgataagaacgtacaggatcaccagggcgtcagagaagttccagaatataaagaggctgataaaaagacagatggaaaaggttcatggtggaagttttggtctaactctaaggagcctgaacaatcttgtgagattgaaaaacctgtaaaacctcctgtaagagttttgggagttatccgaggaagtgagaagcccagcatatttgttccagctaatgaacccagtgttggccagtggttttatgtggatgttcccatgattgctcgtgcatgtggcctccctgaaaatactatttatatagaagatataaatgaggatgtctctccaacaaatccttatcctgttccaaaagatgtcagtactttgattcatcactcagtgatgccacatgaccatctaaaatacaccgttacatggtacactctttctgctgctgtgactttcatggctgcaaagcggataaaggcaaagaaggttaagttatagcggaacataaacctgtctcctgcatcttgtacttatttatgaagctcaagttcccgctgcttcagaaagagatgttcgataacctgagtactgcatcttcatctctcaggcaatgatcaaagtagtcttgccacatttgatatgatgtgcatccatatgggcatctcgtagttgaactcagaggatagaaaagttttgttagcagcttctgatatccttgattcttttgttacggaacttacattgaggaaacaacgtagacattgttatttgtttctattctttgtagtttttttgttcaatgagctagtcgtccacgaggttgatggtgcttgcagaagcaattttacagtacttgctgattttatctgaaaaataaaaacatcgaatctgtt

SEQ ID NO: 27951 - DNA, 3102 bp, Oryza sativa
  ref <308>: DATABASE ACCESSION NUMBER: AK103393
  ref <309>: DATABASE ENTRY DATE: 2002-08-28
ggcgataacgcgaactcgcgaaggaagacgagagagagagagagagagagagagagagagagaggagagaggcagtcgccgccgtccgccccttcagctcgccgctgattttggtcgctggggaaggagaggagtgatctgatgggattcactcgcgggggccgtgtagaagtcgacttgattcggaggggatcgggagatcagagtcatggtcggaggcagcgattggcgaaggagggaggatccaggcaccgattttgagcggaatcgtctgttcgctgcgctgcaatagatctcatcaggaatgaaaatgttgccattgttattggtcctcagagcactttacaagcagaatttgtgacctacctagcgaacaagaccaaggttcctgtcatcactttctctgcaaccggtgatgcagtcactcggtaccatgtcccgtacttcattcgtgcttgttccaaggactcctatcaggtggcctccattgctgcattcgtcaaagcctatgaatggagaaatgttgttcttgtctatgaagacaacaattatggtgttggcatcctcccttccattaccgatgctcttcaaggtgtcggggttaatgtcattaaccgttctgccttccctgcttattcccccaataaccatatagatgtggaactatacaagctcatgaccatgcagacgcgtgtcttcattgtccacatgttgccagcccgtgcttcccgcctctttgcaagggcaaaagcactcggtatgatgactaaagggtatgtctggattgtcacagatagcattggtattgtccttgatgtgcttccccaacattccattgaaagcatggagggaattgttggtttccggccatatattgcagaatctacaaggatcactgatttcagctctcgatttaccaccttattcagaactaagtaccatccaaatactgatattaggatggcaaaacccactatctttcaattatgggcttatgatgtggcatgggcagtcgcaacagcaactgagaaggttcataggaccagatctttgaacccaacttttcatcctccgggaaacataggcaagaacttagtagatgatctcccagcattgcctgctggtccagaactcctcaattccattttgcaaggagagtttgatggattggctggacaattcaggcttatcgatagacatctgcaggttcccacatatgagattgtcaatgttattggagagaaaactagagttatcgggttttatagtcctgattctggactcacaatgtctgtgaactctagaattatccatggtgatgctaaatttagcacaagttcttctgatctggaaaatatcgtttggcctggagattcaacaacagtgcccaaaggctgggacttcccagtgaatgctaagatactccagattggtgtgccagtgagacgtgattttaaaacttttgtgaatgttgagactaatccgaacacgaatagatcaactgtcagtggctacagcattgatatgtttgaggcagctgtcaagaaattaccgtatgctctacgctacgagtacattccctatgattgtgctgtttcatatgacctgctagtatcccaggtcttttacaagaagtttgatgcagcagtcggtgatgtgacaattattgctaaccgaactagatatgtagatttcacaatgccatacacagagtctggtgtttcgatgcttgttctatctaagagtgacgatgaaccaaccacatggatcttcctacagccactagcaaaggacctatggattgccactatgatctttatcttcttcacaggcctagttgtatgggtgattgaaagacctataaatcgcgatttccaagggtcaaaatggaaacagtgcatcactgctttctactttgcattctccactttgactttttcacatggtcaaaagatccaaagcattcagtcaaaaattgttgtggtaatttggtgcttagttttgatgattctggtgcagagctatacagcaagtttgtcatcaatgctaacggcagagaggctccaaccttcagtgactgatctaaaacaacttttggccaatggtgattctgttggacaccaaagtggatcatttgtgcaatcaattctgaagaagcttaaatttgatgaccacaagataaaggtttatagcacgcaggaggaatatgcaaaagcattaaggatgggatcaaagcatggaggggtttcggctatcttcgatgagataccctatctaaattctttctgctcgaaatacgggagggagttccagatggttggccccattgacagaacaagtggatttggttttgttttacctaaaggctctccattggtaccagacctttcagaggccatcttgagcttaacggaagaacctgaagggttgaagattgaaaagacatggttcatggattcgtccttggattattatggcagtcacagcaaaggctcatcacgtatcagttttcagagcttccaaggtcttttcatcattgtcgggtgccttttaggtgctgtgctgttgataaactttagcaagtttctatatgacaaatgcaaagagatgagaggcttcggttcagaccgtgtccatagtggcgagagagttgtttgttacggtgaagctcaaccacaaccaccgcagattgtcatggtcgatcgacgatcctgtgcctgctgataccctccagattaggactgaaaacaaataaagagtgtgaacagttatctgcaccaactatcccaactcccaaggcactagaatggctctgaagctagaaaaaagttcacttgttttggcctgcttgttgcatggccttgcttaactgtgtaagcctcttctgttggttttaattagtcaattgaaagctattctaaaactctagatttgcaataattgtaatgataattgtaatgtagcacaaacatgctgaacgatgttcagttgatgtttttcttttcttgggacaaaactcaattgtaagctattctaaaagaactctagattgacaatgattgtaatatagcacaaacacgacgaacgaagtttttcttgggc

SEQ ID NO: 27952 - DNA, 2047 bp, Oryza sativa
  ref <308>: DATABASE ACCESSION NUMBER: AK103394
  ref <309>: DATABASE ENTRY DATE: 2002-08-28
ctctctctccccccgcaccaccgcctcccctcctctcctctcctctctcccgccgaccaggagaaagaaggaaaaagaagaagaaaaatcctctgcgatggcgaagaagaaggagagggcggtgaacgtgtcggggaagccgcgccactcgctcgacgtcaaccgcgccaatgacaagaagggcgcgggcggcggcgccgggcggcggcggcggcggccgctcggccgccacggtgcggcggctcaagatgtacaagatgaggcccctcagggaccgaggcgggaagatcctgaagcacgacctccagtccaaggagctccccaacacccgcatcgagcccgatcgccgctggttcggaaatacacgagtcgttaatcagaaagagcttgaattctttcgggaggaactccagagccggctttccaataactataatgtgatacctgaaagagcggaagcttccactgtcactactgcaggatcatcataagcaagctagggcgcatcttcttgacactgaaccttttgagcatgcatttggaccaaagggcaagaggaaacgcccaaaactaatggctcttgattacgaatctctattgaagaaagctgatgattctcaaggtgcatttgaggataagcatgctacagcgaagttgctgaaagaggaagaggaagatggcttacgagacctagtccggcacacaatgttcgagaagggacagagcaaaagaatttggggtgaactctataaagttattgactcttcagatgttgtcgtgcaggtgttggatgccagggatccaatgggtactagatgctaccatctggagaaacatctgaaggagaatgccaagcacaaacacttggtattcttactaaataagtgtgatctagtacctgcttgggccacaaaaggatggttgcgcactttatcaaaggactaccccaccctagcattccatgcaagcatcaacagttcatttggcaaaggatcacttctttcagtgttacggcagtttgcacgcctgaagagtgacaaacaagctatatctgttggttttgttggataccccaatgttgggaagtcatcagttatcaacacgttacgctccaagagtgtttgcaaagtggctccaattcctggagagacgaaggtgtggcagtacattactctgactaaaagaatatttctgattgactgccctggggttgtgtaccaaaacaatgattcagaaactgatattgttcttaagggcgtggtgcgtgtgacaaatttggcggatgcttctgagcacattggtgaagttctgagacgtgtaaaaaaggagcatcttaaaagagcttacaaaattgaagactgggttgatgataatgattttcttgtccaactgagcaagaccactggaaagctactcaggggtggggagcctgatcttacaacaacggccaagatggtgcttcatgactggcagaggggcaagattcccttttttgtgcctccaccacagcaaggtgaagatagtccatctgaaacagctgaacctgtggagaaatccgatgaggaaggggtgagcagtgacagaactgctgccgccatgaaagcgatagcgggaataatctcatcacagcagcagatgaatgttccttgccaaaaggaatttggtgtaactaatgaagatagtgaagtcgcggagcaatcagagtgatctacaaaaggctaggaaccctgcatgataaagaacagggcacaattttgccaaatacctagagattttatgaagatttggtgtctaacaggaatgttacgatgaatgttacgatcgttcagttcaccggtgcgttctactgcaacgaaagagcgttcactgcaacgaaagactggaatcaagggtgtgggactgggaaacttctgtaacttcatatattgtgtgggcctttgttgtagaccagatagagtgttttggtagcttaatataaccattttgttccaactgtacttgaaacaaatttattccgatacattaattccgcaaagtcgttcgtatt

SEQ ID NO: 27953 - DNA, 872 bp, Oryza sativa
  ref <308>: DATABASE ACCESSION NUMBER: AK103395
  ref <309>: DATABASE ENTRY DATE: 2002-08-28
gactgatctagctagctactagtacagtacacgcgtacgtacacctacaccttagctagctagcttagcttgtcgtagagactagagaggcaggatagaagctctcaagctcaagctctcatggagacgagctcgcggagcagcagcgggtgccagtcggggtggactctctacctcgaccactccaatggcggccaccggcagtattacgcgcgcaagaatcacgagctcgacgacgacgacgacgacgacgacatggtctccgacgcctcctccggcccgccgccgcgcatgcgcgacgaggacgacgacgaggtgtggcatcagcatcggcatcagcagcaacgccggcaacggaatcacctcgtcggctgccgcaccggccacgacgacgacgacgacggcgacgacgactccggtagcagcggcgtcggcggcggctacagcacttgtacggcccggtcgatgtcgtcgaagaggagggccatcgccggcgaacacagcgtcgtcgacgcggcggttgtagtcgtgctgcgccaccgcgagcacaactgcggcggcggcgacgacgatctcgacgacacggcgagctcgtcgtccgccgtgtcctccagcctgcagccaagctgtgctttctcggcgaggcacttgcagcaatggtcgtcgacggcggcggttcgaggcacgagcatatactgcaggccgccggcgccggctacgcaatgctacatcgcaactgactagaagaagcatagactagcctagatgacaagactttttttgtgtgtgtgtttgtgtttttctgtctatagaattttcagttgttagctctctagctgaatgcaagcagatggaggctctgtttagaatct

SEQ ID NO: 27954 - DNA, 1252 bp, Oryza sativa
  ref <308>: DATABASE ACCESSION NUMBER: AK103396
  ref <309>: DATABASE ENTRY DATE: 2002-08-28
gaccgtgcgctgcttcggtttgctcgggcggagaaaggaagggcagcgtcgcggttgcttgcttcctcccgaatcctcgcctcgatctcgctcgcgggcgggcggagggatcgtgatcgggatcgggatcgggggcgcgcgaagatgagcgtgatcgacatcctcacgcgggtggactccatctgcaagaagtacgacaagtacgacgtcgagaggctcaacggcgccaacgtcgccggcgaggaccccttcgcccgcctctacggctccatcgacgccgacatcaacgaatgcgtcgagaaagcggaggcggcgaagcaggagaagaaccgcgccacggtggtcgcgctcaacgcggagatccggcgaaccaaggccaagctcgtcgaggaggacctgcccaagctgcagcgcctcgcgctgaagaaggtcaaagggctcacaaaagaggaactcgcgacccgtagtgatctggttgctgccttacccgatagaatacaatcaataccagatggtagttcaagtgcaaagaaaaatgggacttggggcgcctcaggatcccgtactggtggagccattaagtttgacacttctgatggcaactttgatgatgagtactttaagggaacagaagaatcaaatcagtttcgtcgggaatatgagatgcgcaaaatgaaacaggatgaaggtttggatattatcggtgaagggctggaaactctgaaaaacatggcatctgatatgaatgaggaactggataggcaagttcccttgatggatgaaatggacgagaaggtggatagagccaacacagatttgaagaataccaacgtcagactaaaagagaccgttcttcagctgagatctagtcgcaacttctgcattgatatcgtcctgctctgtgttattcttggtattgcggcttatctttacaatgttctaaaaaaagtgagaccggactgtgccatggatctattttccacgtcttccggtgatggatggatgagtttcgacgtgtccacgagctgttccctttatttttatctcatctgtgtaatagtagtatggtgttcttccgggacttgcgaacatccttgttgaaagttgaaacagtgagcattgtgcgtgcgaaaacctgacgtcttctgtacatctgcgagtttaattcttagcaagagcgtatcaaacattctgttatgaactatgtaaaccttctcatgtatattcattgcatcagttctttggttgtgcc

SEQ ID NO: 27955 - DNA, 1521 bp, Oryza sativa
  ref <308>: DATABASE ACCESSION NUMBER: AK103397
  ref <309>: DATABASE ENTRY DATE: 2002-08-28
gatcgtctccccaatctttttggcgggagagcaccacagcgccgcctccacttcccgcgcaattcgcaagagaagagccatggacggcgggtcctccacggcggcgaggtcgtcggcggcggagatggaggagcaccagaactggaagaagaacgcgccggtgctctacgacctcgtcatctcccagccgctcgagtggccgtcgctcaccgtccagtggctcccctcccactcccggtcgccgggctccgcccgctcccaccgcctcgtcctcggcacccacacctccgacgagacgcccaaccacctcctactcgccgatgccgccctcccgctcccgccccgcctggcggcggcggccgcggcggcgggcggtgccgtcccggccccgtccgtgtccatctcccgctcggtgccgcacaagggcgaggtcaaccgcgcccgctgcatgccgcagaggccgtacacggtggctaccaagacctgcgtggatgaggtgcacgtgtaccatcttggcgacggcggcgagaagggcggcgccgatgtggtgctcagggggcatgaagcggaggggtatgggctggcgtggagtccgatgaaggaggggttgctgctgagcggctcgtatgataagaagatttgcctttgggatctcgctgctgggagtggagcttcgtctctggatgcacatcatgtgttcgaggctcatgacgatgttgttgaagatgttgcatggcacctgaaagatgaaaacctatttggatctgctggggatgactgcaagctgatgatgtgggacttgcgtactaataaaccaggacaatctatagtagcacaccaaaaagaagtaaactctttgtccttcaatccgtttaatgagtggatcttggcttcagcatctggagatgcaactattaagctatttgacttgcgaaaactgtcaagaagcctgcatgtattcgacagccatgactcctgtaggggagaggtttttcaggttgagtggaatcctaatttggagactgtgttagcatcctcagctgcagacaaaagggtgatgatatgggatgttagcaggatcggagacgagcaggcagaggaggatgcaaacgatggtccaccggagctgctgttcgtgcatggaggccacacagccaagatatcagagttgtcgtggaaccccacccagaaatgggtcatggccagcgtggccgaggataacatcctgcagatctgggagatggcagaaagcatatactgtgatgacaattatctccatgacaatgatgatgactcgtgcccagccacataaggacctggccaacttccctattctgtttctgttgcgtctttggatagcttggttggattgatcatatattcagttagtaacctctagtaggctttgagatgctgttgtttaatcagctttcgttttcgtttgacacctccaatccaaggatggaacatcttgatgtagaatgtccaactatttactactgtatgccttgccttgcctcc

SEQ ID NO: 27956 - DNA, 1676 bp, Oryza sativa
  ref <308>: DATABASE ACCESSION NUMBER: AK103398
  ref <309>: DATABASE ENTRY DATE: 2002-08-28
gtggcaggcagcgggtgataggaaccgcgacgccattggcgcttcttctgtcttggtggttgccgtgcctgcgcgcatcgatggaggggttctgcttcgcgcggtgccgcttcacgcggctggtggtggcgatgcagctggtgatgggcgtgctcgtcatctgcatcagcatggccagcctccaccgcttctacaccaccgacgccctcctccccggcgggctggacgaccccgcccgctgcgccaggttccacggcgccgtcgccggcgggtactccggcttcgacatccgcgcgctggcggaccgcgtcgacgaggtgctcgtccagctcgccgagctgcaggacaagctggaggccacggcgctcaagatcggcaagaagaccaagaagaggaaggggaaggggaagctgcagcagcaggagaacatgaccatgacggagttccagcgattcctggaggacgaggtgatccacccgctgtacggcgcgcacatcgtgctccggctgatccgcatcccccgccccgaccccgacggcggcgccccggccgtcgacccgctggtcaacttcttcgccgcggaggagacgcgcaagtacgtgacggcgaagcgcaaccgcgaggggcggccgggcgcgtacggcgcgaaccggacgtacggcagcatcgggcacgcgtgcgtggtgatgcggcgggagctggacgagtacatgagctacgacgtgggcgcgctctgccccgacgactgggacctcggccagcgcctgatgctcggcggctgcgaccccctcccccggcgtcgctgcctcgcccgcgcctccaagctgttccgccggccgctccccatcaacgagtcgctgtgggcgctccccgacgacggcaacgtccggtggagccgctaccactgccgcggctaccggtgcctgtcggcccgcaacccgcggcgcggctacgaccggtgcgtgggctgcttcgacatggacagggagaagcagcggtggatgcagggcagcaacggcaccaccctggccgacttccggatggaggaggtgctggcggtgaagcccggggagatacgggtggggctggacgtgacggtggggacggggagcttcgcggcgaggatgagggagcgaggggtgacggtggtgacgacggcggtgaacctgggggcgccgttcgcggagacggtggcgctgcgtgggctggtggcgctgtacgccgggctggggcagaggctgccgctgttcgacaacagcatggacatggtgcacacgggcggggtgctggatggttgggtggacctgcagatgctggacttcgtgctcttcgactgggaccgggtgctccgccccggtggcctcctctgggtggacaagttcgcctgcgcgcgcaaggacctcgacgactacatgtacatgttcctccagttccgctacaagaagcaccgctgggtcgtctccttcaagtccagggacgaggtctacctctccgccctgctcgagaagccgctacgctcatgatccaccagctcgtatctctcttagttacgctgcaatgctgcgtctgatatgtgttgctgttaatcttagtagctctgattcatctgacacctcgatgaataaatacaattatctatctattatattattaaagaaatagaaaaaggagtattc

SEQ ID NO: 27957 - DNA, 1238 bp, Oryza sativa
  ref <308>: DATABASE ACCESSION NUMBER: AK103399
  ref <309>: DATABASE ENTRY DATE: 2002-08-28
ggtcgtcattacacgcggactcgtcctccgccgccgccgccgccgcgcagacacctcctgccccgccgccgccggcgatctacaccgggggcgcgcttggagattttttctatggcggggagcagcgagagcgactactactcggaggaggaggaggagctgggatgggaggaggacggtctcggcagcgaaggcgaggaggaggacgcggaggcggcgagggagcgggcgctgaagcggctggacggcctcgggaagcgcggggtgtgctacctcagccgcgtccctcccaacatgaacccgtcccacgtccgccagatgctctccaagtatggcgaggtgcagaggatttaccttgtgcctgaaggccaaggtcatcgcaagcacactaatgttcgagcgaaggcgtacactgaagggtggattgaattttccaagaaaagcgttgccaagagggtggctaatctacttaacggtgaacaaataggtgggaagaagaggtctccattttattatgacatttggaacataaaatatctcaagaaattcaaatgggatgatcttgttggtgaaatagctgagaagactcatatcagggagcagaaactaaacttggagatagcagctgcaaagaaacaacgtgaccactacttgtccaatgtcgagaagtcccgtacgctgaaacatattcaggagcgtaggaaaaagaaacagaagacggaaggagctgaattcaatgaagtccgagaagaaaaaatcgctcgcacaattccgcaaaagaaacctgttgaggagacagacgccaaaactaaaccaaagcttccgaaagacattttagccggagtatttggtggtccatagtgagttcattcatgaatgcttcccaccccttaccttggactggagtatagcaaactgaatggagttgcgctgagataatcgtcttcttcatccgttcatcgtctgctttatttttgtagattaggtcatggtctttagtaacttggttcctacttcctaccttgagtatcttttcgtatttatgctgtgttagggaaggttttgggacctgacgatgaatgtatgattggggtattgtcagtgtcatattatgcacccctgttttctcagcgatcatggctgtaatactgaaacagagttacagaagtacactgctctagcttgaagcaacacactaatgtaccttgaaggctggtattagttgatcttggttttgt

SEQ ID NO: 27958 - DNA, 1242 bp, Oryza sativa
  ref <308>: DATABASE ACCESSION NUMBER: AK103400
  ref <309>: DATABASE ENTRY DATE: 2002-08-28
ggaggtggcagtagcagctggcatcctcctcctctgatctcctcctcggtcacttcagtgcttacttgccggtgatgaggaggtcttctcaggggaagagctccagcggcggcggcgttggcggcgtacggaggtatgacgtgcacggtggtggtaacttgctggcctgctacgcgaaggcggcgaggccgaggccgtccaagtgggacgacgcgcagaagtggctctcccgggcgggcgacgacgactgcggcggcgaagctacccggcggaggagctcctgcgccagcgccgacgacgggctgctgctgcctcctccgccggcggcgcggaagggggccggcggctggcgatcgtggagcaacgtggaatgggagggcgcgcccgcggcgatggcgccggcgctgaaggccgcgcgcggcgacgagggggtggacaccaaggtggtggacgccgtgcaggcgtacgtgccgcagcggtgcgtggtgtcgctgagggacgtcggcacggagatgacgcccggcgggagcaaggagccgtcgagggcgaacactccccgcgtcgtcgcgccggcggcgaccgcccgtgtcgtcgcgcggggcacggcttcgcctgggcaatgcgacggcgggtcgcgtgacagcgccgtcgccggcggcgtggtggatctccgggcggctcgcaagcgcgccgatcaggggcacgacgaagtcgcgggcacgatcacggccgtgtcgcccgcgacggcgtggggcgacgcggagcgcgccaagtacatggccaggtacaggcgcgaggagatgagaatccaggcgtgggagaaccgggagcggcggaaggcggagctgcagatgcggacggcggaggagaaggccgagcggatgaggctgcgcgcgcaggcgaggacggcggggaagctggcgacggcgcaggcggaggccaaggcgcggcgcgcgcgcgccgaggccgagctggcgctgggccgcccgggaggcggtgccaagggttggctgctcacgcggagcgcgagctggagcagcggcagcggccgctcgccctcctctctctcgctccggttgccgctgctgtgccgctgagaaaaatccactgccacagtcaaaaggctcgtgatcgatctgagagtttccgctgcttgttgaaggcggtttctgatgtactactagtaccaggcacagaagaattttatctttgtaccatcaatgaagacccgtttagtttccc

SEQ ID NO: 27959 - DNA, 4210 bp, Oryza sativa
  ref <308>: DATABASE ACCESSION NUMBER: AK103401
  ref <309>: DATABASE ENTRY DATE: 2002-08-28
gacccttttactcggcgcgccttgtctctctctctcagtacgaggggagtagtagtcagtagtcacagcagtagaagtagagcgccggtgccgtcgccaccgcggcgggggtaatgcatgcgctcgcactcgcactgcgcctgctcctccagctgtcgcgatgaggcagacgcgctcgctggcggcggcggcggccgttctggtggtgggtgtggtgctgcattgggtgggggtggtggacgcggcgacggcggcggagagggggatactgctggagttcaaggccgccgtgaccgacccgaacggcgcgctcgcgtcgtggacggcgggaggggacccctgcgtggacttcgccggggtgacgtgcgacccgtcgtcccgcgccgtgcagcgcctgcgcgtccacggcgcgggcatcgccgggaagctcaccccgtcgctggcgcggctggcgtcgctcgagtccgtctcgctcttcggcaacggcctctccggcggcatcccctccagcttcagcgcgctcggccccacgctccacaagctcaacctcagccgcaacgcgctctccggcgagatcccgccgttcctcggcgcgttcccgtggctccgcctgctcgacctctcctacaatgcgttctccggcgagatccccgcctcgctgttcgacccatgcctccgcctccggtacgtctccctcgcgcacaacgccctcacggggccagtcccgaccgccattaccaactgctcgcgcctcgccgggtttgacttctcctacaaccgcctctccggcgagctcccggatcagctctgcgcgccgccggaaattagctacatctccgtccgaagcaactcgctctccggcgccattgccggaaagctcaacgcttgccggagcattgacctgctcgacgtcgggagcaaccatttcgccggaccggcacctttcggccttcttggcctggtaaacatcacctacttcaacgtctcgtccaacgccttcgatggtgaaatccccaacattgcaacgtgcggcaccaagttctcctacttcgacgcctcagggaaccggctcactgggccggtgccggagagtgtggccaattgccgcagcctgagggttctggatttggggacgaatgctcttgctggagacataccaccaagcattgggaaattgaggtcgctttcagtgctcaggctcgcaggaaatgcaggcattgccggttcaatccctgccgagctcggaggaattgagatgcttgtcacactagatcttgctggtcttgctctcatcggagacatcccggtgtccctgagccaatgccagttcttgcttgagctgaatttgtctggcaaccaattgcaaggagtgatcccggacacgcttaacaacttgacttacctcaagttgctcgatcttcatcggaaccatcttgtaggggggattccagtgacacttgcacagctcacaaaccttgatcttctagacctctcagagaaccaactgactggaccaatcccctcagagcttgggaacctgtctaacctgacccatttcaatgtgtcctacaatggactctcgggcatgatccctgccttgccagttctacagagtttcggtagctccgccttcatgggtaacccattactatgtggacctccactgaacaatctgtgtggggctagccggagggcgaaacaattggctgtgtctgtcataattgtcatagtcgcagcagcgcttatacttattggagtttgcattgtttgtgctatgaacataaaggcttacatgaggaggagtaaagaggagcaagaggggaaggaggaggatgaggtgctggagtccgagagcacaccgatgcttgcatctcctggcagacaaggctcaaatgccattattggaaagttggtgcttttcagcaagagcttgccttcaaggtatgaagattgggaggcaggaactaaggcactgcttgacaaagactgccttgttggtggtgggtcagttggtacagtttacaaggccacctttgagaatggtttatccattgctgtgaagaagttggaaacactgggaagggtgagaagtcaggatgagtttgagcaggagatgggccagcttggtaaccttagccaccccaatctggttgcttttcagggttactactggtcatcatcaacgcaattgattctgtcagagttcatggttaacgggagcttgtacgaccaccttcacgggagtcctcatacattttccggaagcagcagcagagttggtctctcctgggagcagaggttcgaggttgcactcggtacagcacgggcacttgcataccttcaccatgactgccgaccacaagtcctgcatctcaacatcaagtcctccaacataatgttagataaagactttgaggctaaattatctgattatggatttggaaagcttttgcctattctaggtagctatgaattgagtagattgcatgctgccattgggtacattgccccggagttagcatctccaagcttgagatatagtgataagagtgatgtatttagctttggtgtggtgttgcttgagattgtgacagggaggaaaccagtggagagccctggggtggcgacagcagtggttctgcgtgattatgttagggcgatattggaggatgggactgtgtcagactgctttgatcggagcatgaagggatttgttgaggctgaattagtccaagtgctcaaattaggtctggtatgcacttcgaacacaccatctgcccgaccaaacatggcagaggtggtacagtacctggagtctgttagaactaattcatgatctcctgacgtcacggtacagtagcagaataggatgttaaaacaggaaaaaacgttttctggtttttgaacagatgatcacattgtttttattctttattgtgtccccagtcacatttgtaaaatgtagatttgcatctgaataagtggttattttggtcaaattaccaaaccctgtggggatttatctctgtttttttcgggtgctccctacaccctcttttctttctagtactgtggaaaatgcaaatgtaagatcaaccactctgaattgagtacctctttctgcatgtctgagctaaagaggagttggtagttggtactgtctaattgtgtgtcaagtttgcagggtagcgaaggatcagttgaacaagagcattgtggtacaggagcagctcatctaaaccacctgttctctcctacttatatcagcagtgcctgaaagatctacaacagctcaaattccattccgaaaccagtaaaaccacacatccaaaatggatgagcttgaactgtctgaattcaatccaagggagcgcgtcaagcagcagatttcagtcccatttctctgggaggtgaagcctggagcgccaaaaaaggactgggccatttccaatccagtgccatcagccatctcatgcccatctctggcgaaacttgtcgtcagcgtgcccttccagtgggaagaaaagcccgggaagcctctccaagatgcatctccttttcatccgctgtttgatcatgctgatttttctgtatctccttcctcgctaaaccctttcttggctgaaagtgaggaagaatattctctagggtttgatctggaagcatttggatttccagacagcaaggaagcatctggaactgcagaatgcgcaggtggttccagtcgccatggcacatggtattcattttcagaaacagaagcttacagcaactcaagtggagacacttcagcgctagattttcagtttccacgggcaccatcagagaaaagctgggaggttgctaatgacgatgatcagctgaagaatccgtggagtcctcccaagagcacatttacactggaggagcttatgatgcttagccgcaaattgtgctgcgggcaagggatgccagttgatgtcaagaagaagaacctctccctctcatcaacggaactcatcaagaagtttttaattgtgtgttcttagctgcaaggcaccatggttgcggcacatggacgaactgtactgtgtgcatgtgagatcccataataattgagcaagttcagcaaggcgtggcttgttccaagtgtaaaatcctagcggtttcggtgttgtttgtactgccatgtagctaaacttgtgaagctattttctttttgtgttctaag

SEQ ID NO: 27960 - DNA, 1235 bp, Oryza sativa
  ref <308>: DATABASE ACCESSION NUMBER: AK103402
  ref <309>: DATABASE ENTRY DATE: 2002-08-28
tggcacccaaaaccctagcgccgcccgctcgtcggaggtgaagaggcggcggcggcggcggcagcgtcgacaatggtgtggttccagtgcgaggactgcggggacgacctcaagaagcccaagctcgccggccacttccgctcctgctccgcctacaggctctcctgcatcgactgcggcgagttcttcacccaggagaccgtccagggccacacccagtgcatctccgaggctgagaagtatggtcccaagggacagaacaaagcatccaacaatgcacagggcaagcaagacaagccaaagccaaatgctgatgttgatatcaatgtcgggctgtcgacatatcccccttggttctgcagcctttgcaagacgacaaccactagcaagcaaacactcttatcacatgcagatggcaagaagcacagggcaaaagcaaaagcctatcatgcttctcagaagcaagcaaatggagttgaacaaactcccaaggaaactgttggtgcacctgtgacagaatcagcacaagtaaacaatgagaggagtactgaaaatgaaagaggtgtggacaacgatgcagcaaagagaaagagagcaaatgatacgacctcagaagagccagataacacgaaaagacagaacaacttgagcgtgaacagtggagaagtggtacaatcttcaaatgaagaggcagaaaccaaagcaaagagcaagggtactaaagatgaattagttagtagtgccaaccttaaaggcagtaaaaagcagaaaatcaagtggaagaaaattattaccaaagtacttcagacgaatccagatggagttctgaagttaaagaagctacaaaagctagtaactaaggaacttctggaatgtggtctgacagaagataaggagcagatgcacgctatcttgatggataagatttcttcaagctccaggttttctgttgatggcaagcgcattagattggttgcaaaggattgagagtaatggatcatgccccctgacagctgattccttgtcgacagatcaatgatggtcttacagtttgttgtggcgtaaagccgagttttggttctattatttatacactgtactgcctggatcatccatacgatccgtggaactgatgtgaattttgcatttgattgttttgggagcaacagccgatctgatcgcaaactgatcttggcaacacggcttgctatcaatgacatcaatatttcatggcc

SEQ ID NO: 27961 - DNA, 2211 bp, Oryza sativa
  ref <308>: DATABASE ACCESSION NUMBER: AK103403
  ref <309>: DATABASE ENTRY DATE: 2002-08-28
gtcttactacacaacacggctgtggtaccaggatttttttcaccacgcgccctacctcgcaatctccccctcctcccgtctcgtcgtcgtcaccgccgccggctcaccccccacccgtcgccgccggcgcggaggccaagccctagccccagcgcggccgatcgcctcgatcccccggcgagccgatgggcgtgcgccgctgaagcatgccagcgcgccgaggccgtggaaagcggaagcagcagcagccgccgccgccgccgacgggcccagcggacgcgaggcagccggaggggaagcagcgggaggaggagcggaaggggatggaagggtccgacaaggggggcgccggcgacgacgggagccccgcgccgctcccggagacggtacaaatcggaaattcaccaacgtataagcttgagaggaagcttggaaagggaggatttggacaagtatacgttggccggcgtatttcctctcctactcatggtaacagaaattctggtgcaaatgcattagaggttgcgctaaaattcgaacatcgaaccagcaaaggttgcagctatggagctccctatgaatggcaagtctacaatactcttagtggaaatcatggtgtcccacgggtacactacaaaggaaagcagggcgggttttacatcatggttatggatatgttgggaccgagcctgtgggatgtttggaataacaattcccactcgatgtctgttgagatggttgcttgtataggtatagaggccatctccatactagagaagatgcatgctaaagggtacgtccatggtgatgtgaaacctgagaactttttgcttggtcctccagatacccctgaagggaagaaactttttcttgttgatcttggactagctactaaatggaaagatgctggtacaggaaagcatgttgaatatgaccagagacctgatatctttaggggtactgttcgttatgctagtgtgcatgcccacttgggaagaactggatgcaggagagatgaccttgaatcccttgcatacacacttattttccttctccgtggccgcctgccttggcaaggattccagggagagaataaaggttttcttgtttgcaagaaaaagatggcaacctctccagaatctttatgtggcattggtccaccaccatttcgtcaatttgttgagtatgttgtgaacttgaagttcgacgaagagccaaactatgcaaagtgcattgctctttttgatggcattgttggtccaaatccagatggaagaccattaaacaccgatggtgcccagaagcttgtatatcaggttggtcagaagagaggccgcctcacagcggctgaagatgaggagcaacctaagaaaaagattagaatgggaatgccagcgacccagtggattagtgtgtacaatgcccgtcggccaatgaaacagagataccactacaatgtagcagatgatagattagcaccacatattcaaaaaggaaatgaagatggtttgtttataagttcagtttcatcctgttcagatctgtgggctttaattatggatgctggcactggttttaccgcccaagtacatgaactctcccattactttcttcacaaggaatggataatggagcagtgggagagaaattactatattacttctttggctggttcaaataatggaagctcggtggtgatcatgtcaacaggaacgccatatgcacagcaatcctacaaagtaagtgattcatttcccttcaaatggataaacaaaaagtggaaggaggggttctatgtcactgccttggccacagcaggaagccgatgggctgtggttatgtcccggaacgctggtttcacacatcaggtagtagaacttgatttcttatatccgagtgaaggaatccatcaacgctgggatagtggttatcgcataactgcaacagcagccacatgtgaccaggtggctttgatcttgagcatacctagaagaaagcctaacgatgaaacacaggagacactgagaacatctgcttttcctggccagcatgtaaaggaaaaatgggcaaaaaatctttatttaggctccatatgctatggaagatcagtgtcgtgaagtgcattttcccgagctggtcctttgtaagattaagatctaataatatgaacaaccggttttgtgacaagataatggggggattttgaagtgc

SEQ ID NO: 27962 - DNA, 2057 bp, Oryza sativa
  ref <308>: DATABASE ACCESSION NUMBER: AK103404
  ref <309>: DATABASE ENTRY DATE: 2002-08-28
ggattgaccgacgccgcgggcttagtccagtggaaggtgttcgtccactcgcgctcgcactcccgccgttacgcgcgcgcgcgccgccgccgccccgacctcgccgcgcgcgccgacgaacctagatgcggtgatgggaagaaggggcgcgggcgcgggcgctgcggtggtggtggtcgcggccttcgtggcggcggccgtggcgtcgggggacacgctcgccgatctcggcggcgccgccaaggggatcgacagcgtgccagaagtgaataacttgggaccatgggcgaaggggcttctgaaagggatgccggactcggcggcagggccagcagagggccccatcgcaaagtatccgctggttctggcagaggagaggacgcggcggccggatgttcttgaccaccttaggatgtatggaggagggtggaacatcactaacaagcactattgggcgtctgtttcattcacaggaattgctgggtttgttcttgctgctgggtggtttatttcgtttggaattgctgtagctgcaagctgcttttggaaatcaagaatagacaaagaaaatgattttcatgcagatatactgcgccttgtgttgcttgtggtcttcatatttactttaacggctggatctgttatcctcttttgtggacagagtaaattcggacaagaagctactagcactgtcgattttgttgtgaatcaatctgatttcaccattcagacgctaaggaatgttaccgattacttatcgcttgcaaagacaatcagtgtggcagcactctatcttccttcagatgtacaagggcaaattgacaatttgaaagtggacttaaataaagcggctgatactatatcccaaaagacatcagaaaactacagaaggataagaaaagttctccataacttgtcagttgctttgatttgcatagctgcgttgatgcctgttcttgcattcttgggatatgttttggagctgtatggacaaagaagtacagtttatgtatttgttaccttatgctggacagtagtggcaactctcttcattcttctagggattttcctgatattgaacagtgctgcaaaggatacctgtgaagcaatggatgaatgggcacaacatcctcaagcagagacagctctcagcaacatccttccacgtgtagatgaaagcacaaccaatcaaaccttgtaccagagtaaacatgttgtggtaattcttgtaggcatagttaatagggctatatctgctctttcaaatcgaaggccacatcataaacatcctgggcagttcatgccttacctgtgttctccctatgatgcgaacctgactgatcggcagtgcaagtctagggaggtcaccttcgataatgcaaccacagcatggctgaactatacatgcacagttcctgactcagatttgtgctctggctccagaaccataactccagagatatacagtcagcttgttttagctgccaatgtaagctatgctctgtaccattatgcccctctcatgctcaatctccaggactgcaagttcgtccgcaacacattcagctccatcgcttcgcagtactgccctcctatatggcgcgacctcagcttggtctcagcaggcctggctctcattgcctctggcttaacacttggcctcctcttgatgctttttgcggaccgcccccaaagggaggaggtgtccgagctgccatcagggtcaaggatcaccccagtagactgctctccatgacgagctcagtctctatggtcattcagactagtatagcaattgcctgtaatagttaggaaaagaagaaggtgaagcactggggcaaagccccattttgcagtggagatgatctaggtggatgagtgcttccttccgtggtatacatggtatgtttcagggaatagttgtaaaggctaatgcctaatggcaaacaaaatttgggcaaaaccccactatgatatgaagagcaatgttctgtatcccctatgattgttcagctggacatgtttctttcttatgtacatgtcttgttctgtgtgtt

SEQ ID NO: 27963 - DNA, 1271 bp, Oryza sativa
  ref <308>: DATABASE ACCESSION NUMBER: AK103405
  ref <309>: DATABASE ENTRY DATE: 2002-08-28
aggccgtggtaacgggtactatggttttggcaatgagagtcaggatggaacaattgagttgaacagaggtcctagatcaggccgtttcaagaaccagaaattgtttggccatactgtcactattgctgtgaaagggcagagccttcctacaagtgacagcatgaatgctactgatgtacctgatagaacacagttcaaccgagatgacttccctgtccaatatgatgatgcaaagttctttgtcattaaatcatacagtgaggatgatatccataagagcataaagtacaatgtgtgggcaagtaccactaatggaaacaagaagcttgatgctgcttatcaggaagctcaggctaagagctccaaatgcccaatattcttgtttttctcggttaatactagtgggcagtttgttggtgttgctgaaatgactggcgctgttgattttgagaagaccttggagtactggcaacaagataagtggaatggttccttatctctcaagtggcacattgtcaaagatgtgcccaacaatattctcaagcacatcatcctagagaacaatgagaacaagccagtgacaaatagccgtgacacacaagaggtaaaccttgaccaaggcattcaaatgcttaagatattcaaggagcacgtcagtaagacctccatcttggatgactttgctttctatgagaaccgtcagaagttgatgcaggaaaagagggtgaaacaacagcagatccaaaagcaggtctgggacagtagggctccaagttctgtcactggagagaagcagcaggatgctgctactgcgaagccaaagctaccaaatggcgtcaatggagaactgaaggttcctgcagagaacggcacagctccagtcgttacctatgcagcgaaggtcgcccaaacagcagcgactgagaagcctgcccttgccaacggcaccgtcaaagctagttaactggatcacataccccatgttccctagctagccatgaagaacaagacggtcctgaagaactcaacaggcatgtggtcccaaggaactgatggtctggaaaactcttatctgtgaaactggcagcacgggcccaagatcctgctgcttggctgctactggggagcagttggctagttagttttgcctagttttcttttgccgtattcccgttttcggtttgcttttttttttagctcgctctaagactccgtttatagtatcgtcgaaaatgccagaaaaaaacctagcggcaaagacaacaagttgc

SEQ ID NO: 27964 - DNA, 1185 bp, Oryza sativa
  ref <308>: DATABASE ACCESSION NUMBER: AK103406
  ref <309>: DATABASE ENTRY DATE: 2002-08-28
aaaaagaaattcgtctcctccgctcctagcgccgccgagtcgcggctgaacagaacaagggagggaggggcggcgatctccatctggcgagcagagcaggggaggggatcctcatctggaagaggctcttctttttaatttcagagccttaaccttaatacaagtaacagtttgtttgttccccgatccgcccctgctgctggtacttgggctatttgattcctgcatagtttcagagctagagctagtgttgctctttacagctttgggcggattcgcgatggcggatgaagagtcgtctgacttcaccttttgcaagatcgattttgagggagatggtggtctggagttccctaaagctatccctgtggcaagtacacctggtgatgctggtgcagataacttaaagactaagaagatcgaaggcaacatgcaggcaaacaattcaattaaagatcaaacatctaattctatatctagtagcatcaatcgtgtatcactcgaagactctaatggaaaagagtcagttcttagcagagagaatacacagtcaaatttatcatctcaacgaaaatcttcaaagaaacctgcagcgcgtgcaaaagttcctttcgagaagggctatagccaaatggattggcttaagctgacccgtacacatcctgatcttgcagggctcaaggggcagttaaaccgaaggttgatttctctagaagaagttaaacagcataaaacaggagatagtatttggactgttttgaaaggtcgtgtgtacaacattgctccgtacatgaaatttcatccgggaggagttgatatgcttatgaaggctgctggaaaagactcgaccgctctgttcaacaaatatcatgcatgggtaaattttgaattcctcctggagaagtgccttgttggattcctcgatcccaatgagtagatgcgccattgagcctgaggccagaactccacttcctctttcttgtccgcgacactagtccctgatgcgtatccatcacatggagacagtttaaggaatgtaaacaagtgttttgcttcattgctaaggagatatagatgctgcttaacattttagaaaaaaaagaaaagttagaaacttgatcaccattgttatgtacaaattccttcaccattgattgctgaagaaaacaaagaacatttccatcc

SEQ ID NO: 27965 - DNA, 2424 bp, Oryza sativa
  ref <308>: DATABASE ACCESSION NUMBER: AK103407
  ref <309>: DATABASE ENTRY DATE: 2002-08-28
gtcacgcgagcgacgcgggcgctccacgatttctctgcctccccccccccctcggtctcctcctcccccaccaccaccgcacgcttcccgaggcgccgccctccgccgccgcgggcatccgcttccgacgacgatattggaaggagcaccgaagggtgtagcacaaggccgagttgcatggggcgataatgccagagttgcggggtggtgtttggagagctcgtctgaggtccaagaaggtttacgacgtccaggacgcagatccagctgcgagtccggtgtcgccagctccgcgggggaggactggaaggcgcggcggtgctgcggctggcagaggcaacaagacagttgctgagggaggagggaggaaagctctgaagcctagaggaaaggggtgcagggctgttgatttgtgtaaggatcaaccttgcaaggacctccctgaagttattgctagaaaggcggttaccggcaaagcccaggaggaccttggtttgaacaaggtagctgacagagctgcgaacttgatgatggacggcgaaagtggagacaaatttgctgcggcagaagatgaatccactacaacaccagttcctgagcgggttcaagtaggcaattccccagagtatataactgataggaagttgggtaaaggtggatttggtcaggtctatgttggtcgaagagtatctggtggaggttctcgcacgggtccagatgcgcaagaggttgcgcttaaatttgagcaccgaagcagtaaaggatgtaactatggccctccatacgagtggcaggtttaccacactctcaatggttgttatggcataccatcagtccactataagggtcgtttgggagactactacattcttgtaatggatatgcttggtcccagcctctgggatgtgtggaattcagtgggacaggcgatgtctgcccatatggttgcttgcattgctgtggaagcgatatcaattcttgagaagcttcactctaaagggtttgtacatggtgatgtcaaaccagagaattttttgcttggtcatcctgggtcagttgatgagaagaagcttttcctgattgatcttggtttagcatccaggtggaaagaagcatcatctggtcagcatgttgactatgatcagaggccagatgtctttaggggaacaattagatacgctagcgtccatgcccacttaggtcgtacaggtagcaggagggatgatttagagtcactggcttacaccctaatctttttaataagagggagattaccttggcaagggtatcagggagataacaagagttttcttgtttgtaagaagaaaatggctacttcaccagagttgctgtgttgcttctgtccagctccgttcaaacattttctagagatggtcactagcatgaaatttgacgaagagccaaactatccaaaacttatttctctctttgatggtttgattgaagggcctgcttcaaggcccatcagaattgatggagctctgaaggttgggcaaaaacgtggaagaatggttgtaaatcttgacgatgatgaacagcccaagaagaaagttaggttgggaagcccagcaactcaatggatctcagtttataatgctaggcggcccatgaagcagagatatcactataatgttgctgattcaaggctgcatcagcatatagaaaaaggcaatgaagatgggctgtacattagttgtgtctcttcttccgcaaatttttgggctctcataatggatgctgggactggcttttgttcccaagtttatgagctttcacaagtgtttctgcacaaggattggattatggagcagtgggagaagaattattacataacggcaatagcaggagcaaccaatggaagctcattggttgtaatgtccaaaggaactccatacacacagcagtcatacaaagtcagtgaatcctttccttacaagtggattaacaaaaagtggaaagaaggtttccatgtgacatctatggctactgctggaaaccgttggggagttgtcatgtcaagaaatgcaggctattcccatcaggtggtagagttggactttctatatccaagtgaagggatccatcggcgatgggagacaggttacagaataacttcgactgcagcaactcctgaccaagctgccttcatcttgagcataccaaagaggaagccaatggacgagacacaagaaactcttcgaacttcctcctttcccagcaaccatgtcaaggaaaaatggtcaaagaacctatacatcgcttcaatctgctacggccggaccgtatgctgacagcttcaacatttcgaagctccaatgtgaagccatgtctagctactactagcattttgcagtgagctgccaaccgatcaaatctcccttgattgggagatctgaagcaagg

SEQ ID NO: 27966 - DNA, 986 bp, Oryza sativa
  ref <308>: DATABASE ACCESSION NUMBER: AK103408
  ref <309>: DATABASE ENTRY DATE: 2002-08-28
ggcccgtcgtccccctcccctctccactccaacttgagctctagctctcgcactcgcaagcaagggaaagcgaggcggaaggaagctatcgcctagcagcggagaccgggagatcgagatgtcggcggggctcgtgacggaggaggtgatggtggggcggctggtgcggatccggcggacggtgatgcagatgctgcgggacagagggtacctggtggtggagcacgagctcgccatgggccgccgcgacttcctccgcaagtacggcgagtccttccaccgcgaggacctcctcatcaacaagtacaagaagaacgatccctccgaccagatatacgttttcttccctaacgatgacaaggtgggaatgaaacacataaagaagtacgtcgagatgatgaaagctgagaacgtctccagagcggtattggttcttcaacagaacctcactccatttgcaaggtcatttcttcaagaattagagccaaagatccacttggaaattttccaggaagccgaattgcttataaatatcaaggaacatgttctcgttcctgaacatcaagtgcttaacaatgaggaaaagaagacattattggagcggtacactctaaaggaaactcagcttccaagaatacaaattacggaccctattgcaaggtactatggcctcagacgaggacaggttgtgaagatcatcaggcccagcgagacagccggcagatatgttacatatcgttatgttgtataatagcagaaaaatgagatggagagcaccataaatctggtgatttttgcaggtatacatacatgaccatatgcttggagaaatcatatttctaaggagaagccatgttaatgatcccatggctgttatgtaagtgaattctcgtgagttaagcatatggaccatacataattcctcatgttgtacactttgtttcaagaactgtataaacagtacagaataaaaacaccagttttcg

SEQ ID NO: 27967 - DNA, 1056 bp, Oryza sativa
  ref <308>: DATABASE ACCESSION NUMBER: AK103409
  ref <309>: DATABASE ENTRY DATE: 2002-08-28
gttctctcccatggccggctacccgccaaaccccggctccggctacccctacggcggcgccggcggctacggtgccccgccaccgccctacggctcctcccccgccccctccgccccgccctacggcgagaagcctcccaaggaaggtaagacctcctcctcttccgccccttactacggcggcggaggcggctacggcgccccgccctccacccagccctacggcagcggaggcggctacggcgccccaccctccacccagcggccccagtcctacggcggcggctacggggctccgccctccagccagccgtacggcgcgccatacggggccccgccgccctcgtcggcgccgtacggggcgcccggcgggtacggcagcccgttcgcgtcgctggtgccatcggcgttcccgcccgggacggatcccaacgtggtggcgtgcttccaggcggcggaccgcgacggcagcgggatgatcgacgacaaggagctgcagtccgcgctgtccgggtacagccagagcttcagcctccgcaccgtccacctcctcatgtacctcttcaccaacaccaacgtccgcaagattggtcccaaggaatttacctctgtgttttacagtcttcagaattggaggtccattttcgagaggtttgatcgtgaccaaagtggtaaaattgatgcaacagaattgcgtgatgctcttctcagtctgggatattcagtttctccaactgtgctagacttgcttgtgtcaaagtttgacaagactgggggcaagaacaaagccattgaatatgataacttcattgaatgctgcctcacagttaagggtctgactgagaagttcaaggagaaagacactgccttctcgggctctgcgacttttacttacgaggctttcatgctgactgtactcccttttctcattgcataaaatggcagtgtgctgcacagtcgacctttcaggagaccatgcccattgtgttgaaacggttctgtaacgtgtgttcatcgacttgtttttaactgagtttattgtttggatttgaaatg

SEQ ID NO: 27968 - DNA, 2243 bp, Oryza sativa
  ref <308>: DATABASE ACCESSION NUMBER: AK103410
  ref <309>: DATABASE ENTRY DATE: 2002-08-28
agctctttcctcctcctcccctcctcggcccttccttcccttcttccctcggcggcggcggcggcggctagcaatcgcgaggaggagaagatggtgaagaagagcaagaagagcaagagcaagcgcgtgacgctgcggcagaagcacaaggtgctccgcaaggtgaaggagcaccaccgcaagaagcgcaaggaggccaagaaggaagggaagagccacaggaagaaggtcgagaaggaccccgggatccccaacgagtggcccttcaaggagcaggagctcaaggccctcgaggcccgccgcgcgcaggcgctccaggagctcgagctcaagaaggaggcgcgcaaggaaagggctaggaagagaaagcttggattgcttgaggacgaggacattgctaatttggcctctgcagcttctgctcagggcagcgagtttgcagagaaggatgcagcaaaggagaatgcctctttagacgtggttaagagccaagatcattcagagagagccttctacaaggagcttgttaaagttattgaagcgtctgatgtcattcttgaggttctcgatgccagagatccactgggcactcgttgcattgacatggaaaagatggtcaggaaggctgatcccagtaaacggattgtgctacttctcaacaagatagatcttgttcccaaggagtcagtagagaaatggcttacgtacctaagagaggaaatgcctactgtcgcatttaagtgcaatacccaagagcagaggacaaaactgggatggaaatcatcaaagattgataaatcaagcaatatcccacaaagcagtgattgtcttggtgctgagaacctgatcaaattactcaagaattattccaggagtcatgagctcaaactggcaattactgtgggtattgttggtcttcctaatgttggcaagagcagtctgattaacagtttgaagaggtcccgtgtggttaatgttgggtccactccaggagttactagatcaatgcaagaagttcagttagacaagaaggtgaagctgctagattgtcctggtgttgtgatgctgaaatcttccaatagtggtgtatctgtggcccttcgcaactgcaaacgagttgagaagatggaagatccaatcagtcctgtaaaggaaattctcgatctatgcccgcacgagaagctgctatccctttacagggttccaacatttacttcagtggacgatttccttcagaaagttgccacactccgggggaaattgaaaaaaggtggtatagtggatgttgaagctgctgcaagaattgtacttcatgactggaatgagggtaaaataccctattttacggtaccacctaaaagggatgctgtagacgactccgatgcagtaattatttcagagactgggaaagaatttaacattgatgaaatttacaaagctgagtcatcatatattggtggtctgaaatcactggaggagttccgtcacattgagattccatctaatgccccaccgcagattgacgaagagatgctagaggatggcaagaagcagaatgaacctgcgcaggaaaaccatgatgagtcgatgtccgatgcaaatgagcgtgaaggagccaagacggccagcgcgagcatacagaatgacaagctgtacacagcagagggaatacttgatcctcgcaagaggaaagccgagaagaagaggcgcaaggcaaacaagttcagcgtgctgaccgacatggatgcagactacgatttcaaggtggattatcagatgaaggatgccctggccgaagagggcaacgatggtggagatgaggagcccaaggaagctgaccctatgactggtgtcgatgatgcgtgaactgatggaactcggcagattgagaatacgaagtagatcatataattataatatgatggtggactgccatcccaagttttgtaccctattagttgaatgagagaagataatggacgctgcttgattcacatagccactgagctggaatcagaattttttgcccatatgcatgcaatggttgcaaaattgcaaaccatcttccagcgatcactctattgtttgggctggtggagagccgtgcctatcagtctcgcatgatatctccgcgactgtcctctgttggggctagcgaaaaattcacaggtaatgtttgacatatcctagttacctcttctacattaagtaaataaactcacctaaacttcatttttaagatc

SEQ ID NO: 27969 - DNA, 1912 bp, Oryza sativa
  ref <308>: DATABASE ACCESSION NUMBER: AK103411
  ref <309>: DATABASE ENTRY DATE: 2002-08-28
gagtccacgagcgccgccgatgcggatgcggtccaactgcagatcccaatcaacacggcacagccacccgcggacgaccgcccccgccctccagacgcgaaccaacctcgtcccgcccgccctccccccgcctccctctccatgccatgccagcctctgtatatgacgctgcccgttccctccgctaacggcgccacagaccccaaaggtctgataagtctttgatttgctagtaccggcatcgcctgcttcgctttcgtcacgttcttgatttgggcgggcgcggagatttagaacggtgctgaatttacaatcttgggaccaagaggagaactactctcaatgatggaaatggtattgccagtcgcgaatgctacggctgcggcacttgcacgggtttctgctgtgttcaatgccccacttgcccgtgctgttgtctttgggattcatattgatggacatttggttgtggaagggcttctcattgctgccatactgtttcagctctccaggaagagctacaaacctccaaagaagccactcactgagagggaggttgatgagctctgtgatgactggcaaccggagcctctatgcccacccatcaaggaaggagcacggatcgacacgcctacattagaaagtgctgctggacctcatacaactgttgatggaaaagaagttgtaaactttgcatcagcaaactaccttggtttgattggcaatgaaaagataattgattcctgtgttggctcagtggagaaatatggtgttggatcatgtggaccacgaagcttttatggaactattgatgtgcaccttgactgcgagagtaaaatagcaaatttcctgggaacccaagattcaatcttgtactcctatgggatatcaaccatcttcagtgtaattcctgccttttgcaagaagggagatatcattgtagctgatgagggtgttcactgggctgtgcaaaatggtttacagctttcaagaagcactgttgtatatttcaagcataatgacatggcttcacttgcgagcattttggaaaaactaactcatggaaacaaacatacagaaaagattaggcgctatattgttgtggaagctatttaccagaattctggccaaattgctcccttggatgagatagttcggttgaaggagaaataccggtttcgtgttatattggaggagagccattcttttggtgttcttggcaagtctggacgtggccttgctgaacactatggagttcctgtggaaaaaatagacattattactgctggaatgggaaatgcgttagctaccgatggtggtttttgtacaggaagtgtcagagttgttgatcatcagcgtctaagcagctctggttatgttttttctgcctcgttgccaccataccttgctagtgcagcaatgtctgctgtgaaccacctggaggagaacccatcagttctcgccaatctaagatcaaacatcgcccttctgcataaagagttgtcagatatacccgggctcgaaattgctagcaatatcttgtcacctattgtctttctcaaattgaagacaccaaccggttctgcttgctgacctggaactccttgagattattgcagagaaggtcttgatggaagattcagtcttcattgcagcaacaaagaggtcgagtttggacaagtgtcggctcccggttggaatccgcttattcgtgtcagctggtcacactgaatctgacatcttcaaagtatctgcatccctgaagagggttgcagcatcagttgtctagtgagtttatacggctgttgagcgactgttgatctcagcttcttacatgatgtgtcctacatttaggtacataatttgtatgttcatcgatctggcgcaattcattgtcatatttaccaagaat

SEQ ID NO: 27970 - DNA, 1665 bp, Oryza sativa
  ref <308>: DATABASE ACCESSION NUMBER: AK103412
  ref <309>: DATABASE ENTRY DATE: 2002-08-28
ggccgcgcttgctcggcacggcaacccacgcgaaatcggagattccttcgattcacgagatcaccacgagtccaccaccctcctcctctcgctggattcgatgggcgctcggtgagatccgaatcccccacggtggtcgccggagatgaagccgccgcggaggtggatgtacgggcggggcggcgggaaggggaagccggcggggctgctgctgctgggggtgttcctctgcttgtcggtggtgctgctgctgctgctgcacggctcgtccccgtcgctggagggcgaggggaggaagcctgaggcggtggaggcggcggggggagggggagaggaggaggaggtggcggtggcgcgggcggaggtggaggaggcgccgctgccgccggggaacgcgcggctcgccttcctcttcatcgcccgcaaccgcctcccgctcgacctcgtctgggacgccttcttccgcggtgacaaggaagggagattctccatcttcgtgcactcgcggccggggttcgtgctcacccgcgccaccacccgatccggcttcttctacaatcggcaggtcaacaacagcgtccaggtggattggggggaggcgagcatgatcgaggctgagcgtgttctactcgcccacgcgctcaaggaccccttaaacgagcgcttcgtgttcgtctccgacagctgtgtgccattgtacaacttcaactacacttacgactacataatgtcttcgtcaaccagttttgttgacagttttgctgatacaaaagcgggtcggtataatccaagaatggacccaattatcccagtggaaaattggagaaaaggctcgcagtgggctgtgttaacaagaaaacatgctgaagttgtggttgaagatgaagaggttttgccagaattccagaagcattgcaggagaaggcccttaccagagttctggcgggactgggatcgtcctattcctgcggaggcatggaaggcacataactgcataccagatgagcactatgttcaaacattgcttgcacaacatggtcttgaagaagagcttacacggaggtcagttacacacagtgcgtgggatctatcatcttctaaagatcgtgaaaggcgtggatggcatcctgtaacatacaaaatctcagatgctactcctgcacttgtaaaatccataaaggatattgataatatatattatgagactgaaaatagaaaggagtggtgtacaagtaatggaaaaccagcaccttgcttcctttttgcaaggaagtttacacgagcagctggtctgaagcttcttgatttatctttgatagcagcaaatggcgcatctaccatgtaaagtttctccgtcaaaagcagaatactgccagcttgcacatacgtaaaggaaagtggtggaggggacagaagataacagcgaattttttttgggcatcttcattacaatttgttgcactctgaaaagggacataggtgttctaaagcaataaagtttgtttcttttagcacctaggttagtacatatgttaacccactacttagcattataactgtaactgtaagcaaccacctgcagttggattggcaagaatcacctcagttcttttcacgacaaattcctttttcaaatttatagagaattggcatgtcttatacttg

SEQ ID NO: 27971 - DNA, 1678 bp, Oryza sativa
  ref <308>: DATABASE ACCESSION NUMBER: AK103413
  ref <309>: DATABASE ENTRY DATE: 2002-08-28
gggcagagaagcagagtacagcaggcagctcttcttctctttgcgaaggttggctacttggccagccattaggaaacaagttagtttggagaagaagcagagttgagactgcatttgcattgctctgtagccatgggcaagcaccatgtcaccctgtgttgtgtcgtttttgctgtgctctgcctggcgtccagcttagcacaagcccaagttctcttccaggggtttaactgggagtcgtggaggaagcaaggcgggtggtacaactttctgcacgagaaggtggaggagatcgccagcacgggcgccacccacgtctggctcccgccgccgtcgcactctgtctcgccgcagggttacatgccggggcggctctacgacctggacgcgtccaagtacggcacggaggcggagctcaagtcgctgatcgaggcattccacgacaagaacgtcgagtgcctcgccgacatcgtcatcaaccaccgctgcgccgactacaaggacagccgcggcgtgtactgcgtgttcgagggcggcacgcccgacggccgcctcgactggggccccgacatgatctgcagcgacgacacgcagtactccaacggccgcggccaccgcgacaccggcgccgggttcggcgccgcgcccgacatcgaccacctcaacccgcgtgtccagcgggagctcaccgactggctcaactggctcaggaccgacctcggcttcgacggctggcgcctcgacttcgccaagggctactccgcgccgctggcgaggatctacgtcgacaacaccaacccgacgttcgtcgtcggcgagatctggagctcgctcatctacaacggcgacggcaagccgtcgaccaaccaggacgcggacaggcaggagctggtgaactgggtggagggcgtcggcaagccggcgacggcgttcgacttcaccaccaagggcatcctccaggccgccgtgcagggcgagctgtggaggctccacgacggcaacggcaaggcgcccggcctcatggggtggatgcccgatcaggccgtaaccttcgtcgacaaccacgacaccggctcgacccagtcgctctggccgttcccttccgacaaggtcatgcagggctacgcctacatcctcactcaccctggcatcccatgcatcttctacgaccatgtgttcgactggaacctgcagcacgagatcgcgacgctggctgaaatccggtcaaggaacgggatccatgcggagagcacgctggacatcctcaaggccgagggggacatctacgtcgccatgatcgacggcaaggtgatcaccaagctcgggccgaggtacgacgccggcgggatcatcccctccgacttccatgtcgtggcgcacggcaacgactactgcgtctgggagaaggaaggcctcagggttcctgccggtagaaagcactattagctttagctatagcgatcgagttgcatggtgctttgcaaccctagataatatatatacgtacgtggctctagctatgaatcatgcaattttgctgcgagatgtgtacgagcgagcttcgatcgatgtacgcttcgttataactagcgttcttcggaaataagtaagcggaatgtaccctgttaatcctgcagaaatgtaggatgaatggaattaactagctactgttcgtttc

SEQ ID NO: 27972 - DNA, 1521 bp, Oryza sativa
  ref <308>: DATABASE ACCESSION NUMBER: AK103414
  ref <309>: DATABASE ENTRY DATE: 2002-08-28
gtgctttccgcgctgctgctgaccgacgacggccgcgcccctgtcccggtctcctcctcgtccctcctccccgcctctccactcttccagaacatcgccaccgccaccgccgccgccgccgccgctcgccggccacgaccgcccccggcccatctacacctccgccggatctcgcagccgcgctccccccattggagggagatccgttccagcgcgtgggatttaatttcaacacatgactggtgaaatgtttgcttgatgatgtccggacatgatttcagtattgttcataatgcagttggcatctcatgccactcaagcagatgaagcaacagagcttgcttccagctgtgattgtgcagaagtgccagcttcacagcagatagtttctgaatcaagtacagcaggaagctccacagagcatctagtttcatgtgaaatcaagccactgggtgttgatgaagacattgaaactattgatgctaacgaagaaacccaccttgtcattcaagactgtccacaatgccggatttgccttgataatgaaggtgatgacttgattgcaccttgtcattgcaagggcacacagaaatacgtgcatcgatcctgtcttgataactggagatcaacaaaggaaggttttgccttttcacattgcactgagtgtcgggctgccttcttacttcgtgcaaatgttcctccagatcgatggtggttgagattgaagtttcaacttctggttgttagagatcacacgttgattttttttattgtacaactggttgttgctttattgggtatgctagtatacagattttatggagatgaactacgagaaatgtttggttatgaagagcatccatatgctttttatgcaatggcaatattggctattgttttggttggtttgctgtatggattcttcatagctataatatgtgggcagaggatcacagaacggcattaccatgttcttgcaaagcaagagttaaccaaggagtatattgtagaggatcttgaaggaactgatggagttcctgaccttgatcctaatcatgttacagagctgaggattctggggctatattgagtactggagatatcatcaattcatcagctaaatgtcgatgctaaaatggtcatatgggaaaagctctgtttagatacaaatccataaggctgatgctgcacggacatcatccagaacttcagcacaaggcatgacaaacgggcttatctgcgttttggaagacatgtttgtctgaaggcatccaatagagtttagagctatttcccttttttccccatgtaggataaattgctctcacacaaaaaggagaataaggtgagtcccctcagactctgaatcgatgatgaggattatgatagaaatgttaggatgccatttcgaatggacattttattagatattacttgtctcttcatgttcacaataaacatgaatagttataagaaaatgaggtaaatagagacgtatgcaagctttgcttttctgccttc

SEQ ID NO: 27973 - DNA, 1894 bp, Oryza sativa
  ref <308>: DATABASE ACCESSION NUMBER: AK103415
  ref <309>: DATABASE ENTRY DATE: 2002-08-28
gacctacctcctctcgactcttcgagctcatcactcatcacctcgtctcgccgccgctcaccacaccaccttccgatggatgccaccgccttcgcctccgctccgaaccctagccacgcgccctccacctacctcctctctctccgcctcgtactcgcgggttctccgcttctccgtccgcgacccgtggcggcggcggcgggggcagcgcctcccgctccacgcgctccgatcgcagcgccccgagccggcgcccgcgtccgcgtcccaccacgacgtggtggttgttggcgcagggatcatcgggctctccatcgcgcgccacctcctcctccacaccccgctctccgtcgccgtcgcggacgccgccgtcccgtgcaccggcgccaccggcgcagggcagggatacctatggatgtcacaccggacgcccgggagtgacacgtgggagctggcggtgcggagcaagcagctgtgggaggagctcgccgccgaggtggatggcctcgggggcggcggtgcgcgggagaggctggggtggatgaggacaggaagcttactagttgggagaacttccgaagagatggctacattggaggaaaggaccaaagctctatctcaggcaggaatacgtgcgggatgcttgtctgctgcttcattgcatgcattggagccggaactctatgttggacatgatgggggtgctatgttcttgcctgaagactgccagattgatgccttccaggctgtctcattgattgaaaagaccaatggttcatattcctcagaaggaagatatatggagatctataatgatcctgccatgtcattagtaagatcagagactactggaacagttcaaggtgtccaaacatctaagcacatcctatatggcagaaaagctattgtaattgcttctggtgcctggactcgaaccttattgcgtagttttcttgaaccgaatcctacattggacattcctgtgatgccacgtaagggtcatttgcttgtgttggataaatttgacaagcttaaactaaatcatggactaatggagctaggatacgttggccatcaagttgctaaatcaagcggcacacccctatcttcagaatccagtgaagatgagcatggtgctttatccatatcaatgaccgcaacaatgaatacaaagggaaatttaatcctaggaagcagtcgagagtttaaaggattttcaagagaagttgacatgtccatccttaaatgtatatgggaccgtgcagcagagttctttcctacgctgaagaatgttcatcttgatattgatgaaaacactgaaatcaggatcgggcaccgtccctttatgcctgatgggaagccagttattggatctgttcctgatctgccaaatgttttgattgcgacaggacatgaaggaagtggacttgctttggcattaggcactgctgaaatggtcaccgacatgattcttgggaatcctggaaaagtggacttctcgccattctccataaaagacaggttttcagcttacgactgagggagctgaaatttgcttttgagtatcgtcgggaagcatttctccagtctgatccagatatcatcattgattcaaactcctgatagctaatgcgaccatcctgttgaatatatgcacaacatgtcagttatactattgaagtattgatacatgtgtgtaaagtgtaaaccccaactggaaaaaaaaacatggataggaaaccatcaaattactgttgcttcctgggtttcttgtacacttggatgaggatccaagatattttgctaaaaaaaagaagagaagactaagtttagtagactatgcctagaattcagcaagttttgtgaaatgggaatttgttgctgatttgcttcg

SEQ ID NO: 27974 - DNA, 1337 bp, Oryza sativa
  ref <308>: DATABASE ACCESSION NUMBER: AK103416
  ref <309>: DATABASE ENTRY DATE: 2002-08-28
gcttcttcttacttaccctcccttctgatcccctgtttcccctggtcatggcggcgagatctccgtgtaggagtgagatcgccgcctcctcctcatggtgtttcctggtgcggcgcgcgtgagagctcggcccgagcccgagccctctcgcttttgccgtgccggatctgattctgtccgtgctagtgttagtgtcacgttttggtgtagacagtagactcatgaaacgaggagaggcttttttgtaggatgggtcaacttttaggaacttgtccaaagtttaacaactctcaaggatgaactgggaatagtggcgctgttatacattaggagttggtctgcgagaaatttggatgggattagttgcggatcttccatcagctagtggagcttaaagatactgatgtgttgtccgtactgaaatgcacttctttgccttggcaaaaccccagtctcccccataaatttagttttgtttgcttagctttaccaaatgccatcagcatacatggtgtaaaatcatatacttttgtaacgaacgaattgtgtttatttgcatttcaactagtgctttcttcctaatttatcaggactatcgagatggcaactgcaactgctccgagattgtgctttcctaaacccggcgcggccattgctccggcgaccaagagcccttccttcattggttacgcaaagcaaacattgaacatgtcaggcctaaggatctccaacaagttcagggtgtccgcgacagcggtgcacaaggtaaagcttataggcccggacggtgtcgagcacgagtttgaagcccctgaagatacctacattctcgaggccgctgaaactgccggggtggagctgccattctcatgccgtgctggatcatgctccacatgtgcgggtaagatgtcatcgggagaagttgatcagtcggaaggatccttcctcgacgagaaccagatgggcgagggatacgttctgacatgcatttcgtaccctaaggcggattgcgtcattcacacccacaaggaggaagaactctactaggtcgctctttttatgcttctgtgggcacatttgctgatttcaaagtggactcgctgttcagttagttttcgctatccaaaaaatggccatatctttgtattagtcttttgatgggaccgtgtcatatgagttgtgacaataattgtcgtagtcctgttcagcatttaaaattgcgtttgttcaattcacagcaggtccaacttccaacgatgacatgttatcagaagttgtgtgtaatggtattattgtggatcacttccagtaggaaaaaattgacttgtcctttctcc

SEQ ID NO: 27975 - DNA, 1556 bp, Oryza sativa
  ref <308>: DATABASE ACCESSION NUMBER: AK103417
  ref <309>: DATABASE ENTRY DATE: 2002-08-28
tgctttgagccaaaaaggttagagcttttgtgttcttcccccacaaatatcccctagtgccttttgtttggccgtggtgtggaaaagcatatgaatgggggagcatctcaattggcatactgctgttgccccccagcttagctatccctttccatccctgcaagaacccttctttatagatctgtgcccttgctgttcatggaaccctgtgattgaggggtttcctcatttggtctctcactcgcggtgtaaacaaagtatatgctccaagtaagctgctacttttagctgcttctctgattcttgagtgatctccaagtgcagaaggagagggaggaggagatgggggagtgcggcggcggcgagtacaggtgctgggaggagcttctgccggacgcgctggggctcgtcttccggaacctgccgctccgggaggtgctgacggtggtgccacgggtgtgcaagtcgtggagccgggtggtggccgggccgtactgctggcaggagatcgacatcgaggagtggcggcagcagcagggcaagcccgagcagctcgtccgcatggtggagatgctcgtcgcacgcagctgcggctcctgccgccgcatcagcgtctccggcctccccggcgacccgctcttctccttcatcggagaccatgcacgggcactgaggacgctggagattccacggagcgagatcagcgacgcggcggtggagagcgtggcgccgaggctgcccaacgtgacgttcctggacatcagcagctgcaccaagatcggggcgcgcgcgctggaggcgttcggcaagaactgcaagtcgctggtggggctccggcgggtgatgcacccgacggacgtcgccggcaaggcgtgccagcgcgacgaggcgcgcgccatcgcctgcaccatgccgaggctccggcacctggagatgggctacatggtgatcgcgacggatgcggtgctcgacatcctcgcgcggtgccgcgaactccggttcctcgacctccgcggctgctgggccgtcgacgacaagttcctgcaggagaggcacccggggctgagggtgctcggccccggcgtcgacgactgcttcgagaacagctacctggaggagtgctccgactactccgacgactcctccatctactcgtgggagctcatggaggacgacgacgacgactactacgccgtcgggagcgacgacgaggccatttgggacgacggccagggcctcgagaacctggaggtcaggttctacggcggcggcttcagcgagagctatgctggcttcgattggccaccatcaccatgaccatgagagcagctcagctcagctcagtccctgacctcactgtccttgctcttcctctcgagccgtgtacctaagcttgcagttgcagtctcgcagatgtgttgttgtactctgtgtgtgtgcgcgtgtgccagtgtgtcatcagcatcactagcttgcagtgcagatatgtgtgagtgaacttctacggctagttgttactactactacatccagatgtaaactttggtgtttacatg

SEQ ID NO: 27976 - DNA, 2102 bp, Oryza sativa
  ref <308>: DATABASE ACCESSION NUMBER: AK103418
  ref <309>: DATABASE ENTRY DATE: 2002-08-28
gacatcatcgccttcgcttctcctctctccgccccacactgtcggaagtcggaagcaaagcggcggcaccgcgcgagagaggcatggcgacgaccgcgaccctccccttctcctgctcctccaccctccaaaccctaacccgcaccatccccctccgcctccgcctccaccgccgccgcttcctccaccacctcccctccctcgctgccctcccgaggctcccgctcccgcgacctcccctcctcccccacgcgcgccgccacgtctcggcgtccgcggcgcccaacggcgcgtcctccgagggggagtacgactacgacctcttcaccatcggcgccgggagcggcggggtccgggcctcgcgcttcgcctccacgctctacggcgcccgcgccgccgtctgcgagatgcccttcgccaccgtcgcctcggacgacctcggtggagtcggcggcacatgtgtgcttcgtgggtgtgttccaaagaaattattagtgtatggatccaagtactctcatgagtttgaagagtctcatggctttgggtgggtgtatgaaactgatccaaagcatgactggaacactctgattgccaacaaaaatacagagctgcagcgccttgttggcatttacaagaatattttaaacaactcaggagttactctaattgaaggccgtggaaagatagttgatccacatactgtaagtgtagatggaaagctctacactgctaggaacatacttatagctgttggtgggcgaccatcgatgccaaatatcccaggaatagagcatgttatagattctgatgctgcactggatctaccttcaaaacctgagaaaattgcaatagtgggaggtggatatattgctctggagtttgctggaattttcaatggcttaaaaagtgaggtacatgtgtttattcggcagaagaaagttttaagagggtttgatgaagaggtcagagatttcatcgctgaacagatgtctctaaggggcatcacatttcatactgaacagagtcctcaagctataaccaaatcaaatgatggtttgctatctctgaagacaaacaaagaaactattggtgggttctcacatgttatgttcgcaacaggtcgtaaaccaaacacaaagaaccttggactagaggaggttggggtgaaattggacaagaacggagcaataatggttgatgagtattctcgaacctcagttgattcaatttgggcagtgggagatgttactgatagggtcaacctgacaccagttgcacttatggaaggtggtgcatttgcaaaaacagtgtttggtgatgaacctaccaaaccagattacagagctgtaccatctgccgttttctcccaaccacccatcggacaagttggtcttactgaagagcaggctattgaggagtatggagatgttgatatctatacagcaaacttcaggccacttagggcaactctctctggattacctgatcgcattttcatgaaactcattgtgtgtgctacaacaaacaaagttgtaggagtacacatgtgtggtgaagacgcacctgagataattcagggagttgcaattgctgttaaagctgggctgacaaagcaagattttgatgccactattggcattcacccaacatctgcagaggaatttgtcacaatgagaaatgcaactagaaaagttcggagaagcacaacagatgaggtagaatctaaagataaggttgttactcagaactagtacagataggaggcattctcagagggacttctctacttccgagcagctgatttacactgggcggacaatttttttttgtagcggtatccacggaaaggaaacccatgacaggaagccagcaaacttgtatcatagcgctgactggcattctctgatcccctttttgcatctattgtagcttgaacacggtgatacactattagctgctgttttccttctcttggttgaaataagtgctgcaccatgtgagtaccacagcctggaaattttgtaagaaaaaaaagaaatattattttggtagtacaactcagcctaatctgaattttacatcatatctgtgctagcatttcc

SEQ ID NO: 27977 - DNA, 957 bp, Oryza sativa
  ref <308>: DATABASE ACCESSION NUMBER: AK103419
  ref <309>: DATABASE ENTRY DATE: 2002-08-28
gagccgccgccacgtgccgcattgatggtcccggcaaccatccagcgcgtaaccgattccctgtacattcggccgcgataactatctctttctcccctataattaatctcgccggagtcctcgccgcgaacccaccaccactgcaatctcgccccgccgcacgcactccactagctaccatcttgaattcttgattgctcggccggcacagctatgtcgcgcgccgtagttgtggtggtggtggtggccgtgctggcgctggcgtgcggcgcggcgtcgcagtcgccggcgccggcgccggcggcggggccggcgtcggactgcgggtcgtcgatcacggcgctggcggggtgcctgacgtacatcacgccggggagccccgaggcgaggccggccaaggactgctgcgccggcgtgaagagcgcgctgggcagcccggccgccgtcgcctgcctctgcggcgcgctcggccaggacttcggcatcaagatcaactacacccgcgccgccgccctccccgccgcctgcggcggcgactcctccgccctgagcaagtgcaacaagaaatttcccggtgcctctcctactggagcacccgcaccatcttcttccggttctgggtcaggatcaacaccggccaccggcacgccatcttcaccgaagtcggcggcggcccaatctccggtctcggcgatgctcattgtagccacggttgctgcacctctgctttcttactattacctctgaagatttttaccacatatgatctagtttctgaaacgctgtgatttgtatgcgcattgcgctgtgatttatcagtgactcttttagggagagatctgctaatgttgacttctatagccgtgcccgtggtgccatttctcactgtttcctggattgctattagtttgtacaatattgggatggttcattcagaataaagtagaaaaatgaagc

SEQ ID NO: 27978 - DNA, 898 bp, Oryza sativa
  ref <308>: DATABASE ACCESSION NUMBER: AK103420
  ref <309>: DATABASE ENTRY DATE: 2002-08-28
gaccctctctctctcttctccaccaccacctccatctcgcagtcgcagtgccagctaaggccttgtacagggcttcgctccccacacgttttcttctccccctccacatctcccctctcgccgccgccgccgccgcattccgttcagggacttctccgccggcgccatggctgccgctgcaaggttcttggcggtcttgctcctcgttcttgctgtcgcggcggcgtcttccgcggcggcgtcgttggctggcggcggcgaccgccacctgcagctggggatgctgtccaccggcggcgagtgccggggcacggtgggggagtgccttgaggggggagacgtcgacggcgaggagggggagctcgggtcggcgtccggcgaggcgcaccgccgcgtgctcgccgggagagggtacatcagctaccagtcgctgcgccgcgacagcgtgccgtgctctcgccgcggcgccagctactacaactgtcgccccggcgcctccgccaacccctaccaccgcggctgctcccgcatcacccgctgccgcggctgatctcctcctcctcctcctcctcctcctgcgccgccgccgctggatccgccggagaagatggcatcgtcgtcgccaggttaaaatacaaaaaaaaagagaggaaaaaacaaaataatcgagctgttgttcttgtgttcttgcagtgccactactcctacctctactatttattactattagctactactattaattaatatattcctttgtttgatttgctgctgctaatgatgctgctgttgtatttgggatcttattgtttgtgctttgtaaagtaagagagatttgtgccccactatggctggcttaattatcaagagatatatattctttcttattctttttttg

SEQ ID NO: 27979 - DNA, 1818 bp, Oryza sativa
  ref <308>: DATABASE ACCESSION NUMBER: AK103421
  ref <309>: DATABASE ENTRY DATE: 2002-08-28
gagtgctcggcacgtcggttgttgctgttgctgctgctgctcctcccgttttccgatcgcagccatgggaacccgcagcgtggccttggtgctcctcgcggccgtgctgctccaagccctcctccccgcttcggcggcggagggtttggtgcggatcgcgctgaagaagcgcccgatcgacgagaacagccgcgtcgccgcgcgactctccggcgaggaaggggcgcgccggctgggcctccgcggcgccaactcccttggcggcggcgggggtgagggcgacatcgtggcgctgaagaactacatgaacgcgcagtacttcggggagattggcgtcggcactccgccgcagaaattcaccgtcatcttcgacactggcagctccaacctctgggtgccgtcggccaagtgctacttctcgattgcgtgcttcttccactctcgctacaagtccggacagtcgagcacttatcagaagaatggaaaaccagctgccattcagtatggcactggttcaattgctgggtttttcagcgaggatagtgttacagtaggtgatctggttgtgaaagatcaggaattcattgaagctaccaaggagccaggtcttactttcatggttgcaaaatttgatggcattcttgggcttggatttcaggaaatatccgttggagatgcagtacctgtgtggtataagatggtagagcaaggtcttgtcagtgagcctgttttctccttctggttcaaccgtcattctgatgaaggagaaggtggtgaaattgtgtttggaggaatggatcctagccactacaagggcaaccatacatatgttccagtctctcagaagggatattggcagtttgagatgggcgatgtcctgattggaggaaagaccacaggattttgtgctagcggttgttcagctatagcagactctggaacatcattgcttgctggccccacagccataatcactgaaatcaatgagaagatcggtgctactggggtagtcagccaagaatgcaagacagttgtttctcaatatggacaacagatcctagatctgttgcttgctgagacacagccatcaaaaatctgctctcaggttggtctgtgtacttttgatgggaagcatggtgttagtgctggaattaagagcgtagtagatgatgaagctggggaatcgaatggtctccaaagtggtcccatgtgcaatgcctgtgagatggctgttgtatggatgcagaaccaacttgcacagaacaagactcaggatctcatcttgaactacattaatcagctctgtgacaagctcccaagtccaatgggagaatcatctgtggactgtggcagccttgcatccatgcctgagatttcattcaccattggaggcaaaaagtttgcactgaagccagaagagtatattctgaaggttggtgaaggagctgctgcccagtgcatcagtggattcacagccatggacatccctcctccccgtggtcctctctggatcctgggtgacgttttcatgggtgcctaccataccgtgttcgactacggcaagatgagggttggcttcgcgaagtcggcctaaacgtgttgttgtcacgttcctaatgacgaggtggacgcatacgccgagagaagaagaccgtagcttttaactagcgtatttatccggcgatgtgtgtatatatgcatgctacataacatgtttatgttttccaaggcctgagatggcgcccgtctattttagcttggcaagaatatctcggaccagtctctgttcgaattctcgtactgatatgtgaacttctg

SEQ ID NO: 27980 - DNA, 2089 bp, Oryza sativa
  ref <308>: DATABASE ACCESSION NUMBER: AK103422
  ref <309>: DATABASE ENTRY DATE: 2002-08-28
gccctcccctccctaaaaccctagcaactactagggtttctctctctctcctccccccctacacagccgccgctgcacccgccgccgccgccgccacaccaccgatggggaaggcgagcaagaagtccgtggccgtggccgtcgcgcccgctgctgtgccggccaaggggaagggcggcaagaagcgggaggcggaggacgagatcgagaaggcggtgagcgccaagaagcagaaggccgcggcggcgccgccggccaaggccgtccccgcgcccaaggcggacgccaagaaggccaagaagcagccgccgcccaagaaggccgcgagcagcagcagcggcagcagctctgaggaggactcgtcggagtccgaggaggaggtcaaggtccaggtgaagaagactactaagcctgtcaagcaggagtcttcttctgatgagagcagcgatgagagctctgatgatgaggatgctaagcctgcggatccggttgctaataatggtcttaagaaaggcaagccagcgagcagcgattctgagagtgattcagacgatgaaatggatgaggacgagaaacctgctgctccagtgaaaaaaacttctgtgactgcacaaaagaaaaaagatgattctgacagctctgagagtgagtcagatgagagtgattcggacgaggatgtgcctacaaagtctaaagcccctgctgtagctgccaagaatgatgattctactgatggttccgagtccgaaagtgactctgaggatgaggatgctgcacccaagggtgctgccaagaaggaaagcagcagtgatgaagaggatgacagttctgaggaaagctctgatgatgaacctaaacaacctcaacaaaaaaaggcccaagaggaatcctctgaagagtcttctgaagaagatagtgatgaagaggatgaaaaattggccaaaactcctaagaagaaaacgcctgctgccaccaaatcacaaaatgatgaacctaaaactcctgcgagtaaccaaagtcagggaactgagtcagcaaccctttttatgggcaacctttctttcaatttaaatcaggaccaagtgaaggaatttttccaggaagttggtgaggttatcagtgttcgtttggctacacatgaagatggctcctccaggggctttggccatgttcaatttgcttcatctgaagaagctaagaaggcgcttgaattgcatggctgtgatctggatggtcgtccagtgagacttgacttggctcatgaaagaggtgcatacacccctcacagcaggaatgatactggatcattccagaaacaaaacagaggttccagccagtctatattgtcaagggttttgattcatctcttgaggagagcaagatccgagaatctcttgaaggacattttgctgattgcggagagatcacacgagtctcagttcccatggatcgtgaaactggtgcaagcaaagggatagcatacatagattttaaggatcaggcttccttctcgaaggcacttgaactaagtgggtctgaccttggtggctacaacctgtatgttgatgaagccaagcctaaaggagatagccgagatggtggtgggagaagaggtggccgatctggtgacagatttggcggccgatctggtgacaggtttggcggccgatctggtggtaggtttggaggtagagatggtggcagaagaggtggacgtggtggcagagatggtggcagaagaggcggacgtggcggttttcagagcaggcagagtgctggtacagctagtacaggaaagaagacaacttttggagatgagtaatggagcttgatcttgcacagctacatgcctacatcttatgcagctgtcaaaaggactgcctacctgcaactgtagtgaaatgcgatgagttctactcccatggtttactctatattgccgccgaatggctgtaccagtgaacaagttactgtgctggtatttttgtctgcagttttggtgtgtttccggtgattgtactggacatctagcgattagtgtaatgcaaggatttcctattacattgttatacatcaagtatttgcttcc

SEQ ID NO: 27981 - DNA, 3531 bp, Oryza sativa
  ref <308>: DATABASE ACCESSION NUMBER: AK103423
  ref <309>: DATABASE ENTRY DATE: 2002-08-28
gacgtataccgaacgcgagggacggcggcgatccgcttgacacagaagatggattctggagcagcggcgaccagcgaagcaaagatccgatcgaggtggcggcggcgcgcggtctcctcctcgtcctcctcggcaatggtaagcttgacttcccttgcttatgctccttccttgtcctggatcttggcttgcatatcccatcctcatcccacccaaccttcgttcatctatcccatccccccggcccccttcttcttctttttttttgttgtggttacattgctctgattcatgcccattaggtttttcaccaaaatgttggaggtgcattgaaattaacttgcagtattgaagggctccatgatacgcatcacacatttctcttcttcatgtgcaacctgtgttttcctcaatttcatcaatccaagaataataataagaaaataaatattcaagttcaattcttaaaaaaaggatttctcaggaataatcgtacttctgtcgtagtacacatttagcatttctcattatgagcaaatggatatcctaatgtgtaggtcgttttagatttctctactcttctctaaatgtatgttgttatagaactttgactctttgcggcatttgtcccttattttttcgtcttatgcccttgctaattgaatatgactttcctcatgcatatatgagatatcatttccaatgtgtaataactaaagggcaactattcgtttaaaaaaaaactaaagggcaacaaggccattttaagtttttaacagtttcttaattcctatgcacaactctaaaacaacctttgtttggaatcagacaaagtactataccgttttgcggattgaaaggtaacagctatgctaatgatttatcttgcaaaaagaaagaaaaagctaaggtggtaattagttttctggtttaccaatctgtgcattccttttgttaacttgtatacatacattttatacttaatgatgttcttgcaaactgtatttcaaaacaaactgatgataaccttctaaaagaaacaaactgatgatcaccatcttacctgcctctcatacctctactggaaaacatgttgttcatattgctcctgctcactaatacaagctgcaggttgttgtatattaatattaccgaaaggtacgtcttctctttgttcttgaaaacaagatgaggctctacatccaattatgctttcttttgaccgagtggggcaactcttttttatgtgctatatcccccaattcttcaaaaacttgtcattgtaactgccgaactgtttcttgctttaattgctacttggtttgaataagtctacctgagtgaataaagctgcattggtgcattcttgtgagtccaatgttcttttagccctctaatttcatgcagagttttccatttaaaatttactgttgggagactattcttgtggctattgatatttaggatcttaatgtttccttcagttcgttggtggggtctaggcacctatagttgcatgccatggattgtattattcaagtctgtaaacatgtttgaataaagcttgtgctctttcatttttctctctaggttaattcaagttataaacgtagctctgtatgtactgaaatgcctggtttttgtgctaagtttaagttcatcaggaggtttgtgactctgttaaatttgggaatgatctggctcatgaggttggtgttgtgaacttgcgatacttttctttgttgccactatattcgaccaggccagtactgatggctggcccctttggtcattgaactgccttgctgcttacacgcaaaaataaaaggttaatactgctttaccagttcatttcagaactccgttgcaactataattcaatgcttgatggtctttacatctgtgtttttccacatgatacagtacacattttgttactcttgcattgcaactatcaatccctgacaaagtaaccagtcactgtcgtagatatattcatatataatcctttgctcaggaaagacaatgtgttttgtcgtttgtttttgtaaatagctaatgctgctgtccggaacttctgggtctcatgggagttgaatcatgcataactacaatgtctcttgggtcatccactacaacacactgactaaatattttagctgtttttttcatctttactttgttcgagttatgttttagttcattagagtgaaggatagagtaaccaatcatgagataaatttatccttaggccaggagtatgcttttttgtgtacttatcaatttaatggttaagaggaaattatagtaatatgtaactgataaaatagtaagccatatatggaacaatacatatccggcatttcaaatcataagatttcttaacttctactaaaaagttttgtagattccttatattgtttcctaattttctagaagttgttgggtggttaatctatgttaggtattgattattcattgtcttttcgtggaacagtaatgatgatttcatagaacacattttggttgctaatggttttttggatcatgtgtttaagtgccatgtggaacaaggatggccgtttagtttgctatgcaatacagtcaacatctgcttctccatatctactgtccttcgtgtgagagaggggggacatgaggttgccacagatgaactttgtttgccatgagcaattcaaatggcttatcgagggattttgggtagagagctaattgaaatacttttgtattttgtctactggtatttattaatcgtgcagttcaagctattgacgagtaaattggacagggtctagtgtcaaacgaaaccagtactagaaactcacctgatcctgtgtctgcaatctatccccgggaagtggtacacatgtgaactaagtagggtctgtttggttgttcctgtgaggacaggacatagcttgggggtggtttggtcattgtgccctggctatgaacctaaaatggaggaaaataaataagccagttggagagtggcattttaatgtgtacaatatctagagtggccttttatcgaattccactaggagtgacactccatcaattttatcatgctgatagtagttcaagttgtcgtattgcttgagaatgagctggagttgtttgttggattgctgtaggtatgattgttgctgccatttgagtaaatcgggaaaatatttcaaagttaacctgacttgctaaagtacaggaaggaggctgaccagtggcttgcatcaccaaagcaatcgactcagtcttgaaggaaattggagatttcgagaactggatgaagatcatggattttgattgtaaaagtataaatgcagccatccctaacatttaccaatcttgactcagccagtggctaatgttaggaagagattttatcttgctcctcacttaacaatttttatctcagatatgaactctgttgtatagatctgtttttctggtgttctgtacacaattgaaaaacaaaagcttgccaatcactttttactgtcaaactat

SEQ ID NO: 27982 - DNA, 666 bp, Oryza sativa
  ref <308>: DATABASE ACCESSION NUMBER: AK103424
  ref <309>: DATABASE ENTRY DATE: 2002-08-28
gcttcgccgacgccgccgcctcctcgagagagagagagagattgagagagagctccgcgggagagcgcgtcgaagatggtgcagcggctgacctaccggaagcggcacagctacgccacgaaatccaaccagacccgcgtcgtcaagacccccggtgggaggcttgtgtaccagtacaccaagaagcgggcgagcgggccgaaatgcccagtcaccgggaagaagatccaaggaattccacacctgagacctgctgagtacaagaggtccagattgtcaaggaatcgcaggaccgtgaaccgtccttacggtggtgtcctgtctggtactgcagtcagagagaggatcatccgggcttttttggtcgaggagcagaagattgtgaagaaggtgttgaagatccagaagaccaaggacaagtcagctaaatgattgcaagatagagacattgccgcgatgtttaagcttctccaaatttgtttttaagcaatcaagagaatttttcttctggatttgggggaaatcccgtttcctagtgctgctagtatgtgagatcaaatcgacatgattgtttaaattttgagcgctagttctctagagtactactacaaccttgtgtggatcctttgatgcaagttttgaaactcccaagtcccaagtttgcgc

SEQ ID NO: 27983 - DNA, 1084 bp, Oryza sativa
  ref <308>: DATABASE ACCESSION NUMBER: AK103425
  ref <309>: DATABASE ENTRY DATE: 2002-08-28
ggctcgcgcgactgaaaggagcgcctcgactcgcatctcgccgccgcgcagctaagctagggttttccgccaccgccgatctcgcccccgcccccggccagccatggacgcctctctcatgggcgccccctccgccgcagcgggagacaatcccacctccggggagcaccggatggggaccaccatcgtcggcgtctgctacgacggcggcgtcgtcctcgccgccgattccagaaccagcaccggaatgtatgtggcaaaccgtgcgtcggacaagattactcagctaactgacaatgtgtacatctgccgctctggatctgctgctgatacacaagtaatttccgattatgtacgctattttctccaccaacacacaattcagcttgggcagccagctaccgtgaaagttgcagccaacttaattaggttgttggcttatcagaacaagaacatgttgcaagctggcatgattgttggtggatgggataaatatgagggaggccaaattttctcagtcccccttggtggaacaattctgaggcaaccatttgcaatcggaggttcaggctctagttacctctatggattgcttgaccacgaatggaaggagggcatgtcccaggaagaagctgagaagtttgtggttaaggtagtttcccttgctatagcccgtgatggtgctagtggaggggttgttcgtaccgtcactataaacgcagatggtgtttcgaggaaatttcaccctggagacaaactacaactgtggcatgaagagctggagccccagaactcgttgctggacatacttgcagctgggaaccctgatccgatggtccaatgaatctgccctccagccatacacctcccttaagcaactttcttctgtatctgactttcactagatttactgaagaactggactgcagaattatgttcagctgtgcgcaattatctagtgcaagatgcttcttgtgctgtatgtaatttcttttcgttaaggaagttcaaaaatatcatttagactttgatttgcctccttttgtggttttgatgcatatggcttgcccctcgtattggcagt

SEQ ID NO: 27984 - DNA, 2413 bp, Oryza sativa
  ref <308>: DATABASE ACCESSION NUMBER: AK103426
  ref <309>: DATABASE ENTRY DATE: 2002-08-28
ggttcactcgttgactggctttggcgctttatttatgtcgggcgatgccatcaggcggctactcctcgccggcgtcgcccccagcaaccgccccccgccgctcaccgtcaagctcctccacgcccgcctcctccgcctcgacctcctcgccgccctctccccgctcctcctccgcgccctctcctcctccgcccttcacctccacgcgctccgcctccactgcctcctccccaacccctcccacctcaccttccccatcgccctcaagtcggcctcccgccttccgcaccctctccgcgcgggcgagcagctccacgcgcgctccctcaagcttccctcccacaccaacccccatgtcctcacctccctcctcaccctctacgcaagatgcggcctcctacaccgagcccagagggtgttcgacgaaatgccacaccccagcaccgtctcctggaccgctctcatcactgcctacatggatgctggggacctcagggaagccgtccatgtcgcaaggaatgcttttgcgaatggtatgcgaccggacagcttcacggccgtgcgtgtcctgactgcgtgtgctcgggttgcggatttggcaactggggagactgtttggagggctgccgagcaggaggggattgcacagagcgtgttcgtggccactgcggcggtagatttgtatgtcaagtgtggggagatggcaaaggcgagggaggtgtttgacaagatgcgggacaaggatgcagtggcctggggcgccatggttgggggatatgcttccaacggccacccacgagaggctctggaccttttccttgcaatgcaggcagagggagtgaggccagattgctatgcggtagctggggcgctatcagcctgcacaaggttgggtgcattggatcttggacggcaggcaatcaggatggtggactgggatgggtttcttgacaatccagtcctagggactgcattgattgatatgtatgccaagtgtgggagcacggccgaggcatgggtggtgttccagcaaatgaggaagaaggacattattgtttggaacgccatgatcttggggcttggcatgactggccatgaaaagactgcatttacccttatcggtcagatggagaagtccggtgtgaaattgaatgacaatactttcattggcttgctctgcagctgtacacacactggcctcattcaagatgggcgacggtatttccataacatgactaagctataccacatcagccctaggattgagcattacggttgtatagtcgatctgctcagtcgcgctgggttgttgcaggaggctcatcagcttattgatgatatgccgatgccagcaaatgctgtcatattgggtgcacttcttggtggctgcaagattcaccgaaatgcagagcttgctgaacatgtattgacgcagctcattcgactggagccctggaattctgggaactatgtcatgctctctaacatatactctaacagaggcagatgggaggacgcagcaaagcttagattggacatgaaggaaaaaggggtcgagaaggttcctgcatgcagctgggttgagtttgaaggtaaggtccatgagttccgtgtcggagacaagtcacatcctctttcagatcagatttacaaaaagctcgacgaattaggattggaaatgaaaaccatgggttatgaaccaacaacagaagtggtgatgtttgatgttgaagatgaagagaaggagcacacactagtgcatcatagtgagaaactagcaattgcatttaaccttctcgtcactggaccaggggagaccattagggtcaccaagaacctcagagtttgcagtgactgtcacactgcaattaaactcatatcgaggataactcatcgggagatcattgtccgagataacaatcgatttcattgttttagagatggttcttgctcctgcaatgactattggtagaactagaaagtagacaacaatttgttgagagctgtgattggtggatagaagagtataaagcagatgatgatgggagagtataaaccagatgatattatgtttggaggcacttctatgcttcacttcttttgaaatgcacaacttttaaagcacaaataaaggatggattgcagttgcagctaaatattccttcaagtgcttcatgatttgtgcaattatttaaacagaaaggaatatatatctcttcaagtgattggttccaaccaagacacacacatgtaggataaactatttcttccccttcagacaatctgcaccggtaattgttgatccttctgatgcttcttttgaatgttgtacttattttcattctcttttgttctactgctatatatgtttttgacttctcaacagtggtaattattgtgaaaactttttccg

SEQ ID NO: 27985 - DNA, 1389 bp, Oryza sativa
  ref <308>: DATABASE ACCESSION NUMBER: AK103427
  ref <309>: DATABASE ENTRY DATE: 2002-08-28
gaaatctccctcaccacagggcacgataccgccgtccgttcgcggcgcgacccttcgccgccgcgccgccgcgccggcgctatgcagcgcctccaaaagcagctccttcccgccctgcgcgccgccttccctctccctgcctcccacttcagcagccgccttctctccgcctccaccgccaccttatcccccacccgcttcgtcgacgaggacgccctcgtcgccgcctgcggcctcaccggagccgaagccctcaaggcctcgaagcgtctacagaaggtaccctcaaatctagacgccgccctcaccttcctcgcctttctcgccgacttccgcctctccaaagacgacatcgccgccgcaagctcacggtacccgcggttcctccatctcaaggtggacgaaaccctaacctcccaagtagcccggctccgggatatcggcctatccactcccgagattggccgcctcattaccatcgccccctgcatcctctccaatcctcgcacgatctcccgccttgaattctacctctcctttttgggctcctaccccagggtgcactccgcccttcggaacaattcctcccttctacggcgaaacaacatcgagagtgaggtcaagcccaacattgcattcctggagcagtgcggcctaactacttgtgatattgccaagatcctcatgtctggctctaggatactcattatgcagccagagcatgtcaaggaaattgtggcgtgtgcagacaagttcggtatgccccgtgagtcagctggtttcaggtatgccctgatggctgttaccggcatcagcccagtgagggtcagcgcaaacttgatttcttgaggatggttattggatgctcagatgcccagctacacattgcggtgtctaggtttccactaatcctgacatactcagaagttaagctgagccgctcactggaattcctgaaagcggaggttgggttggagcctcagtacattgtgctccggccagcattgctcggctatagcattcagaaacggctgatgccgcgttatcatgtcatgaaggttctgaatgaaaagggcctgctgaagaaagacactgatttttactctatggttaaaatagttgaagagagcttttttaagaagttccttctcccataccacaggtctgttccaggacttgaaaaagcttatctggctgcccgtgaagggaaaatgtttcctgaaatctaaaacagagatgctggaggtttattctgcctaggaacttgataatgttctgcattttacatcttgctcagttcttagatgatttctagcgatctgtatttgtgatttcatctgtgctttttgagacaaacatctaattttagtgcactcttgttctcatttt

SEQ ID NO: 27986 - DNA, 2669 bp, Oryza sativa
  ref <308>: DATABASE ACCESSION NUMBER: AK103428
  ref <309>: DATABASE ENTRY DATE: 2002-08-28
ccgatgctgctggatgagaggagatcgctctcgccgccgccgccgcagcagcgcgccccgcgatttgatctctccccgtatcttgtactaatgctggttgtaactgtcataagtttttccttggctatatggcagtggatgaaagctaccgtactccaggaaaagatcagatcatgctgtagtgttagtactgtggactgtaagacaactactgaggcgttcaagattaacggacagcatggttctgattttatcaactccgcggactggaatttagcttcctgcagcagaatgcttgtttttgcgatacctgtattcttggttaagtacattgatcagcttcgacgaaggaacacagattccattaggctaagaagcaccgaggaagaagtgcctctgaagaagaggattgcttataaggttgatgtgttcttctcaggacacccgtacgcaaagcttcttgcgctcctgttagccacaataatcctcattgcttctggcgggattgcgctttatgttgtcagcggcagtggattcctggaggctctttggctttcatggacttttgtggcagattcaggaaaccatgctgatcaggttggcctgggcccaaggattgtgtccgtgtcgattagctctgggggtatgctggtgtttgccacaatgcttgggcttgtgtcagatgcaatatcagagaaggtagattcctggcgcaagggaaaaagtgaggtgatagaggtcaaccatatactaatcctcggatggagcgacaagttgggctctctcctgaagcagctagctatagcaaacaagagtattggtggtggtgtcgttgttgttctggcagaaagagacaaggaagaaatggagatggacattgggaagctagagtttgactttatgggaacatctgtaatatgtagaagtggcagtcctctaattctagctgatttgaagaaggtttctgtttctaaagcacgtgctattattgttttagcatccgatgaaaatgcagaccaaagtgatgcacgggctttacgtgtggtcctgagcctgactggagttaaagagggtttaaggggacatgttgttgtagagatgagtgaccttgacaacgagcctttggtgaaactggttggaggtgaactaattgaaacagttgttgcccatgatgtgattggacgtttgatgatacaatgtgcactccaaccaggcctggcacagatatgggaggatattttggggtttgaaaacgcagagttctacattaaaagatggccagaattagatggcatgcgatttggggatgtcttaatctcatttcctgacgctgttccatgtggagtaaagattgcttcaaaagctggaaaaatcttaatgaatcctgataatgattatgttttgcaagaaggtgatgaggtccttgttatagcagaagatgacgatacttatgttcctgcctctctaccacaggtgcgaaagggttttctacctaatatcccaacccctcctaaatacccagagaaaattttgttctgcggttggcgacgtgacattcatgacatgataatggttctagaagcatttctcgctccaggttctgaattatggatgtttaacgaggtgccagagaaggagagggagagaaaactgactgacggtggtatggatatttatggactaacaaacattaaacttgtacataaagaagggaatgccgtcatcaggcggcacttagaaagtttgcctctggagacattcgattctattttaattcttgcagatgagtcagtggaggattccatcgtacattctgattcacgttctttagctacacttcttctaattcgcgacattcagtctaaacgtcttccatcaaaggaactaaaatcacctctgcgttacaatggcttctgtcacagctcctggattcgggagatgcagcacgcatcagataaatcaataattatcagtgaaattctggattccagaaccagaaaccttgtatctgtctccaaaatcagcgactatgttctatcaaatgaacttgtcagcatggcattagcaatggtagcagaggacaaacaaatcaacagagttcttgaagaactttttgccgaggagggcaacgagatgtgcatacgttcagctgagttttacctctatgagcaagaggaattgagtttctttgatataatggtcagggctcgtgaaagagacgaggttgtcattggctaccgccttgccaacgatgaccaggcaatcattaatccagaacagaagtctgagattaggaagtggtcgctagacgatgtttttgttgtgatctcaaaaggtgactaattttacaatagcacctcacttttttcgagttagtaagtatatattctaacactagtgctgctaaccaatgctaactgaaatgctttaagttgctaaccaggcaaacacacgtcacagtacagttctgatctcatatgttgctagctctgtacatgttgatttgccatctccatagcatttagttgatcttaacataaataattacacatcagcatttgaaactgttgttactaattgacattacaaaattttcagtgcgtcgattcagcagagataatttgtaaattgtaactactgtttcattttgaagagcatgctaatcattg

SEQ ID NO: 27987 - DNA, 996 bp, Oryza sativa
  ref <308>: DATABASE ACCESSION NUMBER: AK103429
  ref <309>: DATABASE ENTRY DATE: 2002-08-28
ggcgagcttatcacttatcatcaatcggcgcctccctctctctcgctcaccgcctccttctcctcgcgatctatccaaacaaggggctcgctaagatcggcatgtcggactctgaggagcaccatttcgagtcgaaggccgacgctggggcgtccaagacctatccccagcaggccggaaccatccgcaagaatgggtatattgttatcaagaaccgcccctgcaaggtggtggaggtttctacctcgaagactggtaagcacggtcatgccaagtgtcactttgttgccatagatatattcaatggtaaaaagcttgaggatattgttccttcgtcccacaactgtgatgttccacatgtgaaccgcacagagtaccagctgattgacatatcagaggatggattcgtgagccttcttactgagagtggtaacactaaggatgatcttagactcccaactgatgacagtctcctgggtcagatcgagactggatttggtgaaggcaaggatcttgttgtgactgtcatgtccgccatgggggaggagcagatctgtgcgctgaaggacattggccccaagtaactccctcaagtggaaggcagaacagaggggcaactccctcaagtggaaggcagaacagaggggtaactccctcaagtggaaggcagaacagagggatccttatgtatcaaacctaaactaaaaaacaaagacatgtattgagaaggaatgctacaaaagacatccacccagcttgaagccgcagtaacaagtgcagtgattgctgggtgtggcattatctgattaccgctaccccatcatgacatttgggatcctgtattttccatggttttatttgtgccctctgtttggtatcaataattgatttggaacggtggaaaccatatactgaagctgaagattatcattgggtcatttcgtgcctatggatttttctctgaaaatttccctagtcactgtttagtctgcaacc

SEQ ID NO: 27988 - DNA, 997 bp, Oryza sativa
  ref <308>: DATABASE ACCESSION NUMBER: AK103430
  ref <309>: DATABASE ENTRY DATE: 2002-08-28
aaggtgatcaatcggcggaaaatgcaattacttggtgtcgcttgcctgcttatagcttctaagtatgaagagatatgcccaccccaagtagaagagctctgctatatttctgacaatacatacactaaggatgaggttttgaaaatggaagcttctgtcctgaaatacttgaagtttgagatgactgcacctacaacaaaatgctttttgaggagatttctacgagctgctcaagtatgccatgaggctccagttttgcatcttgagttcctagctaattacattgcggagctatcacttctggagtacagcttaatttgctatgtaccgtcacttatagctgcgtcttctattttcttggcgaagtttatccttaagccaacagagaatccttggaattcaacactttcattctacacacaatacaaaccatccgacctatgcaattgtgcaaaaggactacaccggcttttcttggttggccctggaggcaaccttcgagcagttagagaaaaatacagtcaacacaagtacaaattcgtagcaaagaagtactctccaccatcaattccagcagagtttttcgaagatccaagcagctacaagcctgattaactccagttactccctgaagtcttgcagtagccccgaatggtaggctgatttgtacagattgctcatgcgcaaggcaagcacacgccacgcgcccttgtgttagcagattggtagattgtacattgtagatgaagtggtagagctgtacatcaagttggcctcatttgtgtatgcacggcaagtgcatttctctggcggcggcttgcttacaaccacagtgcataaagctgctagtcctttcctactctatccattttgcttgctccaagcttgtttgatatgattttaccgtgttactgtaaacaaaatggatatgctggataagagataaatgcctgagggcaagtgaagtatgaatatatttgtccttctcagtgggatg

SEQ ID NO: 27989 - DNA, 2204 bp, Oryza sativa
  ref <308>: DATABASE ACCESSION NUMBER: AK103431
  ref <309>: DATABASE ENTRY DATE: 2002-08-28
ggccaccggctgcaggcggcggcggcggctgaacccctaaacccaatgtcgccggcggcgaggagcctcctgctatcggccgcccgccgtcaacgccgccgcttctcgacggaggccccgtcgtcgactccgcagcagcagctcctccccaaggggaagcggtgggacgcggtggtgatcggcggcggccacaacgggctcgccgccgccgcctacctcgcccgcgccggccgctccgtcgccgtgctcgagcgccgtggcgtcatcggcggcgccgccgtctccgagtccgacctcgtcccgggcttccgcttctcccgctgcagctacctcctcagcctcctccgccccgccctgatccaggagctggagctggagaggcatgggctgaagctcttgccgcggagcccgtcgtcattcacgccatgcctagacggcaggtatctccttctcggccccgacgctgagctgaaccactcggagatcagcaagttctccgagaatgatgccggtgcatacccgaggtacgaggagaagctggagaagttctgcaaactcatggactttgtcatagactcgcctccccctgagatgaggcatgaataccacctctccatggtggacaggatgaaggataaggttgacaagtctgtgttctggagcaaacttcttgggattgtgatgcagcaggggcagaaggacatggtggatttctttgaccttctcctttcaccagcatccaagatcttgaacaactggtttgagggtgatgtgttgaaggcaactcttgcgactgatgctgtgataggttctatggctggtgtccacactccaggatctggttatgttcttctgcatcatgttatgggggaaactggtggccaacgtggagtatgggcgtatgttgaaggtggtatgggttcagtatcgtcagctataagcaaagcagctcttgaagcaggtgtggaaattttaacaaatgcagaggtttcccagatatctgttcatcacacttctgggaaggtacagggggtagttttggctgatggaacagaggtgctgacatcagttgttttatcaaatgcaactccatatagaacatttgtggacctagtgcctgccaatgttcttccagacaacttcctctctgctatcaaaactgcagattatagctctgcaacaacgaaaattaatgtggctgttgacaggctgccacagttttcctgttgcaaagactttaatcctgaaggcggtccagaacacatgggcaccatacacattggatctgaaagcatggaggaaatcgatctagcgtacagggaagctgcaaatggcgtctcatccacaagacctgttatagaaatgacgattccttctgtgttggataagaccatctccccaccaggccagcatgttattaacctttttgttcagtacacaccatacaaactttcagaaggcagctggcaggattctaatgttagaaaatcctttgctgaaagatgcttttccttgattgatgaatatgcaccgggttttagctcatcagtggtaggctatgatatgctgactccacctgatcttgaaagggagtttggcctaacaggtggtaacatctttcatggcgcaatgggcttggattcacttttcctcatgaggcctgccaagggatggtcagattacagaactccagtgaagggattgtacctctgtggcagtggtgcacacccaggaggtggggtaatgggcgctccgggccgtaacgctgcctccgttgttttggaagatctcaggacaaaatagatggtgacccgaggaaacatggaaacggtgattgacaccaggctgggtctcgttcaagcactgcactgcaaaagcaaccgaattccatcagaatgaaaagcacctcatcagacatcaggtataaacacctgtgccatgtgagctcacatattaaggaaatggacaaacatttcttgaggagaggcacattttctgaattaattggccgactttctagtttagagaggggaacattctttgccacctgaccctatttcccagtatgaagatattttgcatttgttctcttctatttgcagcctgtctgaaatatattattcatcggattatctacttgattgtaggataaattaaatatttttttaacaattatcaaatatcttggaacaagtggtctatgc

SEQ ID NO: 27990 - DNA, 1490 bp, Oryza sativa
  ref <308>: DATABASE ACCESSION NUMBER: AK103432
  ref <309>: DATABASE ENTRY DATE: 2002-08-28
gctaacctagctcattagccgccgcagctgcaggagagaaaacacgagcagcagtagtagtagtacaacgccacccaccacacagtgtccgtgtgctgcgggtgtggacgcactggcctccacccatctctctcaccgcctctgcagcagcaaaaggcgaaggcacagtacaaagattcagctagcacccaccaccaccccgatttatagccagccacgccatccatggcgaggaagtgctcctactgtggcaactacggccacaactcaagaacctgcagcagcagcgccagcgctggacacagggataccaccatgctctgcgacggcggcgacggaggtggcggcagtgggctgaggctgttcggagtgcaggtccatgtcgctgccggcggcggcggtggaggtggaggtggaggtttgccgatgaagaagagctacagcatggactgcctgcagctggcggcggcgggggcggctccgggctcgctcgtgtcgccgtcgtcgtcgtcctcgtcgtcgatgctcctgtcgatcgacgaggggggcttggagagggcgtccaatgggtacctgtctgatggcccccatggcagaattgtccaggagaggaagaaaggagttccgtggagcgaggaggagcaccggctgttcctcgtcgggctcgagaagctgggcaagggcgactggcgaggcatctcccggagctacgtcacgacgaggaccccgacccaggtcgccagccacgcccagaagttcttcctcaggcagagcagcatcggcaagaagaagcgccgctccagcctcttcgacatggtgccgatttgcgagaacggtgcgcgcgtctcggagcagctgagcggcgaaggcgcggcggcggcggcggcggcgtcgacctcactgtcgctgatgaacacgcacgagacctcctcggacagagtggcggcaattgatctgaattccaccgaggaagatgacacggtgggcgcgtcagggaggccgtttttcccggtggttctgatggagcagcagcagcaggcttcccatggacatggtcaccaccaccactgcacgccgctcgacctggagctcggcatgtccgtctcgtcgacgccgtccatcggcacatgacccggccatgccatgcacaccgtcgtcgttaggagatgctccagtttcgtcggtgcaaggtctgcaggatatagtacacgctgtaaaactgtggctgatatatctgcagtctgatctgtctgccaagtggagtaaagggctggagtattttggcaaatgtttgtagtaattgtaaagctggtgcaagtggagagatcaacgagtagtaccaactgtggatacagtaatgtccgtactactttttaattaattaggttgtgtaatcagagacaccgattctctactgctcatgtcatgtgcgccttgtgttcattggcttttgcttaagttttgggaagattgcaactctgccattgctg

SEQ ID NO: 27991 - DNA, 1526 bp, Oryza sativa
  ref <308>: DATABASE ACCESSION NUMBER: AK103433
  ref <309>: DATABASE ENTRY DATE: 2002-08-28
gtctctctccccatctctctctctcctcctcgactcaccgtctctctctctcccctcccgtctccggcgatctctccggcggcgtctccggcgaccgggccaccgccgccgccgccaaggagcgctccccctcattccccagatcggtagctgtctcgtcgccgtccccgatcctcctcctcttcctttcccccagatccacaccccccccctcgcgtactcgctcttagcctccgcggcgggaggtggtggtggtgtgggcggggggtgagctcgtgagtcagatccggtgatctgtgcgctgttgcggttgccatggacgacttccagggcctcctggcccgcgactttgggctgcgcccgcaggggaaggcggcgcccatgtcggccgcccgcgccgccgcgtcctccggatccgcctggtccaactccagatccgcatcggcgtcctccgccgccgccgccaccgccccgcccgcgcccttgtacgatgacctcttcggggccgcggcgccctccgccccgccgcccaaggccgcgccctcgccctccctcgacgccatctttgactccttcaaggagccctccgccccggatgccccacccaagccgaagcactcgtccatgccggtgtttgacaagccggtctacgatgacgacatcttcgatggggttcccggggtgaagagcagctcctcggcgcggtttgacgatgtattcggtggcagccacgcgccgccgccacctgcgtacgatgatctgcttgggggatttgggagcaagccggaggtgaaggaggtgctgccggaggagaagaggaagcctgagccggccgcttcatcggctgggtttgatgatttgatcccagggtttggcgggaggatcccgatgcgtgccagggagactgttggaactaaagataagaatgtgtccatgtcaacgtctaagccagctagcatggcaagtgacccatttgatgttcttggtacaacttcaacctcaaagcatacatcttcagggatattcacggatcccttggatgaactgggcaggcctgcaaaatctcaagggaaaaaacatgataatactgctgttgacagtggcctattcgaggactcaagcacttttaatcaggtcccaaaatcagaacctctgtttacctcagagttgaatgatgacttgaaagataggaatggctccaccaaagatcgagattcaagtcctgtgcaaaatttttccagaaaaaatacaacccaaaaaccttctgtggagaacttcgaaaatatctttcctaagtcacagtctgctcgatattctgatgttcatgttgacattggtgcctctgattcagagaaatacagtgggaatggtatggatgaccagtctccaagatctgatgagtccgaagatgagatctggcttacagtttctgagattcccctcttcacacagccaactagtgccccaccaccttcaagaacaccaccacctcttgctgttaagcaaaaaccacatggatcacaagc

SEQ ID NO: 27992 - DNA, 1325 bp, Oryza sativa
  ref <308>: DATABASE ACCESSION NUMBER: AK103434
  ref <309>: DATABASE ENTRY DATE: 2002-08-28
gccagcatcttcctcagccaccaacctattctcacttttacacccaacccctccaaaaaagtataaaatcacaacatcacccctctccaccacagctaaaaactactaagcgaggactcgttagacattacagttatatccagggtgcaatctgcaaaagtctcatccccaaatccccaattcttccccgacctctcgctcgcggaggaggagcgagaatccccgaaccctaggcccgatctcccgcacccgccgcgggcgatggacggaggcggagaccccgttgacgagttcctcatcggcggcggcggcgaggacggcgacctcggcgtcttctgcgacggtgtgccgacgctgccctgcgatggaggacttgggattgatgatgtcagtggagatacttgttgccttgaccaatctgttttagggaaaagaggtagagatgaatcatcatcatctggtccaaagtccaaagcttgccgtgagaaaattcggagggatagactgaatgacaggttccttgagttatcttccgttatcaatcctgacaagcaagctaagttggataaagcaaatatcttgagtgatgcagctcgtctgttggcagaactcagaggcgaggcagaaaagcttaaagaatctaatgagaagctacgagaaacaatcaaggaccttaaggtggagaagaatgaactccgtgatgagaaagttactctgaaggcagagaaggagaggctggaacagcaagttaaagcattgagtgttgctcctacaggatttgttcctcatctccctcatccagctgcattccatcccgctgcattccctccatttataccaccttatcaagctctgggcaacaaaaatgctcctacgcccgcagcattccaagggatggcaatgtggcagtggttgcctccaactgctgtggacacaactcaagatccaaagctttggccaccaaatgcttaattaggtgcagactagctatgctgctattcatccattggcagatcaaaatgtgttcggtcttcctggagagtaaaatagtccgcgatgctgtccattacgtggtaaactgttcttttattggagttctgtttttaactcgtcctattgaggggcgatgcctgtaattaatctggatcgtaaccctcttgcctggtgaatgctccacaaactctcatgtccctcgcatgagtttgttcaagtgtggaagttgtgactgtgctattattttagcattggcttggcagtacttgttctgtttctagcaagagtttcgcatgtgagcacatgcatagcaatatagtatgttctaaatt

SEQ ID NO: 27993 - DNA, 4828 bp, Oryza sativa
  ref <308>: DATABASE ACCESSION NUMBER: AK103435
  ref <309>: DATABASE ENTRY DATE: 2002-08-28
gattgctttccttcccctctccgccccattgacgccccgcgccgccgcttcattctccagcaccaatcctcgcccctgtcggcatcgaaaacggagggaagtgcgcgtgctgatgtttaatcatgcgatgccaatgatgtaagcgcccgacactgccgcgccctgctgcccgtcctccattacctctctctctctctccttgccgttggttcctctgagctcaagctcgatggtgagaggccgtctccgtccgtcggcgacgagtcagtctatctggctttcaatcgggttaggtcttcgtcctctgcatcacctcgtcgtcgatttacctgtctccacaatccaagcccattctgccttcagatctggtgacggctgccttgcagtagccggatttggcgagctcggggggagggggaggagcccacgacgatggtggagctgaagcggatgacagccaccgtggtggtgtagactgattggcccaggaggcggacgcctcgagcttgcgagaagatggcgtcggcacggtgttctccaaggtgggggtccccctcgcgcctttctctcgcctgctttagacaatcacgagccgcctcgcatcgcctaccgccgccgctgcatcctccgtcctcccctcgctgcttcatctggtgccgcctcccataatccagaggagggctccatatggtggtgcagcgcttgatccggagcagctctgatgttggacacgatggcaagccaagggattttaccaccagcatctcctggccaccctcatcacccccctgctgcctcctctaccatctcctgctttgaatcagattttttttaaaggaaacaatacacggtgtactcaatctctgaatgatgaggtcagtgacaaggtaccatgtctattgataaatttgtgccacagtttcagatttcataccgaactgtgtcgataaacctgtaaactcctcaccatcaaaaaatattgtaaagataggggactaaaacatatgcaaaatagttaatatggacttatatttttcagccgcctaagattttctgagtacaccaatcatccaactgaattttgaatttactctaagtaccagatgtgcagggtgttcattacacttaagattgacacttaccatttattttgtatgcatgcatgttttatttttggtcatgagctcagagaatcgatcattccttttctgcatggtcaacaaggcctttaattgctagcttgctgatgatagtctagcaatttggtccagcacaaaaatgttaagtttgtgaggaatctgtttatttggaaaggaaaaattgttgttagtcatagatggaggctatagcccaaactaatgtttttttctaaagaaaagatttctttaatttagtaatatactagaaaatagacgtggctttgccgcataatggaccaaccagtataaaataatccatctgtttcatattgatcaacgtttaacacaaattaaaattttcaaattgatcatcacccccttcgttagacatgtaatattattgcatttaagcatcaaaattgagtttgcgcatgcatgtaggaatttgaggtagtaaagctatcatttcttatatatggggctcagaaggagttaaagtgtgcgtgtttcttgatttttccctatcacatacttacattaaaatgaaatataggaaagttaatactttttgttggtctaggtgaaaaagttatataataatcaatatggaatgtagggagtctgatacgtacacctaatttctttatttatttaatgcctcaaatgatgaaactttacccttttattcatatattaatttaaagcagcaagacattgaattcatggacataagttggaagtcgaatatatgcgcaaaaattccaaattcctatgaaccaaagtaatgaaacggcttattcccattttatctctcctcacagtggcggagctagaaagatttttaaccctaagcaaacttcacttctagtaattgttgtataaatttcatcatcaattcattcaataacatataaatttagtggagtttttgtcggtgagcatgcgcggccacctgggctagccaggcggtggctccgcccttgcctctgtatgtctataaaaatcgagaaaatctattattttaataacacaattcgaatgcatctgtctataaatgttatgcaattcaaatgttttctcaaaggatttttttcttctgtaagaaaatactgcattaagttttaatgcagatatataagtttttggtagtagcatttttttatggtgagaaataatgcattacattttgaatgcacgtgtatactactgtgcattcaaaatttgcacgtgtatattactgtgcattcaaattttaagttattattaagaacattttttccttgtgcaaaatgtacatagaacacaatgcatctatatatgatgctgtaaagataaatgtattctgtgttttctggcaatgtcgtacatatatttgccttttgagcaattcataagtgttgcaatttaaatctaaatttaaacccaagcaactagtactcatggtacaacaattttcaaaaagcgggagaactctgaaacaaaagatacattaagagcatattttgaaacgaagtacaccattttttttgttgaagaaatcattactacgcaatactctgcaatttgaatgtactttgggagatcatattttttattacatttctgaatgtttgtatgcactactatgttaaaatgattttttttgtgatataaatgtatctgagagttcatttggtatcagcataatatatactgttcatggaaatgtatttcacttccacattatcattttttaacttctgtgaaaagggcgtatggaaaatgtatatatgtgcaccttggctctaccaattgggtcattgagcatttgtttttttaacattattttaaatcatgcatcatgcacaaatacttgtactccatttttgcacagtggtttgtatacgcatgcaccgtggtgcagtttaaatttgaaatggccccgtcccaaagacatgggtcccaagcctaacaattgaatctaatcgcacagtttctggaattacatgccactctacaacactttaactgctcattggtataaacaagcacgtatctcaaagcgggctaaatggtcaggataacaggtgcaactgcagttgggtgctcatcggcgtttccgtgtaggaaatggtgcgggagagagcaaggtgacacgtggcagattttcacgagaggcgaagcttgatttatatgacgctacgtggcccaatctctggtccgggttaaaaccctgaaatcggtattaaagaaagatatgtgcatactttggagggtgaccatattttttcctcatagttcctagcaaatatatagaattgtcctctttgtttaaacttaattgagaagacattatgacaattttcaagttaaagcactaggggcttcccatttggaggtgtgagtccccttcacctctgtttctccttgacgcgatctacacctttctttttttggcttccaaatcttctatggtctttgctctccatcctgatttgttgtatgcttcttctgtgcaatgaagctaacaaaaagtccaaagcagagctttgcttcagagattctaaattcagttattttagctattgtaacatgtaatagtcatttgtttattgtgttcttggctcaacgtgcagctctccaattatgttccctttttcgttacaacaattcagtttaatgtggacccaggttctagaatgttttatgtataatgtttttagttgaataaatatccataatccatatatgactatgcataatttccagtgaagaaagtactattgattgctactacaaattaatagtagtgtcatgctgtaggtttaggattcaaggaataattggattgcgcttttgtaaggtaaccagagttagatagtagttatcttctttctgaaaatgatggcagtgccaacatccattatttctaaacacacatttctattctttcagttcactcccatgatactgaaggatctgattctgattgcaaactagacaattcaagggtataccctttgttttctcctttagagaaggaaactctgaaagattttattcactatcggaataataatagttgttattctttgttacaatccttacaaaaataacatggtagttcttactttatacactcaacctatttgtaggtatgtttagcttgaggatttttcattttccaaaaaaattactatgcattttatattgtgttgttgtaggtttgtagaggtaaagtcgatgttctttacagagtttgccctacttgcaaggtgtggcacatctttctggccgatctcttacaagttatagttatgtggcataagaaagatgtatcagtttttatgtatttggtcattggattacgaatgatgtctgggagattttataatgatacaacatatggagtgcaggttttattttttagattcatctccaaagagacctgcaagatctcccttttgaggtcatgaagctcccctttcttgcctccctaggcttggggcctcgactccctctccatcgatggaaagctactgaggcagccagccgacagaagacatagagttgatcaagaaacaacagcacatgcataacaagtgatgattgttcttaaaaaaaaagacaagtgatgatagaaatctaaggatgtttgggcatatgctatgctgtatatgtattatgttatcgtttcattggtttttacc

SEQ ID NO: 27994 - DNA, 2115 bp, Oryza sativa
  ref <308>: DATABASE ACCESSION NUMBER: AK103436
  ref <309>: DATABASE ENTRY DATE: 2002-08-28
gcatggcgggctcgcagcccaacactcagctcgccgccggccgatttcgtcgtccttggctgcctgcctccgtcgccgccggtcgtcgtcggcgcccattttgtcccacctctatccaccttacgcgcatcctccggtagcagcactgcgtggttgcgccgccgccgcctcctcctgtaccgacgacagcaacgccaaaaaccctatccccattcccctcgctgcttgactgcgcgttctcagccggtttcccccttctcttcgtcgtcgtcaccgtcgcgcctgcgactcggcgtgaacgggggtggtggccgcagcagcgcctgcgcagcgaggggggtctcctgtgcgtgttgcgcggctgtgtcttcagcactacggttccccttcgtcttcgcctggtcgctttcaccgatcaattgctctctcgccctcctgcacggaggaggtatgtcccatcaatcagacacatcttcaagctcaaatgattccgaagatagcaacatcatccacccagccagcatatactctatggaagaattcattgctgagcaaagcatcgtggacaattttcttcagcggatcattgtgaagattgaggccaagattgaagctcagaaagctagtacatctcaccctcgaagtggtgaacggaaatatgtaaagaggaaccgcgaagagggccatcgacgactcgtggaagattacttctctaaagatccaatctacagtgataaacagttccgtgcaaggtaccggatgagaagacccctttttctacgtattgttcatgccttaggtgagtggtctccctatttcactagtaggagagatgccattaatcgtcaagggctctcacctttgcaaaaatgcacaatagccattcgtgcattagcatgtggcaccctcggagacgccattgatgaatacgtagatactggtatcagcacagcactggagtgtttggattggtttgtggaaggggtgattgacaattttggtgaagaatatttgcgaagccccactagtgaggatatgcaacatatactacaaatgaatgaggcacggggcttccctggcatgttaggaagtattggctgtatgcactgggagtggaaaaattgcccagttatatggaggcgtcaccttactcataccgatcatggtgcgactacaatgattcttgaagcggttgcttcaaatgacagctggatatggcatgctttctttggtgccattggatcgaacaatgagatcaccattctcggccaaccacagttgttcaccgaattgttgaaaggccaagctgctcatgtgcaattttctgtcaacaggaggcaatacaatacaggctactatcttgctgatggaatatacccagaaggcaatgtctttgttaaaacagtaaccctccctcagagcgaataggatcaattgtttgcacggcatcaagaaggagcaaggaaggacgtccaggaagcctttggacttctacaatctcgttttgccattgtgcgtggtcccactcgtttctttcaacaagagactcttgtcaaaattatgcaagcttgcattatacttcacaacatgacagttgaggatgagaaagatatgggaagctcttgttttgactcggatgaaatcttagggacactggctgttcttttatcagatatcaacactgtgcctgctggctgttatgctgaagtggtacggagaaatgcttctgtttgtgctcaaccaacacatgcacaacttagaagggacttaatggggcatatttggcagcgttttggtccatttggcaacaagtaaaacaatcaatcctcctgtatggttatgttaaaagcctaagcacctttgaggttactgtaagccaacattttggaaagccagaatctcaaacagtgtcccgctggattacttgggatattggacttccaacataaccaatgatgtggttctattgttccctttgtccgactcgctactattccaacttgctggtacaagagctagctctgtgctgctatgttctgttccaactgtggatgtattgggtattatataacaaagagcattaggagtatattacttttgagtttgtgatacttt

SEQ ID NO: 27995 - DNA, 2744 bp, Oryza sativa
  ref <308>: DATABASE ACCESSION NUMBER: AK103437
  ref <309>: DATABASE ENTRY DATE: 2002-08-28
gactctctctccctctccctctctctctctctctctagcctccgcctcgccgcgcctcgccgccgctagggggagaagcggtggcggagagggccgcgtcctcctccattccgcaggtacaccctctctctccatctctgctagcggctagcttcgtcttcttgctgatgctgcaccctctgatctgtgcagggggtggtggtggaatcctgtcaagaaccggggttgttgggaatttgggaatttagggctccgcaatttggaggaaggtgaggcgattttttttatctgcggggaatttctgcagtgggggtggttagattgtgctgtcaatggtggtggtggtggtggttcgatgaacatggcgcgttcgggtgacgtcagccgctgccaccggtgtggcctgtggtcgaatggctctgcgccgatcaccgtaagcgcctcgattacgatgcggtcttcgcgggttacagcgcacgccgtgtatctggattatcctaccagaaccgagcagaagaatgggggtaatttggtggtgatgcggcctgaccgacgacggcctagggatgatttcttcaagggtgagggtggtggtggtagtcttgtagttgtgcagccagaccgagaccgacggccgcaggatgattttgggagggcggccgcagattctgagaaggatgtatcacccatccatgctaagccgaggaagccattggaccagaaccccgagggaatggatgtggcaggtttctcaaaacatggaggaaagtgctatgctgacaaccttcgcaggtactgtaacagcgggaagctcatccaggcctgctgtgtgattgatgagatggtgctccatggccagattccggagactaagtgctgcgttaggataatccgcgggctcgttaaaaccggcaaggcaaacaaagctaggcatgttcttgaggttatggtgctttcgggtggggttccggacaccatcagctgcaacatgttgatcgcgcagctttgccgtggtgggcagctgagctcagcactgcaggttctggaagacatgagattcagtggttgctctccgagcggcatcacttttaacactttgattaggtgcatgttcaatcagcgtatgtatgacagggcgatctccttttggaaagaacagttgaggttaggttggccaccatatgagatgacaagcaccttgcttgttgatcttgtttgcaagaattgtggccctcagaaggccttggaagtcttggatgaactttctttggaaggatgtcaaccagatgtcgtcacctataatgctctcatcagtgcatcatgcaaggctggcaggctgaatgatgcaaagttcatcttaactcgtcttgctgctgaagggcttgaaccaaatggtacaacctactgcatcttactccatgccctctgcaacatgagaaggtgggatgaagtatgcgatttgcttgaagacatgaaccaggtgaatcgtgatcctgatgttacaacctacaatatttttatcaattacttttgtaagtatgggcatctggatcaggcaattgatgtgttggagaggatggttatcaacaattgttctcctgatattgtgacctgcaacacactcctgaatgccatctccaaaaagggtatggttgaggaagctcttgggattgctcgctgcatcagagaaaacggatacaagttggttctcatcacatacaataccctcatagatgctttagcaaagaaggctgaagttaagaaagctatggttctgtttgatgagatgcttagtgacgggatcagccccgatgacatcacatatggttcacttgtcatgggtttttgtaagaaagacatggctgatgaggccctggaccttttaaatcagatgctcactctaggctttgaagttaaaacaactacctttgtcatggtgatccaggcattatgtagagatggtaaagtggaagctgctgctgaaataactaaagtaatgttatcaaaaaatagtatccccgggaattcattgtgttcatccatagtcacaaaagttgccaaatcaggctggaataaagaggcacagatgctccaccagaagttagttgagtgtgagatccttaaagaagatgctgaagttattttaagcagctagtagctggagtataagattgttatttagtagcatgaaacatgcagcttctcagctaatcagcagataaattctggaagttgtagatagtgtcctggaagaggcatcctgacgagtgggtgagccggttaaccaagactgtaccccattgttgctaatgaaatgtgaccctatcttataatctactacctccgtttcagtttataaaactttctagcattgcccacattcatatagatgttaatgaatctaggcgcgcgcgcgcgcacacatatatatatatatatatattcattaacatatatataaatatgggcaatgctaaaaagtcttataatatgaaacggaggaagtactacttacgctactgcgacaaacaaattaaatctcaatggaagaggcattgtggatgtcacttcgcatggcattatggcccttgtaaccacattacgacatcgtcgttaagcaggatagattagcatattctggattagcggtagagttcccctaatgtgtttaggtgcagcttgattcttgaattcgtaatctctctatttatttatttatatatataagtgaagctgttggttgc

SEQ ID NO: 27996 - DNA, 1893 bp, Oryza sativa
  ref <308>: DATABASE ACCESSION NUMBER: AK103438
  ref <309>: DATABASE ENTRY DATE: 2002-08-28
ggccgggttcccgggtgttggtggtggtggccactactagtagagtagagtagtagcgaggtggcgtgatgatccgggaccgggaggagtagagtagaccacccttgatctgcaaggcgcgccgctcattgggtggccagcgtcgaccaccgttttcttggccccgtctcgccgcgatctggtggtgtgcgggcacggctcttcttgccaagaagaacacgcacctagaagttcttggtttttgtctcggttgaggggcgcggcgccatgggcatctcggcgaggtggctcaagtcgttggttgggatgaggaaggtggagaagcagcagcagcagagcaaggaggatggagatggtgggcgagtagcacagaaaagggacggtgctaaccattttcactgccaaaatcagcacggtcaagaccatgataaccttggagcaccaggagagtttcctgatgaaaatggtccatcagaaggtgatagcaatgcactttcgtgctcggaacccgcttttagttcacctaacgtgcctgtgcctcagactgaagaagaactcaaggagatctgggctgctacagttattcagactgtgtttagagccttcctggctaggagagcccgtcgggctttaaaaggactagttaggcttcaagcccttgtaaggggtcatatagtgagaaagcaagctgctataacactcaggtgtatgcaagctttggtgagggttcaagcccgtgttagagcaaggcgagtgcgcattgctttggaaagccagacggatcagcaagctattctacaagagaaaataaatgagacacatgtgcgggaaatcgaggatggttggtgtgatagcataggatctgtggaagatatccaagcaaaactattaaagaggcaggaggcagcagccaaacgcgaacgagccatggcctatgctctaactcaccagtggcaagcaaggcaacatgcagccattacagcatttcaacctgacaagaacagctggggctggaattggctagagagatggatggctgttcgtccatgggagagccgattcctgggctcttatgcagcagatggaattcctgttagtagtggagcaatgcaagacgaggaaaatgctgtctatactccacataagaaacatgttagaagacaaacttcaacacttcattcaaacatactgaaccagaagacctgcctaccaaactcagagggcggtggttcctcatcgaaccggtctggtggttcggcatcggctaagtcaaaactgaaactgtcatccagagaaggatgtgatgaaatttcgtctcgtccttcgggacttggaactaggtcgagtagtaatcctaaggagaggactgggcatttagatcctcaaggaaataagagattctccttacctgccagctgtgtcgaagcaggcaagcgcatgacgaataaatctgcggttaaccggtccctaaaggtcactaaacatcatcttgccagttcaattgagttgcctagaagagttgagctgcagacttgacagccaatccaattatccaaagagcatccatagtcattggcaacattttcacctgagatatcgttcatggatatattggcagccttggactgtgatgatctatccaatatttcaagaaatttgctttgcattcatcgcagcttttcttggccatatagatatgcaggctcaactgaccatctcatgagagatgagaccagttggtagaagtacaaatatgtgtctgagaggagggaaccgtacatatagagttttactatttgtttagtgttgtagtacttgtaaggtgtaactaagactatgtaatagtaacaactttgtgtttttgattggtgtacctatgaatcgtgttggtcc

SEQ ID NO: 27997 - DNA, 2434 bp, Oryza sativa
  ref <308>: DATABASE ACCESSION NUMBER: AK103439
  ref <309>: DATABASE ENTRY DATE: 2002-08-28
gctctctcgcctccgcctcatcatcctctcctctcctctcctctcccactaccactccagcgctgctcccctcgccgtcgtcgctgccctccccccgatcgatcgatcgctccccctcccgcgccgccgtggccatggaatccggccaacccaactccgccgccgcagcagataagacgcagaacagttctgtaccacctgtggaaggtgtagctggaggagggactagttatggatgggtagatggaggattacaggcgtcgagtttaggtaatggtgctattgatcctacaaagatacactcagcagatcttttgcatgtctggtctatgccgagcacagcaaatgttagccaacaagaagcacctcgacctctggaacatgttaaccttttggcagcaagaaatgaaagggaaagttttcaaattgctttacgtccaaaggtatcatgggccacttctggtattgcgggatctgtgcaggttcagtgcactgatctttgctcttccgctggagacaggttagtggttggtcaatctgtaaccttgcgacgtgtggtgcctatgttaggtgtaccagatgctcttgtgccaattgatccactcaattcacaaataaacctgcttccaggagagacaagtgcaatatgggtctcactaaatgttccttgcggacaacagccgggtctatatgagggtgaaatatttattagtgctgtgagggcagaagcagagtccagaggagaatccttgacaaaatctgaaaggtaccagctttacaaagaattaagaaattgcattgacatcactgaacccagagactactcgtcatcagaggaaatggtacaaagacttacatctgcttcaaccacactgaggaggatgttagctcttccatcattccaggactgccaagagaataatggattaggagatatgatggatgaagatattatgaacaatgtggcagttcgtttgaagttgagcctcactgtttgggattttactctcccactgacaccttctttacctgctgtttttggcatatctgaaactgtgattgaagatcggttttgcttggagcatgggaccaaaggttggtatgatgcactcgatcatcacttcaggtggctcctccaatacagaatcagtccatttttctgcagatggggagatagcatgcgcattctagcatacacatgcccttggcctgctgaccatccaaaggcgaaagaatattactctgatccaagactagcagcatatgctgtaccatatgcacctatcctatcaagcactgatgctgcgaaaaattccctgcgaagagaggttgaaatcttgaaatcagaggctcattggtcgaaatcttacttctatttgtgggatgagccactgaatatggaacagtatgatgtaatctgcagcatctctaatgagttgcgttcatatgcatctgatgtgcgtattttgacaacttattactgtggcccaagtggttctgaactggctccttctacatttgaggcctttgtgaaagttccaaatgttctacgtccacatacgcagatattttgcacaagtgaatgggttcttggcacgagagaggacttggtgaaggatattgttgctgaactacgacctgatcttggtgaagaatggtggacatatgtgtgtatggggccttctgatcctcaaccaaactggcatcttgggatgcgtggaacccagcacagggcagtgatgtggagagtgtggaaggaaggtggaacaggattcctttattggggtaccaactgctacgagaaggctatgattccaagtgctgagatttgtttccgacgtggtcttcctcctggcgatggggttctgttctatcctggtgaagtgttttcttcatcacatgaaccggttgcgtccactaggctagagcgcattctcagtggcatgcaggacatcgaatacctgaagctttattcgtcaaggtacggcagggaggaaggtttagctctccttgagaagacaggcgtgtatcttggcccagatcgttatgcacttgaccatggaccaattgatgtgatgcgtggtgaggtataccgcacttgcaggtcttagggcagagctatcaacttctggtgtttcactgtagcatccatcctgttgttgtacatatgatttctcatgtactgggagttgctagcagcaaatacttatcgttgaacccatcaaagctccgttttcacgctcacctgttaacactccattctacggtatacctatgatgctgccagcgtgtgactgcagcacacgaactgtattttattcgtctcgcacggtgtcgatccttatttcagaagggacattatggtgccctgtcccttcagaatctggtagctttatcgcctgatgtggatgtcaccatggctatttcaggatct

SEQ ID NO: 27998 - DNA, 1503 bp, Oryza sativa
  ref <308>: DATABASE ACCESSION NUMBER: AK103440
  ref <309>: DATABASE ENTRY DATE: 2002-08-28
ggccgtccccgccgtccacgccggcgccgcgctgagccgccgacgtcggggcgactgcgactcctcctgtcgccgccagccttctccagttctcccctctgcccgtctccgtttggccgccgcccgccttctcctgctcttggctgctccacgcctccaccgatccggcgctccacccttcagcccagaggattggtaaattgttactgattagtgatattgcgtcgttatttcagaaccatgcggccgcttgtggatgctgactacccaaggaaaaattcctagctacgccactacccaccatcgcggccgctgctttcccctccctgccccaaatgctcccggccacctccaccgtcccacccacctcgccccttccccactcccgcgctgccccgcgccgccacctccgcgcagggcttctccacgggtccgtggcgacggcggcggtggttcgggcgtgcggggtgacgacgggccaccgtcggaggatgggctcggttcgggcgagccccagggcaggcggatgggaggtggcgatggcggataaggagggggtaggggtggagcggctagtggaggtggcgcagagggcggcagacgccgcaggggaggtgctcaggaagtacttccggcaacgcgtcgagatcatcgacaaggaggatcagagtcctgtaactattgcagatagagaagcggaagaagcaatggtgtcagtcattctgaagagcttcccttcccatgccgtttttggtgaggaaaatggttggagatgcgtggaaaagtctgctgattatgtttgggttttggaccccatagatggaacaaaaagcttcataactggcaagcctctgtttggtacgcttatttcactcttgtacaaggggaagccggttattggcatcattgatcagccaatcttgagagaaagatgggttggggttgatgggatgaaaacaaccttaaatggacaagaaatatctgttcgcccttgcaatatcctggcacaagcttacttatatacaacaagtccacatttgtttgcaggagaagctgaagatgcatttattcgtgtacgggataaggtcaaagtcccactgtatggttgcgattgctatgcctatgctcttcttgcctctggttttgtagatcttgttgttgaatcaggattgaagccatatgattttctctcattggtaccagtcattgaaggagctggaggttcaataacagattggaaaggaaacaagctccattggcctgtctctgcggaatcacggcctgaaagtttcaatgtggtggcatctggagacgcccgtgtccacaagcaggcccttgatgcgttgcaatggcactagtctgcaaaacacatccaagtttggtctctaaacaaacatgaatgtgttattcatgtgtccaataaacagtgtattttgtatgcttgcgccgtgagcgactagttattcaaattgcactgccactaataaaatcaatttgatggtt

SEQ ID NO: 27999 - DNA, 930 bp, Oryza sativa
  ref <308>: DATABASE ACCESSION NUMBER: AK103441
  ref <309>: DATABASE ENTRY DATE: 2002-08-28
gtgctaacctacctacactacactacaccacacactacacttggagagaagcacacgtagctagagtgatcgattcattttcttgctcgatcttgatcggtatggctggtgctacggctgccggcgctgccgctgccgcggcggggacgggagccgggtcgccgtgcggcgcgtgcaagttcttgcggcggcggtgcgtgccggagtgcgtgttcgcgccctacttcagctcggagcaaggggcggcgaggttcgcggcgatccacaaggtgttcggcgccagcaacgcctccaagctcctctcccacctccccgtcgccgaccgctgcgaggccgtcgtcaccatcacctacgaggcccaggccaggctcagcgaccccgtctatggctgcgtcgcccaaatcttcgccctccagcagcaggtcgcgatcctgcaagcgcagctgatgcaggcgagggcgcagctggcgtgcggcatccagagcagctcgcactctccggtgagctggccggacagcggcagcatcagcgcgctactccggcaggacatggcgagaaggccgcccggcggcgccctcgacgactgcttcggcggcggcggcgcgctgctgccggagctcatggcggccggcttcaaggacgacgtcgccgccgtgcagatgcagcagcattgctccaaggcggtggacgccggcgagctccagtatctggcccaggcgatgatgagatcaacctccaactactctcagtagaaagaaaaatcaaacaatgcaacgctttgcatgcaggagttagagagtggacaagcaaaaatttagcctgtgtactactgaacttttttatcagtgcaacgtcatagtgaagcaattagtctgcttcatgatgatgattagtacgtagtactactaaataacactaatagcttcttgc

SEQ ID NO: 28000 - DNA, 1664 bp, Oryza sativa
  ref <308>: DATABASE ACCESSION NUMBER: AK103442
  ref <309>: DATABASE ENTRY DATE: 2002-08-28
gtggaaagcttgaagaaatcaaacacatcatcattccaatttccaaagaggagagtcgcagaaagcaatggcttctactgaccgcagcaagaagcttcgcgtcctgctcatcccattcttcgccaccagtcacatcggccccttcaccgacctcgccgtccgcctcgtcaccgccagaccggacgccgtcgagcccaccatcgccgtgaccccggccaatgtctccgtcgtccgatcagccctcgagcggcatggctcagcggcgaccagcgtggtcagcatcgccacctatccgttcccggaagtggccggcctccctcggggcgtcgagaacctctccactgccggcgccgatgggtggcggatcgacgtcgctgccaccaacgaggcgctgacacggccggcgcaggaggcgctcatctcgggccaatctcctgacgccctcatcacggacgcccacttcttctggaacgctggcctcgccgaggaactcggcgtgccctgcgtttcgttcagcgtcatcggtttattctccgggctcgccatgcgcttcgtcaccgccgccgccgcgaacgacgactccgattcggcggagttgactctcgcggggtttccaggggcggagctacggttccccaagtccgagttgccggatttcttgatccggcaagggaacctcgacggaatcgacccgaacaagattccccaggggcaaaggatgtgccatggtctcgccgtgaacgcgttcttgggcatggagcagccgtaccgtgagagattcttgcgcgacggcctcgcaaagcgcgtctacttggtcgggccactctcgttgccgcagccaccggccgaagctaacgccggtgaggcatcgtgcatcggttggttggactccaagccgagccggtcagtgctgtacgtatgcttcggcacgtttgctcccgtctcggaggagcagctcgaggagctggctctcgggctggaagcctccggcgagccgttcctgtgggcggtcagggccgacgggtggtcgccgccggcggggtgggaggagcgcgttggtgagaggggggtgctggtcagagggtgggtcccacaaacggcgatactttctcacccggcgacggcggcgttcctgacgcactgcgggtcgagctcgctgctggaggccgtggcggccggcgtcccgctgctgacgtggccgctggtgttcgaccagttcatcgaggaaaggctggtcaccgacgtcctgaggattggcgagagggtgtgggacgggccacggagcgtgcggcacgaggaggcgatggtggtgccggcggcggcggtggcgcgagccgtggcgaggttcttggagcctggtggggcaggggacgcggcgaggctcagagcgcaggagctcgccgccgaggctcacgcggccgtggccgaaggcgggtcctcgtaccgcgatctgcgcaggctcgtcgacgatatggtcgaagcaagggcggccggcggcgaggctgcggctgcaccgcaacctcagtagcctataatgccaatgcgttcgtctgtacgatgtcgagtcattccactgttgcaggctcccagttcatttcgctcagttgtcatgatgcactgatgcaggccttgttgtgactttgagaaacgtttattcagagtgc

SEQ ID NO: 28001 - DNA, 1182 bp, Oryza sativa
  ref <308>: DATABASE ACCESSION NUMBER: AK103443
  ref <309>: DATABASE ENTRY DATE: 2002-08-28
gatcctccgctcctttcccgccgccgcctcctatagccacccttccccctacccccaaaaatcccccacctcccaatcccccaaacccctcctccacctccacctccgccatgggcagcttcgcctcccccctcgacgccgcccccgcccctcccaccgccaagccctcccctccgccggcgccggcgccggccaacgggctggtgacccaggaggagctgaagcgggtggcggcgcaccgggccgtggagatggtggagcccgggatgacgctgggcctcggcacgggctccaccgcggcccacgcgctggaccgcctcggcgacctcctccggtccggggagctcgccgcggtggccggcgtcccgacctcgctcaagacggaggcgcacgccgccagggtggggatcccgatgctgccgctcggggaggcgggcgggatcgatctgtccatcgacggcgccgacgaggtcgacccggagctgaacctcgtgaaggggcggggtgggtcgctgctcagggagaagatgatcgaggggtccgggggaaggttcgtcgtcatcgtcgatgagtccaagctcgtcccgcggctcggctgtacgggcgccgtccccgtcgaggttgtccccttcgggtgcgaccacactctgggcctcgtccgcaaggtgttcgacggattgcctggcttcagcgcgaggctcaggacggtcgcctccaaggacggcgaggggaaggaggagatgttcgtcaccgacaacggcaactacatcgtcgagatgttcttcgaggatggcatacgcggcgacctcaacgagatcagcgaccgcctcctacggatcaccggcgtcgtcgagcacggcatgttcctcggcatggccacctcggtggtcgtcgccaagaaggacggcaccgtcgccctgctccacaagaagaagtaaccgccccggcagcggcggcggcgccaccaccgacgccaaaataaaccaagattttgcagcgaagcgagggcagccccagcagctggtgcccctccccaacccaagtatctattgctctctagtatgttgaacttgatgtacgtctctactattaccatgatttctctctttttttcatggtaatgttcttgagtgatgctatcaatggacgaagctaataacttgtggacttttgatccatggc

SEQ ID NO: 28002 - DNA, 1578 bp, Oryza sativa
  ref <308>: DATABASE ACCESSION NUMBER: AK103444
  ref <309>: DATABASE ENTRY DATE: 2002-08-28
gacgcccaccgctgaacaaaaaaagaaaagaaaagaaaagaaaaaccctaggccgcctagagagagaaaggaggagaagggttcgccggcggcggatcggatcggcggcattcactcgtcatctcgatggagtacgcggcgccggcaggggcaggggcagggggctactactactacccgccgtcgcagcagcacaagcctcgccgtcccccgcggcccgccgcccgctgggtcaagcactggatcccgcaggatctcgccacctcctccggcaaatgcgccctctacaagtgggtcagggaggatgtgtacaagaatctcaaggacggcaaggccgtgccggagccggaggcggtgaagcctgaacccaccacggagatcctcttcctctgcagctatgaaaactgtggcaaaacctttgtcgatgtcgccgccttaaggaagcacgctcatgtgcacaacgagaggcagtatatttgtcaggagcctggctgtgggaagaaattcgtagatagctccaagttgaagagacaccaccttattcatacaggacagaaggattttatctgtccccatccaggctgtggtaaggccttctcattggattttaacctgcgttcgcatctaaaaacgcatgcgttggaaaactatcatgtatgcccatttccagcatgtggcaaaagatttacgagtgactccaaattaaaatcccatgtcaagggccatgaaaagactggaactccgatcacagcacaatatgtgccatcatcagataaaccacaaagcagcagtaagcctgcgacaccagcaacaactaagcctacaacaccagcagcaacgaagacgacaacacctgcatcaactaagcctacaacaccagcacccacaagctttgctgagcgaccatatgtctgcccatatgatggttgtgggaaagcctacattcacagttacaaattgaaccttcatctaaaaactcagcatcctgaacatggtcaagaagagaatggtaggattgctgcacatgcaagtgagcatgctgtaaatgatcgtgccaatcagtataactatgctgagattgtcgaccttgcaccgaatccaaaaaggagcaagacaaattcagggcataagaccccctcatctaataaagcctacaatgtcaagatttctagcgtgttgcctgctgatatcagtggagtgaagaatcagtggccaggtaagtatgaagatgacagtgaagagacagaagaagaccagggcaacaacattgaagatggctggagatatggtaaccagaatgccgatgatgaggaaacagaatatgaagattaaccaaacgattctcttttgtcctttactaacatcctgctgcaatatatgcactaactagacagtagacgtggtggctgatacctttactaatctgcgtgcattctgaaccctggaagtagattagagaagtgctgttcttgagagtagtagaatcagatggccgtgattgtgtggtttggtcataaatagtctttgtatgcgacttattctcgttcagttttttatgctcgatctatgtattcaatc

SEQ ID NO: 28003 - DNA, 601 bp, Oryza sativa
  ref <308>: DATABASE ACCESSION NUMBER: AK103445
  ref <309>: DATABASE ENTRY DATE: 2002-08-28
ggcactcatctcaagcttttctctctctctctctctttgcactacattcttgaattcacaacctacaaacaatccaagaagatgtcttgctgcggaggaagctgcaactgtggctctagctgcaagtgcggcagcggctgcggaaacatgtaccctgacctggcagagaagaccacaaacacttcagcaactatggtcctcggggtcgcacctgcgaaggagcaatttgagggggttggcaaggcagcagagtctggtgaggctgcccatggctgcagctgtggctccagctgcaaatgcaatccctgcaactgctaaaggagatggtgatctgcatcagcatgctgatgatatgtacaagtaaataaagaagccatttgatgcaatggctcctgtgtgtgtgtgtgtgcgacagtgtgagtcagcttgtgttcttcatcctgatgtactaatgtggcctgtgaatattgtgaggtgtctcctgctttactctcttgtcagaatgtaattagaggctatatatcatggccttgtgattggagcacctgaagtttttacagacaacattatgtttgtgtaatataatatggtttacttgtgc

SEQ ID NO: 28004 - DNA, 2447 bp, Oryza sativa
  ref <308>: DATABASE ACCESSION NUMBER: AK103446
  ref <309>: DATABASE ENTRY DATE: 2002-08-28
gattacctccccgcccgcgcacctcgagcccccaggtccgcctcgcctctccgtcgcttgccgccgcccgcagtggtcgccggccgcgcggggcttcgccggtgtcgcttcctcgtttggaattaattaagcaatacttaatatgggcaagtcaagcaagaaatctgctgttgaagttgcacctacctctgtctcagtctcagaggggaaatctgggaagaagggaaagagaaatgcagaagatgagattgagaaagctgtgagtgccaagaaacaaaagactgtacgtgagaaggttgtgccctcaaaggaggaagccaaaaaagtgaagaagcagcccccaccgaagaaggttgagagcagcagttctgaggaggattcttcagaatctgaagaggaggtaaaggcccaaccaaagaagactgtccaaccgaagaaggctgcacaacctgctaaagaggagtcaagtgatgatagcagtgatgatagctcctcagatgatgagcctgcaaaaaaacctgttgctcgtccaaataaggctgcactttctaccaacagtagcagcagtgatgatagcagtgatgagagtttatcagatgatgaacctgtgaaaaagcctgctgcccctttgaagaagccagttgcacttgctaccaatggatcaaaaaaggttgagacagacagcagcagctctgatagcagctctgatgaggagtctgatgaggatgataaaaaaactgctgctccagtgaagaaaccttcagttgctgctatacaaaagaagacccaggagtctgacagttctgatagtgactctgattctgaatcagatgaggatgtgccgactaaagcaccagcagtagccaagaaaaaggaagaatccagtgaaagctctgattctgaaagtgattcagactctgatgatgaggctgctgctgttaaaaaggaagaagaatccagtgatagctcagacagtgactctgaatctgagtctgattctgatgaaccagcaaaacctactattcctgcaaaaaggccactgacaaaagacacaaagaagggacaatccaaggatgaatctgaagatagttctgatgagagttctgaggaaagtggtgatgaacctccgcaaaagaagattaaggattctacaacttctggtactaccaagccttcccctaaggctaccaagaaagaaatcagcagtgatgacgaaagtgatgaagatgacagttctgatgaaagctctgatgaggatgttaagcaaaaacaaactcaagctaagaagcaagcaccagtagcacaagagagtagcagctccgatgaatcttctgaagaagatagtgacatggaaagtgatgaaccagcaaaaactccccaaaagaaggaaactgctgtgtctgttggttcgaataagtctgcgacaaaaccgggacaagaggaaccaaaaacgcctgccagcaaccaaaatcaagctaccgggtcaaagactctttttgttggaaatttaccatacaatgtggagcaagaacaagtgaagcaatttttccaggaggcaggtgaagttgttgatattcgtttcagtacctttgaagatgggaacttcaggggctttggacatgttgaatttgccacagcggaagctgctaagaaggcacttgaacttgctggtcatgacctgatgggacggccggtcaggcttgacctggctcgtgagagaggcgcgtatactcctggcagcgggagggacaatagttctttcaagaagcctgctcaaagctcaggaaacactatatttattaaaggctttgatacttctcttgacatacaccagatccggaattcacttgaagaacattttggctcgtgtggagagattacacgggtttcaattccaaaggattatgaaaccggtgcaagcaaagggatggcgtacatggattttgcggacaacggttccttgtcgaaagcatacgaactgaatggatctgacctcggtggatacagcttgtatgttgatgaagcgaggcctaggcccgataacaacagagagggtggcttcagcggtggaagagactttaacagcagtgggagaggaggaagacgtggtggacgtggtgatggtagccgtggacgcggtgaccgtggacgtggtagaggctttggtaggggtgacaggggccatggtggacggggtacaccgttcaagcagagcgctggtacacctagtgcaggaaagaagacaacattcggtgacgacgactagacgaacaatttgagccgattttgttctagtactgtagtaatctccatcccccctaatatatgcgattctagtgagccgtgaattggctacctccggactgttacattctagccgtgttatgtactttgttggcagttgggaccgtgttggtaaatttgcccgacagatttggcaattttgg

SEQ ID NO: 28005 - DNA, 1349 bp, Oryza sativa
  ref <308>: DATABASE ACCESSION NUMBER: AK103447
  ref <309>: DATABASE ENTRY DATE: 2002-08-28
ggtgtccgtcgacacgccgccaccgccacgggggttggggatttctttcccctcctccaagccaagccggacgcggacgccaccgccctcgccttcacctccatttatacctccggcgagcgccgcggcggcggcgacgcacgcatccttccttcctcctcccgcaccaccggcgaccggtaaaacggagagacccgtgggcgagcttgttcgaggcggggcaccaccaccatgtcggcccccgcggcggtggagcagcggctgcaggcgctgcggcagaagctggggaggaagcagcacttcgaggaggccgtcgccgacctcgccgccgcggtccgggaccaccacgccgccgcctcccccgccctccgcgatctgatgtattctacagtttgccgtgtggcaactgtccttcagactagatatacagcacctggattctggcgtgctggtctgaacctcttcttaggtacagagaagctggtaactaatccttcagaaaaggagcaactgaagactttcattctgagggcccgggagcatcttgatgagaaagagaacgaggaatccatgccaaacaacagggaaacagatacaagatttctttttgaagggcatcttacagtgggacctgaacctccacctcctgcctggcttgttgcccagaatttagcacgagaacttagcattttagctgaaccttctggagatcaaggtgcgaacaacaacggagagtccagggctgaggagatggcacctgctgctgctataatgaatttcttaaacaccatgacagtggatggagacctagaagccgctttggaagaatctctgcagaatgtgatggcgaatcctaaggtgcctccagcttcaaaggaagtcgttgcgaatctaccagttgtaaccgtgacagaagaaatcatagctagattgggcaaagagactcagtgtgctgtttgccgggagagcttgctggtggacgacaagatgcaggagctaccgtgcaagcatcttttccaccctccatgcctcaagccatggctggacgagaacaactcctgcccgatctgccggcacgagctgaggacggacgaccatgtgtacgagagccggaaggagcgggagcgagaagaggaggaagacaggaagggcgccgcgaatgctgtcaggggtggggagttcatgtatgtctgaacatctgaatttcaaccgaacgtgattatctctctgtaacgatttcctgaaattcagagtgcactggagttgaaaattcatgtacaaacaacgtttgcttcggttcaccaccgtatcttcgttgaatgatactaccactatacagccagcttatt

SEQ ID NO: 28006 - DNA, 1449 bp, Oryza sativa
  ref <308>: DATABASE ACCESSION NUMBER: AK103448
  ref <309>: DATABASE ENTRY DATE: 2002-08-28
gcctttccctcctcatctccgacgcgcatttcccccaaaagaggggagcaaatggcgtcggcggcgtgctcctcgtcggcttccgccctcgtccgcctcaccggcccgatccatctgtgcagcgcaccgccccgtgggtccgcgcggcggcgccacgcttccgtgcggtgctcgttcgcgccggtggagacggcgaggataaaggtcgtgggcgtcggcggcggcgggaacaacgctgtcaaccgcatgatcggcagcggcctccagggcatcgaattttatgccataaacacagattcccaggcgcttttgaattcgcaagcgcaatacccgctacaaattggagagcagttaactcgtggactaggtactggtggaaatcctaatttgggagagcaagctgctgaggaatcaaaagaagccatagccaatgccctgaaggattctgaccttgtcttcataacggctggaatgggagggggtactggatctggtgctgctccagttgttgctcagatatcaaaggaagccggttatctcaccgttggagttgttacctatccattcagttttgaaggacgcaagcgctctcttcaggcgttggaagcattagagaagctggaaaggagtgtagacacacttattgttattccaaatgatcgattattagatgttgttgatgaaaacacgcccttgcaagatgcgtttcttcttgcagatgatgttcttcgtcaaggtgtccaaggaatatcagatattattacaatacctggacttgtcaatgttgattttgctgatgtgaaagctgttatgaaaaactctggaactgcaatgcttggtgttggtgtttcttccagcaaaaatcgggcccaagaagctgcagagcaggcaacacttgctcctttaatcgggtcgtctattgaggcggctactggtgttgtgtacaatatcactggtggaaaggacataaccttgcaagaagtaaacaaagtctctcagattgtgacaagcttggccgatccttctgcaaatataattttcggggctgttgttggtgaccggtacactggtgagattcatgtgacgatcattgccacagggtttccacaatcctttcagaagtcccttttggccgatcccaagggtgcaagaataatggaggccaaagaaaaggcagcgaacctcacctataaagcagtggcagcggcgacggtacaaccagcgcccgccgccacttggtctcggaggctcttttcctgaacacggttcaataggaaaactagtagtttgtgtaccttagattctcatggaattactgagttggcgctccaatcaggcttctatgtgttattctttttggatatgtaaacacttaacagttacacatagtgattagcttcacttttattgtatgtatcatctagatgaggttgaggtcttcaggagttc

SEQ ID NO: 28007 - DNA, 1811 bp, Oryza sativa
  ref <308>: DATABASE ACCESSION NUMBER: AK103449
  ref <309>: DATABASE ENTRY DATE: 2002-08-28
ggaccgaccggtcacttcccactccccagttcccagtgaacagagcaggagcagcctccactcctcctctgccactccactccccaccaccactcgcatcaccatccatccatccatctccaacccaagccgaatcacaccaatcgccatcgccatcgccatcgccgtgcgtggtcgccggtgccggcggcggagggggagggggaccaagggaaaagagagaaggtgagctgagctgagctgaggtgaagtggtgctgaggcgagtgactggggggcaatggcagcggcgtgggtgctggccgcggcggcggcgttggcgctgtgggcggcggcggcggagggggcaaggtcgccggcggcgagggtgcaccggcacctcaagaggctcaacaagccggccgtcaagagcatcgagagcccagatggagacatcatcgactgcgtgcatctctctcaccaaccagcatttgatcatcccctactcaagaaccatactctccagatgaggccggcctaccaccctgaaggcttgtatgatgatgacaagagaagcgtggcctctgacaatgccggcgagaagccgatgctccagctatggcatcaaaaggggaggtgcccggagggcaccgtcccgatcaggagaacgaagaaggatgatctgctcagagcgagctcgttgcggcggtatggcaggaaacggcataccgccgtgaacccgctgtccattgatcccaacatgctcaatgagggtggtcaccaacatgccatagcgtatgtggagggggataagtactatggtgccaaggccaccattaatgtgtgggagcccaagattcagcagcctaacgagttcagcctgtcccagctctggatcttggggggttcatttggtgaggatctcaacagcatcgaggccgggtggcaggtcagcccagacctctatggagataataacactaggctgttcacatactggactagtgatgcttaccaagcaacagggtgctacaacatattgtgctccggattcattcagatcaacagcgagatcgccatgggcgcgagcatcttccccatctcgaacatcgccggctcacagtatgatatcagtattctgatctggaaggacccaaaggaaggaaactggtggatgcagttcggcagggagtatgtcctcggctactggccgtccttcctcttctcctacctcgtcgacagtgcgtcgatggtcgagtggggcggggaggtggtgaactcggagcccgacggcacgcacacgtcgacgcagatggggagcgggcggttcccggaggaagggttcggcaaggcgagctacttcaagaacatccaggtggtggacagcagcaaccagctgaaggcccccaagggggtgggcacctacaccgagcagtccaattgctacgatgttcagaacggcaacaatggcgactggggcacctacttctactatggcggcccggggaagaactcgaattgcccatgaatttggtgatgaagaagctgatgatatatatatatttatatatatatatataatatatggtgaagtgtgcaagtgtaaccaagcattaatcatgtgtggaatacagattgatctgcatctgtttcttaatttagccctaggtagtatatgtgtatctttcctactgattttctttttcttctcttcattagttttttcttcttctttttctgatgtgccatgtaaaagtttctgaagagaagcatggcgtgaggtggtggtgcaggggtgatgatgacaattgatttgtgggtaatttgcaagtc

SEQ ID NO: 28008 - DNA, 985 bp, Oryza sativa
  ref <308>: DATABASE ACCESSION NUMBER: AK103450
  ref <309>: DATABASE ENTRY DATE: 2002-08-28
gtatgactctactagtcgagtcgtcttcatcttcgagaagggagaaatttcagagagattttttatttatttatttttggattttgggatcggcggccgacgctgtcgagtaccggagtaggggagctcgccggagtaagctcttctcaggctgtgcgggggtggcggagggcggcgcggcgcggcgagggggcatggacacgatgaggggggcgctggagcgggcgaggatgctggtggggatggaggtggacgaggagtcggcgccggaggagcagtccttcttcgacgacgtcacccgcaactgcgccctcaccaccacccagaggctgtacggcttcgcgatatgcttggctgccggattgacgtgcaccttcttgtcaatgcttgttttcttcaatcctgtgaaattcggggtaacattcacccttggcaatttgatggcacttggaagtacagcgtttcttataggtcccaaaaggcaatttgacatgatgcttgattctgtgcggatatatgcaactgctgtatacattgcaagcatcataattgctctgttctgtgctctctttgtgcacagcaagctgctgactctacttgccattatcttggaatttggtgctcttgtttggtacagtctaagctatataccctttgcacgctcggttgtttcgaaggtgatgacgtcttgcttcgacactgaattctagaatgaccatcctgatctacatgttgttgctggacgcatagatgatatatctgtaatatactgtgtattttgatggagaagtggagtgggggtcatcttctccgattagcctgtgtagtcattctgatgttgtgaagacacacggatttgtgcgtcttatgctcagagatcatgtcatcttttcctcacttcccccccttcttccccacatttgtacatggtaaccacttacactccgcattcgaacgtttactgtgcagtttgtttggattgtcc

SEQ ID NO: 28009 - DNA, 2517 bp, Oryza sativa
  ref <308>: DATABASE ACCESSION NUMBER: AK103451
  ref <309>: DATABASE ENTRY DATE: 2002-08-28
gggtgacggcgacggctgcgcctcctcctcgtcctccttccactccccatcgctagccttgcgctagacaaagcgcggaaggtggtggctgcctcgctgcaaatgagccaccgcaggcgacgtaacgccgctggcccgccgcctcccgaaggcatcggcggctcgtccaccgcagaggcctcttcgacgggggaggagaggccggatctgccgtgggcgtgggcgctgggatcggagcgaagggtgctcgcgctggcgctggccttccgcgcggcgaacgcgctgctggtgcgcacctacttcaaccccgacgagcactggcagtgcctcgaggtcgcccaccgcatcgtcttcgggtatggccaccttacttgggagtggaagcgtggtcttcgaagttacctccaccccttcatctttgctgctctctacaagattctttcgctgctccacttggattccccatggttcatggcgatggctccacgtcttctacaatcagtctttgcatcttttggggatctctacttatataaactttcaaaactcattttcaataatcacgttgcccagtgggcactattttcacagcttgttaactggttcatgttcttctgtattacacggactctctcaaacagcatggagacagttttgactgttactggactttactattggtttgttgcaatagagtctgtaaagggaaattcggttgtttcaaagcagcaggctgccagcaagcaaagccctccatcaagaaaaatggctctactcatagcagccttagcttgtgctattcggccaacaagtgccataacatggctatatgttggtcttttggattttattcagatgaaatcaaaatcccggtttatttttctcgaggtcgttccgctcggggtctttgtccttgccgtgacaacgtttcttgattgttggatgtatggttcccggatcatagtgccacttaattttttgaaatttaacctcttctcttcaggaggagactactatggaacacatgtgttccactggtacttcagccaaggttttccatcgatgatttggactttcttaccgttttccatttctggaattttgaagtctcgagaatggaggcttgcaggtcttattgtctgggtattagtggtttatagcatacttggacataaagaattcaggtttgttctcccggtgcttccttttatgttcatgttctcaggacataacttagctgcaatggcacaactcaagggaaaaggtcacaatgagaaaggacgactttcgaggttgaagctctctgtcattctgctcatcctaacaaatgttccaatggctttatatatgtccttataccatcaaagaggaactgaagatgctatgctttatctatcacgagaagcccatgatggaagagtaaagagtgtcctcttccttatgccttgccattcgacaccttattactctacattacattacaacctacctatgcgctttttggactgtactcctagtgaaaacaaagggaccttggatgagtcagaccgtttcctcatgaacccagcagattttgtgggcgaggtttttggaaatttatcttcgttcagtcatattgtattatttgaatctgaagaaaggcatgtcaagttgcttctgcgcaattcatttcaagaggttaggagattttttcactcccacttcaaggttgatagagaccttcaatcgtcagttgttgtttattcacagaagagtgtattgtgatcactgtggcagaaaaggctcgttagtgtactatcttgcctaacatttctaatcatgtttcaccctactttaatttatcattcgagaaatgatctatagtttgggcctttattttgatatattgattttttcccatcctttgtgatgtaattctatttctatgtattagcgccaacttccatgttttcacaaaaaaaaaatcatttccataactagaggtgtgaagaagttttagaggtttaacaaaacgaagacaagagacgagcagagctcctcttctagagaaactggcgccatcccaaccagctcttcaggaacaagttccattccatccatctcaaccaagtttcaaaagtgagcaagtaacaaagaggcaaaaggtggttgttttccaggaactcttcatagtctgcaacagtccaactctccatcttgacctcccagcatctttccaatcttcctctgcatcactgaagtcatccacttccagtattgaagtgccaactatgtctttctctgaagatcttccatggtgaaagtaggacaaaccatcaggcaaaacaaaaaggggacagatcattccatggcaaatctttgtgcggacatactgaacctcataaaatcatgtcaaatgtaagttaaaatcatgtcaaatgtaagttctcattgatttcctgtagtttttattgttgaacatgaacgatacatttttacaagatatttatgtcaggaaatgctaatcgaaactctgct

SEQ ID NO: 28010 - DNA, 3831 bp, Oryza sativa
  ref <308>: DATABASE ACCESSION NUMBER: AK103452
  ref <309>: DATABASE ENTRY DATE: 2002-08-28
gtgcgcaaagcagccgcggtcagcagcatcacacactgcagcagcagcagcagcagcagcaggagagaggctgggaagccaagaccaagagagagaaggcaaaaggcgcaaaggggaagaggggagcacgaccaccctcctccgtatcattgccatctactgcccccatcctactactactcctacacccgtctactccactccacaacctcttcttcttcctcctcgcgtgcgtccgggcctagctgtagcacgagctcgcctgcccatctctctctcttcgccgctttgcctttgctggcgttgcgcgttttgccacactcgctgcttcttttttatacttcgggtttgggcgggtgccactggagacattcgtggggtgccattgcggcgtcttctcctctctcaggaggcatttgtgacatttggtcgatggtgaagtgtggctaagctgctcgcttggcttagtactctggaattgaggttttatcagaatcttggcattcagattgcagctgttcttgggtttcttggagacatatggcgtcctcgcaggagaaggccaagacgggtgttctgagaaatgccgcagcgctgctcgacgaaatgcagctcatgggagaaacacagggtgccaagaaggtgatcaactcggagctctggcacgcttgtgccgggccgcttgtgtgcttgccgcagcgggggagcctcgtgtactacttccctcaggggcacagtgaacaggttgcagcgacaactagaaagattccaaattcccgcattccgaactacccaaacctgccatctcagttgctgtgtcaagttcacaacatcaccttgcatgccgacaaggacactgatgaagtttatgcacagatgacccttcagccagtaaactctgaaacggatgtattccctattccaactcttggtgcttataccaaaagcaagcaccccactgaatatttctgcaagaatttaaccgcaagtgatacgagtacacatggtggtttctcggtgccacgaagggctgcagagaagttgttcccacaactggattactcaatgcaacctcctaaccaggagcttattgttcgagatttgcatgataacatgtggacattccgtcacatttatcgtggacagccaaaacgacatcttctaacaactggatggagtctctttgttggggcaaagcgtctaaaagcaggggactctgtcttatttataagggatgagaagtcacaacttcttttgggtgttaggcgagccacgcgacaacaaacaatgttgtcatcttctgttctacctactgatagcatgcacattggcgttcttgctgctgcagctcatgccgcatcaagtggtagttcatttactatctactacaatcctaggacaagtccttcgccatttataattcctgtagcaaggtacaacaaggcaacatatatgcaaccatcagttggaatgagatttgcgatgatgtttgagacagaggagtcaagcaagcgcagatacacaggtacagttgtgggaataagtgactacgaccccatgagatggcccaattctaaatggcgcaacttacaggtcgaatgggatgaacatgggtatggagaaagacctgagcgtgtgagcatatgggatattgaaactccagaaaacactcttgtgttcccttcgtcgaccttgaattcaaagcggcaatgtcttcctggttatggagtttcagtgcctgggatggaaattggatcagcaaatatgtcatcatttccaagggctcagggtaatccctatggcagtttgcagcacattccagctgttggatcagaattggctatcatgcttctcaaccaatctggtcaaacccttgggagtccccttagttttcaccagtcctcatattctagtattatccaaaatgtgaagcaaaattatatccctcctctaacagttagcacttcagcttgtttgacaaagcaagaaagcctgccttcagatgatgcccagcaccagttccatatggcaaatatgcagaatggtgatcttgaaggctctgaagtccagcctgtcattgattcgatttctgagtcaaagttgaatgctacatcaagagatccaagaaacacagattcatacacaagtcgaagtacttcggagcaaaacagtaagggtgagcctagaggcaagactcgtaggagtaagaagggcttgcctcacaaaaccgtttcagagaaatctgacctttcttcagccccttcttggatctgtgacaatcagcaggttggtttagaatcgaaactggttggttgtgatgaacaagtaaactgtggaaatattgaagattcatcaggtgcacttactcaaggtaattttgttggacagccgcatggccatcaggttgaacaaaagggagtgctgtcgccacaaaaggtagaatcatcaaaatcacctgatggaggaaagtctgtcaattcgtttccaaaccaagggtgtttttcgcggttcattgatggtcttgattggatgactcagccttcctactaccaagactccaatgtaattcaaccagccggtgtgtcagagaacattttcagttcttctgcagatatacctccctcaatgattgctgatactatggagacttttcaggcttcatgtctttctgattgccttcctaattccatacaagaattcatctccagcccagatctgaattcactaacctttctttcacctgacatgcaaaatttggaggtccaactccagcatgatggaagcaatttgccaagcacgtccaactcgtttgtacagatgagtttttctgaagagagtgcaagtcagagtgcaaacttaagtggacttcacatggaatctacacacagaagcataaacaccacttcatgctctcaaccaatgtctactgggggctttgatgcagggatgtactcaaagttgccacgtttaaaagaatcccaaatcttgtctttgccagagattcataccaattccatgggaacatcagcttgcagtatggatgcaaccgagtacagccttgaccgaagtgcgaagccgatgaaaccaccagtgcggacatatacaaaggttcaaaagcaaggatcagttggaagatctatcgatgttacagggtttagaaattaccatgagttgagatctgccatcgcttgcatgtttggtctccaggggaaattggagcatcctggcagttcagagtggaagcttgtatatgtcgactacgaaaatgatgttcttcttgtcggagatgatccatgggagtaagtagacatgtcttcgaattggtgtctcctgttctttctactcctggtcagcatattaattgacactcatacctatgtgcttttgcttctacagggaattcatcaactgtgtccggtgcatccggattttgtcaccttcagaagtacaacagatgagcgagaatggcatgcatgttttgaacgactgtattcaagcagcttagtagtaccattttctggatgaagctctatatcgacatgaaggccacaagagaaatgcacatccgagaagctgtagttctctgaatgcgttgcattactgaatgttaagctgatttgttgacacttgacagtagtgtttgtggtagagacttacaggaaaaaaaaaggctcatcttttgcaagaagaccaggtaggaaagcccaagctgtggaaaatagtgtgcagtgattactcatgctttgatgcatttccaacttccactgtatgttgcgagctatgtcgaatcagaaacttatttggttccttacttcactcagtatacattcc

SEQ ID NO: 28011 - DNA, 991 bp, Oryza sativa
  ref <308>: DATABASE ACCESSION NUMBER: AK103453
  ref <309>: DATABASE ENTRY DATE: 2002-08-28
gatccaagtatacgcagcaaaacacaatccaaagcgtgttcatccaatcattctctgttccgctctctcaccccagcgagatggccggatcaggagacgagctgatgctgctcggcaaatggccaagcccattcgtcaccagggttgagctcgcgctcggcctcaagggcctcagctacgagtacgtcaagcaggacctcgtcaacaagagcgagctcctcctcgcctccaacccggtgcacaagaagatccccgtgctcatccacaacggcaagccggtctgcgagtcgtcaatcatcgtgcagtacatcgacgaggccttccccgacgccggcgccggcgccgccctgctccccgccgacccctacgagcgcgccgtcgctcgcttctgggtcgcctacgtcgacgacaagttcgttccggcatgggtggcgacgttcagaggcaagacggaggaggagaaggcggaggggatgaagcaactgctcgcggcggtggagacgctggagggagccctgaaggattgctccaaggggaagcccttcttcggcggcgacacagtcgggatcgtggacgtcgcgcttggtggcctcatctcgtgggtgaaagcgaccgaggtgctcgctggctccaagatcttcgacgaggagaaggcccctcttttggccgcgtgggcgcagcgcttcggcgagctcgacgtcgccgagaaggtgttgccggatgtcgacggggtggtcgagttcgctaagatgaggctggcagaggcagctgcggctgccgcggcggcttcaaaaaactaagatggatatgtttggttatgtcgtggtaactcccattgtttgggagaaaataatgtgcttgttggaaaaattatttgggagaaactaatgtgcttgttggaaaagaatagatttagttgatttagtgttttttctgtatcagtatcttgatttatgtctgaataatgcaaggaatattcaatgaagtcatg

SEQ ID NO: 28012 - DNA, 624 bp, Oryza sativa
  ref <308>: DATABASE ACCESSION NUMBER: AK103454
  ref <309>: DATABASE ENTRY DATE: 2002-08-28
gggggtttcgtgttcatctcgccttgcccttggctcgcgtcggggcggatgcggaggcggcgtcgctgtccccgatcgaatgctgccgctgctgcgccccctcactttcgagatctgagcgcgtgacgcccgcctctccggctccgaggagaaatcaatggagaacggaaccaaggctgtcgatgttgggcaaaggcaactcaagatcatggaagaatgtcttgctgcaacgatcccagattcccaatcttttgtacattctgctctcctctcgggcttggccagcataacatgaagtccaagccccaaagaaacagccccttgtaagaggggttcttcgtctgcacgtgcccaacaacaactcctgcaaccgttttctccactgacaccgatgaactcatccgggtgacctgcttctccattaacctatggatgaagctccgttgaaaatccaagtagaagtactgcatagccgtctactaatctcttcttacacactgcttatattttgatgtgtttccttccatggttcgttactgtatcgagttcatgtattagtacttggttatgctgccagcttttgatgccttctgtacggtctcggtgccaatattggttggatcg

SEQ ID NO: 28013 - DNA, 1421 bp, Oryza sativa
  ref <308>: DATABASE ACCESSION NUMBER: AK103455
  ref <309>: DATABASE ENTRY DATE: 2002-08-28
gaccattttcctcaaacgatatagctagctctactacacacttgctctgcccgatgatgatggcgcgagaggtgagcagcgaggaggaggctggcggcggcgacgagctccggcgagggccgtggacggtggaggaggacctgctcctcgtcaactacatcgccgcccatggcgagggccgctggaacgcgctcgcgcgctgcgccgggctgaagcggacggggaagagctgccggctgcggtggctgaactacctgaggccggacgtgaggagggggaacatgacggcggaggagcagctgctgatactggagctccatgggcggtgggggaatcggtggagcaagatcgcgcagcatctccccggccgcaccgacaacgagatcaagaactactggcgcacccgcgtccagaagcacgccaagcacctcaactgcgacgtcaactcccagcagttcaaggacctcatgcgctacctctggatgccccgcctcctcgaacgcatccaccgctcctcccaatcccaatcccacgacgccgacgacgccgacctctccgtctccgccgccaccagctgcatcacctccgacctcgtcgtcgacgcgcatcacccgccgctcgccatggccgacagcaacgactctgcagccatgtggcagcaacatcaagcaccacagatgagcgtcgccggcgcgccgccgccgacgacgacgatggcccaacatgtagtactgccgaccgcggcggcgtcgtgccaccagatgcaggatcagttcgtctgcgcgcgcgcggcggagacgacgacgtgctgctggtccgagtcggagtcgctgccgggtctcgcggggctgtactacgacgacgcggcggcggcgctgccggagtttgacgtggagaccatggccatgtggggccctgaggacgacccatggtacacgcaaatgcttggcttgtgaaaaccgttgaccaaatatgatgccttcctacctacacctacacatttgtgtggattaaagaagaaggagatgcttattatttggaggttaatttgatttgatttaacccccaataatctcgtctccagttcttaccacatatatcgtcaattctcaagtacagtacattagctacactttagtacagtagtagtattttggaacatgcatggagtaattacttaagctacacttggtagttttcctcctccatgatcatcaagtaaaagcatgcatgcatgatcatggatggagataaactacagtgctaattaaattagtctggatgtacggttaatcgatcgcttggtttttactatactgcctgaattactccattcttaatttctcgggacggatgaaacggattggtttaatttgtttgtaataatgtatatcaagctagctagctagcttaatttggtg

SEQ ID NO: 28014 - DNA, 2670 bp, Oryza sativa
  ref <308>: DATABASE ACCESSION NUMBER: AK103456
  ref <309>: DATABASE ENTRY DATE: 2002-08-28
ggcagtgtcgacttcctctcggccgcgctagggacccacgccgccgccgccgccacgtccgccttttccccgctccgctgctcgcctccccagcctccgtccgtgctcccctaaaagcaggaggcggccgccgagaaggagaaggcgccgcgaagagtgagagcggggggctagacctagtgcaatcgagccttcatcggcgccaccgcgggccatcgcgtggttagccgccggagtcgggggtggggggatgccgcgggagccggccgccatgcgcgtctacacggtctgcgacgagtccaagtacctcatcgtgcggaacgtcccgtctctcggctgcggcgatgacctcgccaatctcttcgccacctacggcccagtagacgagtctgtctcttcctcctcccacctataccataccaccacctgcctgtgtgaatgatttgcttgcttattcaggtgcacgcccatggatgccgaggactgtgacccctacaccgacgttttcttcatcaagttctcgcaggtcagcaatgccaggtgagtaaccaaaatagtaccttttctttcagtcctttttcctgttcaggaagaaccgacgttcacagaatgagtgaaaaatgttactagccaccattaattccaacaattaaatttgtgtttggtagtcttttctaagacaaatttgtctccttctcatccctgttttgagctctgtgcttaggattacagctttagtttagtttgttagcaattgggaacaaatctggacctactatttgccaaatcgcaagtttattttctcaatgaaagcaagaaacggcattaattgcaggtttgcaaagaggaaattggatgagtctgtatttcttggcaaccggctgcaggtgtcatacgcccctcagtttgagagtcttctggacactaaggagaaactggaagtcaggagaaaggaagttcttggccgaatgaaatgtgtgcttccatgttcttcttttccccctaactctatgctgtttagccttcgttgtttcaatatgtaaccgttttctttctacgactacacattgctagtttatcttgcttggatagttatatataaatgtttgctttcatttctccagcatcttctggaagacctgaagggttatctcatcattctccaggtcagggatcatctgctgcaaactcacaccgtcagatgagctctaataaaaggttaacatattgcgtactactatcagtttttttttgtgtgtgtgtgtatgcaaacattgctaaggagaacattggtcatcagttactcattgatcggcccagtcttcaactaaattctatccctgttaaccatgccatttggaattggaagttaccctcatatccacatctttattgatatatgacatctggtctgaatatttgaagatggatacccagtctttatgaatagcttagcagctaagctacagtgggtttaccgaacaaaactgagatctttggcacagtaaagttgaaagaaaaaccagcaatccttattccttaatcaaaagactgagacacttcttctagctttgtgtttggtttgctctttagattttatgcatcagtttgtatatttcatactcagcactaccatgtaggagtatcaaccaggatttggtttgttcattttaaggaatgaacttcaattatgatacaattacatacactcgccttttatggaatattttcaaactttataagtaatattgaatgatgtggaactaagatggtaacccaaaagcccatctggatcttctctgattagaagtgtaaacactgtatatgacttatctagtgaagttccattttgccatcttcagggaatacacaaaaacacttcatgcttctcaatttgaagatcctcgtttcactcatgtatcctctaataaggtatgcagtacaacagtatgtatcctctaataaggtatgcggtactgcaaagtaatataatgtttggaatttggactctaggtgagaaaccaagaggttattcattgagaaaaaatatggcattaaattagcagggcatataatggtgtaagccaactttcttttcagaaaaagaaaaacagaaacaggggaattaatgcattgagtcatacatagtacctggaaaggcaaattctgcaataatttggaattttgtatatcctgccatattattgaacttagtattcttaccaatttgtggagaaaatacttctctgtaggattattttccatctgagtcgatgaatgcaacagtaaacctagtcagggagaagcttgataagatacaatccagcagcgacaattccagtgctatagttgcacccaagaaaccaaggaccgataaccgtagacgaatttgatatcatgggatggagtagaacatgcatttttttttcttcatctactttcttgtagtttgttttataattggcagaaaatagtgtactataatgctaaatgctgtctatattctccctcagttgtaaaagtatccccttttaggttttctgcggaagtaacgttagtatcatgttttgacgtggattaatgtcatgtttgatgagcacatttctcttcgtgaaaagtccacctttcttttgaacaatttatatttgaaacatcatgttctgttggtat

SEQ ID NO: 28015 - DNA, 2355 bp, Oryza sativa
  ref <308>: DATABASE ACCESSION NUMBER: AK103457
  ref <309>: DATABASE ENTRY DATE: 2002-08-28
tgtgttaggctgcctcacacggcgagggatcgcggactccccggacgaggcggcggcggcggcggagctccggcgaacccacacggcggccgccccgactccgtctcctctgcttctcccacagctccggcgacaatccagaaactccactcccttgagagcgagcgccgccgcgccgccgccggtgattgcttccgcctgcagcctcgtcgaaatcgtaggctgtggattcagaagagagaggagagagagaagttcgaacagagtaggtcacgtggagcgccatgtccacccggagcgccttcctcgccgccggcgttgccatcgccgccgccatcttcctcctccgccctgcttccgacctgtcgagggatttgggggaagccgtcgctgacatgatactggccaatgccaccatctacaccgccgaccccgcaatgccgttcgccgaagccatggccgtacgcgccggccgcgtgctccgcgtgggcggatactactctgttaaggagttgaagggtagacacacaatggagttgaatcttagtggaaatgttgttcttccgggattcattgattcccatgtgcacttcattgatggtgggttgcagttagcgcgggtgccacttcgaggggttacaagcaaagatgatttcatcaacagggtcaaggaagctgtcaaagataagcatcctgggcaatggatatttggaggaggttggaacaatgatttttggggaggtgattaccccactgctgcttggttggatgatatatctcctgataatcctgtctggctttcacgcatggatggacatatgggaatagccaattcactagctatgagaatggctgggatcaacaaaaacacaaacaatccagttggtggaactattatgagaacaactgaaggagagcctaccggtcttctagttgatgctgctatgaagcttgtgtttgatgttatctcagaagtctctatccatgaaaggagagatgctcttcttagggcaagtagacacgccctaatgaggggggtgactactgttgttgatgttggaagttatttccctggaaagtcagaaaagcaagtctggcaagattttacagatatatatgaatgggctcattctgtcgaaacaatgattatgagagtttgcttattcttccccatgcccacatggtctcgtgtttatgaccttatccatgaaaaaggtcggatgttaagtcaatggattcatctaggtggtgttaaagctttccttgatggttctttgggttcttccagtgctttattctatgagcactacaaggatgatcctagaagttatggtctccaattggttgacatggattatctgctcaatacaacattagaattagacaaatcaggactacagattgccatacatgcaattggagataaagccaatgatatgctactcgatatgtatgagaaggtggttgatttgaatggaatgaaggatcatagattccggattgagcatgctcaacaccttgctcccggtgcagccaagcgctttggcaaacatggtattattgcatctgtgcagcctgatcatatattagatgatgccaattctgctgggaagaaaattgggatagaacgagctgagcgaagctcctattcttttcggtcactattagatggtggtgcacatctggcttttggttctgattggcctgtttcagatattaatccattacaagctattcgaactgcagtatcccgcaaacctgttggatgggaagtcccttggatccctgcggaacgcttatctctagatgattctctgaaagcacatactatatctgccgcctatgcctgcttccttgaccatgttttgggcagcctatctgaaggaaagtacgccgattttgtgatcctgcctagcacatcatggaacgagttcggcagcgacataacggaccacgtcttggcaacatatgtgaacggcaagcaggcctatccatgatcccattaggtgaccgactgactgtgctctaggttgagtacctgaacaagagattttagctatgtacctaaacgagcacttgtccagatacacagccaaaatatgttaaatttgctgacagggagtactgtaattgtcatatgcaaagttagctatttacctgaacaagcacttgtccaaatacacagctaaaatctcttaaatttgtggacagtgaatactgtaattgtcatatgcatacaacatctgagattttagtatgtacttgaacaaacacttgtctagagatacacagccaaaatctcttaaatttgtggatagggagtactgtaattgtcataagcaaagtcgacagcat

SEQ ID NO: 28016 - DNA, 2531 bp, Oryza sativa
  ref <308>: DATABASE ACCESSION NUMBER: AK103458
  ref <309>: DATABASE ENTRY DATE: 2002-08-28
gggcgggggtcgttgatttgatctgacccgtagtagaagcagggggagggacggtgggcggtggcttgggagggaggcaggggcggggcggctcgagttaggtttcttggcggcttcagttgggcgaggaaggtgagcggctttcggtggttggttgctttgaggctttagctgaagacacaataaaggaacaccaaaaaaatgggtaagaaaggaaattggttcagtgctgtcaagaaagtcttcagctcatccgatccagatgggagggaagctaagatcgagaaggcggacaagtcgagatccaggaggaaatggccatttggaaagtctaagaagtctgatccttggacctcaacagtggcagtgcctacctctacagcaccgcctccacagccgccaccgccaccgccaacacaccctatccagccacagcctgaggagatcaaagatgtcaaggctgttgaaactgacagtgaacagaacaagcatgcgtactctgttgcacttgcctctgctgttgctgcagaagctgctgccgtcgctgcccaggccgctgctgaggtggtccgcctcacaacagccaccacggctgtgccgaaatcgcctgttagttcaaaggatgagcttgccgctatcaagattcagactgccttcaggggttatctggtaaccaactgcacttgtagtataattgtgttcgtccttgtcacccatgtttacgtcttttcactaagaatacacccaaaaaatgattatatcttgttatttgtgcgggtcactgtcttgggcatttatttttcattcctgagcatgcactttagctaacagcctgctaatattaagtgtttgtaagatatctaatttggttggtagaaaattgctgtcagatgcatcattttctgctttgtccattttggtaacaccgtcaatattgtgttctgctggtcaaaatgaaacatacattagtctgacgtttgatgtttccagactccagtgttgttacacatcacaatatgttggtgttgatataatagctataaaaatcaaagtgaagcaagacaagatacttccattgggacttgatgagctttaaatctttgttaagttctgttttatttatgtgacattaagtggctacttattttacagaactaatattatttcaggcaagaagagcgctgcgagcacttagagggctagttagattgaagtcgctggttgatggaaacgccgtcaaacgacaaactgcgcacaccttgcattgcacacaaaccatgaccagagttcaaactcaaatatactctagaagggtgaagatggaggaggaaaaacaggctcttcaaaggcagctacaattaaagcatcagagggaacttgagaaaatgaagattgatgaagattgggatcatagccatcagtccaaggagcaggttgagaccagcctaatgatgaaacaagaagctgcgctaaggcgggaaagagctcttgcatatgcattttctcaccagtggaagaattctggccgaactataacacctaccttcacggatcaagggaatcctaactggggatggagctggatggaacgctggatgacatcaaggccttgggagagccgagtgatatcagataaggatcctaaggaccattattcaacaaagaatcccagcactagcgcttctcgtacttatgtaccccgcgcaatctcaatccagagacctgcaacaccaaacaagtcaagccgtccaccaagtcggcaatcgccatcaactcccccgtcaagggtcccctcagttaccggaaagatcagaccagcaagtccacgggatagctggctatataaggaggatgacttgaggagcatcacaagcatacgctctgaacgcccaaggaggcagagcacaggtggtgcctctgttcgggatgatgcgagcctaacaagcacaccagctctccccagctacatgcagtccacagagtctgcaagggcgaagtctcggtaccgcagtctattgactgacaggtttgaggttcctgagagagtacccctggtccattcttcaataaagaagcgcttatccttcccagtcgcagacaaaccaaatggtgagcatgcagataagctgatggaaagagggaggcgtcattcagaccctcctaaggtggatcctgcctcactgaaggatgttccggtttcataattcagtcatattatcagagcttattattgttaggttgcttttcttcctttgtgtattttctaatttagattgcattctcgagagtcgaggttgaaccctccgtgaaaatgtatgatttgtcagggttgatttgagacaattctaactgtttacaggcagtttttttcctgatgattgttgtgtgtgaagagtaagaaaaagaaaatgaagcggtggaaaaaaatggtggtgtgttctaatattgtgtgtgcttctcttccaatgtacaatactccatgaactatgggttgacctattaattgtaagacatgggtttttctggttatg

SEQ ID NO: 28017 - DNA, 1869 bp, Oryza sativa
  ref <308>: DATABASE ACCESSION NUMBER: AK103459
  ref <309>: DATABASE ENTRY DATE: 2002-08-28
gagagagagggaagcgaagcgaagcacagcagcgcgaagaaaggtcaaggcatcgtggagaagaaggagaggaagaggaagaggggataaaagttttgcttggattggttcttgttcttgaggcgttttttcgcgtgggatggagagggattttcttggcgcgatttggaggaaggaggaggcggccggcaagccggaggagcattcagattatcgaggaggaggaggaggcgcgtcggcggcgatgcagtggcagtttccggcgaccaaggtcggcgccgcgtcgtcggcgttcatgtccttcaggtcgtcggcggcggcggcgagggaggaggaccccaaggaggcggcggtgttcgaccgcttctccctctccgggttccgcccgcccgccgcgcccgtcccccggtgacgccttcgacggcgctgccgccatgaagcagcggcagtttggattcaacggccggcagcagtacgccgccgcggcgcagcacggccaccgggagcagggcgtggactcctacggcgtcgcggcgccgcaccatttcccgtcgccgtcgccgtcgccgcgccaccccgtgccgttcggccacgcgaaccccatgctctgggttcatagcctccccaacgtcgccggcgggagcccctacaggaaccaatccttctccgtcggcaactcggtggccggctccaccgtcggcgtctacggcggcccaagggaccttcaaaatccgaaggtgacacagatgaccatattctacgatggattggtgaatgtgttcgacaacattccggtggagaaggctcaagaacttatgcttttggcaagcagggcatccattccgagtccaccgagtgcagctcgtaaatcagattcgcctatttccgctgctgcgaaacttacagtgcccgaggctttgcctgcaaggcagattgtagttcagaaaccagaggcttctgtgcctcttgtatcaggggtttcgaatccgatcaccatcgtgtcgcaagctgtgactctccccaagagcttttctagctccaacgactctgcggggccgaaatctggaggcctaccgttggctgttactcctttgagccaggcatccccgtcccagccgattccagtagcaaccacaaatgcttcggctatcatgccaagagctgtgcctcaagctcgaaaagcatctctcgcccgattcttggagaagcgaaaggaaagagtgtcaagtgttgcgccatacccatcctcaaagagtccactagagagcagtgacaccattggcagtcccagcacaccgagcaaatcatcgtgcacggacatcaccccttcgaccaacaactgcgaggactcactgtgcttaggtcagccaaggaacatcagcttcagcagccaggagccccccagcacaaagttacagatatgagacctggtgatcattgtataccgaagattcagctcagcgagagtcggctgaccttgatgccagatcggacgccttctttcgcatccgtgttagggtatgatgagacataggaagagatcactagatgctgtttctatcctggctgcaaaatctttctttggctagagctgtttataagtgctgatctagccacagccgccgccacttagtagtacgagagctgtgacattgcaggtaatttcaggctgttcttgattatttttgccctgagccatagcggcattggacttgagaggaaaagaaatgctgctgagttgtataggattacagattcggcgtatgtaattttgctgttttttggttctagccttaaacatacaaagctagcttcagaattcaaacagagtatccctgatgccaatatgccattgccatggccattttt

SEQ ID NO: 28018 - DNA, 780 bp, Oryza sativa
  ref <308>: DATABASE ACCESSION NUMBER: AK103460
  ref <309>: DATABASE ENTRY DATE: 2002-08-28
ggccggccttccaaatgccgtcctccccgtggatccccaccgccggcgctccgccgccgcgggcagcgccggccgtggtctactcctggctgtcggagcgccaccctgtcaaggaggcaggagcaggagcaggcgcttccaacgcgcaggagtccaggccccgcgtttctccggcggagaactctgaagtggaaacccgagagcatgaagagaaggtcaacaaatatcaggctgtccttgcagctcgtttgaaggccaaatacttttctggcaaggcttttggtaaagaaaatgtgtttgaagaaatgactatccagtctgagaccattctgttaagcaggtgcccgttttcaagtttatttgcagatccagcaaaattttgccgggagaagagctgtactaaagaggacatttatccatctttgacaaatgcctcctttgccaagcataaccatttatctctagttcgtgaagactcgtcgaagtaattagcggacagtttgtctgcagaaaactcttaacacctgccaagtggcacctgtctatcaataccacctaatggatgagggttgggtagttactttattaactacatatgttatccttaaactaaatgaactgaaacatgtaaaatatcaacaggcctaatttaacttgagagtttagtttcttcttgtaggcctgttgagcatatagatagctatgaacttaactctatgcaaaacaatgctcatattgagattattcctctagggggatgtctccaacattttacctgcc

SEQ ID NO: 28019 - DNA, 1754 bp, Oryza sativa
  ref <308>: DATABASE ACCESSION NUMBER: AK103461
  ref <309>: DATABASE ENTRY DATE: 2002-08-28
gatctcttcccaagcttcaacttcaagaacccacccacttctcctcctcttctccatccgctgcggcaagcgcgcaattcagttgctgcgagctcgctcgccggcgacaatggcggcggcggtggcggtggtggttggttgcgttcttcttggtggtgtgtgggggttcccggaggaggatttggtggcgcggctgccggggcagcccgtcgtcgggttcaggcagttcgccggatacgtcgacgtcgacgagaaggccgggaggagcctcttctactacttcgccgaggcggcggagggcgccgccgccaagccgctcaccctctggctcaacggaggtcctggatgttcttcggttggaggtggcgcgttcacagagctcggcccattttatccgagaggagatggcagaggcctgagattgaacaagaagtcttggaacaaagtatccaatcttctgtttgttgaatcaccggctggagttggatggtcctactccaacacttcatcagattacaatactggcgatgcacagaccgctaatgacatgtacaaatttctgttgggatggtacaagaagttccctgaatacaggtcaagagggctacttcttagtggagagagctatgcagggcattatataccgcaactcaccgatgtacttctcacacataatgagaaatcaaatgggttcaaattcaacatcaagggagtagctatcgggaatccgcttctcaagcttgacagagatgtccccgcaacatatgagtatttctggtcccatggcatgatctctgacgaaatatttctatcaatcagccacagttgtgattttgaggactatacctttagcaacccccacaatgagagcaagtcatgcaatgatgccattgcagaggcaaacagtatagttggggattatgtgaacaattacgatgttattcttgatgtgtgctacccatcaattgtgatgcaggagctacggctgcggaaatatgtgactaaaatgagtgtaggtgtggatgtttgtatgacttacgaaaggtatttctatttcaaccttccagaagtgcagcaagctcttcatgctaacagaacacatttgccctatggctggagcatgtgcagcgatgtgctgaactacagcaataaggatggcaacatcaacatcttgccattacttcagagaattgtagagcacaaaataccagtttgggtgttcagtggagatcaagactctgtggtgcccctattgggctcccgaactcttgtacgagagctagctcatgacatgggcttgcatgtcacagtcccatacagcagctggttccgcagagggcaggttggaggctgggtaacagagtatggtaatattctgacctttgcgacggtgcgaggagcatctcacatggtgccatttgcgcagccagaccgagctctcggactttttcaatcattcgcacttggacggagactccagaatacaacccacccacctattaactaagtgtacctacgaaaggagctgaagatacaaacaaatagtctaggattttcagttttgctacagaagattagttcataagggtgtattagatggtcaaatacgaatattttatctattagagagaacagggaaataatactagattaaattctttattgttctctatctggattgtcagattgcattcctggaagtctggaacattgagcaatctgtataactatgtcattttaggggttttgggggc

SEQ ID NO: 28020 - DNA, 1265 bp, Oryza sativa
  ref <308>: DATABASE ACCESSION NUMBER: AK103462
  ref <309>: DATABASE ENTRY DATE: 2002-08-28
gcacttgtcagacagcacaaaacatcgatccaaaagcacttctcggacagcaaatcgtctcgatcctgttattagtattcaggcgccatggcagctggaagctcccatgtttctgctgatgcaaggaagctggtgggcaaggtggcggtgatcaccggcggcgcgagcggcatcggcgcgtgcacggcgcggctgttcgtgaagcacggcgcccgcgtcgtggtcgccgacatccaggacgagctgggagctagcctcgtcgccgagctcggcccggacgcgtccagctacgtgcactgcgacgtcacgaacgagggcgacgtcgccgccgcggtcgaccacgccgtcgccaggttcgggaagctcgacgtcatgttcaacaacgccggcgtcagtggcccgccgtgcttcaggatgagcgagtgcaccaaggaggacttcgagcgcgtgctcgccgtgaacctggtcggcccgttcctgggcaccaagcacgcggcgcgggtgatggcgccggcgcgccgcggcagcatcatctcgacggcgagcctgtcgtcgtcggtgtccggcgcggcgtcgcacgcgtacacgacgtcgaagcacgcgctggtggggttcacggagaacgcggccggcgagctgggccggcacgggatccgcgtcaactgcgtttcgcccgccggggtcgccacgccgctggcgagggctgccatgggcatggacgacgaggcaatcgaggcgatcatggcgaactcggcgaacctgaagggcgcaggcgcactcaaggcggacgacatcgccgccgcggcgctgttcctcgccagcgacgacggccggtacgtgagcggccagaacctgcgcgtcgacggcggcttgtccgtcgtcaacagcagctttggtttcttcagggactgaaaatgatttgggaccagtcgtcagtcgatcgacaatactacattacgtcgttatatatggttgatgttatttgtgttgcattcttgaataaactagcatccatggttccccgcttgtttgcgaggacattccatcgctagctagattctgtcttgtatttgtatttgttggaagagtgaaatacatgcatgaacggtgcttaaactattcaggtttcctgaactctaaaattaaatttgtatttttatcctcaaatttatattgggtgccacttatgtgacatgtcacaaagacgcctacatgtcaattggctaacaggttcagtcatacagaaaatataaaattaaaacttt

SEQ ID NO: 28021 - DNA, 4445 bp, Oryza sativa
  ref <308>: DATABASE ACCESSION NUMBER: AK103463
  ref <309>: DATABASE ENTRY DATE: 2002-08-28
ccccgcggccaccaccaccctcgccgtctcccgtcggagcctcctcgcccctcgcgccatcgccgcttccaccggccgcgcctccccgggccttgtcggaaggttcaccctggatgccaactccgagcttaaggtgacattgaacccagcaccgcagggttcggtggtggagatcaatctagaggcaactaacaccagcggctccctgatactgcattggggcgcccttcgcccggatagaggagaatggctcctaccatcccggaaaccagatggcacgacagtgtacaagaacagggctcttaggacgccttttataaagtcaggtgataactccacgctgaaaattgagatagatgatcctgcagtgcaagccattgagttcctcatatttgatgaggcacggaataattggtacaaaaacaatggccagaatttccaaattcagctacaagcgagccaatatcaagggcagggtacatctactgctacttcttctactgtggttccagaggatcttgtgcagatacaatcatatcttcggtgggaaagaaagggaaagcagtcatatacacctgagcaagagaaggaggagtatgaagcagcacgaactgagttgatagaggaattaaacaagggtgtttctttggagaagctacgagcgaaactgacaaagacacctgaggcaactgatagtaatgctcctgcatctgaaagcactgtgactactaaagtcccagaggaacttgtacaagtccaggcttacataaggtgggagaaagcaggcaagccaaattatgccccagagaagcaattggtcgagtttgaggaagcaaggaaggaactgcagtctgagttggataaggggacctcagttgagcagttgaggaacaaaattttgaaagggaacattgagacaaaagtttccaagcagctgaaggacaaaaaatacttttctgtggaaagaattcagcggaaaaaacgagatattgtgcaactacttaaaaaacacaagcctactgttatggaagcgcaagtagagactcctaaacaacccactgttctggatctcttcacaaagtcattacaggagcaggataactgtgaggttctaagcagaaagcttttcaagttcggtgacaaggagatactgggaattaccaccgttgctctaggaaaaaccaaagttcacttggcaacaaactatatggagccacttatacttcactgggcgttgtcaaaagagaatggagagtggcaggcacctccctcaagcatattgccatctggttcatcattgctagacaaggcatgtgaaacttcattcagtgaatatgaattgaatggtctgcattgtcaggttgttgagatcgagcttgacgatggtggatacaagcggatgccctttgttctccggtctggtgaaacatggatgaaaaataatggctctgacttttacttggatttcagcaccaaagttgcaaaaaatacaaaggatactggtgatgctggtaaaggcactgctaaggccttgcttgaaagaatagcagatctagaggaagatgcccaacgatctcttatgcacagattcaatattgcagcagatctagttgaccaagcaagagataatggattattgggtattattggaatttttgtttggattaggttcatggctacaaggcaactaatatggaacaagaactacaatgtgaagccacgtgagataagcaaagcacaagataggtttacagatgatcttgagaatatgtacagaacttacccacaatatcaggagatcttaagaatgataatgtctgctgttggtcggggaggtgaaggtgatgttggtcaacgcattcgtgatgagatattagtaatccagagaaataatgactgcaaaggtggaatgatggaggagtggcaccagaaactgcacaacaatacaagcccagatgatgtagtgatctgccaggccctacttgattatatcaagagtgattttgatattggtgtttactgggacaccttgaaaaaagatggtataacaaaagagcgtctattgagctatgatcgaccgattcattcagagccaaatttcaggagtgaacagaaagatggcttactccgtgacttgggcaattatatgagaagcctcaaggcagtgcattctggtgctgatcttgaatctgctatagcaacttgcatgggatacaaatcagagggtgaaggtttcatggttggtgttcagattaatccagtgaagggtttgccatctggatttcctaaattgcttgaatttgtacttgaccatgttgaggataaatcagcagaaccacttcttgaggggttattggaggctcgagctgaactacaccctttgctccttggctctcctgaacgcatgaaggatcttatctttttagacattgctcttgattctactttcaggacagcagttgaaagatcatatgaggagctcaataatgtagaaccagagaaaattatgtacttcatcagtcttgtccttgaaaatcttgctttatccaccgacgacaatgaagatatcctatattgcttaaagggatggaatcaagccttggaaatggctaaacagaaaaacaaccaatgggctctctatgctaaagcatttctggacagaaccagacttgcccttgcaagcaagggagaacaatactataatttgatgcagccctcagctgaatatcttggctcgttacttaacattgaccaatgggcagttaatatctttacagaagaaattattcgtggtggatcagctgctaccctgtctgctcttctgaatcggattgatcctgttcttaggaatgttgcacagcttggaagttggcaggttataagcccagttgaagtatcaggttacattgtagtggttgatgaattgcttgctgttcaaaacaaatcctatgataaaccaactatccttgtggcaaagagtgtcaagggagaggaagaaataccagatggagttgttggtgttattacacctgatatgccagatgttctctcccatgtatcagtccgagcaaggaattgcaaggttttatttgcaacatgctttgatcctaacaccttgtctgaactccaaggacatgatgggaaagtgttttccttcaaacctacttctgcagatatcacctatagggagattccagagagtgaactgcaatcaggttctctaaatgcagaagctggccaggcagtgccatctgtgtcattagtcaagaagaagtttcttggaaaatatgcaatatcagcagaagaattctctgaggaaatggttggggccaagtctcgcaacgtagcatacctcaaaggaaaagtaccctcatgggttggtgtccctacatcagttgcgattccatttgggacctttgagaaggttttgtctgatgaaatcaataaggaagtcgcgcaaaccatacaaatgctgaagggaaaacttgctcaagatgattttagtgctctaggcgaaatacggaaaactgttctcaatttaactgctcctactcaactgatcaaggaactgaaggagaagatgctaggctctggaatgccctggcctggagatgaaggtgaccaacgttgggagcaagcatggatggcaattaaaaaggtttgggcgtcaaaatggaatgaaagagcatattttagcactcgtaaggtgaagcttgatcatgactacctttccatggctgtacttgtacaagaaattgtcaatgcagactatgcctttgtcattcatactactaacccatcatcgggagattcgtctgagatatatgctgaagtggtgaaagggcttggagaaacacttgtaggagcctatcctggtcgcgccatgagctttgtatgtaagaaaaacgaccttgactctcccaaggtactgggtttcccaagcaagccaattggtctcttcataaagagatcaatcatctttcgttcagattccaacggtgaggatttagaagggtatgctggagcaggactgtatgatagtgtccctatggatgaggaagatgaagtcatactcgactacaccaccgaccccctcattacagatcagggattccaaaaatctatcctctcgagcattgcacgggctggtcatgccattgaggagctttatgggtccccacaggatgttgagggtgcagtgaaggaagggaagctatacgtagtacagacaagaccacagatgtaatctatatgtatattttatagccaagtcaatcaggcaatgttgtagagtaagatatacgggccgtgggacatgtataacacgttacgcccttttttttattatttgctttcatactcacaatacactaatttatagggcttattttatcgccaataagtgtaatctgactatgatcataaataagcctcctaggctaccg

SEQ ID NO: 28022 - DNA, 1304 bp, Oryza sativa
  ref <308>: DATABASE ACCESSION NUMBER: AK103464
  ref <309>: DATABASE ENTRY DATE: 2002-08-28
ggtcggtcaacgccgcgctcgatctctcgccgccatggcccgcctcgccgtcgccgccgcactcctcctcgtcgccctctgccgcgtcgtccacggcgaggccgatcaggagaccgcccccgcctacgccaaccgtgaagcctacgtcgagcacaatggtggtgacgccgccggcacgtccgtcgccatcgtcccgccctacctcgacgccgccgccgccgcccgtgacgagcccgcggcggcggcggcgagccccgaggggcctgtgatcccggtcgacgacgacgcggcggaccagcagggcttcctccgcttcccctgccgctaccactgccgctaccgcccaccacatgcgccacggcggccatcgccatggggagggattccatggcaaggaggagaagcagcagctggtgttcgagatgccagtcgagccggcgacccgcggcgaggagcgcagggaggaggaggagggggtggttctccccgtcgcggagccagatccggactcgcgccgccagtatgccgccgtagccgccgccgaggaggaagacgaggatgagatggcgaggctccacaacggccgccgctcccaccaccaccatcatcgccaccaccatcatcaccacgacgagaacgaggaggacgagcacgagcaggccgacgaggcttcgcccgccgtggagcggttgatcagcttccaccgccgccgccaccaccaccaccaccacgaagacgaccacgagcagcgcgaggagggtgcgcccatgaagcggttccgccacaaccacgaggaggaggaggagtccgagatgaggaccaagcgcttccaccaccaccaccacaaggacgacgacgagcgcgagctggaggagatggcgaggcggtggatcaggaaggcgctgatgagcagcaggatgcaccaccaccgcggctgccgcttccaccaccaccaccaccacctcagcttccgccaccgcgcggaggacgccgccgccgccggcgaggaggaggagaaaggcggggtgatgagttggctcaaggactttgtgaaccgcttctaggtctctcgatcgatcagcctagcttgccgctgcttcttcttctccatcgtctgcttgtgttgttgtgtcgagttcattcatgattcatatggctgctgtgtattctacttttctacggccgtatatgtatttcgtataccgtatttgtgttgtggtactctcgacttatcccgagtgttcatgttgttgtttgtgtcacggatgttaataaattgttctcctatttcaaatgcgtgcatt

SEQ ID NO: 28023 - DNA, 2347 bp, Oryza sativa
  ref <308>: DATABASE ACCESSION NUMBER: AK103465
  ref <309>: DATABASE ENTRY DATE: 2002-08-28
gggagaccaagaagaagaaagaggaaaccacacccacctccatctccgcctccgccgccgccgccgccgaccaagtcgagggggagatccagcgagagcgaggaggaggaggaggatggcggtgatggaggagcagcaggagggagccgcgggggtgatgcggcggaggcccaagacgaagatcgtgcgcacgctggggccggcgtcgaggtcggtggagatgatcgggcggctgctccgcgccgggatgtgcgtcgcgcgcttcaacttctcccacggatcccacgagtaccaccaggagacgctcgacaacctccgcgccgccatggagagcaccggcatcctctgcgccgtcatgctcgacaccaaggggccagagatccgaactggatttctgaaagatggaaaacccgtacagttgaagaagggtcaagaaatcacagtttcaactgattatagcataaagggtgatgacaacatgatatcaatgagctacaagaagctagcggtggatctgaagccaggcagtgtaatattatgtgctgatggcaccatcactcttactgtccttcactgtgataaagagcaaggcttggttcgctgccgttgtgagaacactgctatgcttggtgagaggaagaatgttaaccttccaggagttattgttgatctcccgacacttactgagaaggacaaggaggatattcttaaatggggtgtcccaaacaagattgacatgattgctctgtcttttgttcgtaaaggctcagaccttgtagaggtcaggaaggtgcttgggaagcatgcaaagtcaataatgctgatgtcaaaggttgagaatcaagagggagtggctaactttgatgatatcctggcacaatctgatgcttttatggttgcaaggggtgatttgggaatggaaattccgatagagaagatcttttatgcacagaaggtgatgattttcaagtgcaatattcagggcaagccagttgtgactgcaacccagatgttggaatctatgatcaagtctccccgccctactagagcagaagcgactgatgttgccaatgcagttcttgatggcactgactgtgtcatgctcagtggtgagacagctgctggggcttacccggaactggctgtacggaccatggccaagatctgcctgcaagcggagtcatgcgtcgaccatgccgctgttttcaagtccattaccgcatcagctccaattcccatgagcccattggagagccttgcatcatcagctgtgcgtacagcgaactctgccaaggcggcgctcatcttggtcctgactaggggaggaacaactgctaggctggtggccaagtacaggccatccatgccgattctgtccgtcgtggttcctgagctgaaacagaccgactccttcgactggacctgcagcgacgaagctcctgcgcggcacagcctcatcgtcaggggagtgatcccgatgctgagtgtagccactgccaaggccttcgacaacgaagccactgaagaagctctcgggttcgccatcagcaacgccaaggcgatggggctctgcaactccggtgagtccgtcgtcgccctccaccggatcggaactgcatctgtcatcaagctcctgacagcgaactagtggcagacggcagttaatccacaccattttgctcggaggaaaatttttgctgggggatttttacttaccacgcatatctatagcttttgttgccatgatagtggcatttgcattcaggtgcaccttcggtgtttgctgttcatgggttaaccattgaaacagttaaattcgttattgctaccgcagcttatttcgctgcctctgctgctactagtattaaacttgacagccgttacgtaatttgttagttctattctgttctgttttcttggctgaaatgcatttcttgaattcgtttcgttatgatgaatatggttcggggttctgcgtaactggttactgctagggatatgaaatggagttgatagtttccgtccactacttgtagggatataaaatggagtggatagtttcatccgttcggagtagaaactgctccaaatggattgaacaatgttatttggatatctgttgaaggcgtgaaacatctcattttttacatgttggacttaattaggcattgtttataatttatgatcaaacttttttatataaaacaagcttattttgtgtttatgtgatggtatttgtttctattagaagtttaggtggttttcatgttttgagaaatttttgttttgatatttgtgtacgataaaaacgaatatggtataaacattatccatctgtattcatcct

SEQ ID NO: 28024 - DNA, 2175 bp, Oryza sativa
  ref <308>: DATABASE ACCESSION NUMBER: AK103466
  ref <309>: DATABASE ENTRY DATE: 2002-08-28
ggcgtccatccgtggaagggaacggaaagggggaagaagagctgcagcgagcgacgagggcatcgccgcctccgccgccgccgcgcgcgacggtttatcccgtccccgatccgatcgtcgccggggctcctcctcctccaccctcgccgcgggcaatatttggaaccccccagggaagtatctctcaccgccgatcgcctctcatgccgtgctgagtggagcgcctaccgaatccctacccccacccgccgccgccgcagcagctcgtgccgtatcctgtttacagcggtttgtgggtgatggcttccaacgccgaccagcacgcggcggcgaacggtggtggggggacgacgccggctgcgaccggtagcccccctgccgggaagaaggcggcggccgctgcagcgtggaagaggccggggaacggggcggcggtgccggtcgtggtggcgcctgggagccccatcatggacgccgactcatggccggcgctgcccgggctggcgtctccgccgccgacgacgctgacgccgacgccgatgccgcccaaggcatcgcccaaggtggctcctctaccgccacccgctgaggcggtgatcccaccgatctccttggggaattccggcgctccggatgctaatcctgatcacgaagcaccggtgcggaatccgccggctaggcgtgccctggtgatgcctgtgggggatgggctggacaagcgtgcccctggctcagagccatccccagtctacacccctaatgccaggagcaatggaggcggtgatcaccaccagaatggtcgatatggttcccatccccatagccgaggtagtggctatggtggtggggggaacaggaggggcaatggtggaggtggaggtggaggtcgccgtggacaggagcaccatggtggttttgatgggcaacgccgtggcggtggccgcagggacggccatgggcctggacaccagcagcgcggccaccatccatcttacataagggctcctctggctgttgtgactgcggcgcctcctccaccaccaccatttgttaaccctgctactccacaaacaccaccttatggagctcccataggcttccctgagatagcacctcatgtctactattttacgtctcccctggaaggtgttcaagcactgccttttgtgcctcacccagcaagccctccagctatgttaattcctcaatttgatcctcttcgagcggagctgctgaagcagatagagtactactttagtgatgacaatttgtgcaaagacatattcttgaggcggcatatggatgaccagggttgggtgccattacccctgattgcaggatttaatcaggtaaaaaagctgactaataacgtgcagtttatcttggaaacagttctgcaatctaccgtggttgaagtacagggtgacaaattgcggaagcgtgaaagatgggagatctggttgcttccaaaacaaggttattctgctggaaattcttctggttcgctgtcccctgtgacatccaacattgattcactggcatctcagtttcaatctgttggacttgagggggcaggctaccatgcaagtcaaggaatgcccggtgaagctctccttactaggtcagcaacttcagttagtctaggttatcaggcacccccctttggagggttatacagcaacgggagtggaccactttttgggcagaagtctgcaagaagtttactccggagcgataccttttgaggttttacacaagaaagattacaacggcatgccgagttttctctggttacggcacgcgtacctcatctactggggtgaggagtgaggactaaaatccagttgatttggaagaaaacaaccaaaaaaaggaaataaaacatacaaaaaagagagatagaaatacccaaaaaaatataaaaatataaaaaccaaaaaaatcgaaaaacttaaaaacaagaggaaaaaacatagtaggtagtattatgtgcaggacttatgtattttgtggttgtgctcttgctgggacgtgagtacgtgacattacctgttaagtactcgtttgattgttgctcttttgcagactgagttgttatggatgttgtcagtcggaagctgttaaagacgagacaaacttatttcaaaaaactgatgacattattatcagttgtgc

SEQ ID NO: 28025 - DNA, 1384 bp, Oryza sativa
  ref <308>: DATABASE ACCESSION NUMBER: AK103467
  ref <309>: DATABASE ENTRY DATE: 2002-08-28
gaccgtcatctcaccacacaaacgcaggcacacaaacacagagagcagcccaaaccgaccaaaatcactgcagagttcaggcacttcttcagatagttctccccctctgtttctttctctctttatttctttctcgagttcagtttgagagatggatttggcgtggtggttcgcggtggccgtggtggtgtgcggccttgtggggggcggcagcgccgggctgctggagaccaacccgggtttggcgtacaacttctaccagaagtcgtgccccaacgtggactccatcgtccgcagcgtcacctgggcgcaggtcgccgccaacccggcgctccccggccgcctcctccgcctccacttccatgactgcttcgtccaggggtgcgacgcgtcgatcttgctggacaacgccgggagcgagaagacggcggggccgaacctatcggtggggggatacgaggtgatcgacgccatcaagacgcagctggagcaggcgtgccccggggtggtgtcgtgcgcggacatcgtggcgctcgccgcgcgcgacgccgtgtcgtaccagttcaaggcgtcgctgtggcaggtggagaccgggaggcgcgacgggcccgtgtctctggcgtccaacaccggcgctctgccgtcgccgttcgccgggttcagcacgctcctccagagcttcgccaaccgcgggctcaacctgaccgacctcgtcgcgctctccggcgcgcacaccatcggcaaggccagctgctccagcgtcacgccgcggctgtaccaggggaacaccacctccctcgacccgctgctcgactccgcctacgccaaggcgctcatgtcgtcgtgccccaacccgtcgccgtcgtcgtccaccatcgacctcgacgtcgccacgccgctcaagttcgacagcggttactacgccaacctgcagaagaagcagggcgcgctggcgtccgacgccgcgctcacccagaacgccgccgcggcgcagatggtggcagacctcaccaacccgatcaagttctacgccgcgttctccatgtccatgaagaagatgggacgcatcgacgtgctcaccggcagcaaagggaatatcaggaagcagtgccgctccgcctcctgaatcctgacgatcaccatacaaacatattttcttcttggtttcttgaatttttttttcttcttctcctctctcgtttcatcggcgctgatcaaaatatattgtgcgccatgatgattaattaaggtcccaagatctgtattaatttgttaagtgctcgattcgatcgttcaaggtgtgacattttgttaatcttggccttcgtcgcgcgatctaatcgaagaatgaaagaatgcagctcgttctttccactgctgcttc

SEQ ID NO: 28026 - DNA, 3031 bp, Oryza sativa
  ref <308>: DATABASE ACCESSION NUMBER: AK103468
  ref <309>: DATABASE ENTRY DATE: 2002-08-28
gctacaactacacaaacccatcacctttctcctcctcttcttctccttctccttccaaaaaacccaagaaagtgaggtgtaagtgagattaattggttgtgagaagcagcaatgcatgctccaagaaagttcaagaaggcgttcatggagcggctgctgctgagcctgcaggtggccgggctgacgtccaagtccatgggcctccgggagcgccgcgatgccgtcaggctgtcctccgacgtcgccatggcgtcggcgcgcggccgcgcggcggaggcggcgatcgcgctccagcccaagcaggcggttagggtttaccaggtcggggacaaggtggaggtgaggagggaccgggaggtgtacggccactcgtggttccacgccaaggtggccaaggtgatcgacaggatgagctacctcgtcgagtactccgatctggagaagggggaaggggaggccgtggccaaggcggtggagtacctgcactggcggttcatcaggccgtccgaggagcgctcgccgcgggattgcgatttccggattggccccggcgccgccgtcgaggcctactgcgacggggcatggtcgcccggcgtggtgcggagcgtcgtcggcgagggtgagtatgaggtaagtgtcaatggaaagaccaaggaggttgtggtgaccaaggtgcgggagctgcttcagcctcagtacaagtggaatggcaagaactggaggattgtctctgctaagagacacttgaggcagcagtctatgtctggaaaaagcccaagctcaccagttgatgtgttctccagtgatgatgaacatagacatgatactgaatcttctgcccggagaaggtcaataaaaaggtcaaggaaggagttcaatgcaacgcagcaacctgaaggcatgttacctgaagattctgaggatgtttcacattctgagatgaacactcctttatctgaattatgcaagtcatcgggaagcaatcattctccaaagtcttgctctgacccatctggaatgaaaaaaattcaagtgctttcgaagaagatagtgagtaactgtttggtaccagtgaaggggattcttgatgcttcgacaggacatagaatacctcagaatgaatcaagagaagatggtattgggaagacaatggttaatcaagaaattatatctgacatgatgcttacgaatggtcaggctaatacatctgcttgtggaacaagtatgaatgaaggctatgctatgctttcaactaaaaagtttggaaaacagaaaatggcattatctcgcagatacaatcctgtacggaaggcacggggagggctgctctctgtccagcaactacacactaaaaaaatcatgccttccgagctcaaacggggtaaaatgagacttattcatgcacttcaggacatgaacgatccctctgataatattcagttaaagggaaacagtacttctccaagcagagaaattatttgtgctttgagtgtctcttcacaatgcaataccccatctcctctgggtaaacaaataaaggcttttgacttcgtgtcaagagaggctgatagtggttcaaatactaagtttcttatcttgaagaaatttgctagaaagaagggctccaaagaatcagatagcccacataactcattggatgcaaccagtactgtccagccaatacgtagaaagaaagctgcagggcgactgaaaggatcttctgtggagagacagttggagggtgaaactcatattcagcagcagcttaataaggctttggaggataacctgaatgcaaatgaagtaacaaatcaagaactgttgccactaacacctccaggctttgaatcagttgtcaatggaaaacgttctcgtgattggaacactgatggtttctctgaagttaacttaaattctagtctgttcgatgaagagctgactgctacaatcaatagcatttgtcaagataatcataatagagatgcagaatctgacaatgtggctaccgaagtagctgaaatcagccatcttatggagaaatctatgttacctcttgactgttcagttgggcatgaggtgggtgggaaagtgggacagggatcaatccaattacatattgggaacagtgggagtttgccgtgcaccagtgacaatgccatattaaggcgctgctcatttggtgggaattctatggtctcagatatatctaagtgtcaactcactggtcagcaggccccattcaccaagaggtcccatgtttggtctttatttgaagagatggatgtgtttcgaaagatgccacagcagccacatttccttccactcaagcaccatccactagggctgcgtgaaggaacggctttaggtctaatgtggtcatatactgatgcagtggataatataagtaaattatgcataacggacagcatggaaatatttgaagaccacatcaaaacacttaccattttagaagaaaatggattcagtgttcagtctttgcagcagattctgaccaaattgctccagatcagatcagattacaccaattctctcagagacggggagaaactgaaagaacagatagcggataaggcctttgctgtgtcccgtgttgatgctctgcttgatgaaaatgatagtgctatagccaagcttgaacaggaacttgggaaactccgatggaaaggccagaagatgtcaaagaaaaaggaggatgaagatgcagagctgtcaagactgaaggcggagaataacaatgctgaggaagcacacggtgatgctaaacgacagtttgacagcatccgggctgagctgcggcaacacttagcaattgatagtcagtaaccatcctgatgagtcccaacttaggcactgtatgctgggtgcttatctaagactaggaaccctgcctgttgaatgtgtcagtcctgacctattatttctagaccatctatctgtgctaatctgatctacctatctctgtacttatttcttcctaaaatttgccagctatctgctgttattagttcct

SEQ ID NO: 28027 - DNA, 1870 bp, Oryza sativa
  ref <308>: DATABASE ACCESSION NUMBER: AK103469
  ref <309>: DATABASE ENTRY DATE: 2002-08-28
gagctagcacaccacgcagcttcagctcaggcgtcgagaggaaggaggaggagggggtcagcctcgctcggttccggcggccatggcggtggcggcgcccggccagctcaacctcgacgagtccccctcgtggggctcccgcaacgtcgactgctgcttcgagaagctcgagcagatcggcgagggcacctacgggcaagtttacatggccaaggagacggagacgaacgagatcgtcgcgctcaagaagatccgcatggacaacgagcgcgaaggcttccccatcacggccatacgcgagatcaagattttgaagaagctccaccaccagaacgttatccagctcaaggagatcgtcacctctccaggcccagagcgagatgagcaagggaagccaatcgagggtaacaagtacaaggggagcatctacatggtcttcgagtacatggatcatgatcttactgggcttgcagataggcctgggatgcggttcactgtgcctcagattaagtgttacatgaggcagctacttacaggcctgcactattgccatgttaatcaagtgctgcatagagatattaaaggatctaacctcttgatagacaatgagggtaacttgaagcttgctgattttggccttgcaagatcattctcaagtgaccacaatggaaacttaacaaaccgtgtgatcactttgtggtatagacctcctgagttgttactcgggagcacgaggtatggtccagccgttgacatgtggtcagtgggttgtatttttgctgagcttctcaatggaaagccaatattgacaggaaagaatgagccagagcaactgtctaaaatttttgagctttgtggtacgcccgacgagttaatctggcctggtgtcacaaaaatgccatggtacaacaatttcaagcctcaacgaccaatgaagagacgggttaaagagtcctttaagcactttgatcagcacgcgctggatcttttagagaagatgttaactttggatccatcacagagggtatcggcaaaagatgcacttgacgcggagtatttctggactgatcccttaccgtgtgatccaaagagcttgccgaagtatgaggcgtctcatgagttccaaactaagaaaaaacgccagcagcagaggcaagcagaggaagccgcaaagcgccagaaattgcagcatcctccaccacattcccgtttgcctccaatccagaacccaggccaaccacaccaaatcaggcctggccagcctatgcataatgcaccacctgtggcagctggcccaagtcatcactatgcaaagccgcgaggacctggaggccctaataggtacccacaaggcgggaaccaaggaggctacaatccgaaccgcggtggacagggaggaggctatgggagtggcccatatccacagcaagggcgaggtcctcccccttatcctggtggtggcatgggcggagccggtggtccgaggggtggtggtggcagtggctatggtgttggcggaccaaattatcaacagggtggaccttatggtgcatctggtccaggtcgaggcccgaactataatcaaggtggttctcgcaatcaacaacagtatggaaactggcaatagcacggcggtatcatgagcagcaaatgcccttccggtaggactctgtatgttgaaagaacctctgatgttgtatttgagatatactttttgcatggtgtattcagatccaggcatctctcggaagtatgatgtttatgactagctgtatagtatggcactggtgtgattcccaatgtttgatgtactagtattattattactgcaagaatgtggaaagacatgaaaagtttgttatcaggatct

SEQ ID NO: 28028 - DNA, 1266 bp, Oryza sativa
  ref <308>: DATABASE ACCESSION NUMBER: AK103470
  ref <309>: DATABASE ENTRY DATE: 2002-08-28
ggggcgagcctctcgagctctcccgaaacaggcgtttcaggagaaaaaaaaaatccccttttctcccggccccttcccttccatctccggcgaccctccgatcgccggcgtgaggggagggggtgggattttcgtccctttagtaatctattagcttaggtgttggtcttctctcgtagtcgggtcttcctgtcgtcgggttcttcccgtttgttcaagtcgatggatcgccggagttcggcaccgtcgtcccggcgacggaaggagtcgcttttagtcgccgagggtttagtttggaaaaacagaggaggagttgcaatgaggggaaggcagatcggtcaaaggaacttcttcaacctgtcagatccagcacaagtttggtggcgctgccccctccctgcatctggccggcacgcaacgacagttgcggcgttggctgccttgtccccggacaccatgacccaccctctccgtctccggcctctccccctccagatgttggggcggcgacggtgtttgttggggtggcgacagctctcggattcaaggacagcaggtaacaaaatatttggcagcctgtgcttctcgagaatgctgcgttggtgctggtcggattggtgcttgcatgatctgttggtagatgggctggggatgatagttgctcatcaaggaattgcagctggccaccaggttaatttctcctcatcctcctttgttgagctccaagctgaagtagaaagacagcagatcaatcaatgccatcctagttcttgactaaggttggccggagtttggggacctctttcttgatgtttctatacagtggtacccatgctgggttcgtcgttcgggttgagggcagaccgtccgtgcaaccttgtttcgcaggattgcagtcagtgctcctcagattcaatgataaactccgtggaaatcaactgttaaagtccggtgaagctcacaccaaaatctacgactcaacaacaaaccttcaatttgtgccgttcccgtggaggcaaccaaaggggattatcggtttgtcaagcggtgtgcacgtcaatgaaggcccatggatgtagtcgtcgcggcaacgccgctactcctgtcgatctcatccattatcactgtatggctacatcaggaatttgtttcccttagttcagtctgtctcatctttagaaaggatggtttggtgtatgatcaatttgtactggggattctttccctaatctctgtcttttctatataataaaatgagtacttttc

SEQ ID NO: 28029 - DNA, 1968 bp, Oryza sativa
  ref <308>: DATABASE ACCESSION NUMBER: AK103471
  ref <309>: DATABASE ENTRY DATE: 2002-08-28
gggctgcactgcagtgacctcttctcacctcccacctcctctctctctctcccctttcctttacccgccgccgccggcgtccaagaagcgcgggggttggtagggcggtgaccggcggcgaggtcaaagggattgcttgctgctagtgctgggcaggttggttctttttctgccaattcctggagaatcgcgcccttttttggctcccaagattcttcccccctccatttctgcgtcttttccacgccacggtgacggcgacgagcttgctttttttttttttttcttttttggggccaattagtgattctttgtccggccttgcgattgctggagttgtgttggggatcgaaaccgaggtgagccgatgagcaagaggagttgcggcggcggcggcgcgcggttgcaatgcgcggcggcggattggggcggctgcttcctcgcgctgccaccggcggcggcggcggcggtgccctcaggcggtgacaccgatggcggattcaacctggcgtggactctccaccagtcgttccaccctgcctccggcctcttcgccagcgtcggcgtcggcttcccggcgacctcctcgagctcgccgtcgccgccggacgctcccggagacccgtatgccaagtatgtctcgccggagatcgagcaccatgctctgcccggtcaaagtgtggaggtggagctaatggagaaggggaagaagaacaagaagaagacgaataaagcattcaagctcaagatcaaggtgggcaatccccacctgaagaggctgatcagcggggggatcgccggcgcggtgtcgaggacggccgtcgcgccattggagacgatcaggacgcatttgatggtggggagtaatgggaattcgaccgcggaggtgttccagtccatcatgaagcatgaagggtggactgggttgttccgcggtaactttgttaatgtcattcgagtcgccccgagcaaagcaattgagctcttcgcttttgatacagctaacaagttcttgacccccaaatctggggaacaaaagaaggtcccactccctccttcactagtggctggggcatttgctggtgtcagttcaaccctctgtacttaccctctggaattaattaagacacgattaaccatacagagaggtgtatatgataactttctccacgctcttgtcaaaattgtccgtgaagaaggccctactgagctgtaccgaggtttaacgccaagtttaattggagttgtgccatatgcggcgaccaactactttgcttacgacacccttaagaaggcctacaagaagatgttcaagacgaatgaaatcggcaacgttcctaccctgctcattgggtcggccgcaggagctatctcaagcacagctactttccccctcgaggttgcacgcaagcacatgcaagttggcgcagtcggtggcaggaaggtctacaagaacatgcttcatgctctcctgagcattctggaggatgaaggggttggagggctttacaggggtctggggccaagttgcatgaagttggtgccagccgccggtatttcgtttatgtgctatgaggcttgcaagaaggtattgacagaggaagaggatgactgaatagtgtgtccttacactcttcagagcgcagttttgcaacttttttgactggaggcatcttttgggcttgatttggaatcaaatcatgctggaatcggatgaaactcgtgtagtttcttaagaatttttaccccaactctgtgctgtcagcttggcctgataaaacctgcctctttccccagttttgcttcaggatatcatatgcagagaacatgtccaataactgatttctgctgagtttatgaagtggttgaaacgcaaatgggcagtcataattcccaggtggtgaaacaactacgagactctgtaatctgtgtgcagctttgcaagtgcatgaaaggttcatttgatcc

SEQ ID NO: 28030 - DNA, 2964 bp, Oryza sativa
  ref <308>: DATABASE ACCESSION NUMBER: AK103472
  ref <309>: DATABASE ENTRY DATE: 2002-08-28
gagccgcaggaggaggccggctgcgctgcgctgcgcgatggaaccggagagggaggcatcgtcggagtggggagatggtgtcggggcgctgggtttccgggtgaaggcgtcttcgcgcgagccggcggcgcagaaggcggccaatgtgctggagccggacctgcgttcccactggtccaccgccaccaacaccaaggagtggatcctgctcgagctcagcgagccgtgcctcctctcccacatccgcatctacaacaagtccgtcctcgagtgggagatcactgccggcctgcgctacaacaagccagataccttcgtcaaggttcgcccgcgctgcgaggctcccaagcgcgacatactctatcctgccaaccacaccccttgccgctacgtccgcatctcttgtatgcgcggcaaccctatcgccatcttcttcatccagctcattggaatccctatacctggactggaacctgacctccagcctctagtcaactacctattgccacatatcactgcacacaaacaatcctctcaaaatatccacctccagttactcaaagacattgcaagcaggctaccaccatttctgccccagattgaggctgacctcgctagtgtcacagacactccagagagcagtgtacactttttggctctgcttgctgggccattttatccaatcctccaacttacaaatgaaagggattttactaaatcattaattagctctgctgattcagatgctctgaaaagtagtttggcttctactccaacggtttcttcaaactttgagacacaacctaggagatcacggagtccatcttctgttcagcctgcttgttttctggcatttcgatctgaaacagccgtactgctcttaaggaaagcacacagagacagagcccttggaattgtttgcctgaaagcatcaaaggtcctgcaagaacttctggagcccgatccattgttagatgatgcttctgaccaagtactttgtacagactactctagtttgtttggagatgaatttaacttatcggagaattgctttgatgcctctattctgaacattttggatattgctgctgttgaagaaggcattcttcatatactatatgcagcttcatcacagcctctgttatgttgcaagcttgctgagaaaggttcagacatgtggtctgtcttaccacttgttcaagctctgcttccagcacttcgtcctccacttagccctggttctactgaacagattgatggttgtcttagccaatggaatcatccaaatgttcataaagctctctctcagattgctacaatgtcaatgtcatcatcagttcttcatcctcttctcagagcctgtgctggttatctttcatcctacctgtcatcacatgcaaaagcagcctgtgttttgcttgacttatgcaggggaccattatcaccgtgggtacccatgatcacggcaaaggtagaccttgccattgaacttctggaggatctcctgggtattatccagggagttggtcaatctcttactcgttctcgtgcagcactgaagtatattgcattggccatatctggccatatggatgatgttctcacagaatataaagacgtcaaacataagttacttttcattctggagatgctagatccttttattgatccttctgtaagtgttatgacagatgcaatggcatttggtgatgtgtctgttgtgcatttggagaagcaagcaagcgcttgcaatatttcgttaaatattattcgtacagcagtgaagaggcctgctgttctcccttctttagaacttgaatggcgtcgtggtgctgttgccacaagtgttattctctctaccttggatccgcatatgccactccctcctgacatagacctctgcaaaagttcgatgcctgagattgatcaaatatctctgatagttccaaactgtccaccgcactcctgcagtgctgaagatgctgatgggcgtgatacatctgaaacaactcccagggaagatattcttgaacagtgcaattctttatttgctccagaagaattagagcaatctgagttgacaaagactttggaagaaaaaaagcatgagaaaataagtacagatttggaccagaacttcccagaggacacaaaaagtaatggaaaattaccagctggcctttttcagttagataatatttttgctgctgattactatgatgcacatgctgattatctgcagctggtgaactatcaggactgtgaattaagagctctagaatttcagcgcttagcactgaatctatgcacacaacaagaacctacagttgaggggcataatgctggaatagatgcttttctgttagctgctgaatgctatgttaatccactctttctcttggatttccattctaattcggagtctttggatgaaattgaacgtattcatgcagaattgatccaaggaaattgtttctctgaggcgaaacatctgcgtgctaaagatattgatctcatgaaaatttataatttggagaataaacgagataaagcggtcctggatttactcatgcaagctgcaagatatgattttgaataccagggaaagatacctgatgggaaaccttttccagatgatgttgaagatggcaagcaatatatagaaatttcaccagaggctagacaccttgctgatgctgtaactttggtcagaaagaaccaggctatgctttgtcactttatcatgaaacaatttgaaaggaaaggacactctcctaacgaaattctcctccagagcttgttgttcttgttgcactcagcaactgatctattttgtccaccagagaatgtgatcgatatcatattgaaatccgccgaagatctcaatggaaaacttgtatgtctttacaattccgttaatgcaaggaataataaattggatagagtaaaactacattatctacg

SEQ ID NO: 28031 - DNA, 1430 bp, Oryza sativa
  ref <308>: DATABASE ACCESSION NUMBER: AK103473
  ref <309>: DATABASE ENTRY DATE: 2002-08-28
gaccatccaccaccaccacgctacgctttcctcctccccctccactccagattttgctcccctcgagaccaccaccaaaagcagcagcaccaccgaaagaggaagcaaagcaaagcaaagcaggcgaggtttcagtctcccaggaatccccttccaagaactcccacccgattcgaagcgctcgaggaggttctttgctcaatcagagtggatcttctgctgggaggattgggaagagcgggggagagatggggtccggatctttgctcaaggttcttgccaagaacttcgatgttcttgctgggcctttggttgcactagcttatccgttgtacgcttcagttaaggcaatagaaaccaaatcccctgtggatgatcaacaatggctcacatactgggtgatgtactcattaataacactgtttgagctcacatttgcatcaattattcagtggcttcctttttggccatctatgaaattgatctttatttgctggcttgtcttgccatacttcaatggtgcagcctttgtgtaccaaaattatgtgagacctatgtttgtgaagcaccaaatggttaacatttggtatgtccctcagaaaaagggccttttcggtaaatccgatgacttcctcacagcacttgataaatttattgaagaaaatggacctgaagctctgaagaaactgactaacaaggctggcaaatcatctaaacagtctggcaaatcatggaaagattcaaagtcatcaaaggagtcaaaagattcgaagtcatcaaaggaatccaaagaaccaaaaccatcgaaagattcaaagcaactgaagccaccaaaagtttcgaaagagtcaaagccattgaaggactcgaaagaagacaagaaggcagtgaaagaagataagaaggcggctgcgaaagattcgaaagaacagaagaaggcactgaaggactcgaaagaactaaaaaaggcgttgaaggactcgaaagaacaggggtcgcagaaggattcagatgaacttaaaccaaagagcaacaagcgcgtgacgttcgccgaggtggagcccgagaaggaactcaaggcctccaacagcgactggcatccgacctccgagtatcacagcgtgtacccggagcacaactcatggagcagcagcttcatgatctttgaggatgagaacagttactggaactagagatctctagacctgccaaaaaaaaaaagcagcccggtgaagagtcttcagttagttagaagtagctaggaggccatttaaactctcttgttctagctgtcctctatcgattgttctgacttgggtcaccatgtaacatatttctctaatttacaccagtagatgatgagtaatgtagaaatctgcaatgtgggttggtgatgaaaatggtgatgctggtagaattcagattatatc

SEQ ID NO: 28032 - DNA, 1520 bp, Oryza sativa
  ref <308>: DATABASE ACCESSION NUMBER: AK103474
  ref <309>: DATABASE ENTRY DATE: 2002-08-28
ggcgacgacacgagacttttcctgcctccgccgccggtctcggcgtggtgccctgaggcggcgaggccgccgtgagatctcagctccgccgcccgtgggaatcgagctccggccccgtgccttttcctgcccccccagctgaaaaatggggaggataccgtctctgaaaaatttcaatgccttcccccatgcggaagaccacttactaaagaagacttactctggtgctatcgtcacgattttcggactaattataatggttacgttatttgcgcacgagctcaaattttatcttaccacctatactgttcatcagatgtctgtagatctgaaacgaggagaaactctgccaattcatataaatatgtcatttccctctctaccatgtgaagtcttgagtgtggatgcaattgacatgtctggcaagcatgaagtggacttgcatacaaatatttggaagcttcgcttggataagtatggccatatcattggtacggagtatttaaatgatctagttgagaaggagcatgggactcacaatcatgatcatgaccatgagcatgaagatgaacaaaagaagcaagagcacacctttaatgaagatgcagaaaaaatggttaagagtgtgaaacaagcaatggaaaatggtgaagggtgccgagtttatggtgttctagatgtgcagagggttgctggtaacttccatatctcggttcatggtttgaacatttttgttgctgagaagatttttgatgggtcaagccatgtgaacgtcagtcatatcatccatgatctatcctttggtccaaaatatcctggaattcataatccactggatgagactacaaggatactccatgatacaagtgggaccttcaaatactatatcaagattgttccaaccgagtacagatacctctcaaagcaggtgttgccaacaaatcagttttctgtcaccgagtattttgttcctaaacgcgctactgataggtccgcgtggccagctgtgtacttcttgtatgatctctcaccaattacagtcacaatcaaagaagaaagaaggaacttcctgcatttcctcacccgactatgtgcagttcttggcggtacctttgcaatgacaggaatgcttgaccgatggatgtaccggcttattgagtctgtcacaaaatcaaagaccagaagcgtactacggtaattgcgcatcacatgataagtggaggcaaactgtgacaaccctgtgtgttgtcactggtcatacaaatcagtcagagcatatcgtctcagatacggtcaaccccagtgggttttcatgttttgatatgctctatggctcgattgcttaaaatacttatgttgttagctttgtcattaatcactcatgttagactggcacggactcataacagttttgtaatcaatgattcccacaaatcggaggtgccaacgtcgtgtgatcatggagaaacaaatcccagtatagcctgataattccaaaaaagcaggaaaaaaatcaacat

SEQ ID NO: 28033 - DNA, 1294 bp, Oryza sativa
  ref <308>: DATABASE ACCESSION NUMBER: AK103475
  ref <309>: DATABASE ENTRY DATE: 2002-08-28
gggatggctcaagagggagctcagttcttcacaagtaagctgaaatcgtcagcagagcaattgctaaataatcgaagaccgaataaagtgactgtcaagattttttcaaggcgtacatcaaaatgggaaaattggtggcagcaataggtaaattgctctgctgtgtacaagttgaccagtcaacagtaggcatcaaggaaagatttgggaaatatgaggaggtgcttgatcctggatgtcactgcgtgccatggattattggaagccgtgttgctggtgagcttacactaaggcttaggcagctagatgtacgttgtgagacaaagacaaaggacaatgtttttgttacggttgttgcatccattcaatatcgagcaatggaggacaaagcaagcgatgcatactacaagctgagcaacccaaaatcccaaatccaatcttatgtctttgatgttatcagggcaagtattcccaaactagaattggacgatgcttttctgcaaaagaatgaaatagcaagagctgtggaggaggagcttgagaaggcaatgctagcttatggttatgagattgtgcaaacactgattgttgacatagaaccagatgagaaagttaagagggcgatgaacgaaattaatgctgctgcaaggctacgtgttgcagcaaatgagaaggcagaggcagagaagatcattcagatcaagagggccgagggagaggctgaagccaagtatctgtctgggcttggtattgcaaggcagcggcaggctatagttgatgggctaagagacagtgtacttggcttctctggcaatgttcctgggacttcagctaaggatgtgatggatttagtcctgctgacgcagtactttgacactatgaaagagatcggttcaacatccaaatcttcagcaattttcctccctcatggccctggtgctgttgcagatattgccagtcagatccgtgatggatgtcttcaggctcatcaaacaaagtgaaaaatccaaggaagcagtaacttggattggtgagggcctttccactggtttgtatgtgcttgaggatattgtgtgaggttgtaaaaatagtatcaagcttgtagaatagtttgtgcttaatgtagatcaggtattctctgggataggttccaatccatacggaatgaagaatgtgtgctttacatgaatctagttgatggttgtggtgtgcttacatacagtatgctgcatgtgtgctgtgagaaaaataatgttgtcagcctgtatatcctcaatatatagccttgattgcg

SEQ ID NO: 28034 - DNA, 2278 bp, Oryza sativa
  ref <308>: DATABASE ACCESSION NUMBER: AK103476
  ref <309>: DATABASE ENTRY DATE: 2002-08-28
ggtcactccactgcaatatacaatggcgcatgcttgaatgccgccgccgccgccgcgacctcgtttggcgccaaatccggccgccatcatccacgccgcgctgctcaaatcctccccggccagcctcccgccgcgcctctccttcaactccctcctcgccgccgccgctgcctccccgcacccgcgcctccgctccctcgtcctccccgcgctcgcgctcgcgcaccgctgccccgccgccgctgggccgctcgactcctacgccctgtgctccgcgctccgccacgcctccgcgccggaggcggagccactccacgcccacgccgccaggtccggctggctcggcagcgtcttcgtgtcctgcgcgatcgccgcggcctacggtgggtccggcaggttcttggacgcacgcaggctgttcgacgaaagtcctgtcaggaatgccgtctttgggaacgctgttcttgctgggtacgtgaacgcggggaagtgggcaccgttgctggagtttgcaaggaggttttcggagcttcgattgcaggttgatgggtacaggatgacggctgtggtgagagcttgcggagagttggcggatgctgatttgggtggacaggcgcatgggcatgcgatcagaagggtgggagctgtggagtctgacgtgttcttgaccagtgcgcttgtggacatgtatgccaagtgtgggcttgttagccacgcgaagcgcgtgtttgacctcgcccagcaagtgaatgctgttggaatcgatgttgtgctgtggacggcgctgctgaacgcatatggaaggcacggaatgtgcaaagaggttatccagatatatgatcggatggtggcttcaggggtccggcctgatgaactgactattctggctgtgctctcagcatgccaacatgctggggaggtggtcaaagggctccactattttgagtctatacatgaagattacgggttgacaccgacaccagatcatttcagctgcgtggtcaacatgctatgtcgggcagggatggtgatcaaggcctgggagattgtgacctccaaaggctgtggaggtgagtttggcatctccacatgggtggctttgctcagtgcttgctgtgattgtggcaatgttgagctcgggaggatggctgctcagagggcaatcgagctggagcctaacaatggcaccatttatgttgagttgtcaaatttgtatgcgaggtttggcttgtggggggagattgaccagctgcgggaattgatgaaggacaatgggttggaaaaagatgctggattgacatgggttgagcttagttcctgatatgacttaaaatcccttcatgaaaccagtacaggtggaggaaggggaggcaatttcgcttttgttatgaaagccaactgagtatttttgggaacagatttgagtatagtcctattttttggtcacatatttaagactgctggaggaattgaaagtgaaaccactcgtggctttgccttggtcacctcatatttatcttcgttcaacaatgcatatacacctttacatcaggactggatccgactttagcatggttgctgcctcatgatgcctccaatgaattgaaagcatctgtgtaccagcgggttacaaaccgccagaataatccaaagatattaacattcagtcatgtactcttctgatgcgaacatgatgccctagtgtgacaagtgataactgtgctgagatgaaccaaacgaattgaaagtattcgatgtgccagaagttctcttatgaatcaaaatatttgtaaagaaaaaaggctcctccttctgactctttcaccaagacaaacttgtgctatggatttgatttgcaggtttctcctagacaaaattacaccgggtgctcgaaatctggaacttattagacttctcatggtacgaatgctttctttttattcttcaatggagttcttcctatatgttgtgactgttatttttgaaatgacactgaaatttcacaggtcaggcctttgttattgtgatcatgatctgctaaatcactgctagttgtcgttccaacaaagaagaattaaatatgcagtacaatcgcgcttgatgtcctagacaagaccagttaaaatacatcagattaggcagtgctgaaagggctattattttctatatattgatacagtcaatttgagtagtatgagaaactaactcaatgtatccagtttatagtgcaggtcttagtaatgggttattttatttggaacattaactaataatatcc

SEQ ID NO: 28035 - DNA, 1824 bp, Oryza sativa
  ref <308>: DATABASE ACCESSION NUMBER: AK103477
  ref <309>: DATABASE ENTRY DATE: 2002-08-28
gaaaccctaatccccctccaaaaccctacacccaccccctcacctgcggcggctgcggcggcggcggagagcaacatcgtcgagtcgacgccatgaggccaccgcgagggaggggattcgggaggggagggagaggcgatggcggcggccgcagtggcggcggtgggaggggattcgggaggggcggggacagcggagggagaggaggccgtgggaggggaggtggcaggacgccaaggggccgtggcggcggccgcggtggcgggaggggtggcatgaagggcgggagcaaggtggtcgtggtgccgcacaagcacaacggcgtcttcatcgccaaggccaaggaggacgcgctctgcaccaagaacatggtccccggcgagtccgtctacggagagaagcgtatctcagtccagaatgaggatggaactaaggttgaatacagggtgtggaaccccttccgttctaagctggctgctgctgtgcttggtggtgtcgacaacatctggattgctcctggtactcgtgtgttatatctcggtgctgcctcaggaacaacagtgtctcatgtgtccgatattgttggaccgactggtttggtctacgctgttgagttctcgcacaggagtggtagggatcttgttaacatggccaaaaagaggactaatgtgatccccatcattgaggatgctaggcacccagcaaggtaccggatgttggttggcatggttgatgttatcttctctgatgttgcccagccagatcaggggctttagcaaatgaggaacttactcggattccccttcaggacatcaaattggatgatgcaaattcgagtttccaatgcgccgtgccttcattgtttctttcctttgcgtttatgggtattctgaataaaatattttgactgtgctagcaatttgccttatgcctgttttattctctcgttagttgtaaaaccttcagtatcgaagttgatgcgtgccttattggtggccaatagtcatgtttttgtccatattcatttccttggcatgatcttgtttattttcttgactacatcagctgtggtaggaatttataggtttcctggtatagcgttctctcctattgttattatgttttatgcctctttgatagtgctagttaggaccagattgttatgtttttgctttgtaaggagtaatgaatactgtggagataaaagtttacggttcatatttctgtactgaataaacatacttgcagtagtttctataaggttgctgctcgagttaagagataatttgtatcccataaaattacctttatggaatcttccttggcatgtccctgtgttaaaaatcgtgaaggttctcacagaattcagttttgaaaccgtttgcaattttaatcttctactaccctgcaggctaggatcttagccctcaacgcatcctacttcctgaagaatggtgggcattttgtcatttcaatcaaggcgaactgtatcgactccaccatgccagctgaggctgtgttcgctagcgaggttgagaagctgaaggcggatcagttcaagccgtcggagcaggtgaccctggagcccttcgagcgtgaccatgcctgcgtcgttggtggctacaggatgcccaagaagcaaaagggcacatcttaatttaaggatacggccatctgcggtcaaagctcaaatgtactagtagaactttttataagcgttagcgtttttgcttaagctattttaattagttcatgctgctgctggttttacagcaatccatgtgtaccgcgaacagagaagttgaaattggttgaatcgacgct

SEQ ID NO: 28036 - DNA, 1712 bp, Oryza sativa
  ref <308>: DATABASE ACCESSION NUMBER: AK103478
  ref <309>: DATABASE ENTRY DATE: 2002-08-28
ggtcctggctagctgctgcgcgctgaccagctagctgccaattgctccctgtgagctgcgtgctgcgagaggtcaagctagctgtagtggtcatggcgagcgtcccgctcctcgcggagtggccggccgggaaagagaaggaggaggggcgcgtccggcggcggctgccggcgttggcgagggaggcgtgggaggagtccaagaagctgtgggagatcgtcggcccggccgtgttcctgcggctggtgctgtacagcttcaacatcatcagccaggccttcgccggccacatcggcgacctcgagctcgccgccttctccatcgccaacaacgtcatcaccggcctcaactttggcttcctgctgggcatggctagtgcactggaaacactctgcggccaggcctacggcgcaaagcagtgctccatgcttggcatctacctacaacgttcttggatcatcctcttcgtcttcgccgtgctcctcgtcccgacctacgtcttcaccgccccgctgctcgaggcgctgggccagcccgccgcgctggcgcgcaaggccggcatggtcagcgtgtacatgctcccgtcgcacttccagtacgccgtcctcctgccgctcaacaagttcctgcagagccagcgcaagaactgggtcaccgtggtgaccgcggcggcggcgttcccggtgcacatcgcggtgagctggctgctggtcagccgcctccggttcggggtgctcggcgccgccatgtcgctcggtgtctccggctggctcgtcacgctgctgcagctcgcctacgtcgtcggcggcgggtgcccggtgacgtggagtgggttctccccgttggcgttcgtggatttgtggggttttgtcaagctgtccgtctcgtctggagttatggtatgtttggagacttggtactacaagatactgatcctgctcacaggacacctgaagaattctgaacttgcagtgaatgctctttctatctgtatgagttttcaatcttgggagatgatgattccagtgggattcttagccggcaccggggtgcgagtggctaacgagcttggcgcgggcaacgggaagggagcaaagttcgcgacgatcgtgtcgacgacgacctccttcctgatcggcctcttcttcagcgcgctggcgctggccttccatgacaagatagcgctcgtcttctcgtcgagcaatgcggtgatcgacgccgtggacaacatctcctttctgctagccgtcaccatcctcctcaacggcgtccaacctgttctttcaggggttgctattggttcagggtggcaagcggcagtggcctatgtaaacatcggatgctactacttcatcggagttcctatcggtgttctgcttggttggagtttcaaccttggagtttttggaatttgggctggaatgatcgctggcactgcaatccagactataattctggcgcacatgaccattcagtgtgattggaacaaagaggttttgcaagcaagtgaacgcgtccaaagatgggggaacccaaaatgaacaggagcaagtatattatgtgttcgtactagcagtattgtggattgttcactgtatcaacaggttttccatgttggagaattgggcttgcttgcttgagttgcggcttgtaatttgtagaactttagtttagaatttggttggttactctacttgcttgacgccttgttc

SEQ ID NO: 28037 - DNA, 3292 bp, Oryza sativa
  ref <308>: DATABASE ACCESSION NUMBER: AK103479
  ref <309>: DATABASE ENTRY DATE: 2002-08-28
ggggttctttctaggccctaggacaagccaagaagcggcggaggggaagggaggaagagggcaccagccgcaccggccggcggaatggcggcgccgcccaaggcctggaaggcggagtacgccaagtccgggcggtcctcgtgcaagtcgtgcaggtcccccatcgggaaggaccagctccggctcggcaagatggtccaggccacgcagttcgacggattaatgcccatgtggaaccatgccagttgcatcctcagtaagaaaaaccagataaaatctgttgatgatgttgaaggaatagacacactcagatgggatgaccaagagaagataagaaattatgttggaagtgcaccagctactgcaagttctgcagctgctatttcagataaatgcaccattgaggttgctaaatctgcccgtacttcctgtagacggtgtggtgaaaagataaaaaagggaacggttcgtgtttcatctaagcttgaagggcaaggttggtatcacgccagctgttttctggagatgtccccagctgcaactgttgagaatttctcaggctgggagatcctgtcgcatgaggataaaagagctgttcttgatcttgttaagaaagatgcccccagctcagggcaaacatcttctaagggttccaagcgcaagaataatcagaatgatatacacgactgcaaagctcccaagataatcaggagtatatcagaaggcacagcagaagataaagggaaagctgttgtatcacatgattccaatgctaattcttttgatcttcaagaaaagcttaaagagcagagtgacacactttggaaattgaaggatgaacttaagaagcatgtgtcaactgctgaactaaggaacatgctcgaagcaaatgggcaggatacatctgggccagagcggcatctattagaccgttgtgctgatgggatgctttttggagcattgggtacttgcccagtttgttctagcttcctatactatcatggtggccagtatcattgcagtggctatgtgtcagaatggtccaagtgtacatactctacgacagaacccgtgcgcagtaaaaagaaatggaaaattcctgacgaaatggataatggttatcttacaaagtggttcaagtctcaaaaggctaagaaaccagagagagttcttccgccaatgtcacctgagaaatcattgtgccaatcaacccagcaaaaccgatctttccttagtgaaggactggataaattgagagtttctatagtaggacaatctaaagatgtggttgatggatggaaacagaagctgaaagatgctggtgccaactttaatgccacagttaccaaagacagcagctgcttagttttatgtagtgagcttgagagtgagaatgctgaagtcaagaaagcaaggaggttgaagataccaattctgcgagaaggttaccttggagaatgcattagaaaaaacagagtgcttccatttgatttgtataaagtagaagctgcattggaatcttcgaaaggaggcacaatgactgttaaagttaaagggcgaagtgctgttcatgagtcctctggtttgtaagatacaggtcatattcttgaagatggaaaaagcatatacaatacaaccctgaacatgtctgacctgacacgaggtgtgaacagctattatatacttcaggtcattgaagaggataatgggtctgattgttatgtattccgaaagtggggacgagttgggaatgaaaaaattggaggcactaagttggaggagatgtcgaaaattcatgctattcaggaatttagaagattgtttcttgagaagactggaaacccctgggaagcatgggaacaaaaaacaaatttccaaaagcagcctgggaaattttatccacttgacattgactatagtgtaaggcaaggaccaaagcggaaagacattgacaaaatgaaaagttcacttcctccccagttgctggagctcatgaatatgcttttcaatattgaaacatacagggctgctatgctggaattcaaaattaacatgtctgagatgcccctgggtaaactaagcaaggaaaatatccaaaaaggttttgaagcattaactgagatacagaatctattgggtaacactaataatcaagaactggcggttagagagagcttgatcgttgccgcgagcaatcgtttcttcacccttattccttctattcatcctcacattatacaagatgaggatgatttgatggtgaaagtgaaaatgcttgaagctctgcaagatattgaaattgcttctaaacttgttggcttcgatagtgacaatgatgagtctcttgatgacaagtacaagaaacttcgatgtgccattacgccactccctcatgattgtgaagattacaagctagttgagaagtatcttcttaacactcatgctcctacccacaaggagtggtcactggaattagaggaagtcttttcgcttgatcgagatggagaattcagcaagtactcaagatataagaataatctacataacaagatgttgttatggcatggttcaaggttgaccaattatgttggaatacttagtcaaggactaagaatagcacctcctgaggctcccgtgacaggctatatgtttgggaaaggcctctacttcgcagatttagtaagcaagagtgcacaatattgttacgtggataggaagaatccagttggtttgatgcttctttccgaggttgctctaggtgacatgtatgaactgaagaaagccacgtccatggacaaacctccaagagggaaacactcgaccaagggcttaggcaaaaccgtgccgctcgagtctgagtttgcgaaatggagggatgatgttgtggtgccatgcggaaagccagtgccagcatctatcaagacatctgagcttatgtacaatgagtatattgtctacaatacatcccaggtgaagatgcagtacttgttgaaggttaggttccatcacaagaggtgactagaagacttgaggtaggagtagaaatgtagaattaatcagtggaagtatctccatcgttatcagtagtctgtggtggctacgcttttgatgtgttagaatgatttatccagtagtttcaggttggtaggaggttatgtgctgctcgcgtatgatccgttttggggtatgttgcatgggcatcgcgcgagtggcgcaagtaaatcccctgcgcatgccatgggcatttgatagatgtttgcctaattttctgtggcaatgtgcgcatttggct

SEQ ID NO: 28038 - DNA, 1789 bp, Oryza sativa
  ref <308>: DATABASE ACCESSION NUMBER: AK103480
  ref <309>: DATABASE ENTRY DATE: 2002-08-28
gactcctcctcggccgcctcgtcgtctccggcgacctccgccggagccccgcccacctccgccgcatcgtcccgctcctcccttcccacccccacctcgccgccgccctgtgcgccgtccatttcccgctcttcccctcctcctccgtcaccttcctccacaacatcctcatccgcgcctccgcctcctccgcgtccccgcgcctctccttcgccgccttctcctccctcctccggtgcgggctcgtccctgacaggttcaccttgccgcccctcctcggttcggcgggtaagctcccggccttcccgcgcacgggcgcgcaggtgcacgcgcaggccgtccggcgcgggttcttggcggatgtcttcgtcgtcaacgcgctcctcgcgatgtacggcgcgctccgggacgcggcgtcgatgcgggaggtgttcgggtcgtgcgccggggtcgcggacgtggtgtcgtggaacacggtgatcggtggctacgtgaagtgcggggagatggagagtgccaagagggtgttcgacgaaatgccacggaggaatggggtgtcctggagcaccatggtggggggctatgccgcggccggggagctggatgtggcaagggagatgttcgatcggatgccagctattgggaggaatgtcgtgacatggaactccatggtgacaggattcgcgcgccacgggctgctgccgttagcgaggaagatgttcgatgagatgccagtcaggaatctggtgtcatggaatgcaatgctccggggttattcagtgaacagcgacatggatggcgcgagggagttgttcgatgtcatgccagagaaggatgtggtttcctggacatgcatgatttcagggtatgctcaggctggacgctatcaggatacccttgagctgtttcgcgcaatgcagactgagagcaatgtacagccgaatgaggtgaccatggtgagtgtgctttcagcatgcgcaaatttaacagcactggaagaaggaagatgggtccatgccttcatcgacaagcacaaaatggtgctcaacaacgagtacaatcttggtgctgctcttattgacatgtatgccaagtgcgggagaactgacattgctgtcaaaattttcaactccctggaccgaaagaacgtctcggcctggaacgcgctcatcaccaggttggcaatgaacggcaatgctcgggattccgtagacgcattcgaacagatgaagagaacgggtgaaaagccgaacgacataacgtttgtcggtgtgctcacagcttgttcccacggtgggctggtggatgaaggtcgacggtgcttccagagcatggcgtctacctgcggagtgcagccggaggtgaagcactatggttgcatggttgacatgttaggccgagcagggcttcttgaagaggcagaggagttgatccggagcatgccgatggcacccgatgtcatggttttcggcgctctactgggtgcctgtcgaatgcacaagagatttgatgtggctgaaagagttcagagtgagatccatagcctcaatctcaacgcccagcagtctggctgccatgttttgatttctgacatttatgctgctgctggtaaatggttcgatgttctggaggcgaggcaagttgtgcagaggtctggcatcaggaaatggacacgataggtttaagattcttgtagaagcctgatattgactttacgcttttgagcaatggaagtggtggcactggtgggtatattgcttaatgcttacaagttatcggaaatgtggtt

SEQ ID NO: 28039 - DNA, 1464 bp, Oryza sativa
  ref <308>: DATABASE ACCESSION NUMBER: AK103481
  ref <309>: DATABASE ENTRY DATE: 2002-08-28
gcccttctccaaatccccttcgcattcgatcccctcccctcgccgccgtctcctccacctccgccgctcgccgcccgatcccctcccatcccctccgccccgccgccccgcacctagatatgccgtcgtcgtcgtcggcggcggcggcggcgtgcgggcccccggagttcacgccggggtggaagacggtgtcgacgtgcgccccggacgtcgtcggcgagggcgtccacgtgttcgacatcttcgggtacagcgaccacaaggggatgggcgcccacgagcccatcaggtcgggggccttctccgtcgccggcctcgactgggtcgcctgcctctacgccgacggctacggcgtcgccggcatcgacgacgtctccgcctacctcaggctcctcggcgacgcgcccaccccgcgcgtgtgggtctcctgcgaggtcaagctcgtcgaccagcgcaccggggtggcctccacgccgcagcccttcctcaggtacgccctggcgttcggcgacaagtgcaaggccctccactgtatgatgatccccaggggccagatcgaggtggagccctacctcgtggatgatcgcctcaccatggagttccatgtcgtcgtcaggagagacccccgggtgtcgaggaccgcccggttcccgcgcatcttggtgccgccgcccgacatcaagcggcagtttgccaacctgctgcagagcaaggagggcgcagatgtcaccttcgatgtcgcgggggagccgttctccgtgcacaagctcgtgctcgcgatgcggtcgccagtgttcaaggcggagctctgcgggctgctgagggagccgggaacacagcctattaccatcgttgatatgcagcccgccgtcttcagggccctgctgcaattcatctataccgatcagttccccgtgacgcgcggtttcgagagacgcgacaattgtgaaatgatccggcacctgctcgttgctgcggacagatacgccgtggataggctaaagctgctatgccaaggtatcctttgcaagaatcttaatgttcacaatgtcgcgactacgctggcactggctgatcagcatcaatgcgacaagctgaaggatgcttgcatcgaatttatgtcatgttcaaagaagatgaagggtgtagtggcgagcaaagggtatgaggatctccaaagaatggcaccttctgtcttggcggatgccgtggcgcagatgtcgaagctcaacaaaatgtcaaggggtagtgttccacaagatgagtctaagagctgttagcttaatttataagggatatgggtattctttcttctcttcctaaatcaggtaccgtagtcagtttactctttacattttgggagcacctttgtggtgcttatctgtttatatgatagataggtttattttatctctttgcaagctttgtttccattaactgacatataacctgttgtccttccgc

SEQ ID NO: 28040 - DNA, 609 bp, Oryza sativa
  ref <308>: DATABASE ACCESSION NUMBER: AK103482
  ref <309>: DATABASE ENTRY DATE: 2002-08-28
gacatcgagcttgaagctcttttctctctctctccctccatccatgtccggccgtcgccgccgtcggccgatctcctccttcgtagttccccttcctcttcccttgcgccactatgctggctccactccggcgaatccattttgcccatctccccttccttttccccttgaatcaagccaccaccacccctctctttaccaccggagataagctcttctactcgccgttccggccacatccctcttcctctcttccatccaccaccctccccgggtgcgcgtcgctcgggaacacaaacctccgccgacgtcgcagcctcccagccactggagcaccgccgccccactcggcctctcctctctcttctctcggctcactgtgagacagaaagaagagaacgaaaagaagaagaagaaaaggaaaaagaaaggctgacaggagatgcgagactgtgtccaacgtggcaaaactaaaggatatataccttgacagtgctcaaacttgatggtcatgcatgaagtctcatgctatgatcgtctggtcattggtgaacgttgaaacagttatattctttggaaatgagttctgtatgcactatactttctgct

SEQ ID NO: 28041 - DNA, 1164 bp, Oryza sativa
  ref <308>: DATABASE ACCESSION NUMBER: AK103483
  ref <309>: DATABASE ENTRY DATE: 2002-08-28
ggtcctcatctcatcttctcctccaaattcctcttccacatttcctcctcctcctcttctttctctcaagaaaatcagtagctagccatggcgtcttcttcttctctcaggagcaccagctgcctcgcctccgccgcggagaccgacgccgacaacctctgcctccgcctcggcccgccgggaagcagcatcaccaccaccaccaccaccggcggcgccgacccggcggcgaagaggtccctcggggcgaagcggtcgctggagagcacggacagcatggcctccggcaccggaacttccgccgccggcgacgagcacgacgacgacaccgccgcaccggccaaggcacaggtggtaggatggccaccagtgagggcataccggaggaacaccttccatcaggccgccgccgccgccgccgcaaccaagaagggtggtgatgagaaacagaagcagcagcagcagggaggagggctgtatgtgaaggtgagcatggatggggcaccatacctgaggaaggttgatctcaagatgtgcaagggctacagggagctgagggaggcactggatctcctcttcaccaagtgcttctctgcaaccgcctctgacggatgcagcgatggccagttcgccattgcctacgaggacaaggacggtgacctcatgcttgttggagatgtgccctgggaaatgttcatctcttcctgcaagaagttgaggatcatgaagggctctgaagccaggtgatggtctgatggatgatcaaaggagacaaatcacaggctaggacacaccacatgagaagatggatgatgaatcagagatcatgaatcacatggcatgagatgaatgggatcaagaagggagcagaggactagaagagccctgatggcttgtgctcttcgttgctgtacagagagagtttaggcactgccttgtttcagtgtttctgaatccaagagggacaagatgtatgaactgtgtatatagtcttttaattaggctcatttcttttttcagtttgagttttgtactgtatgagcgaaggctggaaaatatgaaaaaagggagaaatttgacctaagcttggtcatttctccacaccaaagattccttgtttctctgtgttcatatcataaatacagtaccaagccagtatttgtc

SEQ ID NO: 28042 - DNA, 1683 bp, Oryza sativa
  ref <308>: DATABASE ACCESSION NUMBER: AK103484
  ref <309>: DATABASE ENTRY DATE: 2002-08-28
gtctttcttccatttcttcttccctctcctccgcggccccgctccgctccggccacctcgccgccggtcaaagcgcgcctcgtcggagcccaaatcggagcgcgaccctaacggaggcttcgcttcagatgcgccgccaccgccggccacgcgccgccgcagcacgccgcagatgagccccgacgcgacgggcgaggccggcggcggcggaggcggaggcggggacctgttcgccgccaacctcaagggctcgctcctcgccgtcgcctcctccgccttcatcggggtcagcttcatcgtcaagaagaaggggctcctccgcgccggcgccgcgggctcccgagcaggtgttggaggatatgggtacctcttggagccgctctggtgggtcgggatggtcactatgcttgttggggagattgccaacttcattgcttacatgtttgcacctgctgtcctcgtcacgccgctaggagcactcagcataattgtgagtgctgttctggcacattttacactgaatgagaagttacagcgggtgggcgtgctgggatgtgttctttgtattgttgggtcgacggtgatcatcctccatgctccccaagagaggaccccaagctcagtggatgagatttggcacttggcgatacaacctgacttcctttgctatgctaccgctgcagtagcagtatctctgttcctgatgatatattgtgctccacggtatgggcagatgaacataatggtgtatgttggaatttgctcagtgattggatcattgacggtaatgagcattaaggctgtgggcattgccattaagcttacaattgagggcataaaccaggctggctactttcagacgtggctgtttgcagtgatttcaattacatgcatagctgtccagttagtttacctgaacaaggcgctggatactttcaatgcagcagttgtttcacccatctattatgccatgttcacaaccctcactattttagcaagtgcgataatgttcaaggactggtctgggcagagtgcaagcaaaattgcatccgagatttgcggatttctgacagttcttgctggtactcttgtgctacactctactagagaacctgatcaaactctttcggcagacctgtatgcacctcttcctccaaagatatactggcacatccaaggaaacggggatataggtaaacaaaaagaggacgactcacttccctgtgacattataactgtcatgcgtcaagactactttgtctagagatcttccaagatgcttggcgtttcatgcacatctatttgtctgagcggagattggtacagtcactaagtctgtcattcataatcccctcaagagtcaagaccatcttgctaccaagatcaaagcaactgcaaaattttgtagacatgttgttactggattgtgtatcatttgtcgaatactcatgacaaagctaaatggccatacggtgacttctgagcgaacaaactcagccccctagcctgacaactatgtgaagatattgtacaaaaattgccaggaatgcagttctttttttaaccctttcatttgaactgaaggcaagtatacaaggcttgctaatcgctatcattgacatggcactttgttcccctttgtagggtccggaatgtaacttgatgtacctgaggttgtcttgc

SEQ ID NO: 28043 - DNA, 2893 bp, Oryza sativa
  ref <308>: DATABASE ACCESSION NUMBER: AK103485
  ref <309>: DATABASE ENTRY DATE: 2002-08-28
ggccgctgcccgtccccgcaacccaacgcctgattcgcttctccatctgcttgcattcaaccgggttgtggaggaggagtaggagaaatccggtggatatcgatcggatccagatgaacactcgactggattccggcggacagaagtaaatccggagtcggttttttcgtaaatcgcaggtactctacgcaatttttgatcctaattgttatactagtagtaatacagtgggagatgtgagtaataattgctggattatttctggtttttgtacaaggagaaatcgaggtacagatattcatgctgcctcgatgtgttggaatcaacaagatgaacaattaacatccgaagcacaaagaatttcggataaatccaactaatcgatcgatcgtatatgcaactagtgcatatacatatctagtagattcctgttcataatttggaggaggaagatcagttatgagttaccggcgatttgtgaatctggtgcttgataaggtccaaggcaactacacagtgcggcgcatggacatgtcacgcttcttcctcccccgtaaattggcaacgccgctggacgccggagcacacgacggcgcggcggcggtggagtacggcaatctgccatgcccggtgatgagcttccgtgcatcggtctgcccgatggagacgatggagttcatgctccttggtggaaggcataacaagatagtcggcaccgacctgacggggcgcaccctcctgtacgaccccgacgagcacgtcgtccgctccctgcccaccctccccatgcccaagttctcccccgtgtccctcaccatcggcgacgacgacctttacatcctcgacgacatccagggcccgttcaccggcggccatgatcactgcttccacgccctaacctatagtagggagagcttcaccgacgccgacggcgactggtgttgccacactctcccgccgcctccttacatggtgaagcaacgcggcgacttccaattcgactcctacgcggtggtggatggggtggacatctggatatccaagcaaggcgtcggcacctacaggttccacacggagcgcggagagtggagcgcggtggcgagcggcggcgagtggtgcgcgatgccgttcaccggcctcgccgtgtacgtgccggagcacggcctgttctatggcctcgcgtccggcaccgacaacgtcctatctgcgtctgatctcattagcggcgggagaaagccggagcagcacagcctccttcctctggagtacacgccgcccaaggcgttgacgcaggtgtcttcccacctcgtgcacctgggctctgccaacttctgcatcgccaggttcttcgagaccggcttcttcgacgccgacgaacaacacaacccggagctgttcgctgtgttcaccgccgtcgaggtggagcgctgcgacgacactggagtgctccgcctcgtgaagcacaagtcggagatgtacaagcttatcagcgaaatatattattgggtgctttaatcagctattactccctccgtttcagattatatttattaaaatcaaatgcttaatttatattgggtccgtgaggggacagtaaagttctttgcttaatttatatttcttatttcccaatttccttgtaaatcagatgatatattttgcttggagatatcattggtttttccttgtaaatctttttactaattcatatcattggtttttcctgactgcaaatcacagttcaggtcctctcatgttgtgatttaatgttcagaaggctattatggtttatgggtacttgctctaatataaattttgtcaaaatatatgtcgaagttaccataatattgcagattactctttcatctaatccctgaattttagattggtgcacagtgattagttaggttattttctgactaatgctgataaaatcgacgtgtacactcttgtatgaaatgaacagtttctactattctatagggacaaccatatatctttgagaatattgattttatcccccccccccccccgcaccacctcctgtttgtatttgatgatccttatagagactgctgttggccttgaatttatcccccaacatttgtatgcatggaaatgtggtgaaattttttccagtgattcatcaatataatctggtgagttgatcatgagctggatataatccaaaagcttctgttgatttctacctatgtcctttctgttgatcgctatagggtagattgaatgagctggatatatctttctgttgatttctacctatgtcatattgcagcatagggccataggggccatgcacatttatttgtaattcagatgaacctcatcctgtgcaaataagattgttaaatgctttctgttaatgatggacgctcaactatcaattctaaatttgggtgcaatgtgaatcaggccacataggttcagttggatctgttgagtttcataaggaagaggtgcctatgctcgctgattcatcaaacagctccatcaaagctgtagggcttgggatagactaatgattaaaaattgatttcacaagcaaacggaagcgttgtctctgctagtttactggctgaagagagtaccaactaacacaagaacagatctaagcatggcacaaaacttcttcactttccagaagaagttcagagaaagacagtctcaccgtatcatgtcagagaaaacttcagcagattcccaagtgcatgtccctgaacttccgcttgattcttcctggacctaggctttcctgggattgaaaaatggcatgcacatctcatgatcaataatatacataatttaaatcagaatcatgtacatctcatggtcaacaatatacacaatctaaatcagaatagtttgcgctctc

SEQ ID NO: 28044 - DNA, 584 bp, Oryza sativa
  ref <308>: DATABASE ACCESSION NUMBER: AK103486
  ref <309>: DATABASE ENTRY DATE: 2002-08-28
ggttaatgtccgcgtccccttccaaggagggagttagggtttaactccgactgaacgatcccccccgccggccaccgccctcgccggcgtcgatccgatacggcgtgcgcctggtcgctgcaccatggggtacctgcaggaggccagggagaatcacgtcaagaagaaggtcgaggaagctttgcggagcaaaatgaagcagaaggcccttaaggagtgtgatttctactgctcaaaatatgctgagtgtgctcgaggtagaactttttcggtggtatggcaatgccgcaaacaagcaaaagagttgaatgattgccttcatcaattcacaaatgatgcagtcctggaagaaatgaagaaggcttacatggttgagcaagagagcaaggaaaagaaccaataagcattatgcaatggccaatggccaatgggtttctccatgcttgtacgtacattgctccttttggaatttgttagttgcttattagtcatcttaattgatttgatgccgagttcctggagacttgaaaacattgattttgttccacatgcataatctggtataacatcaaggtccctatgcg

SEQ ID NO: 28045 - DNA, 1188 bp, Oryza sativa
  ref <308>: DATABASE ACCESSION NUMBER: AK103487
  ref <309>: DATABASE ENTRY DATE: 2002-08-28
ggcatgtaagtggcacgccgcatcgtccctctcgtctcggcttggtccgcaagaagaacaacaccgcgagagtaaaagcaccccctcctcttcgtctcggctttcggagctctcgatactttagccgcgattcggagggaaaccctagctagctcccgctctcgatcccgcgcccgccaccgcactcggcaagatgttcctcacgaggacggagtacgaccgcggggtgaacaccttctccccggaggggcggttgttccaggtcgagtacgccattgaggccatcaagttggggtcaactgcgatcgggttgaagaccaaggatggtgttgtccttgctgtagagaaacgtgtgacctcgccactgctggaaccaagcagtgtggagaaaatcatggaaattgacgagcacataggctgtgccatgagtggccttattgctgatgctagaacattggttgagcatgctcgtgttgaaacccagaatcataggttctcatatggggagccaatgacagtagaatctactacacaagctatctgtgacttagctctgcgttttggtgaaggtgatgaagagtcgatgtcacgaccatttggtgtctctctccttattgctggtcatgatgagaatggacccagcttgtactacactgacccatcaggaaccttttggcagtgcaatgccaaggcaattggatcaggttctgaaggagctgatagctcattacaggagcagtacaataaggagttgacccttcaggaggctgagaccatagccctgtctatcttgaagcaggttatggaagaaaaggttactccaaacaacgtcgatatcgcaaaggtttctcccaactaccacctctacacccctgcagaggttgaagctgtcattgcacggttgtgagaagattgccatcgcgtgttattttaatcagccctaagacagcctctgtatgaacttcctaaatggattatcagtccattgtttgctatggctgtcatgttatgttaacaagatagtggctgctagagtttattactggctctaatagtctggtgtgcagcccagtcatttgcttgttttcagcagtgttgagaccatgtactatcaaaaagagaacgacaatcctttccaagatttggttgcaacatttcgacagtcatcttgatcttcggtttcttccc

SEQ ID NO: 28046 - DNA, 1779 bp, Oryza sativa
  ref <308>: DATABASE ACCESSION NUMBER: AK103488
  ref <309>: DATABASE ENTRY DATE: 2002-08-28
gactctttctctctcccacttcacctcgcgatctctctctctctcttccccacctctacgcgcctccgcctccgcctccgccatggaggtgttctactacctcgtcttcggcgggctcgccgccgtcgtggcggggctggagctcggcaagtccggcaaggaccgcgtcgccaccaccccggccttcaacgcgttcaagaacaactacatcctcgtctactcgctcatgatgtctggggattggctgcaggggccgtacgtgtactacctctacagccagtacggcttcgacaagggtgacattggccgcctcttcatcgccggcttcggctcctcgatgctcttcggcaccatcgtcggatccctcgccgataagcaggggaggaagagggcgtgcattacctactgcatcagctacatcctgagctgcatcacgaagcactcgcctgagtacaagatcctgatgattgggcgcgtgctcggaggcatcgccacatcgctgctcttctcggcgttcgagtcgtggctcgtcgcggagcacaacaagagaggatttgacccacagtggttgtcgataacattctccaaggctatatttcttggaaatggcctagttgcgatcatcgctgggctatttgcaaatctgcttgcagataacttgggttttgggcctgttgctccatttgatgctgctgcttgctttttagcaataggcatggcaatcatcttatcatcatggagtgagaactatggagatacatctgataacaaggatctgatagcccaattcaaggttgcagccaaagccattgcttcagatgaaaagattgcattgcttggagctatacagtcactgtttgagggttcaatgtacacttttgttttcctgtggactcctgctttgagcccaaatgatgaagaaattcctcatggcttcatatttgccacattcatgctctcctctatgttgggtagctcaattgcctctcgtttgttagctcggaagctgaaggttgaaggttatatgcagattgtgttttcgatatcagcttttactcttttcctccctgttgtcactaacttcctagtacctccctcctcggtcaaaggtggtggcatctcatttggaggctgtctacagctgctcggtttctgtatatttgaatcctgtgttggcattttctggccatcaatcatgaagatgaggtcccagtatattcctgaggaggcaagaagcacgatcatgaacttcttccgcataccactcaacctgtttgtttgtgtggttctttacaatgtgaatgcattccccatcactgtcatgtttggcatgtgtgctattttccttttcatggcagcaatcttgcagaggcggctgatggttgtctctgatctccacagatcaacaaaagctgtagagatgactggggaagatgagccgttaaacccatagaagacaagacaatagatgtgaattggacatgaaaattgccatccaacttgagccgctttccactggctgctgaataagctggaaaatagcaggctggaatgaaacgtactagtagtagtttagtttgcttgtaggtagtctcaattcatttttgtcaggagagagtacacggtccagaaaatattgagctacaggcggcatagtaacgccttgcataggtctccttcccattcttttccactttcttctcgagtgtgatgatcgatgcttaaccattttggatgcaaaacatattgagtagtgtaacaaatttggtgattgttcct

SEQ ID NO: 28047 - DNA, 811 bp, Oryza sativa
  ref <308>: DATABASE ACCESSION NUMBER: AK103489
  ref <309>: DATABASE ENTRY DATE: 2002-08-28
gttacacacgacgaacccccacgacgcacttagctaagctagcgtatagtctctgatcgatccgatctccgacgacgacgacgacgatggccggtaaagtaagcgcggtggtgctggtggcgttggtggtggtggcggcggcggcgggcggcgcggccgggctgtcgatgtgcggcgtcgaccggtcggccgtggcgctgtgccggtcgtactgcacggtggggagcgcggagaaggcgccgacgaaggagtgctgcaaggcggtggcgaacgccgacttccagtgcctctgcgaccgcagggacatgctccgcaacctggagaacatcgacgccgaccgcgccacgcagatcccgtccaagtgcggcgtccccggggcctcctccagctgcaagtaatttacattaggtgatcgagatgatcactctagctagccagctgcaaaatcacactctagctagctagatgatcgatgatcgatgatcactagtgtgtttctagtggttaaataagtattgttggttggttaattaggggggggctaagtatgtgatcgatcgattgctagtagtggccgtgttatgtcaggccatcgtcgcgtcagctggatcttattttgttctgttgttttgagtagttcacgttctgaatgtcgccaggctagctgacatgtgctcgtgttgctcttgcatatatgcatggcgcagtctgcctgtctctatgtatcaatcttgtgattctcttgtacgtcattgctgtgtgtctaccttaatcgtgttctcataataaattttgctgcttgttttgatct

SEQ ID NO: 28048 - DNA, 1385 bp, Oryza sativa
  ref <308>: DATABASE ACCESSION NUMBER: AK103490
  ref <309>: DATABASE ENTRY DATE: 2002-08-28
gattctcgaataaacccctcaccacggcggcgccgcttccgcaactctcctcctctcgccgccgccgccgccgccgcccgccgcccgccggagcccgaagccgggcatgacgacgcgcatcgcgcccggcgtgggcgccaacctgctcgggcagcactcggcggagcggaaccaggacgccaccacctacgtcggcaacctcgacccccaggtttcggaggagttactatgggaattatttgtgcaagcaggccctgttgttaatgtctatgtccccaaagacagagtaacaaatctacaccagggctatggatttgtagaattcagaagtgaagaagatgcagattatgctattaagattttgaatatgatcaagctatatggaaaaccaataagagtaaacaaggcttcacaagacaagaagagccttgatgtaggggcaaatctttttattggcaatctcgatccggatgttgacgaaaagctcctgtacgataccttcagtgcgtttggagtgattgtgactaatcccaagataatgcgagatcctgaaactggaaattcacgaggctttggctttgtgagctatgactcctttgaatcatctgatcaagctatagaggcaatgaacaaccaacatctatgtaaccggccaattactgtctcttatgcctacaagaaagacacaaaaggagaacgccatggcacacctgcagagaggttgctagcagcaaataaccctggttctcagaagaataggccacacactatgtttgcaagtggcccgcctacgcaagggcttgcaaatggtgcacctgtgcctcgacctttttccaatggggcagtgccacctcagattcaacatgttcgaccgccgccacctcctatgcaacaattccctccaatgcagatgaatggtcagcctgtttggcctccgcagaatacacagctaccaccccacatgccacctcaaatgcattacaggcctgcagtgagaccacctccaccaaacatgatgccaccccctcctcttggcatggtaaggcctccgccgcctccttccagtatgccagctccacctatgtggaggccacccccacccccacaacaagctggtggtatgccaccacctcctatgtccatgccaccgccgccaccaccaccttctggttaaacatatgctggtgaaggttccataccatatggcacattgtagctgtagactgggaatgttggtacctttcttatatttccatgtaacttgcaaacactaggagaggatcagaattcagtgagtttagctgacactgatacaaattctcgaggttaactgtattttgttggaaatacatgaattttgtggttaactgtatttttgtgatttc

SEQ ID NO: 28049 - DNA, 1276 bp, Oryza sativa
  ref <308>: DATABASE ACCESSION NUMBER: AK103491
  ref <309>: DATABASE ENTRY DATE: 2002-08-28
gattttgctccaatctcacaatttctccgccttctcgtcctcctcgccgaaccacccccatcgacccacacaaccagcgaaccggaaggatttcactcagctgagtttcctgcctccatccccacggcgatggcggaggaggcgaagaatctggagacggcccgggccgaccgctccgtgtggctcatgaagtgcccgaccgtcgtctcccgcgcctggcaggaggccgccaccgccgccgcctcctcctcctcctcctcggacgccgccgctggcgccaactccaactccaacgcgaaccctaaccccgtcgtcgccaaggtcatcgtctccctcgacccgctccgctccgaagatcagcagctccagttcaagatggagatggctcaaacaggcaatggcaatacaccaaagagttactccttgaacatgttcaaggattttgtgccaatgtgtgtctttctgaatccaaccaagggaagctttcatgcgaagggaaagtcgggcacaaatttgacatggaaccgcacagcgataatcttgtgaactatgggaagttatgtcgtgagaggactcaaaaatctatgattaaaaatagaaaattgatggtacttgcgaatgacaatggaatgagcatgaggccgttgcctggcttggtgggtctgatgtcttctggtccaaaacagaaggagaagaagccactaccagtaaaaccatcagacatgaaaagaacgagaagggatcgcagggaactggaaaatatcttattcaagctttttgagaggcagccgaattggtctcttaagaatctcatgcaagaaactgatcaaccagagcaattcttgaaggagatattgaatgatctgtgtttctacaacaaaaggggtccaaatcaagggacgcatgaacttaagcctgaatacaagaaatctacagaggacgctgatgctactgctacttagaagtcttatgcttcggtctactagataggagtcctcgtccagtgtggactccaatccgttacttgctgcgttcaaggaaatcttggatacttcgtttatagtttgtttcttgagaaacatattttgtacgcatcaagcgatacatcttttggtgttactggcggccatatcttagacccagatttcggggactcgatatattcgtgtccatcagagtttagaaacaaggatgttgaaatttgtgtgtataatgtattttagctcttctaggcaaactaacatgatgattttcatgatcattaaacaccttgacc

SEQ ID NO: 28050 - DNA, 2122 bp, Oryza sativa
  ref <308>: DATABASE ACCESSION NUMBER: AK103492
  ref <309>: DATABASE ENTRY DATE: 2002-08-28
gaggccctcaggttcctctccgataactccggcctcgccgcgcagtggcttgcggacatcgtcgagtacctcggcgaccatgacctcgctgacccaaggttcctcgccgacctcgccgtcaccctcgaggggctcaagaaaccttccggtgacctcgacggtggcctcctggcggccgctctggacatgctcgaggcagagttccgccgccttctcgccgaccactctgcaccgctcccgctcgcgatgcagcagctgaacacaacctctgcatctactgccgcgccgtctctcatcccggccgcgaccgttcacaagctcagcctgattcttgaccgcctcattgccaatggcaggcaggaccgttgtttgtccgtgtatgctgatgcccgcggaggcgtggtgagtgccagcctccgtgcccttggcctcgattacttgcgaaacccggtcgacgtcgcgcaggcgttgggccctggagttgagttgtgggggcggcatttggagtttgtggtgcgctgccttcttgagtccgagcgacagctctgcaacaaggtgtttgggcagcgcaaggatgacgcatcagcgtgcttcgctgatgttgcagcgcacgccggcattcttgatttcttgagctttggtcgtgcggctgctgatgcgaagaaggaccccattaagctcctgcgtttgctggaggtgtttgattctttgaataagctaaggttggacttcaaccggttgtttggtggaaagaaggcgtgtgtagagattcagaaccaaacaagggaccttgtgaagttgttagtggatggtgctgttgagatctttgaggagttgcttgtgcaggtggagctgcagcggcacatgcctcccccacctgatgggggtgtgccgcgactagttagctttgtggttgagtactgcaatcgcctccttagtgagaagtacaggcctgtgcttgcgcaagttctcaccatccatcgcagttggcgcaaagagacattcagtgacaagatgcttgttaacgcggtgcttaacatcgtcaaggcccttgaagctaattttgatgtctggtcaaaggcatatgacaatgtgacactgtcatatctcttcatgatgaacacacactggcatttctttaagaacttgaaggctactaggttaggcgagcttttgggtgatgcgtggctgcaagagcatgaacagtttaaggactactatctgacggtgtttatgagggatagttggggggtggtttcaccgctgctcaaccgggaggggctaatcttgttctccaagggccgggccacggcaaaggacctggtgaagcagcgccttaaaacattcaatgcgagctttgatgagatgttccgtaaacaatctgcatgggttataccagagaaggacttgagggagaagacatgtggtcttgtggttcaggcaattgttcctgcttaccggagttatatgcagaactatgggccactggtggagcaggatgttagtgctagcaagtatgtaaagtacacagttgatggtttggagaagatgctcagtgcgctcttcattccccggcccaggagggctgggagcttccaaatcaggcacacaaatgacaagattaccagtgcgatgacaggcttttatcggagtgcttctacagtgaaatagctttggttgaagaaccaaatggttggttctactatttatgcaataatgggatatgtaacaatgattcattttcggccagtcagcaaattgctccacactggacgtgaggcccaatagtgaacctgtgatgagaatattggtggcatatgaacataggctcttctatagttctcatggtgaaggtgaacagaagatggtgggggacaatgtgcgtaattgggacatttcctacttatcaaatgtcttcccttctgttattatgttattgtccctatcaccataaccattcatttagaaacttctgtggggacatgttgatatttaatcagctgtgtagtgtatgtaaaaattggtttcattttaggtgggctgtagacatttattttatatgttcaatgtgctacaaactgagcttcgatatgcaatgtattatatgaaaagctagagtttg

SEQ ID NO: 28051 - DNA, 1036 bp, Oryza sativa
  ref <308>: DATABASE ACCESSION NUMBER: AK103493
  ref <309>: DATABASE ENTRY DATE: 2002-08-28
ggccgcgacgtcatccgcaccgcacccgatcagagcagccagatcttccccccgacttcccgggccgtctcctcccctgcaccaccccaccccaccccaccccaccggcggcgatggcggcggctgcccccgcgacgacgtcatccgcggccgcgaggccctcctcctcctcctcctcctcgcggcaatccgacgctcctctgcgcgccgccaccgtctccttcccttactccccacggccggccgcgttggctgcaggcgctcgggcctcgcgggttagccccgtcgtggtcgccgccggcggcgggcaccagcggcttatggggtcgttgactaacacccaggggctcaggtttggagtggttgtggcacggttcaatgagattgtcaccaacttgctactgcagggagctcttgagacatttgagagatattccgtcaaaaaagaaaatataacagttgtaagtgttcctggcagttttgaaattcctgttgcggcacaaaagcttgggaagtctggaaagtttgatgcaattttgtgcattggcgctgtgattagaggtgacacaacccactacgatgctgttgcaaactctgctgcttcaggtgtactgtctgctggattgtctgctgagatcccatgcatatttggtgttctgacatgtgatgacatggaccaggctctaaatcgtgctggtggtaaggctggaaacaagggagctgaagccgctctaactgcaatcgagatggcctcgctgttccagcatcacctggcctgaccgccggggctactgatatcatcgggacggcaaagttttggctgctagagattttcgccgtttgctatagcatcttgaggccattattatccattgtccccaactggttgatcgggatgatggttgtgtttttaccgctgttctttttgtcgagtttttttgcaagactgaagaggtatcaccgtccagctaagctgttcaactgctgtatgtgagaaacatgagaccttgaattgaataaacgtcagtacgtcacc

SEQ ID NO: 28052 - DNA, 1159 bp, Oryza sativa
  ref <308>: DATABASE ACCESSION NUMBER: AK103494
  ref <309>: DATABASE ENTRY DATE: 2002-08-28
gatcgcgccacgcgagctcgatcgatcgaggtgtgtatacaaggtgttcgacaatggtgaagctggcgacggcgagggagtgccgggcgtacggcttgggcggcggggggcgggcggcgcgggggaggtgggagtacatcaacgccggggcgtacgtcttcgcggcggtgctcctagccggcggcttcgggtggcacctctccgcgtggtccgccaccaccaggtccggcctcgccgcggcggcgctcgggctcctcctcctcctcgcggtgaacgcgcacgacctcctggcgcacgccgccggcgtcgactacagcctcgcactcgccgccgggctcgacagccagttcgctctcgtcgaggtcgccgtccccgccgtccacttcgctggcaccgtgctcaccctcattgcgctcatcttcttcgagattcagatggcaagagggtacaggcacagcctagagaagcacggcctgaacatgctcatcgccgggccggcgctgtggttactcggatccatacaaaacatctgccaggtatacgaacgcgccaacgggcatgtccagatcctccagaaatgtgtccaaacgccgctgctgctagggagcacgctgttcttgatcggcggcatcatcaaccgccacgacatccacagccaatcgacatcccgttcagagctactggggaggagctggggatggttctgcgtctccggcagcctgctgttcgtcgcggcggggctgctgaacctcctcaaggtgttcaagatgcagcagatggacgggcggggactggagaagctgcgcggcggcgcgcaggagcggctgaacagggagagggagggcaaggtgcccctcattcttgaggaaggccagaggaggaccccggctccggtgtcgggccaggtcccgccgcctccggctgggtcctacaaggaggccgtcgtcagcggcgcgccggctggctagctagctagcttagcagctgcactgcactgcacacagtgtaacgatgagaataagggaggtgacaaaacaaggtgccatgcattactgccattgccacactgtaatttcgtatttgcagctgtcacgtactgtagactgtctgaaacttagatgtgtgcctgtgaatttatggtcgatatattacatggtgt

SEQ ID NO: 28053 - DNA, 2711 bp, Oryza sativa
  ref <308>: DATABASE ACCESSION NUMBER: AK103495
  ref <309>: DATABASE ENTRY DATE: 2002-08-28
gagtcctccccctgaccccctccccctctcgatcccttccttccttcctcccccaatcttccaatccgagagaggcgccgcacgcgtcccagatctatggttcgcgcgcccactccactcctcccccaccgccgcgccgactcgccgccgcaccggccctccgccgcggccgccgaagccgcctggccccgggagtgaaccgaaccccaggaggaacgcgaggtgaaccgggcgccggaggcgggggcgatgatgatcagcaggcagctcgtgctgacctacctctacctgctaatctacgtctgcctctcgtcgggagtcatcctgttcaacaagtgggtactttctccaaagtacttcaaatttccctttcctattacccttacaatgattcacatggcgttttctggagtcgtaacgttcttccttgtccgtgtgtttaaggtcgttgcaccagtcaagatgacattccaaatatatgccacatgtgtgattccaattagtgccttcttcgcgtcaagtctttggtttggaaacacagcatacttgtatatttcagtcgccttcattcagatgctcaaggccttgatgcctgtggcaacatttataatggctgttctatgtggtactgacaaattaagatgggatcttttcttgaacatggtcttggtcagtgttggtgtcgtagtttcatcatatggcgagattcattttaatatcataggaacattataccaagtaacaggcatttttgcggaagccctcaggctggttctgacacaggtcctccttcaaaagaaggggttaactctaaaccctatcacaagcctatattatatagccccttgcaggtattgcaactatatctgaaaagtttgcttgcttgatatgatttcaaccaactaccgttgaatgaaataacgacttctctcttaaagtcttacagaatacttgtacgaaaaacaaagagaattttttagtttgctcttataaaaaacatgtaaactgccattttcttgaggttccattagtgatattaatgacttggttttatataatatgtacaaccaaatggtgctagtgctactttattgtgcaagtgctgttgtaatgtacacatgtaaataaaaatcactaaaacttataacacaattggttttcctatgacatttatgaagagaacactgttcttcatttgtagtagtttctaacctcagttgtttgaatgaataaataaaagaacagatttgaaatgtatattcgtcgtattagattgcatgtattaggcaacaagagcattcgagaggtttatggcatctgtctgtaaggcttatatgtgtggtttcttgttgagaagcagaaagtagtttgttaggacttaggaacaaccatttgctgcctcaacttttgcactcactggtttttcttctgtagcctctgtgattattatgcactgtttttgtctccatacaactaagctttgcatattctatatgtcactaaaatgtttgtgccattttactctctgcaatttcttatatgtattcttctgttttgcagtttcatcttcctgtttgttccttggtttttacttgaaaagccagaaatggatgtttctcaaattcagttcaactactggatatttttctttaatgcagttgctgcatttgcattgaacatatccatctttctagttattggaagaacaggagcagtcaccatccgagtcgcaggagttctgaaggagtggatactcattgccctctcacccattatctttcctgaatctattattacaagcctgaatataattggatatgctggttggtaattatccattcaattttctctagaagtagaatctatatctataatcttaacctgtggttttgtgttccattgcatagcataaacatggggttatgttaacatgtgtaacatactaacatgttcttttgagttacaaagggacataaatccggggcttgtgaaatttgcttatacttttatttcaaatatgttgtttgtgattaaccttcttaattagtattgctttaatgtgtagctctctctggcgttgtcatgtacaattatttgaagatgaaagatgtcagagcgaaccaacttccagctgatatcgctcctgacagagctacgaaggataagaagatttcaaacatatacaagcctgacaatttcatggattctaatgatgaaaccactgttggaagtctggcgtcagaaggtgcaggggttgatgaagaagcccctttgattccttcttcacgcctctcctatgttactcggacacaaactggcagcttcaatagcagatgaccatcattttctgaagttttgagttagttgagggagcaaactttgccccagattaaccagctttcctcctggggagtctgaaagaggtattaggatgataaactatagccatattagaagctctggtgaatagtcctgcattcaccttggtatattttgctagttggaactgaatgtgtattggccagacacctggagatgaagtagagaaaagtgcagggatagggtcaaatgtttgaccagtacttgggatcaatttggtagttgcgttagatatatattgcttattaacccagcatattgaaaatgtttagcagaccatagacgatgtaaagcattttatagatgctaatttgtattgcagttttgtttcc

SEQ ID NO: 28054 - DNA, 1447 bp, Oryza sativa
  ref <308>: DATABASE ACCESSION NUMBER: AK103496
  ref <309>: DATABASE ENTRY DATE: 2002-08-28
gagaagaaaaagaaatctgccgtctcgctctcgttgtctcctccgctccttgcgccgccgccaagacgagtcgcggctgaacaggggagcgccgggcggcgagctccatctggcgagcagagcagagcagcggaggggaggggatcctggaatcaggacatagatggatccagaggtgaaggactcaaggccatcgaggtctcccggcgaaccaaatcttttcctgcaatggggcagccggaaacgactccgctgtgtcaagacgagggacgacggctcgccatcacctgcgcggaccgatgttcttaggcgcaccataccacgagtgaatcgcccgcttggcggtgatgttgccccgtttcgttcgccgcggcgcccgagcacgctgaaccgaaggaaaaccgagccatttgtgagcgataacaggcactccatgtcaccctcgccagagaaggatcgatattactccactaggggttctccattcccattcgagggaaatgggtttgattttggtggtggaatggaagaaaagggaaccacagcactgccaaggttcttcatttcattatccaacaaggagaaagaagaggacttcatggcaatgaagggatgcaagctcccacagaggccgaagaagaggccaaagttgatgcagaagtgcttgcttatggtaagtccaggagcatggctgtctgatttgtctcatgagaggtatgaagttagagagaagaagtgcgctagaaagagggctagaggattgaaggctctttgcaatgagagtgattcagaatagaaatacagagcgggatcaattttttttgacttttgctggagacagttaggtacaatgctggttcattcattaactagacagatctgagcggctaatttagagagggaggatcaccggctctcctactatccttatttcaccacccctgtatctccatcctttttttgttcattcgttgttccaaacaaatcgtcatctagaactaagcctatcgacagaaatagttgtatattagatcattcctgatctagcaagtttgtagctcagaccttaaaggcaccgcggagtttggtcaccactgaagtgaaagtaaatgaaaacgaagagagagagcttaagatggaaggcagcaatgcatggtctatgagtctatcatgatttgggattgagaaagaagatgggaggttgttgggtatggtgcatggtgcattttggtgcctcaattgttgtaacagtaacaccaagttgggaggaagatttgaggccagctggccattcaaataggttactactgaatcccaaatattgtaatcctagttgatgttgaagagaacgccgtgtgcaggccatgcctgggcatgatcctggattcatggttagactgtttctcctgaaatatatatcaaattcgcagagttgtttgaccttctc

SEQ ID NO: 28055 - DNA, 1154 bp, Oryza sativa
  ref <308>: DATABASE ACCESSION NUMBER: AK103497
  ref <309>: DATABASE ENTRY DATE: 2002-08-28
ggctcgttccatttccattcctacgccgaggtcttcttccccactctctccctcccacgccgccgcccccgcaaaccctagcgaacgcagcggagagaggagagagcgccatggccgtggaggtggcgacgcagaagatcaggtggggagagctcgaggaggacgacgagggggacctcgacttcctgctcccgccgcgcgtggtctccgggcccgacgagaatgggttcaagaaggtggtcgagtatcgcttcgacgacaaggggaacaaggtgaaggtcaccaggaccttccgcgtccgcaagatcgcccgcgcccgcctctccaagagcgccatcgagcgccgctcgtggcccaagttcggcgacgccgtgcaggaggacgtcggcgcgcggctcaccatggtgtccaccgaggagatcgtccttgagcgcccacgcgccccagggagcaaagctgaagaaccaagtgcttctggtgatccactggcaagcaagagtggtgcagttctcatggtttgcagaacctgtgggaagaagggtgatcactggacctcaaagtgcccctacaaggatctagctccccagacagaagcttttgtggacaggcctcccactgctgatggctctggacctccaggtggcgccgtgaagggagcatatgttcctccaagcatgaggtctggtgctgttgatagggttggacatgacatgaggcgtaggaatgatgagaactctgtccgtgtgaccaatctatcagaggacacccgtgaacccgacctacttgagctattccgcacatttggtccagttagccgtgtctacgttgcggtggatcagaagactggagcaagcagggggttcggcttcgtcaactttgttcacagagaggacgctgagaaggctatcagcaagctcaatggttatggttatgataaccttatccttcgtgttgagtgggcaacaccaaggccaaattaattttgttactccctgcaagcgttacatacttttcatgaatgttcgatcagtatgtctcttgaaatagtacttttggtttgcgcatatcctgtgtcctgaacttaagctgtactatttttgcttggacgagaataactgaactcgcagctatttcctatatcagctgatatttgc

SEQ ID NO: 28056 - DNA, 2336 bp, Oryza sativa
  ref <308>: DATABASE ACCESSION NUMBER: AK103498
  ref <309>: DATABASE ENTRY DATE: 2002-08-28
gagactgcaaactctgagagagagagagagagagagagaggccatgcccacacagcacctgacctctcgccgccacgctgagctactccgccatctcctcctagatggcggcgccgccgtgaaggacctccgtctccgccgtgtcgtcccgctcacctccgcgccccttgacgactcctcccccgacccggccggccctgctgccaaatctggatctgcagagacgacgccgccggaggcccaagacggccgggagcgaaagccggtcgtccagcggtcgaagctcgtgcacgccccggcctccttcggctaccgccgcttactgcctttcctcaaccaactgaccaacaccaaccaagaatcagaatgccctagtggcaaggacaactccaaggttgatgcatatgccgaatctgaatctgaagctcaacctgatcctgtgcattgctctatcagcaccaccaaggaagaaatcaacatttcctcttctcatctttcaagcaccaagatgtgcctttcccggtgtcagaggtccaggtttgttcaccaccccagctcatttagctacaagaggatgctgccatttgttacggagaacgagatcacttctcaggaaggtcacaggaccaaaattccaagactcgtacaagaaaagcaatcttcaacggatgagaatcttatcttgaccactggacagcatcactttgttatgtcaggagactctgctgaggaatgcaaaacagctcaagtcgaaagattagtagaagaaaacgaatcaaaatcagacaggattcatcctcttggtggaaggctgcttcagcctgctgtttctgaagccgctcatctagaactacaagtcagtacagttgaagggcaaaatctcacacaggaaagagtgctagcttcagatgcacaccttctatcttcagacaagggtgagtgcacattgaaatggaatgatgtcctgcctgctggacagcatcagcctgctgcctcagaagacttctctgaagaaagcaacaaagcaggagttgaagcagtattagaagagaggaaatcagttccagacggaaattctgttcttgatggcagacagcttcagacttttgtttcaaaagcttctcctccagaaggcacagctgaaatgcagaaggccacacaaaaacaagcagtgacttcagatggtgatgacgaccctctagactcctgcaagggtggatctcttgccaaagagcagcctctactgcatgctacagagttgtcagtaaaagataatgctgaaggtgatgaggtacatcaatgccaaagcccagagttgggaacttctgatgtttgttttggtggtcctaccaaggttgtaataccatcagtgaattcccacaatgcactagagcaatgtgattctatggcttctctagatgaaccgttgcttgatgtggagatgacatgcattcctttggacccttgtgctactggtgtgccctactcagtgaaggaaacgcctgctggtgttctgtgcacgtctgatcatggttccactggcacacccttaacagtggaagaaacctccagttccgtttctgttgtgcacattgagccaatgtcaagcaaagtcagcccagtacggcaaagaggttccccttgtttggaaaaacgaggcctttcccctaagaaactatctccaaagaaaggaatacttaagagacatacaagggggtgcaagggaatctgcatgtgcttggactgcagcacattccgtttacgtgctgaccgagcttttgagttctctaggaagcagatgcaagaggcagatgatataatagataacttactaaaggaggtgtcaagtcttaggaatctcatggagaaatctgctggccaacaggagacaaagcaaacagcctgccagcgggcgtcacaggtggaggtggtggccagagagcgtcgtaggcagatgttgatggagctgaactcacattgcaggatccctggaccaagggtgaaatttgcacaatatgttgaagagaggatggcgtcgtctccatcacctgattcacctagcaggagaagataaacaggggaggatgtgtcctgtctgatctatccagcttacctggttaatttttgtgtagtgcagtgcaatactcctacttggttaatgtgttgtagagggtgggtggtctgtttttggaggaacagcatgtcatgtgcatcctttgtttgacagaaaatggaaggaccatgtgcgtggcgtactagatatattaaatatttattattaccaccagtccagtgaaatagtagaatgatactatctatatacacagttttgaggt

SEQ ID NO: 28057 - DNA, 1714 bp, Oryza sativa
  ref <308>: DATABASE ACCESSION NUMBER: AK103499
  ref <309>: DATABASE ENTRY DATE: 2002-08-28
gtctctctccctccacctccgctcctactctgctgctccaccacgaccaaaagccatgcctatgctgctgctgccgctctcctcctcttccgccattgccgccacctgagctgagctcttgtactcgctacgctactcaagatggctttcgccacgctctttgactccctctactgccccgaggagcacctcgacctcttccatgacaccgccgccgacgacgacctccacctcgaccttcacctgcaccaacccccaccgccgccgccgctcctcgacgacgacctgcctgcgctgttccacgcgctcagggggaaggaggacccgctgcgccccgccgccgacgacgacggctacggcggggtgtctgcccgggaggcggcggtcgggtgggcgctgcgcgccgtcgcgaggctcggcttctccgcgctcacggccgcgctcgccgtcgcctacctcgaccgctgcttcctcggcggcgcgctccgcctcggcgaccgcccctggatggcgcgcctcgccgccgtcgcctgcgtcgcgctcgccgccaaggtggaggagacgcgcgtgcccgtgctcctcgacctccagctctgcgccgccgaacgcgccgaccccaacgaggcctacgtgttcgaggacaagacggtgcgccgcatggagctgctggtgctctcggcgctcggatggcggatgcaccccgtgacgcccctctcctacctccaacccctcctcggcaccgcccacgccgcgcgccttcaccactgcgacaccgcattgctcgcgctgatgcccgattggaggtggcctcgccaccgcccttcggcgtgggccgccgcggcgttgctcgcgacggccggatggtgcggcggcggcggcggcgacgacgccgagctcctagccctcatcgatgcccccaaggatgagatggcagagtgcgccaagatcatctccgaggaggcggcggcggcggcggcggggggcattgtgatcggcggcgaaaataagcgcaagggcgcggcggggctgtactcggcgccggcgagcccgagcggcgtgatcggcgcgtcggcctgcttcagctgcgacagctcgtccagcagcgtcgactcgctgttcgccgccttggagccacccggccggccgatcaagcgaggtgccgccgccgccaccaccgcggatccgcttcccgccgacgaggagagccgcgacgcctggccgccgtacgccgcatgaggctgctctggtcggtatcgggaaggggagaagctaaagcaagccactaattaagcttaggaggaggagggttcagtccaagaaaaagatgttccattaacgcaatgcaagaatgcaggtgcgaaggggtaggttcattcatgtagccattgatggtctcttggagctcagctcagcctcaacctcaacccaccatagccatggatggaggtgaggaagaagctgttttgtcctgtctgctcactctgctggtaccaccactgttagaaccatgcttcacactctctctcttgtttctctctctagagagaagagagagagtataaaggagtaggagtatgaggagtggcaacaatggcaatggcatcaaatgctgcaattgcccacttcccatgagcagctagagctacaacagcagacctgaggctattgtgctcacctcttcttcttccaccattaatgaaaatgcattactacc

SEQ ID NO: 28058 - DNA, 768 bp, Oryza sativa
  ref <308>: DATABASE ACCESSION NUMBER: AK103500
  ref <309>: DATABASE ENTRY DATE: 2002-08-28
ggcgttgtcccttctcccttcactccgctagggttttaccccgcgatggccgccgccgccgccgccgccgcgcggaggctcctctcccgccgcgcgccgacggagatggccccgctgttccccgggtgcgactacgagcactggctcatcgtgatggacaagccaggcggggagggcgccaccaagcagcagatgattgactgctacatccagaccctcgccaaggtcctcggaagtgaggaggaggcgaagaagaagatctacaacgtctcctgcgagagatactttggtttcgggtgcgagatcgatgaggagacgtccaacaagctggaagggcttcctggtgttctgtttgtcctccctgattcctatgtcgaccctgagtacaaggactatggagctgagctcttcgtcaatggagagattgttcagaggtccccggagaggcagaggcgggtagaacctgtcccacaaagagcatcagataggcctaggtacaatgacaggacccgatacgcccggaggagggagaaccaacggtgatctgattatcagaagccaaataacaaagccgcctgggtggcttgaggccttactagcatatgctgaatggaacaatctaaaaattgctttaatagttttgtcgctggtattgctatttttcatgctggtgattctcacatctttggatgtatcgcattctgtaattactggaaaacttgaaagtacctggcttggaatgcattgctgctgctgaactcttcggcc

SEQ ID NO: 28059 - DNA, 1914 bp, Oryza sativa
  ref <308>: DATABASE ACCESSION NUMBER: AK103501
  ref <309>: DATABASE ENTRY DATE: 2002-08-28
gacagcctacctagcttctccttctcgctcgcttcgcccgcataagtctagccacaaacccgccgccgccgccgccgccgccgccgctagcttccgcggagcggggcgagatgttcatcgagagcttccgcgtggagagcccgcacgtgcggtacggcgcggcggagatcgagtcggactaccagtacgacacgacggagctggtgcacgagagccacgacggcgcctcccgctggatcgtccgccccaagtccgtccgctacaacttccggaccaccaccaccgtccccaagctcggggtgatgctcgtggggtggggcggcaacaacggctcaacgctgacggctggggtcatcgccaacagggagggaatctcatgggcgaccaaggacaaggtgcagcaagccaactactatggctcactcacccaggcgtccaccatcagggtcgggagctacaacggggaggagatctacgcgcccttcaagagcctcctgcccatggtgaaccctgatgaccttgtgttcgggggctgggacattagcaacatgaacctggctgatgctatgaccagggcaaaggtacttgacattgatctgcagaagcagctcagaccttacatggagtccatggtgcctctccccggcatctatgaccccgacttcatcgccgccaaccagggatcccgcgcgaacaatgtcatcaagggcaccaagaaggagcagatggagcagatcatcaaggacatcagggagttcaaggaaaagagcaaagtggacaaggtggtggtgttgtggactgcaaacactgaaaggtacagcaatgtctgtgttgggctcaatgacacaatggagaacctcctggcgtctgtggacaagaacgaggcggagatatcaccatcgacactgtatgccattgcctgcgtcatggagggtataccgttcattaacgggagtcctcagaacacctttgtgcctgggctgatcgatcttgctattaagaacaactgcctgattggtggtgatgatttcaagagtggacagacaaagatgaagtctgtcttggttgatttcctagttggtgctggaataaagcccacctcaattgtcagctacaaccacttggggaataatgatggcatgaacctttccgcacctcaaacattccgatccaaggagatctccaagagcaatgtggtcgatgacatggtctcaagcaatgccatcctctatgagcttggcgagcatcctgatcatgttgttgtgatcaagtatgtgccgtatgttggagacagcaagagggcaatggacgagtacacctcagagatcttcatggggggtaagagcaccatcgttctgcacaacacctgtgaggactcactccttgccgcgccgatcattcttgatctggtgctccttgccgagctcagcaccaggattcagctgaaagccgagggggaggagaagttccattccttccatccagtggctaccatcctgagctacctcaccaaggcaccccttgttcctcctggcacaccagtggtgaacgccctggcaaagcagagggcaatgcttgagaacatcatgagggcctgcgttgggctggcccccgagaacaacatgatcctggagtacaagtgagggaggctgccgaggccgagcagccgtggcatgtggcaaagaggcgaatgggatggagcaagaaagacgtgattagctagctctaagaattgttttagcttctcttgtgatttttcggtctttcccattcttaaccttctgtgctttgtgtgagactcttatcgggctatgcaactagcagcagccttactatggtactggatgatgttatggagaatgttagctagttcccctctatttataacttattagtatcggagatttcagttcg

SEQ ID NO: 28060 - DNA, 2427 bp, Oryza sativa
  ref <308>: DATABASE ACCESSION NUMBER: AK103502
  ref <309>: DATABASE ENTRY DATE: 2002-08-28
gaccggccgcctcgtcctctcgccatggccgcaccatccgcgagctcccgtgcctccgcgatctagcgcggcgcggtggctctcgcacccccggcgtcgacggagcgcggaggaaggcgggcctccgtacagaggcagtcgaggggcacgggatttaggggagaggggttggggggatggggaggaagcctgatccgtcgaagccacactacggtggcggcgcctcgccgagggcagcgaggaggacgcagccgtcgccggttttcctgggaacggcgctgttcgtcctagggtttgtgtccctcttcacgggacacatcgttacggacgccgactggtcccggatccggagccggtggcgatccaagcaggttagaaataacgagcccataaatatttggaaatcgaggtattccaacttgtactatggatgcagcaggaggagcgtaaatttcagatctgctgtgccggagaacagttctactggttacttgctgattggtactagcgggggactaaatcagcagcgcatagggataacagatgctgttgttgtcgcccgaatattgaatgccacacttgttgtacctgagttagatcaccactcattctggaaggatgatagcgacttctctgacatttttgacgtggactggttcatctcttacctatcaaaggatgtaactattgtcaaaagaatcccttatgaggtgatgatgtcaatggataaactcccatggaccatgcgtgcgcctaggaaatccatgcctgatttttacattgatgaagttttgcctatccttatgcgaaggcgagctttgcagctaacaaagtttgattatcggctcactaacgagcttgatgaagaattgcagaagttacgctgccgagtaaatttccatgcattaagatttacaaattccatacaaactctaggtgagaaattggtgcgcaagctgaggagcatgagctcacgatacgttgccgttcacttgaggttgagcctgacatgcttgcattttctggttgttactatggtggtggtgataaagaacggagggagttaggtgaaattaggaaaagatgggatacactacctgtaagactctgaaacttggtgagcttaggatctggatatatttttgtcggtattgcacttcctttttgtggattatttcttttgcactgataaggatgtgttgggtcagatttcccttaaaaactattgagtgataatggctgctgttagttctgagtgtccatgtattcttttgatcaattagtaccgatggatcaatatttgaatgatgaaatgatttagactgattcctagcaggagttgagcgctgaggatgagcgcagtaggggcaaatgtccactgactcctcaagaaattggtttgatgctccgagctcttggttttagcaatgacacgtacctgtatgttgcttctggagaaatatatgggggagaagaaactctccagcctctgagggatctctttccaaactactacaccaaagaaatgcttgctgggaatgatttgaaaccgttccttccgttctcttcaagattggctgcaattgatttcatcgtatgtgacgggagtgatgtttttgttacaaacaataatggaaacatggccaaggttttagctggacgaaggcgatacatgggccacaagagaaccattcgcccaaatgctaaaaaactcaacttactatttaagagacggaaacagatgggatgggatatattttcacagaaggtaaagaaagtgcagaggggactaatgggagaaccggatgatatcagaccaggaagagatgatttcaatgaatttccatcatcttgcatctgccaaagaataccagtcaatagatcagtcacagcgcgagctgaaaacttgtgagctctagtgtagtgaggcagacaacttgagaacggagaatgctgggtgattgagcacgtcccttgctgcactggggaaaatacatgtttgttaagcaaagaaaacagggatgtaaacccaatcagacagaagcagacgtggtggataaatactcttaccggctttaactcatggcactctggtagtctggtggttcagacccagcagaactggttagtgtgcagcgatgacagacaaactgctgatttgcagcttcagtttggttccactaattgttaaaactgtggtaaagaatctgccacgataattgtagtcattagctcgatatgctatccctgtaaattgtacggtatacacgatcaattatttggatgtgtgcttcaatcgtcccatcttctgtctggtagaacctcacagcaacgaacttatttgctgaagggaaatgccattgtaccagaaacttggaaattgaaaattgcggtgattacgtgtaatttatttccttttaacgagcc

SEQ ID NO: 28061 - DNA, 596 bp, Oryza sativa
  ref <308>: DATABASE ACCESSION NUMBER: AK103503
  ref <309>: DATABASE ENTRY DATE: 2002-08-28
gggggaagttcgatcgatccctcaccatggcgtcggagaaggaggcggcgctcgccgccgtgcccaacgacaaccccaccatatttgacaagatcatcaagaaggaaataccttccactgtggtatttgacgatgagaaggttctggctttcagagacataaatcctcaagctccgacccacattgtgatcattcccaaagtgaaggatggattaactggcctatcaaaggcagaagagaggcatgtagaaatactcggttacctcctctatgttgccaaagttgttgcaaagcaggagggacttgaagatggctaccgtattgtcatcaatgatggccccagtggatgccaatctgtttaccacatacatgtacatctcctcggaggcaggcagatgaactggccgccgggctaacgagtgcccgtctgttgaactgccttcatggcaaggatgtcacactgcctctccgttgaataattcctgtaactggcataacaattggtgccctgaacttatgctatatgtttgtggatgttaccaggacaggacatgaccatcctgctatgatttatggacaagatacattgcgttctc

SEQ ID NO: 28062 - DNA, 3755 bp, Oryza sativa
  ref <308>: DATABASE ACCESSION NUMBER: AK103504
  ref <309>: DATABASE ENTRY DATE: 2002-08-28
gagcttcttcgcttcgctcctcttcctcctcgcgatagccgccgcggcggcggccgctcgcatccgcctcgtcgcgcgcgctccagcgccgccatcatcgcctccatgcgcgcggccttgatcgcatcgttccctcgcctccacggctccaccggcggccagcgagctcgtgatgtgcgcggcgaggaaagctgcggctcggctgctctcgccgcgggcttccacgcatcccttctctgcggccctcctcctgcggggacgagccgcccgcgggggatccctcgaggcacacttggctacggtgccccacgagcgtgcctcggttttgcggttctgggtcagacgccgcagattccacgacgcccgcggggtgttcgacgaaaggcccacgaggaccgcgcccgtgtggacgttgacgatctcgggctgcgcacggcgcggccggtatgcggacggaatgcgcgcgttcgcggagatgctggcagaaggtgaagccacgccgaacgcgttcgtccttgctgccgtcgtcaggtgctgcgccggtatgggcgatgtggagtccggcaagcgcgtccacgggtggatgctgaggaacggggtgcatctggacgtggtgctgtgcaatgctgttcttgacatgtacgccaagtgtggccagttcgagcgtgccaggcgggtgttcggagcaatggccgagagagacgccgtctcctggaacattgccatcggtgcatgcatacagtccggtgatatccttgggtcgatgcagctttttgatgaatcgccgctgcgtgacactacaagctggaacacaatcatcagcggcctgatgcggagtgggcatgctgcggacgccctgagccacctgcgtcgaatggcgcaagctggagtggtgttcaatcactacacttactccacagcgtttgtcttggccggcatgcttctcttgccagacctaggccggcagctccatggccgtgtttttattgctgcactggagggtgatgcatttgttcggagctctctcatggacatgtactgcaaatgcggcttattggaggcagctgcgtcagtctttgatcattggtcaccactcactagagacatgaactttgcctggagcacaatggttgctgggtatgtccagaatggcagggaggaagaagctcttgatctctttcgaaggatgctgcgcgaaggggttgctgctgatcggtttaccctcactagtgtagccgcagcttgtgcaaatgttgggatggttgagcaaggaaggcaagtgcatggctgcgtggagaagctatggtacaaattggatgcaccattggcatctgccattgtggacatgtatgctaagtgtggcaaccttgaagatgctcgtagcatattcgacagagcttgcaccaaaaacattgctgtctggacttcaatgctgtgctcctatgcatctcatggccaaggcaggatagctattgagctcttcgaaagaatgacagcagaaaaaatgactcctaacgagattacccttgtcggtgttctatctgcctgtagccacgttggattggtcagtgaaggagagctttactttaagcagatgcaagaggagtatggaattgttccaagcattgagcactacaattgcattgttgatctttacgggcgatctggactgcttgacaaagcaaagaacttcgttgaggaaaacaacatcaaccatgaggctattgtttggaagacgctactgtcagcttgtcgacttcaccagcacaacgaatatgcaaaattggcttctgaaaaattggttcaactggagcaatgcgatgctggatcatatgttatgctgtcaaacatatatgcaaccaacaacaaatggcacgacacttttgagcttagagtttcaatgcaggaaaggaaggtcaggaagcagcctggtcgatcttggatccacctgaagaatactgtgcatacatttgttgcaggggatgcgtcacacccacaatcagctgaaatttatgcttacttggagaagctggtggagagactgaaggagattgggtacacaagtagaactgatcttgttgttcatgatgtagaggatgaacaaagggaaacagctcttaagttccacagtgagaagctggccattgcatttgggatcatcagcactccaagtgggactccacttaggatcttcaagaatctgcgtgtttgtgaggattgccatgaagcgatcaagtacataagtctggccacaggtagggaaatagttgttcgtgacttgtatcggtttcatcatttcaaggatgctagttgttcttgtgaggatttctggtgaaattttgttgaccattcatgatgactaactgagtaactgaagattgttatgtactgcgtcgtgcacgtgcatggctgtactagagattgtggctcaaatgtatattgatttaaggagaattccttattagccatctgatgccaagtatattcctcatctgcggagaagcgcattaacaggctacctcaccttgatgagccagacatcctcacctccacctacgaaccattatcatcggcagtcggcatggactactcgccatttagcaaggctgtggtgaggcaggcggtggataacctggtgaaggccagcaactggatcatcctgatccatgtccttcccagaggagcagatgccagccacaaggagctctggaagagcaccggctcacacatgcagaggcattgcaatttttctgctgcttctcttgttcagcaaattctgactgctgcttctcttgttcaacaaattctgacgcagaaagcttaacagggaggtgttgggtcaaccctgataaggaggtactagcgatcctgcaagctgaatcgaagtccaagcaggtaatgactcagctttgccagaagatcacccacctttgtatttgggtggtttgtgaggaattctgcataggggacaggcgaattatgcttgatggttctatagttgtaacaatctgcaactgcctgggcgtctgtacagactatgcttgaggttcaccattccatttcccatgctggcattctcatttttcttggttaggacaagagcttcttgacattcattgacaagtgtattgaaggttcttattttgtaatgtcatagtaaattccttgtttggggtcatgtctgcagtttgcaaggagtccagggaaggttcacacttgaacccaagcagtgggctgttccaaccaaatgagaagaaggatgtggtaacatcaactggctagcaatggttgggattctcgctggttacctttgtgatggggcctcttaagatgttaaagctctatgctgttccttacatgatattgtcatgtggttggattttgtcacatacttgcaccatcatggccatgaagaagcttccctggcaccatggaagagtaaataacattattaatgttgtgggattgctatttgtcaatgatgcaaggatggccactagggtatagtccatttttgttcaacatagggcatagtctagttttgttcaacatagggcatagtccatttttgtttgctaaatggcagaaggtttatttgttcaaacataggttctgcgtgtaaaaattattgagtagagatttatgcctttaaagataattagctgaatttcccgtgcaactaaactaaatgattatgtgaaagtagaattgtatttgacatacaactcttgcatctatatatgtaaatacaaacc

SEQ ID NO: 28063 - DNA, 1118 bp, Oryza sativa
  ref <308>: DATABASE ACCESSION NUMBER: AK103505
  ref <309>: DATABASE ENTRY DATE: 2002-08-28
gaatccacccacctcgccgcccgtcgccgtcgcctcgtcgccgccactcacctctcaccaacaatcgcgacgacgaaaagaaaaaaaaaaaaaagaatctcgtctcacccccaatggcgcagatcatcgacgggaaggcggtcgccgccgacatccgccgcgaggtcgccgccgacgtcgccgccctctcctccgcccacaacctcgtgcccgggctggcggtggtgatcgtggggagcaggaaggactcgcagacgtacgtgcagatgaagcgcaaggcgtgcgccgaggtcggcatccgctccgtcgacgtcgacctcgccgaggacatctccgaggcggcgctcgtcgccgaggtccaccgcctcaacgccgacccagccgtccatggcatacttgtccagcttccattgccaaagcatattaatgaggaaaagatattgaacgagatcagcttagagaaagatgttgatgggttccatcctctgaatattggcaagcttgcaatgaaaggcagagacccactgttcctaccatgcacgccgaagggatgcatggagctcctaacacggagcggagttaccatcaatgggaagcgagcggtcgtggttggccgcagcaacattgtcgggctacctgtatccctgcttcttctgaaggcggatgcgaccgtatccattgttcactcccggaccccaaaccctgaaagtattgtccgtgaagcagacattgtcattgcagcggctggccaggctatgatgatcaaaggagactggatcaaaccaggcgctgctgtcatcgacgttgggacgaactccatcagtgacccaaccaggaaatcggggtacagactcgtcggcgatgtggatttcgcagaggtgagcaaggttgctggtcacctgactccagtcccaggtggcgttggccccatgacggtggcgatgttgctgaagaacacggtggatggagcgaaacgtggtatagttcagtaaagtttccatcttgtatgctgtaactgcaaggatgatgttgtaattgagtgcatttctggacaaattcgttctcatttttgttgtgtgacggttatttcgagaataataagaataagtttgtctgtc

SEQ ID NO: 28064 - DNA, 471 bp, Oryza sativa
  ref <308>: DATABASE ACCESSION NUMBER: AK103506
  ref <309>: DATABASE ENTRY DATE: 2002-08-28
gctccttgccccatccgtcggccgcgacgacgacggatctccaccgcgcgccgccggcttcccctcctcgcctcctccgccgtcggccacgacgagccacgacgagtgacgacggctctcctccgcgcgccaccggcttccctcctcgccgcctccaccagctgcgacgacaacggatctcctccgcgcgccgccggcttctcctcgtcgccccctccgccaccggccacgatgagccacgacgagcgacgacggcgccgacgcggtggctcgggtcaacgtgggggcagtggacggaggagagccgtggccggactgtggccggcggcgggagccgtgtttttcttttatttttttagatgatttccgcaagcgggccacgggcccgactgcgaaaatggtctattttcgcaagtgagatggtagcggcggtccttcccccgcctgcgaaaattgatttgggccgcttgg

SEQ ID NO: 28065 - DNA, 2952 bp, Oryza sativa
  ref <308>: DATABASE ACCESSION NUMBER: AK103507
  ref <309>: DATABASE ENTRY DATE: 2002-08-28
gactattctccatcgctcgcagcctcccgcatcccacctcgttcgccttccccggcgccggcgcctccaccaccagcgggcacctgtgtggatctgccgtcgtcctatatatagctaggtgaggtccagccgcctcttctcctgcttccttcgttacgctgccctgcccggggatcccactccgcctccgcccttcattccagccacacgtgatttcttctccctccaactctactctcccctttttattatcttctcctctcatggagtgggtttttgctcattcagctagtgctgccgtttcttcatttctcctcaaataatcgtgctccctccactagtgcataagtttcacttcacacaatttgcatccaagttctaaagtcatacccaacacatccttaacttttattttcactttcggtcaacaatattatagttactacggagtacgtgctacggtgatcctgatgtgagatcaagctacttttgttagactgctgcatctgtttttggatctgtggatgtttgtaattagccatgcgaggaaagccgtggacaagacttgcccctttcatatccaagcgtcatatttcaacctctcagacctcattatcttcatcctgctcatcatgatccgcgatacagccatggctctttgttggtcttggtaaccctgatcctgtgacaccccatttcgctgcaggctgggtttgatatgatagacatgtttgcacagtctcagggtatatctccgaccaggcatcacttcaaggcactatttgcggaaggaatggtcgaaggtgtgcctgttttgctcgctaagcctcaaacgtatatgaatctcagtggtgaatctgcaagcatcacttttagaactctttccatgttttaatatctgatttctactctgccctactatcttggaataaatctatttcgtgtcccttaactcttggcatggtttaacttttgtccctgaattctaaaactaaatcactctggctcgtggtttattgccactactaatcttcgaacagttgcatgcccctgtcctggtcattgaccgatggttcatgctttccatcatgagcatatcttgtcatattctgttgtgccttttttttttctgtcagcctcgggattgagtttgccagtttcatgagaagctagtattggcactgaaaattgttccatcaagagtaaattgcgcctacagtacatagaacttataaattgctcgctctgatactacaacttgcttagtccgtgtgaactaagactaaatggcccatacaagttatactaaggtactactaagcaagtagtaccaaacgagcgatttgcaagttgctatacttatttgcatccaccacctaagtttgtgtattgtgagtgtaatttactcttccatcaaactcaacaaaagactaacaaactctgctgccaccagttcactggttcacctcattcacgtcctacatgtattcgacattcttcacctaaatcccctcattcactccggggaatgcagtggcggagcttaggctaaattctagaggggaacaacacttaccagagttacataagaaagaggggggcattttgtaatttaatcacttgctatgggtaaatatgtgcttcatgcctacatttattttaaatcttgcaaagctgggggaggcaaagacccaggttggtctctatgatcctctgcaactgccagaatggtttgaggtcaaactgtgattgcctcagcagaaacactgatgttgtcgtcattggtggtgggtctcttgagtaccaccaatttaggatgatacattaaactttttgaggattaggcttatttactagtggaagtggtgctattactcatcagagtttcctggccacaagcctggagaatgaatatgtggctgcaatgggtaggttatgggtgaccaaaaaggttcagtccaattgagctaatttaagtcgatataactgcagggcaatcctggcacttcttattatcttgattttgagataatttagaatatataccatatttggatgctatggaatgtcaaagaatggagtacatcaatgtttttgatgttactaactgaatcagaacgatttgctaagagccatttccccctaaattcaattatgtccgcagctttactttggttggggcaaccaaaagcctatcaacaatcagaattttagttgctatgacttgaacttgatatctcaatatgtctgttttgttttggttacttctatgtcttatttctttgataggtcgtgtgtaattcagcttgtagaaattcctttaactggacataaaaaaatggttataccatactgaccctgatctgatgactcttggtgataagtcttttttggcctattgcaggttgggccacttgctgcctattataaactaccacttaatcgtgtccttgtggcatttgatggcacggacctgccctgtggaattcttcgtttacaacctaaaggaggattcgggcgccataatgggtctgttgattttgtaaccatgtgttttaatgaagtaatttgtcattcaaaagattgattcagccatagaagagggtgttgagattctaaagttggttgttaccaagggtttatgagtctgcaagatcatcaaattggatcagaaggataagcatctagcaaccatctgacaacacatgacatgcaactgtaaagatgacgatagacgctgcttatctgagaaagcgatctaagcctgttgaatttccctcaaaaatgcctgatgggagaacctgataacatctacacctcatgattcattgatttgtcacacttgctacaatggccgtctcctttgcattggatttgtaagtgttgatgctgccaatgtttctttttatacttttgtactactgacttaataaaaacttgaaggttctatcc

SEQ ID NO: 28066 - DNA, 1612 bp, Oryza sativa
  ref <308>: DATABASE ACCESSION NUMBER: AK103508
  ref <309>: DATABASE ENTRY DATE: 2002-08-28
gacactcacacgctgcagcagcagcagcagcagcagctttcccaccgactcctccccctcctccattaatggccgccaccaagaaccctccaacccccacgtgacctcctcctcccctccccctccccctccccctcccgacctcgccgccggcgacctcccttcttcttcctgcttgcctgctcgcttgcctgcctggttcgaccgatgctgagctcgtcgccctcggcggcggcgccggggataggagggtaccagccgcagcgcggggcggcggtcttcacggcggcgcagtgggcggagctggagcagcaggcgctcatttacaagtacctcgtcgccggtgtccccgtcccgggcgatctcctcctcccaatccgcccccactcctccgccgccgccacctactccttcgccaaccccgccgccgcgcccttctaccaccaccaccaccacccctctctgagctattatgcctactatggcaagaagcttgaccctgagccgtggcgttgccgccgcaccgacggcaagaagtggcggtgctccaaggaggcgcaccccgactccaagtactgcgagcgccacatgcaccgtggccgcaaccgttcaagaaagcctgtggaatccaagaccgctgcccctgcgccccagtcgcagccccagctgtccaatgtcacgaccgcgactcacgacaccgatgcgcctctcccgtcactcactgtgggtgctaaaacccacggtctgtcccttggtggtgctggctcgtcgcagttccatgtcgacgcaccatcgtacggcagcaagtactctcttggagctaaagctgatgtgggtgaactgagcttcttctcaggagcatcaggaaacaccaggggcttcaccattgattctccaacagatagctcatggcattcactgccttccagtgtacccccatacccgatgtcaaagccaagggactctggcctcctaccaggtgcctactcctactcccaccttgaaccttcacaggaacttggccaggtcaccatcgcctcgctgtcccaagagcaggagcgccgctcttttggtggtggagcgggggggatgctaggaaatgtgaagcacgagaaccagccgctgaggcctttcttcgatgagtggcctgggaggcgagactcgtggtcggagatggatgaggagaggtccaaccagacctccttctcgacaacccagctctcgatctccatcccgatgcccagatgtgattgagaactttgctgcttgtggcagcggggtggacctctaccccgcattttaccgctgctagtgagttggatcagtgattgcgcctcccctggttctttgttcaattgtatcgtgctatgaactagttaagagaaccctactttttttttctagtagaagagacagaaaactcttatccatcatcatgttttaagattccacgatgttttgtacctgcaacccacgacctgccggctgctggaagttactggctgtctgtaatgtttgtagtagatgatctatgatgtatcatgtatctatctacttgttccgaattgcggaaaccaaagccgataatctggcatgtgccaacgtcctcctt

SEQ ID NO: 28067 - DNA, 833 bp, Oryza sativa
  ref <308>: DATABASE ACCESSION NUMBER: AK103509
  ref <309>: DATABASE ENTRY DATE: 2002-08-28
ggctccctcgcgattcccccactctccttctcgcggagcaattaaaggacacaacgcgtcgcgaggtcgcgccgccgcgaaaccccacttcttcttcgccgccggccgcctcgcctcgcctcttcctccccgcagcatcatcctctctcccccggttccccggcggcggcggcgagcggcctcgcagcttcgccaagtccccactccctccatccccaggttagcatttgacagccatggcaaagcatcatcctgatctcatcatgtgcaggaagcagcctggcattgcgattggtcgtttatgtgagaaatgtgatggcaagtgtgtcatctgtgactcctacgtgcgcccgtgtacgcttgttcgggtctgtgatgagtgcaactatggatccttccagggaaggtgtgttatctgtggaggggttggcatctcagatgcttactactgcaaggagtgcactcagcaagaaaaggaccgagatggatgtcctaagattgtcaaccttggaagcgccaagaccgatctcttctatgagcgcaagaaatatggttttaagaagagatgatcaggaaggtggatttgtctggtccttctggtctcgctgtgatttttgttgcacggatataactgctaagtcaacagctttgtattcatggtctgctttgatactaatatgagatagcatcgctgatgtttgctgtaatgttacttgtatgaaatggtctacattctcgagtctgcatttgcacttatgcagtaggtacctgatgttaatgactatgattgttgacatgaaatgcgaactgagatatggagtacattttagtct

SEQ ID NO: 28068 - DNA, 1709 bp, Oryza sativa
  ref <308>: DATABASE ACCESSION NUMBER: AK103510
  ref <309>: DATABASE ENTRY DATE: 2002-08-28
gtacgtgagcgagtagtaattcccacgcgcggcggggggcattcccgtacatggtgtacttttctgggcggatgtctgcctccgtcgtgtatcccccccgctggattctgtgacgggtgcgtgctctgctcctcccgcgcgcgtgccgccaaaccacacacaccccctcccctgcccccacccacacccgccggtcgctgcctcgctcgcgcccaagccggatcacgcctcgatctcccgtgagccggggcgtgcgttgggcgttggcgtacaatgcggctcgcgctcgctgccgcgcccgtgacgacgcggatcccctgttttgtacacgcgcgggcgcacgctttgtcgcggtggtgacgcgggctgccgtttctctgtttcatttgggaggggggggtgtcgtctcgtgtcgtgctgctgatggcgtgtgtgtgtgtacgtgtggttggtttgcagagggtgggggagatgatgcggcagctcaagtacgtgcggggcctggagttcgcggcgggggtcgggtacgtggacttcctctcgcgcgtgaaccgggtggaggacgaggcccgccgcaacgggagctgggccgcgccgcacccgtggctcaacctcttcatctcctcacgcgacatcgccgccttcgaccgcgccgtcctcaacggcatgctcgccgacggcgtcgacgggcccatgctcatctaccccatgctcaagtccaagtgagtactactagtatactatttgtttatctcctgggatgggtttttgtttaatcggataattaattagcccatttggtccgtacttataatacgacgggggtttctggttgtcttccatcccgttctgttttggatttagccttgtcatatatctgccgccattaggatttagcagccactaaccccaggttgctatgattgatgtaaattcctttttcttcttttttttctctctctctctgtctcagtttgccgccaatgcacgcacgcacgcacacgagctgctaattaaaacgccccctaattaacacgtttgcgtgtgacaggtgggacccggccacgtcggtggcgctgccgaatggcgagatcttctacctggtggcgctgctccgattctgccggccctaccccggtggtggcccgccggtggacgagctggtggcgcagaacaacgcaatcattgacgcctgccggtccaacggctacgactacaagatatacttcccgagctaccacgcccagtccgactggtcgcgccacttcggcgccaagtggagccgcttcgtcgaccgcaaggcacgctacgacccgctcgccatcctcgcccccggccagaacatcttcgcccggaccccctcctccgtcgccgccgccgccgccgtgatcgtgtaagagacggatgatcgacgatggtgattatgctgtttgctgggttaattctggatgatggcgacgatgaggatgatggtgatgatggggatgaagaggagggatcgggacgagcacaatgatgatggtgatgatgatagggtcattgttaggtacatttgggaggggtgcaaaagagggaggtttcggttcgatgggatggacgacgtgtcaagggcagtagggccggcggctgtggctcggctctgcagcaggagttgcaaaagggaaaacgaaagatgtaaacgttttcctgctttgattctttttcttccc

SEQ ID NO: 28069 - DNA, 1276 bp, Oryza sativa
  ref <308>: DATABASE ACCESSION NUMBER: AK103511
  ref <309>: DATABASE ENTRY DATE: 2002-08-28
ggggctcgcctctcgacctcggtgttgcgctctcctccgctcggaccgctcctcgccggcgatccccccgcctccaccgccgccgccgccgccgccgtcgatctgcgctgccacggccgggggggaagcttgtgctgaggcgcagtcctgaagagaaccccacttgggaggccggggggcgtcgaagctccaaacaaccaagcaccatcgtgacgaagcacgccacgggagatgactaaggcggcggaggcgtgggagggcccgacggcggcggagctgaaggcggccggcgcggaggcgatccccggcggggtgcgggtgaaggggtgggtcatccggtcccacaacggccccatcctcaactccgcctcgctccagctctttgaagataaacttcagacaacacatttacctgagatggtttttggggagagtttcttatctcttcagcatgctcaaactggcattagattatatttcaatgcgcttgatgctctgaaggcatggaaacatgaagcactaccacctgttgaagttcctgcggcagcaaagtggaagttcaggagtaagccttctgatcaagtaatacttgattatgactatacattcacgacaccgtacaatgggagtgatgctttggttcagaacccagatagtattcaaacaagtttggatgaaccccgcaatttgtgttgggaggattctgaggatcggattgaccttgttgccctttcagcaaaagaaccaattcttttctatgacgaggttatcctgtatgaagatgagttagccgataatggcatttcattcctcactgtgcgagtgagggtgatgccaactggttggttcctgctcttgcgtttttggcttagggttgatggtgtacttatgagattgagggatacccgggtgtattgctcttttggtagtgacgaagcaaaacccattgtactgcgtgaatgctgctggagggaagcaacatttgctagtctgtctgcgaagggatacccttccgactctgcagcatatggagacccgaatcttattgctcataagcttccagttgtgatgcagaagatccaaaagctgaaattacccaattaacccgacaacccatctcgtgtacatcagcgtttttttttccattgactgttggacggtgttctctttctgcttatcatgtgctgtggtctgtggatgcacgttcctgtagctggcaatagtataaaaattcttgtggtaaaggctatttgtctactggggcttatcagctttt

SEQ ID NO: 28070 - DNA, 3893 bp, Oryza sativa
  ref <308>: DATABASE ACCESSION NUMBER: AK103512
  ref <309>: DATABASE ENTRY DATE: 2002-08-28
gggagttcactctcaccgaggccgccgccgccgccgccgagccatggaacccggggtgggggggtgggggggtggcgcagctggtacgagagggagaggtggacgacggtggcggccggccttgatccggccggtggcagcgggaaaggggggagccggggaggtggcggcgtgctagatatggaaacacttcggagatggcgatggccgtcgaggcgcgcggattcagggtgggggtggtcgagctcaccggcggcaagggactcgccgggtggtcgaggtctccgatcatccgacgcggagagttgcttgggttttctgtttctccatggttggtaaataatagcaattccatcctggaattctcctcctcccattcccgagtttccgacgagacgctttggcaatggcggtggcgccagatcacgcgcccgtattcgtggcgctgccgccgcggattccgcgggatggacatggggaggaatttcccgggcttggacttgcctgtccttctcttttcctcccttgttcttggggtggggttggcggattggggaatcggcttcgagctgattggttttgactgcgccatccgatttcttcgcttttgtggaggggggcagcacggctgtgcatttcgttctcttgtcgtggatgcccccggaatttatccccaattctcgctatacttgctcgtctacatcggtgtgtttcttggagcatttcaagcacttctcgtcttcatcgatgcatttcttggagcatttcaagtgtccagcgtctaaatcgctcaggcgaatttggaggagcctttaggcgcattccgctcaaaatcaagtggaattgttgcatgaatcttcagattgttttggctggattgccaggtttcttcgatcatttttctctacggggctgaggaatttttcgccccatgcccggaaagctccaaaggggatgtttgccacaattttcagagtatctgtgttgagatgatcggtgtggtgtagaaggaagcacgcaaatgatgaggcattgtaggagagaatggctcctcgccctgtgcctcatctctgtgcagctcctcattccaacaggctgcgagggggttctcgtcgcggcaagcaacatgtcgccacctgctttgacaccactcctcatcaatcaagtagaccaattggtagaacatgcatgggtcaagtgtggattggacaagagaactcttgaagatgttagacgccacttcaactacaaccatgtattggcaattctccgtagaatgtctgggcaagacattaaggacacctctcctgacattgatggagggaccagtgtattatcactagaaaggagggacgctatactgaactgtttaagcaagcagaatttcatgagtatcgctggacaggatggtttaaaaatcttgtccgctgattatatcaaagcacttattgcctcacttagaacagaccttgctcaggaatcttcaactacaaagtcaatacctgaacaagcaggaaaacctgtcccagggaaaacttctacaccaaaacctgtaaacaaaccaaccgacagtgtatcatctccaccagatcgttcatataaatcagctcctacagaaaaggaaaaccctcctactaaatcagtagcggaaaagaaaaaggacagcagtggcatgccaaatgctttcattggtttgtccattgctggcatagctcttatggctcatctctgtttgtgctgcttcatgtgccatgggacttcctcatctgacttgagggatgataaaccacttctgactctaaatccgagcaacttgtccgctgcttctaaatcgtcccaaggaaatccaattgatgtcaataagcttggggtagtgtcgttgaaatcagaggctggtcaaaatggagatgtgaaactaatttcgaaggaaggcacaaacaatgtgaatgtggtgcacccagtgagttctgtgtcagaatcaacattgatgccacctccggaaggcgcaaacaacgtgaatatggtgcacccggaaggcgcaaacaacatgaatgtggtgcacccggaaggcgcaaacaacgtgaatatggtgcacccggaaggcgcaaacaacgtgaatgtgaatatggtgcacccagtgggttctctgtcagaatcaacaccgatgcagcctcctgtgatgccacctccaattccgaagcttctttctccaccagcaccccaagctcccatgccaccattaaaggcttctcctgttcctcccccagaaccttcaccacctcctgctccaaaagctgcacctccaccgccaccaccaaaatctactggccctggcccacctcgcccgccaccgccagccatgcctggttcttcgaaaacacgcccaccgccacctcttaagccaggcgctaaggtgggtgctgttgaaaattctaatgaagctaaaacaaagctcaaaccattcttttgggataaagtaactgccaatcctgcacgatcgatggtgtgggaccaccttaaatcaggatcattccagtttaatgagcagttgatggaaaacctttttggttataattcaactgacaagagcagtgacaccaagaaagatttatcatcgaaagatgccactcaactcataaggatacttgaccccaaaaaggcgcagaacctagctatatcattgagggcgcttggtgtttcacctcaggaagtatgtagtgcagttaaggaaggaagtgaacttccatctgatttgatacagaccttaataagatggtccccaagtaatgatgaggagctcaggcttcgattatacagtggggaactctttcaacttggtcctgcagagcaattcttaagagtaatcatagatattccttatattttccagcgcttagatgcattgcttttcatggccaatttaccagaagaagcttcaaatgtgaagcaatcctttgccactttggaggtggcttgccaggagcttagaaacagccgtctttttatgaagttactagaagctgtcctcaaaaccggaaatcggatgaatgttggcactttccgtggtggagctcaggcttttagactcgacacgctcctcaagttgtctgatgtcaaaggaactgacggaaagacaacactattgcattttgttgttcaggaaatcattcgttccgaaggtgtccgtgctgaacgggctgcaaaggagcagaacagtggcgtttccagtgtgaagactgatgatctaggtgacaaaagtgagcaaactgaagacggttacaaacaactggggctgaaagttatctccagcttaggagatgaacttcaagatgttagaaaggcagctatcctagacgcggatcaattgactatgtcggtagcaagtcttggccacaagctcatgaaaaccaatgaattcttgaacatggacatgaaaagtttggacgaagacagtgggtttcaccgcaagcttacgcacttcgtacagcagtctcagactgatattactttcttgctggaggaagagaagaaaatgcggttattggttaaagacaccgtcgactatttccatggaagtgcaggaaaggatgagggcctccggttatttgtgatagtaagagatttccttgcaatgctggacaaggtgtgcaaggaggtgaaggaagcatcaaaagttgctccagtaaaagcaaaagccaaacagccctcccaatcattgcagtcattccgtgatccacgggttaatctttttccggcgattcaacacctgagggcagatagctctagctcaagttctgatgatgaaagttagatcaacatacctatgttttaccgtgcacactcagtgagaaaaattcatcaggaaatgataacgccaaaacaggttaaaactg

SEQ ID NO: 28071 - DNA, 2636 bp, Oryza sativa
  ref <308>: DATABASE ACCESSION NUMBER: AK103513
  ref <309>: DATABASE ENTRY DATE: 2002-08-28
gccgacgcttttccccacccgacaaagccgccaactcccccctccgctctcctccggctcgccggcctcgccagtcggcagccgccgcctcttcccgcccctctaatctccggcgctcgatgccgggggacgcggaggacctgccgccggcgataacgaagctggggcggcacttcaggctcacggaagcgcacatctgggatggctggtacgccgctggcgccgacgtgagccacaggagctggcactccgatgatatcgattccggcggctgttgtcaaacagataaagtccaaaacaagccaaccaaacagacagatgaaggcgatttgtttgttgaagatttagaattgtccaacctgatgggttctttggggcttcctgtttcattcagcacaagtaaagagaaaaagaatgcacccaataaggtaaagaagaatggaaggagagtctcctacgaagcagcaaatactctaatcgacgatgattcaaggacatgcacgggtactaaagaaactgaaagtattgttcagttgatggcttgtgtggagcaaactaacccatgcagttcatctaggatcactgtgggttacagtgaagtctgccaaggtgatatcgagaagatggacaaagacattgtttatgctaatgaacaggaagagtctggtgatctctgctcttctaaagtattatcaagtagcaaagctgaagataactatgaacatgagacttgtcagtttcatgctaacatgaacaacccagtaaaagcagattctcctgttcgagaaaatgaaactgcagaagttgtcttgaaattgaacaaggagatgctggggcaaaactctgttgataatgaatctagattctcctctgctgagatttgtatggaaggaggattatcaacaataaaagatcaactatctggggaaactccttcaacatcccatgataataaggatgttgatcatgaaacttgtctaagttcagcagagccatctcctgtggataataatcctgcccaaaagtctgacagcagcttttacttcgaatatggtgattggagagtcctgtgggatccattctacagtcggtattacttctataacatcttgacacaggagtctacatggtatcctcctcacggattggaggattttgcatcacattctaacacatgtatacctgaagacctggacgaatttggctcacaaaataaaagcacaccggcacaagaacatgatcaggctggtggtgacaagcatttggatgagcaggggcaagcttgttacagtgaattgagcaatttatcagatattcctgatggagagagaataaatcaatgtatggtaactttcaccgatgaagcacgccacactgataatattcatcatcagaatgatagttcaatgagtgaaatttcagagatgaatcaggagattggtcgtaccaaaaagaaaaagagagtaaggagatctaagtcatatcattcatgtcaagacttggcagggaacatctccaatgacattgccaagtactgggctcagcggtattcacttttctccctttttgatagtggtataaaaatggatgaagaaggatggttttcagtgacaccagagctcatcgcaaagcatcatgcatctcgcgttggtgccggcattgtgattgactgtttcacaggagttggcggaaatgccatccattttgccaacaagtgcaggcatgttatcgctattgatattgatccccaaaagattgattgcgcgcagcataatgcaactgtctatggagtacatgatcatatagacttcgttagaggtgattttattcatgtggcgcctcgtctgaagggagaaactgtttttatgtcgcctccttggggtggaccagactatgccaaagtagatgtatatgatatcaaaaccatgcttaagccttgtgatgggtattctctctttaaacttggtacatcaatcgcttcgagggtggtgatgtttcttcctcgtaacattgaccaaaatcaattggcagacatgtgcctgtcagttgatcctccttgggcagttgaggtagagaagaatttcctcaatgggaagctgaaagccataacagcatattttgagcagcaggatggttcagatgtgcaggacgctagtgatacaaacccccaaaacccagaataccatgcttagtgaaaaacgcctgtgctcaatcatcaaaggtcagcgtaatcacaaggtgccactcaggccatcgtgtaagggcgcgttcggctgtcgtgtgcagcggtaccctgcagcctacacccagttcacttggtgcagcaacaagctgtaacatggctgtgaaacagcgctgtacaagcagccgaagaggcccctccctaagtagttgattttggttcttacttgctagcatgaagtttctgtaattatgtccagtgtatctgtttgtgtcatcaacctctctgttattgcaccgtccactgtacgatatatagctcttgcggcatcccagcaagcatcatggtgctgcttccctagcaaatctatcttcgaatggcatgggaaaaaggctgacgtgatatgttctatgcatcgctcatactgactatgtgttaccacatcgtggtttgc

SEQ ID NO: 28072 - DNA, 4093 bp, Oryza sativa
  ref <308>: DATABASE ACCESSION NUMBER: AK103514
  ref <309>: DATABASE ENTRY DATE: 2002-08-28
ggcggccgcggcatttcgaattcccaaccccgaaaatccccacgccccgaaaatttttcgcgcccaaacccaccaaaccctagacccacctccggccggcgacgccgccgccggcggccggcgaggatgcacatcaaggagatatgcctggaggggttcaagtcgtacgccgggcggacggtggtgtcggggttcgacccgctgttcaacgccatcaccgggctcaacggctccggcaagtccaacatcctcgactccatctgcttcgtgctcggcatcaccgacctccgccaggtgcgcgccgcctcgctccaggagctcgtctacaagcagggccaggccggcgtcaccaaggccaccgtctccatcgtcttcgacaactccgaccgctcccgctcgccgctcggctatgaggattcacccgagattaccgtcacgcgccagattgtagttggtgggcgaaacaagtatcttatcaatggccatcttgcacaaccttcccgagtgcagactcttttccattctgtgcagctaaatgtgaacaatccccattttctaattatgcaaggacgcataacaaaagtgctgaacatgaagcctccagaaattctctccatgttggaagaggcagcaggtacaaggatgtatgaaatgaagaaggaagctgctctgaaaacactcgagaagaagcagaataaagtggatgagattaataaactccttgatgaagaaatccttcctgcattagagaagcttaggaaagagcggtgtcagtacatgaaatgggccaatggcaatgctgacttagatcggctcaaaagattctgcatcgcttatgagtttgttcaagctgagcgagtgagagatggtgcactcaatgatgtcaaacaaatcagggcaaagattgttgagctggatgaaagcacagagaagctaaaatcagagatacaggaaatggataagaacatatctaacttggctgctgaaaagaagctaaactaggtggtgagatgaaaactttgtcagagaaagtggataagctctcacatgcacttatcaaggaaacttctgtgatgaataatcaagaggaaacaataaagtcagaggaaaagggtgctgaaaagattctcaagaacattgaagacatcaaaagatctataattgagcgggacacagctgtaaaaaatgcagaggatggtgcagctgacatgaaaaagagagcagatgatctgacaaaagagttggacgagagtgagaaagaataccagggtgtactagcaggaaaaagcaatgcaaatgaaaagaaatgcctagaagatcaactaagagatgcaaaagctgctgtcggagaggcagaatctggactaaagcagctgacgacaaaaataagccattctgagaaggagctaaaagataagaaagcccagttggtatctaagcgtgatgaagctactgcggctgagaatgagctgaaagctagggaaaaggacttggaaactgtcaaggcatccatgcaatctgtaaattatgaagaaggacagatggaagctttgcaaaaggatcgatctattgagttagacgccgtccagaaactgaaggacaaaattcgtgctctctctggtgaactagcaaatgttcacttcaattatcgagaccctgttaagaattttgacagatcaaaagtgaaaggagtagttgcacggcttatcaaaataaaggatagctcaactgcaacagcgctggaggttgctgctggtggaaggctatacaatgtggttgttgatactgaaaccactggaaagcaactcctacaaaatggagatctcaaaagaagggtaaccatcataccattgaataagatccagacaggtaccatacctgagagagttcggcaggcagctcgtagactggttggagctgaaaaggtaacattggctctagaactggttggctatgttgaagaagtaaagaatgctatgacttatgtctttggttcaacatttgtgtgtcgaaatatggaatccgcgaaagaggttgcatttaacagagaagttggcagtacaagtgtgacccttgaaggtgacatttttcagcccagtggccttttgactggaggtagtcgcagaggtggtggggacttgctaaggcaactacatgaattagctaaagctgaggctgatcttgccaatcatgagaaaagactttctgttattgaacaaaagattgtggtgcttttgcctctgcagaagaagttcacagagttgaaatcacagtttgaactcaaatcatatgacctgtcattatttcagaaccgtgttgagcaaaatgaacatcacaagctaggtgaacttgtaaagaaacttgaacaagagcttcaggaatcaaagcaagagctaaaagcaaagcaagcgcagtacgaaaaatctgtctctactgtttctgagctagaaaagaccatcaagacttatggcagtgagcgtgaaggtagactcaaagctctggaaagaaaaatcaaatcattaaaatcggagttgcagtccatgtcgaagcaactaaaggcccatgaaagtgagagggagaggcttattatggagaaagatgctgttgccaatgagcttgccatgcttgaagagcaactgacaacttcaaaagctcaaattgccgctatgactgaaactttgaataggcatcagaccaaggttgcttccataaagcaagactatgatcaagctgaatctgagctcaacattgggcgttctaaactgaaggaatgtgactcacagataaatagcatggccaaggagcagcaaaaactgcagcagcaactaagtgattcaaatgttgaaaggaagaaaatggaaaacgaggttaagaggatggagattgagcagaaggattgctcttcaaaggttgataagttagtagagaagtacagttggattgcaactgaaaaacagttgtttggaaaaagtggcactgattatgactttgtatcatgtgaacctcataaagcacgagaagaacttgaaaatctccaagctcaacaatccagtcttgagaagagggtcaataagaaagttatggcaatgtttgagaaggcagaggatgagtataatgatttgatgtcaaagaaaaacatcattgagaatgacaagtcaaaaatcaagacagtgatagaagagttggatgagaagaagaaagagaccttgaaagtcacatggcttaaagtaaacaaggattttggatctatattcagtacacttttacctggcacaatggccaaacttgatcctcctgaaggtggtacttttttggatggtcttgaagttcgggtggcatttggaacagtttggaaacaatctttatctgaacttagtggagggcaacggtccctcctcgctcttagtcttatcctggcgctacttcttttcaaacctgcaccactttatatattagatgaggttgatgctgccctagatctgagccatacacaaaacattggtagaatgatcaaggcgcattttccgcactcccagttcatagttgtctcactaaaagagggcatgttcaacaacgcaaatgtgatattccgaacgaaatttgttgatggggtgtccactgtgacacgaacggtcccttcaaagcaaagatgattggattcattcatcacttcgtctgaaggaggatgaagtcgtttgttatgctctttgctaacttttctgctgatgctacccccaaagggtgtgtttggataatgggaaatgagggatgggattgggattgggaaatgaatgaagggttaggattaaatggatgagggagaatgaatggttaagatttaaagaggggtgggaaatcatttcccttagacatttgccaaacactgccaaaatgtttcaagcgcctcgcttgtcaggcccataacattaacgtgactcagtaaaatgttctagaacacccttacgttgatgcatctatctagttccctgtatgtatttgatctgacagaatgtaagattaactattacatttgtagtaaataagtgtagccttttattattagaaaattggcttgaataactggaacgtgtcg

SEQ ID NO: 28073 - DNA, 3263 bp, Oryza sativa
  ref <308>: DATABASE ACCESSION NUMBER: AK103515
  ref <309>: DATABASE ENTRY DATE: 2002-08-28
gatgtggcacttgcgggggaggagctccgtgaccgcagcagcagccgcagcgctacataaaccggtcgcccacctgcgcctcctcctcgcagtctccgcctggtccgtccccgccgcagcctccaacgtcgcggcggcttcgactacgactcgaggcggcccgagccctagcgcgggcgtcgcgcctagagcgatgccttcctcgtcctcctcgccgccttccgccgccgaggggacgaccgctgcagcgggtgggttccgcctcaccgagccctcgttcctcgagtcgctgatgccgaagaaggagatcggcgtcgaccgcttcctcgccgcgcatcccgagtacgacggccgcggcgcgctcatcgccatcttcgattctggagttgatccggctgcagctggtttgcagactacttcagatggaaagcccaagatccttgatgttattgactgcacgggtagtggtgatgttgacacgtccaaagtggtgaaagctgatgatgatggttctattgttggtgcttcaggcacccatctgactataaatccctcatggaagaacccttctcaagagtggcatgttggctgtaaattagtctatgaactcttcacggacacacttacctctcgtttgaagaaagaaagaaagaagaaatgggacgagcacaaccaagaagcaatatctgaggccttgaaacagctgaatgaattcgaaaagaaacacagtaaatctgatgacgccaaacaaaaaatggctcgtgaagacctgcaaagcaggcttgagtacctgaggaaacaagcagaaggttacgatgacagggggccggtaattgatattgttgcatggcacgatggtgatgtgtggagggttgctgttgatacccagggccttgagggcaacaaaaattgtggaaaacttgcagattttgttccattgacaaactacagacttgagcggaagtttgggatttttagcaaattagatgcttgctcttttgtagcaaacatttacgatgatggaaaccttgttagtatagtaactgattgctctcctcatgctacccatgttgcgggcattgcagctgcttttcatcctgatgaacctttgctcaatggagttgcaccgggtgcacaactgatttcctgcaagattggcgatacccgtttaggatcaatggagacagggacaggcctggttagggccttgatagctgcagtagagcacaaatgtgatctgattaacatgagctatggagagcctacccttcttcctgactatggcagatttattgatcttgctagtgaggttgtagacaagcatcgtattatatttattagtagtgctggaaacaatggtcctgctttaaacactgtcggtgctcctggtggtactagttcaagcattattggcgttggcgcttatgtctcaccagctatggctgctggagctcactgtgtcgtacaagcaccagctgaggggatggagtacacatggtctagccgaggtcctactgctgacggggatcttggtgtctccattagtgcaccgggtggagcagtggctcctgtaccaacatggacacttcagtctcgcatgctcatgaatggaacttccatgtcatcaccttctgcctgcggtggggttgctcttcttgttagtgccatgaaggctgaaggcattccattaagcccttatactgtgaggaaggcaattgagaatacagctgcatcaataagtgatgtgcctgaggagaagctaaccacagggcatgggcttttgcaagttgatagggcttttgaatatgctcaacaggctaaggaattgccacttgtttcttatagaatatcaatcaatcaagtgggcaagccaacttctaaacttagaggaatatatctacgtgggagtaacacatgccggcaaacaagtgagtggactgttcaactagacccaaaatttcatgaggatgcaagtaacatggagcaattggttccatttgaggagtgcctgcagctgcattccactgatagctctgtcatcaaaattcctgagtacataatggtgacaaacaatgggcgcactttcaacattgttgtaaatcctgttaatatcagcagcggccttcactattatgaagtttatggtatagattgcaaagcaccatggcgtggacctattttccgcgtaccaatcactgtaataaagcctattgctctatcaggagagccacctgcattgacactttcaaatctttcctttaagtcaggtcacattgaaagaaggttcataaatgtgcctattggagcttcatgggtggaagttacaatgcgcacatcagcctttgatactcctaggaggttctttttggacactgttcagatctgtccactgaagcgacctattaaatgggaggctgttgtcactttctcttcaccttctctcaagaatttcagttttcctgtagaaggtggcttaactttggagttgtccatagcccagttctggtctagcggaattgctagccatgaacctacctgtgttgattttgagattgtgtttcatggaatatccgttgatcagaaaataattggccttgatggtagtgaggcacctgtgcgtgttgttgctagatctctattagcatcagagaggcttgttcctgttgccactctgaacaaggtcaagaccccttatcgaccagtggagtctaatctttgttcacttcctcccagccgtgatagattaccatctggcaagcaaatcatagcactaactctgacttacaaattcaaactagaggatggtgctgaaataaagccccgtgtgcccctacttaacaacagaatatatgataacaagttcgagtctcagtattatagaatatcagattcaaacaagtgtgtctactcttctggtgacgtctatcctaattatgtcaaactctcaaaaggtgaatacacgctgcaattgtacataaggcatgacaatgtgcagttattggagaaactgaagcagttggttctatttatcgagaggaagctagagaaaaaggatttcattcaattgagtttctactctgaacctgatggccctacagttggaaatggcaccttcaaatcctctattttagttccaggagaaccagaagcattctatgtgggtccaccatctagagaaaaacttccaaagaatgttctacctgggtctgttttggttgggtcaattacctatggtgcggtaagctctttcagcaagaaagatg

SEQ ID NO: 28074 - DNA, 1579 bp, Oryza sativa
  ref <308>: DATABASE ACCESSION NUMBER: AK103516
  ref <309>: DATABASE ENTRY DATE: 2002-08-28
gtgaaaagggaaatgatatccatttcccaccctcctaatcccattagccatacgcagcccgagtgtcttccccttccctttgtggcgtaaaagaaagaaaatctcccgtctcctccgctccttgcgccgccaagacgagtcgcggctgaacaggggaggggcggcgatctccatctggcgagcagagcaggcgagaggattgtgttctcgtttctcctaccctacaggatgtttagataattcgagaccctagctttgaactttgagtaggttcagttcttagctgtagaagatgaatggttcaagtggctcccaaggacataatgtcaatggaggacagaagaaagtgcagcatgctagcccactcactctgaacaatgggtcaaagcaccgtccattgactcccatgagacgatgccgcggtgtagcatgtgtggtgatcatactgtcaacagcattcacattgatagttttcatagcccctattactactttccttgttcggctagtcagcgtgcattacagtagaaaggcgacctctgttctgtttggaatgtggctatctttatggccattcttgtttgagaagatcaacaagaccaatgtggttttctctggtgaaagtgtacttccaaaaaagcgtgtcttgttatttgccaaccacaggactgaggttgactggatgtatttgtgggatcttgcattgaggaaaggctatttaggatatatcaagtacatccttaagagcagcttgatgaaattgcctgtttttagctgggcatttcacatttttgagtttatcccagtagaacggaaatgggagattgatgaagcaattatccagaacaaactgtcagcatttaaggaccccagagaccccctctggttggccgttttccctgagggcactgattatactgagaagaaatgcatcaagagtcaagaatatgcttcggagcatggtctgcctatacttaaaaatgttcttcttccaaagacaaaggggttcctttgctgtttgcaagagttgaagagctccctagatgcagtttatgatgtcacaatagcgtataagcatcgcctgccagattttctggatattatatatggcaccgatccttctgaagtccacatccacatcagaactgttaagctctgtgacattccaacgtcagaagatgaagtaaccgattggatgatagagaggttcaggcagaaggaccagcttctgtcagattttttcatgcaaggccacttccctgatgaaggaactgaaggggatgtatccacaccggagtgccttgctaatttcattgcaatagtcagctcgacaggcttcttcttgtacctatctcttttttcgtctgtgtggttcaaggtctatgtattattaagctgcgcttaccttacatttgttacctatttctccattcaaccaccccaactgatatgctcatcagagggtggaacccatgccaaaaaggtactgtagaaagaggctgtagctttgactggaaactgtatatctgcaaaagatatttactgtagaaacccttggcttgtgcaattgtcatcgttc

SEQ ID NO: 28075 - DNA, 2019 bp, Oryza sativa
  ref <308>: DATABASE ACCESSION NUMBER: AK103517
  ref <309>: DATABASE ENTRY DATE: 2002-08-28
gtgtcagttgaaccggtctcctcgagcgctcggaggagcggcaggcgggcgcctctcgatctcccccctcgcgagtccggagtccggacggggaggcgcacaactccaggaatccagccatggtgaagacgtcggccaacccgaatgccaagggcaaggccgcagcttcgtcctctggtcttccgtcacccaagaccacgcccagaggggtgaggcctaaggcgtttaagaagaaggccaaggccgatccagagatgcagaaggtggcagctgcggaagccgccgccactgctgagactgcatcggcaccccctctgaagccggctgaggtcagcccagcggcagcggtggccaaggagaatggaggacagaggatgagcagaaaggaaaagacaaagatgaaagagggggaccagatgaaggaggataagaaggggagaataaaggggaaggaaaagaaggacgataaagcgagggagaggaagggtgaagctgggtttatattcatgtgcagtgctaagacaaagccggagtgcttccagaatggtgtgtttggcttgcctaaggggaagatcgatgtggtggagaagatccagccaggggcaaaactgttcctctatgacttcgacctgaagctgctctatgggatatacaaggccaagacaaagggagggttagatcttgtgcgaggcgcgttccatggaaaattccctgcacaggtcaaatttaaggttgacaaagattgccttcctcttccggagagtagtttcaagcatgccattaaggagaactacaattcaaagggaaagttcacccaggaactcagccttaaacaagttcataggttgttagaactattcaagcctattagcttgcctcaatcatctattcaatatgttaaagaaaggcatcgacgattggatgtctttgagggtcgcctaccacactatgttgaaggaaggagactgccacgacatgtcgaggaaatgcatcatttacgacatgttgaagaaaggagattgccatatgaccatgaagaaagaagattaccgtatgaccatgaagaaagaagacgaccacgatatgttgaagatattcgtcatccacaatttcttaaagaaagacatgctataaccgactctctgcatgatccatttcgatctcggcatgtgactcatttaccagagcttcaacatgctcctcccacatactatcatcatgttgctcatacttttgacgaacggcaccatcaacctcaagttgatatcgtgtatgaacgttctgcccccagagctatagttgaggctactgacagggaggccttcctcgcaagagattacagagtgccagaagagattgtcgcacgctcggatcatgtggatgagctctaccgttcttatagacttgccactcgtgcaatggatctccatcagggtccgtcctatgtgacagctgcctatgagaacccaggacctgcctacagtgaaagcatccatcagatgcctgtttcttctacaaggcctaacgtgcctggtgcgccggtctcctccctgtattcctttgctggtgcaccagcatatcgatgatcaccccagtggcccagtgcactgaaattggccccagacaaccttattgtcagttggtgatggtgtaggtactggcatcctggtactatactcctgctctcttgaaagtcaggctacaagttaatcgtacttgttgctgcagagtatcgattcctttttatcccaattgtaacatagattcctttatactggatcatgggttttatttcatcagatttaatgaacaaaataaaatgtgcggtatttagctgtctgcctagtatttagtttgtgtcgtgaaagggaattcattatcgtcctgccctttcattttttatatgtggtacgtcttgtcttagctaaatgatcctgagatcgttcttcagttgtttggctctaacctggtctgctaaagtggttatgcgaaggaatccaggattcgctcacttcgctt

SEQ ID NO: 28076 - DNA, 2383 bp, Oryza sativa
  ref <308>: DATABASE ACCESSION NUMBER: AK103518
  ref <309>: DATABASE ENTRY DATE: 2002-08-28
gatattcaaattcactgctaaaccggtatcttggttgtactagtgtgtgcaaggagacatggattttctatatctcgactagctggatgcaatcgtatccattgttaagcgacaaagttggttcaagaatcagggacgacttgtatggtcgtctctgtctctctgccgtgttggacggagattactcactactatagtccatccccgtgggaacgaacatggattgagctcctctttgcgcacgccggaaataccccgatggatcgccgtctcatcctgtccgtcgccgtcgccgtcgcgctgctcgcgccccgcgctgccggcgagccatggccggtgtgcgggcaggacttcggcaccttcacgcccaagagcaggttcttcgccaacctccagctcatcgccgccacgctccccggtaacgcctcgtcgtcgccggacctctacgccaccgccgtggacgttggcgccgtcccggagcaggtcaccgccgccgcgctctgccgcggcgacgtcagcgccagctcctgcctcggctgcctcacccaggccttcgccgacctgcccaacgcgtgcggcaactccagggaggccgccacctactacgaccggtgcatggtcagctactccgccatcaacttcctctccggcggcgccggcggcgaagacccggcgaggatcgacgcgtacacggtgaacaacgagaacaaggtcacgtcggagcaggggcggtacaaccgcctcgtggcggcgctcgtcaacgccaccgccgactacgcggcgtacaactcgacgcggcggtacgcggccggcgaggccgacttcgacgcggcgctccccaaggtgtacagcctggcgcagtgcacgccggacctgtcgccggcgaggtgccggagctgcctcgccaagatcgtggcgcaggagctttggtcgtacaaggacgacatcggagggaggaccctctccgtcaggtgcagcttccggatcgagaccaagcctttcctcaatggcacgacgatggtgcggctaccggcgacatcggcgccgtctccggcgccgccggtcaacgcgacgccttcagcggccacgccgggacgagagacaaagtacaaggttccgcgcctggttcttataatactgctccctataatagcagccgtaaaccttgtcgtttgcttctgtgtctggaggaggaagcgtccagtaataacaaaagcaaagcagacaaatgccaactattacgctgaagcagatgacgttgacagcgtagactccatgctcatggacatttctactctgcgagctgcaactggggattttgcagagagcaacaagcttggtgaaggtggatttggagcggtgtacaagggtgttcttccagacggcaacgaaatcgcagtgaagaggctgtcaaagagctcaacacagggagttcaagagctgaagaatgagcttgctctggtcgccaagctgaggcacaagaacctcgtaagctttgtaggcgtctgcctggatcaacacgagaggctgcttgtctacgagttcgttcctaaccggagccttgacctgatcctctttgacactgagaaacgcgagaagcttgactgggaaaagaggtacaggatcataaacggcgtcgctcgaggcctgcaatacctccacgaagactctcagctcaaggtagtccaccgtgatctgaaggcgagcaacatcttgctagacgcgaacatgaaccccaagatctcaaactttggcctcgcgagaattttcggtcaagatcagacccaggctgtcacgaaccgtgtcgtcgacacatatgggtacatggcacctgagtacatgatgcgtggcaactactccgtcaagtcagacgcgttcagcttcggcgtcatggtgctggagatcgtgacgggaaggaagaacaacgacttctacaacaactctcaccaatctgaagatctcctgaacacgatatgggagcgttggatggccggaaccgtggatgagatggtagacccggccatgagcaggtacgtctcggcgagcgacgtgcggaagtgcgtccacgtagcgctcctgtgcgtgcaggaaaaccccgcggatcggccggtgatgtcgtcggtggtgatgatgctcgacagcgagacggtctccctccaggtgccctccaagccggcgttcttcgccaggaacggcggcgctaaacccggcgtcgcgtccgacgagtcgaccgcgtcagtgtagaacctgtcatagagagagcttcgatcggtccaggatatggaacttcttgcgctgctgattagtggctcccactctgaaaggaggattgtgctactgtacggacaatgtaagaatcatgaaaagtttgcacaatttttgt

SEQ ID NO: 28077 - DNA, 1507 bp, Oryza sativa
  ref <308>: DATABASE ACCESSION NUMBER: AK103519
  ref <309>: DATABASE ENTRY DATE: 2002-08-28
ctctcctgattcccttcgaccgaccgccaccatcaacgggcgacgccgcgccgtcgacccaccgcccgccggcccaccgccccgggccggtcccgtcgttctccacccgcggtccgccatcgacgccgcgtgatcggccgtcagatccacagctccggcatcatcccggcattttgttcttcccccaacagcacatcgtgacctggtggggcatcgtcgccatcggtcctccggccggcggcgatgaagtcctcggtttccccttcttgtctttgggactggcaagcagcggagcattgtgaaagcaatgctgcaagtcatgatgtttctagattcatgtgggactgcctcaatcaagatgatgatgacctactgggattgctgggcaatcaaactcctctaagagactgtcgtggcttctttgatattgatgatttcacctgcaaggagacgttggaccttgaggaatctcgggaatcaaagcgccgccgcatattggagtacccttctgagtctaatcaatcagaagatggaaatcgtgaaataagttctaccttgggcacatctgaggtatcagaaatttcattgctttgcaccgatgaaccgcagagcttcaattgggattcacagaacaattcaaataattttgattctttgtcaactggagcattctaccaatcatcacatagtcattcgaaaaattgctctgatgaaaatcaaatgcatttcaggcatgaccaaatgcattctagccaggagagcgttacatataccaatgatcaaagtggtatttcaggaactactgagaatgattcagtgacagaaagtcttgtaatgcaggagactaggaagctttctacacttaaagtatctaaaggagcctcactggttaaggcgaagcagaatttaactacaactatagcatacccttttaccctcatcaaaccatcctgggaggaaggagacgtcatcactctgaaggatataaatcagcgaatccgtgctcctccgaagaaggctccagaaaccctagggacttcagccttctctggcaagccagtcgttggcaaaacaaggatcagaactgacgggggcagaggcagcatcacgatactaagaacaaaaggttgagagtccaaacaacttgtttctcagccattacctggattgctttcagcaatttgatctccgtagctctccagtttttcgttttgattttttttttttggccatggatttggtatttaggatgactatcaatggctaactcttcaaagatttaccattcatcctgtgtacattagcgacatgcggctaatgttatatatgagagttttgtgttcagaaaccatgcccctctactcatccaacttatgtcggatgttgttcagggttttctcccatttttctgaatagttgtccattctcgaatggacgcgtgtaatcgtgaaacatttgattattttgttgcttacaatatatagcacacatacaggggagtttatgc

SEQ ID NO: 28078 - DNA, 3146 bp, Oryza sativa
  ref <308>: DATABASE ACCESSION NUMBER: AK103520
  ref <309>: DATABASE ENTRY DATE: 2002-08-28
tgatctggctccctctcttcctctccctccctccctcccttcgctcgctttctctctcctccccttccctttcctccccttccatctctctctctctttctctcatctcctcctcgcttcttctcaagcaaagctagcggcgagctcggagtagcggcgcgctctctcgtacgccaaccgcccggctcctcctcctcctccccttcgggaccccgtgcccgagctcgccgccgccgatcgggcattggatccttccaccaccggtgttcgttcgtagcggattttatttttgcggggtttctcggcatcccctgagtcgcgggatcgcgcccaatcgatggcgcagagcaactgggaagcagataagatgcttgatgtgtatatctatgactatctgctgaagaggaacttgcagtcgacggccaaggctttcatggcggagggaaaggtcgccgctgatccagtcgcaattgatgctcctggagggtttctctttgagtggtggtctgttttttgggatatatttattgcaagaacaaatgagaagcattctgaggttgcagcggcatacctagaggcacagcaaatcaaagcgagagagcaccaacagcagatgcagatgcagcagttgcaactaatacaacacagacatgctcaactgcagcgaactaatgcaagtcatcctacacttaatggtccaataaacaccctaaattctgatggcattctggggcattcaacagctagtgttttggctgccaagatgtatgaagagcgcttgaagcaccctcaatccttggactctgagggatcacagcttcttgatgctagtaggatggctcttctcaagtcagctgcaacaaatcatgcagggcaattagttcccggaactcccggaaatgtgtctacaacgctgcaacaaatccagtctaggaatcaacaaactatggatataaaaagtgaaggtaatatgggtgttgcccaaagatctttgcccatggacccatcatccttatatggacagggtattattcagccaaaacctggattgggcggtgcaggactaaaccaaggagtaagcggtctaccattgaaagggtggccattaactggaattgaccaattgcgaccaaatttaggtgctcaaatgcagaagccatttctttcaacacagtcacagtttcaacttatgtcaccacagcagcagcaacaattcttagcacaggcccaagcacaaggcaatcttagcaactcaagtaactatggggatttggatccccggagatatacagcactaaccaggggtggcttgaatggtaaggatggacagcctgctggaactgatgggtgtattagttccccaatgcaatccagttcacccaaagttaggtcagaccaagagtatctcataaaggtacaacagacatcttcccagcaaccgcaggaacagcagcagcagcagagccagcaacaacagcagcagcaaagccagcaacagcaaatgcaacagagcaatagaaaaagaaagcaacctacatcttcaggagcagcaaatagtactggaacagggaatacagttggcccttcaaccaattctccaccatctactccatccacgcataccccaggagatggacttgggatgcctggcaatatgcgccacgtcccgaaaaatttagtgatgtatggtgctgacggaacaggactagcatcctcttcaaaccaaatggatgatctcgagccatttggtgatgttggctctttggaagataatgttgaatcattcttagccaatgatgatggagatgcaagggatatttttgctgcacttaaaagaagtcctgcagagcctaacccagcggcttcaaaaggttttaccttcaatgaggttaattgtttgcgcacgaacaatagcaaagttgtctgttgccatttttcttcagatggcaagatattggctagcgctggacatgaaaagaaggctgtactttggaacatggacaccttccagagccagtatacatcagaagaacacagcctcataattactgatgtccgtttccggcctaattcttcccagctggcaacatcatcctttgatagaactattaagctgtggaatgctgcagatcctggattctgtttgcatacgtttgttgggcataatgtccaagtcacatctttagattttcatccaaagaagacggaccttttgtgctcttgtgatggcaatggtgaaatccggtactggaatctgacccagcttagctgcatgcgtgccatgaagggaggtactgcccaagttcgattccaacctaacactggacagtttctcgcagctgctgcggagactatggttgccatttttgatgttgaaacgcacagcaaaaaatacacactacagggccataacacagatgtgcaatcagtgtgttgggacagcagtggggagtaccttgcctctgtcagtcaggacttggttaaggtctggtcaatatcatcaggagagtgcattcatgaggttagctccaatggaaacaagttccactcttgtgtgttccacccaagctatgccaatctccttgttattggaggctaccagtccctggagctatggaacatggtaaagaaccagagcatgacgatacaagcccatgaaggtctaattgcggccttggcgcaatcgccagtgaacgggacggtggcttctgcgagccacgacaactctgtcaagttgtggaagtaacaacaataacgtacctagagataagaatagctgttccaggtaattgatactggatttcttcagcctaggctagtcatagaatggaggtgagtttgatgtactggttgagttgtgttactatctcagaggcaaataaggaagagtaggagccgggcgattgtcgcggttgagctgttcagtgcgtattgcagtgagtttgtgggaggggctgtttctttttttttttttttttttaccttgatgatagatgttgatgtagcacaaaaggaagataaggaacgaaggcctaaagttggctctctgtttcatgttgttaatgttctagtatgagatgtaaaatgtaacaatattcggtgttttaatgggaactcgctgcaatttgtccggcggttgatagatg

SEQ ID NO: 28079 - DNA, 3055 bp, Oryza sativa
  ref <308>: DATABASE ACCESSION NUMBER: AK103521
  ref <309>: DATABASE ENTRY DATE: 2002-08-28
gatttgattttgcaataactcctgggggcttcttcccttccactctcgtctcgtactctctccaaacccaaatcaaaaccaaaccaaaatcgaaaccaaatcgaaaaagcgagagagagagagaggaaaaagtttggattcatcatccccttcttcttcttcctcctctcgcctcgcctcgtctcgtctgctccaatccagtccgcatctccccgccattgccgccgccgcggccgcgcttaatttaacccactcccactcctcgtcgccgtgggctccaccgaggcggcggcggttgctgtgttgcgccggcgagcgggcggtcgacttggaggtgctgagcctctgggtaccaaggatgaaatttgtgcttgtatttggatgacataagcgcgccacgcacttgctaggaaggaatgaaaatcagcggacttctgacctctgctggcatcaatatcgctctttctgtgctgtttatatcgctctattctgttctgaggaagcagccagccaatgtcagggtctactttgggaggaggattgccgaggagcataatcggctccgagaagcttttatcttggagagatttgtaccatctactggctggatagtaaaagccctgcagtgtaccgaggaagagatcttggctgctgctgggctagatgctgttgttttcaatagaattctagtattcagcttacgcatcttctctctagctgccattctgtgtgtgtttggaattctaccactgaactactttgggcaagatatacatcatgttcggattccttcagaatcattggatatctttacaattgggaatgtgaaagtgagatcaagatggctttgggtccattgtgtagccttgtacataatatcaggagtagcttgcattctcctatatcttgagtacaagcacattgctaggctgaggctccgtcatcttacttgtgcaatgcccaatccaagccattttactgtccttgttcgtggaataccaaaggaaaccaaagaatcatgcagtaatgctattgatgatttcttcaccaagtaccatggatcaagctacctgttccatcaagttgtttacaaagttggaaaagttcagaagataatgactggtgctaagaaggcatacaggaaattcaaacattttacagacagcactattgatcagaggtgtcgagcaatttcataccggtgctgtctgtgcggagcctcatctaattctttccagctgttggcaactgggcttgagcagaatcaggggaaatctgaccttcaagattccagcttgaaactagatgatcaggaatgtgcagctgcttttgtatatttcagaactcggtatgctgctcttgttgcctcagaaatactccaaacatctaaccctatgaaatgggttactgatctagctccagaaccagatgatgtgtattggtcaaatctttggctaccttataagcagctttggattcgccgaatagctacgctccttggttcaattgtttttatgttattctttctgataccagtgacatttatacaaggactatctcagctagagcagttgcagcagaggcttcctttcctgaaggggatactggagaagaaatacatgagccagcttgtaactgggtaccttcccagtgtcatactgcaaatatttttatatgccgttgcaccgataatgatattattttctacattagaggggcctatatctcacagtgaaaggaagaggagtgcttgctgtaaagtgctgtacttcactgtttggaacatattctttggaaatgtactatctggtactgtcataagccaattgaatgtgttatcaagcccaaaggacatccctgtccagcttgctagagctatacctgtccaggctaccttctttatcacctatgttctgacatcaggatgggccagtttatcatctgaacttatgcaattatttggtttaatatggaactttgtgaggaaatatattctacgtatgccagaagacacagagtttgttccctcattcccatatcacacagaagtgccaaaagttttgctgttcggactactgggcttcacatgctctgtactggcacctttgatcttaccttttctgttagtgtacttcttccttggttacatcgtgtaccgcaatcagttgctcaatgtttaccgcacaagatatgacacagggggtttgtactggccaatcgcacacaacgcagtgatattctctctcgtgctcacacagattatctgccttggtgtatttggcctgaaagaatcaccagtagcctgcaggcttcaccatacctcttatcatcctcactctgttattcaatcagtattgcagaaatcgacttctcccattattcagaactaccccagcacaggatttaattgacatggacagggaagacgaacggtcaggaagaatggatgaaattcaccaccggcttcattctgcctattgtcagttccacgacactgaagatatacccttggagaaaattcagactgtcgggagcgatgaggaacaagggtgtagctctgataagtcgaatggaaaagaaagcttcgaggaacccagagcggagttgtctcacccaacactgaatggactcccagttagccgtcttcggcatgctgtgaagtcgattactttccttgtcagattgcagaaaagaggtttgtcagaatagaataggacatctaactactaaccccttcatcagcctgttcagcgatgaaaatgtacagccacatacatcatacaacatacattgagagagcatcaggatacctgaaaagcaattttgttgttttgatccgtttgatttccaagctagtgactctaggacatgctagttaatcagtatattcaagcctttgccatgcagatattgttgtagtgctaggtcattctgttacatgaaatttaaacttgtttctttggtaacctcagctactctgcaactcaattaccctcctcttctaacttcaactcatctgagaatgtaaaactgaaatttccatgcctgttagctt

SEQ ID NO: 28080 - DNA, 3088 bp, Oryza sativa
  ref <308>: DATABASE ACCESSION NUMBER: AK103522
  ref <309>: DATABASE ENTRY DATE: 2002-08-28
ggttggttcccttcttgagaccccaaaacccaactaggaaggacaaggacacatccctctccctcttccaccaagagagatagagccaagaaccggacgaggtagaagagattgagccgccacggcagtgggagcgcgcgcgcgagttccccgagatccgcgagatctccgtcgccggctcatgccactggtcggttcttggggcggcggcggcggcggcggggggtggtgagtctgtggccgtttcttgcggcgtggtgaggtgaggggagggagaaagagaggctgcacatgtccgtcatggcgcggccccgcttcgaggaggatgacgaggatgagttctttgactcgagggaggtcatgtcgccggcgtccgtctcttctccggcgagctccgggcgctacgacgggcccatgctcgaggtgtgggccaccgacccgtgcagcgtccatgagcgccgtcagaggttcatcaagtccttgggcctctcggattcgagcccctccgccggcggcggcggcgaccggcccgacgaggagccgtgctcgaggtccagtgccgcagaagagatcctcccgtgcagccccaccgtcgagctggtctcagccgtccccagttttgcgtgcagaggcgaggagccgggagcgtcaggcggcggcggcggcgcggaggtgttggattgtgtattcaagaacttggacgatggtacagtgtttgtcgtcgacgagatgggaaaagatgggagtttcaggagcctcagggacaggcgatccaaccggacagttactgcagcggaattcgaacggacctacggctcgtccccattcatctgtgagctgatgcggcgggtggatgattcggatgagtcctctgctgtggagaaggctctggtcaggggaaggagaaggaggaggagatttggatggctgcgcaggctcggcatccgtggctgcgtcgtcgatgtggaggaggacgatgagacgaattcaacatcctcgagttcttgtcggagttgctctgggaaggttgatagggtcaaggtgaggctttacaagaagaggtcaaaggaattgtccgcggtgtacaggggccaagacatcaaggcgcacgaaggcgcaattgtgaccatgaagtttagctctgatggacagtatctggccactggaggtgaggatgtggttgtgcgtgtgtggcgggtggtggagggggagaggcccaatgaacttgactttgccgaagatgatccttcatgcgtgttcttcacagtcaatgaaaactccgaattggcccctgtcaactccagtgaagggagtaagagcaagcactacaagaactcaaaggtgtcgacagatccagcctgtgttgtgatccctcataggacctttgcattatcccaggagcctgtgcatgaattctatggacatgatgatgcgatcttggatctttcatggtcaaaaaatagggacttactttcttcatccatggataaaactgtacgattgtggcaggttgggtgcaatagttgcctgaaggttttctcccatactaactacgtaacatgtgtgcagtttcatcctaccagtgacaattattttatcagtggttgtatcgacggattggttcgcatttgggatgttcgtagatgccaagtcgtggactgggctgataccaaagagataatcactgcagtttgttaccgccctgatggaaaggccgcagtggttgggaccataacagggaattgtcgccactacgatgcatcagaaaatcacctggagctggaatctcaagtcgctctcaatggaagaaagaaatctccacttaaaagaataatcggtttccagtactgcccatctgatccaaagaaattgatggtaacatctggcgactcgcaagtccgtattcttgatgggcttcacgtaatttccaactacaaaggactgcgaagttcaagtcaagttgctgcatcattcacaccagatggagatcacattatatctgctagtgatgattccagtatctacatgtggaactatgcaaaccaaatagctcccgtcacaaaccatgtgaagactgtatggtcaaatgagcacttcctgccatgatgtggccattgcgataccatggaatgcctctcagacaaggaattctatttcactggcttgcagtatcacttcttcacagcaagaagtcttggatgagttccacaatgaacatgatagctcatcatgttctcatactgaggattcccctgatggtgatagtctgtaccaattaccatctggaaatttcactcttagcagtgccttctttgcggaatctgctccaaggggatcagcgacatggccagaggagcagttgccatcaaattcgacaacacagtctaccttgaggaaatctcagtacaagttcctgaaggcttcttgccagaatgctgctacgcacgcctggggccaggtaatagtggctgcaggctgggatggctacatcagatccttccagaactatggcttacctgtgcaagtgtgacatggtactagacatgcatcatttaccattgatagtccaaggcaaaagcttgggtatgccttgagaagtctggctggccctgacgcccgtcctgattcattatttcagcacaaagcgtcacatggctggtgcgtgagctgaattgcttgtggaccagaagttgtatgtagtctgagtggtccttcaagatcttgacagcgtcaacacatcgtagcaggcccgcggaagatgaatcgcctcgcagaattatgcaaaggcatgtggggatttaggcagcaacacgttggtgttctttctttctttctcttctttgttttggctcctgttagggccatccgtaaatatatataggagacatacatatttttgccgagttgaaacttccctcgcccgaaccggatagtcgatggacaatgggcaagtggagagctagaaatcactgttggataggggggaaaaattcagagtggtgggggtgcacatactactggattcgtttcatttgttcacatttcatgattcatagcctggctgagtctatgatggacattgatactg

SEQ ID NO: 28081 - DNA, 1850 bp, Oryza sativa
  ref <308>: DATABASE ACCESSION NUMBER: AK103523
  ref <309>: DATABASE ENTRY DATE: 2002-08-28
gactctctcctcctttccctctctttcctctctatctctcttcgttttgttttttcgcttcggggcgagaagaaaaacctgccatttttcaatctgccggagcagagattttcctctgccgcgcgcggcgtgggccggccgggtctcgactggcgccggaggcggaagccgtcgggttcttcgatctttctcgcttgccggtttcgactggagatcgtcggtttcgccgcttggatcgaggatacaatggctgttgctgaacatctatgatctctgtgtgcatacatcgaacaacatctcaattaagccaggcacaacacagctgtgttttccatagcttgaaacatctcagtgatgagttgtttttctctctttttcaagaggtcaaggaccgggcagcaacaaagtgatccatataatgaagtcttctctggtgctgagaacataacaagatacagctataaggagctggctaaggcaacactgaattttgaccaatccaataagattggtgagggaggttttggacctgtatacaagggaactctcaaggatggaacagatgttgctgtgaagttgctgtcgttacaatctagacaaggtgtgaaggagttccttaatgaacttatggcaatctctgacatttcacatgagaatcttgtcaaactgcatggctgttgtgtggaagggaggcacagaatccttgtgtacaattatcttgaaaacaatagccttgcacatacccttctaggttctaggcaaagtaacatacagttcaactggagggctcgagtaaatatatgcatcggtgttgccaagggactagcattcctccatgatggtgtccggcctcacattgttcaccgtgacatcaaggcgagcaatatacttcttgataaggacctcacgccaaaaatttctgattttggtttagcgaagcttctgccttcagatgcatcacatgttagtacaagagtcgcaggaacactaggttacttggctcctgaatatgccatccgaggacaagtgacacgcaagtcagatgtttacagctttggtgttcttcttgtggaaatagttagtggaagatgcaacactgacacaaaattgccctacgaagaccagatccttcttgagaagacatggaaatgttatgatcaggggtgtttggagaaggccatagacagctctatggtcgatgacgtggatgtcgacgaagcctgcagattcttgaaagtcggtcttttgtgcacccaggacatctcgaaacgtcgacccaccatgtcaatggtcatcagcatgctgacaggcgagatggaggtcgacaaagagaagatcagcaagcctgatgtaatcagggatttcagggacctcaagctcaggagcaaggccacatcctcctcctcactgttgacctccatcatggcgcgctcaactccctcgtcgtctcaggagacgacgcgcacctccatcacggtcaccgccatatcggaccgcgactgatgggtctctttctgaaagtgtaaagttgtgtagaggaaaaccgtagcgtagacgatattatcttcattttttgtgcttgcatgatctttatgtagaatttgcatcatccccattcactgagcctgaacacattgctgagtcacacacacacacacacacacacacatatatatatatatatatatacagcccatttctgtcctgaattaactctgtcaattgtcaaagtgtcatcaagaaaccactactccagtgaattgctgaaagcctggaaaggaagttgcatacattccaactgagaactgtgcttcagaatactattaaatgcaattagttcaatttccttc

SEQ ID NO: 28082 - DNA, 1964 bp, Oryza sativa
  ref <308>: DATABASE ACCESSION NUMBER: AK103524
  ref <309>: DATABASE ENTRY DATE: 2002-08-28
gatatcctctcctacgatactgcgcgctcagcacagaagaggaaggtatcttaactagcccaggataccaccacacaccgagtactgttacgtgttcacggtctagctaagcagtgatcatgggctcggcggctgacgggagcctcgccaacgagaaggcgccggccgagacggtcggcgtcggccgttacgtcgaaatggagcaggacggcggcggacccagcaccgcaaagtcccggctctccggccttctctggcacggcggctcagcctacgacgcctggttcagctgcgcgtccaaccaggtggcccaggtgctcctgacgctgccctactcgttctcccagctggggatgctcagcggcatactgttccagctcttctacgggctgttgggcagctggacggcgtatctcatcagcatcctgtacgtggagtacaggaccaggaaggagagggagaaggtggacttcaggaaccatgtcatccagtggttcgaggtgctggacggcctgctggggaggcattggagaaacgtcggcctggccttcaactgcaccttcctactcttcggctccgtcatccagctcatcgcctgcgctagcaacatctactacatcaacgacaagctggacaagaggacgtggacctacatcttcggcgcgtgctgcgcgacgacggtgttcatcccgtcgttccacaactaccggatctggtcattcctcggcctcgtcatgaccacctacacggcctggtacctcgccgtcgcctccctcatccatggccaggtcgatggagtgaagcactcgggccctacaaagatggtcctctacttcaccggggccacaaacattctctacaccttcggtgggcacgctgttactgtggagatcatgcacgcgatgtggaggccgcagaagttcaaggcgatctacctgatggcgacgctgtacgtgctgacgctgacgctgccgtcggcggcgagcgtgtactgggcgttcggggacgagctgctcacgcactcgaatgcgctggcgctgctgccgcgcacggcgttccgggacgccgccgtggtgctcatgctcatccaccagttcatcaccttcggcttcgcctgcacgccgctctacttcgtctgggagaagctcatcggactccacgactgccgcagcctcttcaagcgcgccgccgcgaggctccccgtcgtcgtgcccatctggttcctcgccatcatcttccccttcttcgggcccatcaactccgccgtcggctccctcctcgtcagcttcaccgtctacatcatccccgccctcgcgcacatgatcaccttccgctccgcgcacgctcgtgagaacgccgtggagccgccgccgcggttcgtggggcgatggacgggcacgttcatcatcaacgcgttcgtggtggcgtgggtgctggtggtcggcttcgggttcggcggctgggccagcatgaccaacttcgtccgccagatcgacacgttcgggctcttcaccaagtgctaccagtgcccgccgccccctctgccgccggcgggcgccgctccgaacgccacctggccgccgttcccggcgacgccgttcaacgccaccaccgccggcctcgctccggcccctgctccttcgccggcgcatttcttcggccgccaccaccggcatcacagccacgggctctgaacactgaaatgtacgtaccagggcaatgctcgagctttggtttagctatagttgttcactagcgccgtcactaattagtcttagcttagcacaaagctgcatcttctctagctatcagtagcatgtcagtcagacggagtatcccgtttcaagttccttggttctgtactgcctcctggcgtggagctcaaaaaacgaacagaaaaaaagggaatgttgctacggccgcagatgcaagagccagctaatctagcctctttactttctctc

SEQ ID NO: 28083 - DNA, 1726 bp, Oryza sativa
  ref <308>: DATABASE ACCESSION NUMBER: AK103525
  ref <309>: DATABASE ENTRY DATE: 2002-08-28
ggagtgaaaaatcaaacccgcatatagagagagaggaacagcgaaagaccacgcgtgccatccctccacgcttgtagggtttccggatcggaggagagagccccccacgccgccgcagccatggttcgcggatcgctcgggaagctggcctcgcgcgccctctccgtcgccgggaaatggcagcaccagcagctccgccgcctcaacatccacgagtaccagggcgcggagctgatggggaagtacgggatcaacgtgcccaggggcgcggcggcgggatcggtggaggaggtcaaaaacaccttgaagaacgtcttccctagtgagaaagagatagttgttaagagtcaaatcctggctggtggccgtggattgggaacattcaaaagtggactgcagggtggtgttcatattgttaaggcagaggaagctgaaagcctcgcagcaaaaatgcttggccagattctggtaacaaaacaaactggtccacaggggaagattgtgagcaaggtctacttatgtgagaaactgtcacttgttaatgagatgtacttcgccatcacccttgacaggaatactgctagtccgctcattatagcgtgcagcaagggaggaaccagtattgaagatcttgcagagaagtaccctgatatgatcatcaaggttcctattgatgtattcaagggaatcacagatgatgatgcagctaaagttgttgatggtctggcaccaaagacagctgacagacagtcttccatagaacagattaagaagctctatgaactgttctgcaagtctgattgcacactgctcgagattaatcctcttgctgagacagctgacaacaagctggtcgctgctgatgcaaagttgaactttgatgacaatgctgcctttaggcagaaagagatatttgccatgcgtgacacaacacaggaagatcccagagaggtggctgctgccaaagctgacttgaactacattgggcttgatggagaaattggctgcatggtgaacggtgcaggattggcaatggctacaatggacatcattaagttgcatgggggtacgcctgccaattttcttgatgttggtggaagtgcatcagagggacaggttgtggaagcatttaagattttgacttccgatgatagagtgaaggctattctagtgaacatttttggtggtatcatgaaatgtgatgtgatagcaagtggaatagtgaatgcagcaaaacaggttgacctgaaggtgcctgttgttgttcggttggaaggcaccaatgttgaccaagggaagaggattctaaaggaaagtggaatgaccttaatcactgcagaggatcttgatgatgcggctgagaaagctgtaaaagcatctgtcaaataattaactatttgtagtataccaacatcaagtttattttttgctggcacaagatgagcggtgctcatgacatatttcaggggtctgaagttgggaaccccaaatccttttgaagtggaattattttggcttgatttcccctagaaacattttggtctactgttaataaacctctgtcggcaccaaactgagcaaccacttctttttgccaaagttaaagtggagtttatctgtttttgccttgagcaagagagtacggctttacactttgcatatgcgcgataactgattgtaaagtctgtaacatcttggctataggttatgatgacgtgttatgatc

SEQ ID NO: 28084 - DNA, 4186 bp, Oryza sativa
  ref <308>: DATABASE ACCESSION NUMBER: AK103526
  ref <309>: DATABASE ENTRY DATE: 2002-08-28
gtgttgcgctgcttgcgttgcgcacactggaatagccgctctctcagtataagacgaggagggagcagccggagcgcgagagggagagaagcggcggcttgggagaggctgcgtttgggtgagctgagagatccaatgccaaggccgtgaggtgatcctgtggctcgggagagggggagaggaagagagagcgagagagagaggtgagcgtgcgtggcggcgatggcggatgagtcagggagctgcggcggcggcggcggtggcggagggggatgcgaggcggtgaagaagagggtggaccagagcgtggcgttccatgagctgttcgggttcgcggacccgctcgactggctgctcatggcggccgggagcgccggggcggtggtgcacggcgccgccatgccggtgttcttcctcctcttcggcgagctcatcaatggcttcggcgagaaccagcacagcctccgccggatgaccgacgaggtgtccaagtactcgctctacttcgtctacctgggcctcgtggtgtgcgcctcgtcttaccttgagatcgcttgctggatgtacaccggggagcgccaggtgggcgcgctgcggcggcgatacctggaggccgtgctgcggcaggacgtggggttcttcgacaccgacgcgcgcaccggcgacgtcgtcttcagcgtctccacggacaccctccttgtccaggacgccatcggcgagaaggtcggcaacttcatccactacctatcgacgttcctggcgggtctcgtcgtcgggttcgtctccgcctggcggctcgcgctgctcagcatcgccgtcatcccgggcatcgccttcgccggcgggctgtacgcctacacgctcaccggcctcacgtccaagagccgggactcctacgccaacgccggaatcatagccgagcaggcgattgcccaagtcaggacagtgtattcctatgtgggggagtccaaggccctcaactcgtactcggaggcgattcagaacacattgaagctggggtacaaagcagggatggccaagggtcttggcattggctgcacttacggtatcgcctgcatgtcctgggcgctggtgttctggtacgcaggagtgttcatccggaatggccagaccgatggtggaaaggcattcaccgcgattttctctgcaattgtcggcggcctgagtttgggacaatcgttctcgaatctaggcgctttcagtaaaggaaagattgccggatacaagctgttggaggtgataaggcagaggccgacaattgttcaggacccagcagatggaaggtgcctggatgaagtccatggcaacatagagtttaaggaagtggcctttagttatccgtcccgtccggatgtcatgatattccgtgacttttccctcttctttcctgccggtaaaactgcagctgttgttggaggtagtgggtctggaaagagtacagttgtggctctgattgaaagattttacgatcctaatcagggtcaagttttgctggacaatgtggacatcaagacactacaattgaagtggctgagagatcagattggtttggtgaatcaagaacctgcactctttgctaccaccattcttgaaaatattctttacggcaagcctgatgccacaatggctgaggttgaggctgcggctacatctgccaatgcccatagcttcattgctcttcttcctaatggctataacactcaggtcggggagagaggacttcaactctctggcggtcagaagcaacgtattgccattgctcgtgcaatgctaaagaacccgaagatccttctcttagatgaggcgactagtgcacttgatgctggttcggagaatattgttcaagaagcccttgaccgcctgatggtcggtaggacaactgtcgtggtcgcgcataggctgtcaactatacggtgcgttgacatgattgctgtgatccagcaagggcaggttgttgagaccggtacccatgacgagctccttgcgaaaggaagctcaggagcttatgctgctctcattagattccaggagatggccagaaaccgtgacttccgtggcccatccacccgcaagtcccggtcatcccgcttgagcaattcgctgtccactcggtcattgagccttaggtcggggagcttgaggaacttgagctactcatacagcactggtgcagatggccgtattgaaatggtttccaatgccgacaatgaccggaagtacccagcacctaagggttattttttcaaactccttaagctaaatgcacccgagtggccctataccatactgggagccatcgggtccatcctatctggcttcatcggccctacatttgctattgtgatgagcaacatgattgaagtgttctatttccgggacccgaatgcaatggagaggaagactagggagtatgtgtttatctacattggaactgggttatatgcggttgtcgcgtacctcgttcaacattacttcttcagcatcatgggcgaaaatctgaccaccagggtgcggaggatgatgcttgctgctatcttgaggaatgatgtggggtggtttgatcaagaggagaacaattcaagcctcgtggcggcacgcctttccacagacgcagccgatgtgaagtcggccatagcggaacggatatcagtcatcctgcagaacatgacctcacttctcgtgtccttcgttgtgggcttcatcatcgaatggcgggtggccgtcctcattcttgtcaccttccctctccttgtccttgccaactttgcccagcaactgtccatgaagggcttcgccggcgacacggccaaggcgcacgccaagacgagcatgatcgccggggagggcgtcagcaacatccgcaccgtggctgcgttcaacgcgcaggacaaggtcctgtccctcttctgcaccgagctgcgcgtcccgcagatgcacagcctccgccggagccagatctccggcgcgctcttcggcctgtcgcagctgtcgctgtacgcctccgaggcgctcatcctctggtacggcgcgcacctcgtccgacaccacgtgtccaccttctccaaggtcatcaaggtcttcgtcgtgctcgtcatcacggcgaacaccgtcgccgagaccgtcagcctcgctccggagatcgtgcgtggcggcgagtccatccggtccgtctttgccatcctcaactacaggacgcgcattgacccggatgaaccggaaaccgagcccgtcgagtccgtccgtggcgacatcgacttccggcacgtcgacttcgcctacccgtcgcgccctgacgtcatggtcttcaaggatttcagcctcaggatccgagctgggcagagtcaggcgctcgttggagcgagcgggtcagggaagagcaccgtcatcgctctcatcgagcgtttctacgaccctctcgccgggaaggtcatgatcgacggcaaggacatccggcggctgaacgtgaggtcgctgcgtctcaagatcggcctggtgcagcaggagcccgtgctgttcgccaccagcatctttgagaacatcgcctacggcaaggacggcgcgacggaggaggaggtgatcgaggccgccaaggtggccaacatgcacggcttcgtcagcgcgctcccggagggctacaagacccccgtcggcgagcgcggggtgcagctctcgggcgggcagaagcagcggatcgccatcgcgcgcgccgtgctcaaggaccccgccgtgctcctcctcgacgaggcgacgagcgcgctggacgcggagtccgagtgcgtgctgcaggaggcgctcgagcggatcatgaagggccggaccgcggtgctggtggcgcaccggctgtcgaccatccgcggcgtcgactcgatcgccgtggtgcaggacgggcgcgtcgtcgagcagggcagccacggcgagctcgtgtcgcggcccgacggcgcctactcgcggctgctgcagctgcagctacaccacggctgatcgtatcagttcagggcctaggttccgggtgtacagaagtgggcgaggccagtaatcgtcatggtgctgtgcgggtggtcagatgatgtgcttgggtacaactgttttcttcttcctgtaaccgatcaggattatgccggatgtgttttggcactaatggcggctctggcaattttagatgttc

SEQ ID NO: 28085 - DNA, 1703 bp, Oryza sativa
  ref <308>: DATABASE ACCESSION NUMBER: AK103527
  ref <309>: DATABASE ENTRY DATE: 2002-08-28
gagtgccaccgcgcagttctctcctctttctctccccgctccggcggcgccgcggcggtgctcctcgtcgtcctcgtctccccgtcgccgactagccgtgccggggatatctctccgacccggggtgaagaaaatctgtccttgttcaaaagtttttcaatttgggtgtcctacctatatatgatccagttgtaaaaaggctgactaagggcatggatggaaacaaagacgaggccttgaggtctgtcaaacttgcagaaactgcacttgcatctggagatagacagcgagcagaaaaattccttcgaattgcccaaagattggaccccagccttccgattgatgatatgctgggcacacccaagaagtatgataccctggatggtgctgtacgccaatacagggctagaagtggtgaagttggtgaaagccaaaatttgcgtaaagaatctgttggtccttctaatgttgataagggttacactgaggaaaatgttagagtggttcggaacatcacaaagaacaaggattattatgcaattcttggagtggagagaagttgctctgtagaagagataaggaaagcctacaggaagttgtcactgaaagttcatcctgacaagaacaaggctcctggggcagaggatgcatttaagttggtcagcaaggctttcaagtgcctaagcaatgatcagtcaaggagaacttatgatcaaacaggtgccattgaggaccatgagtttaattatcagtattccaatgtcatgaggcagagaactacaaggcgacaaaggcaagcaagaagtagcttctatggttatgaagaagacttagatccagatgagatattcaggtcgttcttttatgggacccatgataatatgttccagtctcacaatgcctacagagcaagaggaacagtgaggcaacagcaacaacagagacgggaacatccggttcagggtgggtcaggcataaatttaacaatgttggtgcaccttgcaggggttttgtttttcatcttgtttgctttcattccagcaaggcatcctgagtattcccttaaaaggacaagctacttttctatatcaaaagtcactgaaaagcatggggtggagtactttgtcagcaaacaagaattcgaccagcagtttccacgaggaagttcttctagagataatcttgagcagtatgtttttaaagactacaagagcatgctgggaagattctgtcatgtggaactccaaaggcgccaatgggccaaggactaccctacacctcactgtgacaaactgcggagcctttctgtagcataaatggtttggcctcttcttttgttagtagaagagtttcgctcttcctttgcaggtatatcacggcacaggttttttggggaaatgatgagcagcgtggtttcttggtctatgattttaaatacttaggaagtagtagatactattgctgcattttagttatgaacacatgcatgcagtcatgaaccatcaggttaactcacagatctctgtttactattgatgtcaaccttgagcggcatggagttcatattgaaacgggccggttacttttgctgcagtaatcatttcacacttgcttccagttgtaaaactggtgccaacgaatttttgtacagatatgttcacctttctttttttataaagaaacagagggatatgtttagcttg

SEQ ID NO: 28086 - DNA, 1771 bp, Oryza sativa
  ref <308>: DATABASE ACCESSION NUMBER: AK103528
  ref <309>: DATABASE ENTRY DATE: 2002-08-28
gaacggcgaacggcgatctggtctgattctgatcttgttcttctccacaatggagtttcttgatatgacttgccgaaatagcagtcgaaaagggagtgggggatttcgatgtccgagagccaatttcgcataggatccggcccggccgaccgagcgccttcatccatatttatatatctactagtatagaagaaacacaagaagatcgccaacacatctgattccgatctcatccaccagcgcccgcttcaggtcatccatgaagaacaagaagggaagtcgccgcaaccgcaacaaatcagcagcatccactggttccctaccactaccagtggataggctctctaagttacctgacgatgtcctgctcaacatcctggaccgtctcaacacccccgacgtgctggttccttcttcaacggttctcgttttgtctctttgcctcgtcttattcaggccaacagcgccgtggctgatgcaacagacaatgtcctcagtttcagaagccaagacgtccctcttcaccgactcagcatatgtttctacttgaaatactacgactgtctcaccatcggcaaagctgtttcccaagccatggccacctacaaccaaatcgacagcgtcgagttcatcatcttgacggagctgcagccagagtgttacaccgttgatgatttccgccgtaatgggaagcagttcatgacctttcttggttcttatcttgatgcattcgccggccttacacagctcttcatccagaacttgaggcttgctgaagctgacattcccaacatcctctccacatgcaaacggctgcagtatctgtgcatgtcggtgtgtgattcagaggatagcgtgttgcagctgcagctggaacacccgcggcttgttgagcttgacatttacgatgcaggtttccacctagtcgacctcaaatctctacccaacctcaagcggctggtttttggtatgtgggtctctcccggagaacccttgtcttttggcaacgtcccaatgctttcaagcctaagcctcaacaatgtaagcgcgggatatcagaaggttttcaggttaagtcacttccttgctaatgtccccaacataagcaacctgcacctcagcttcgcaagtgaaaagatttgggttaagccagagtgcccaaaacttctggcgcctgttctccagaaactgcgggttttgaatctggatagactccccgagggatgtgatatagcttggacaagattcttcctcgaggcagcgcctaacctgaagatgtccatcacagtttgggaccattggtgtgacatggagactgacagcgtggaacggggaagaactgggttaccgtgacaaaacaaacgtggagtggcaaagctcacaacctgatggtttcaagcatcacaatctggttaagctcatcatctacggttttcaacctgatgacaacttcgttggatacatcaggtgcatgatggaagccgcggttaacctagtgaggatatccctgtacgacaggaggttctctgattgctgcagtgaccttgatcccaagatcaagatcaaagttgctctgtcaagatttccgcggaccatcaagcagcaggagttggtgaggaggaaaattacagagggattcgggattgcttcctctgatataattcgcttccggtcttaaatctgaatttactatgcgcaaaaatgtaaatcttggttttgctatacagtaatacatattgagttttctgaatattcgggttcttttttttcc

SEQ ID NO: 28087 - DNA, 1484 bp, Oryza sativa
  ref <308>: DATABASE ACCESSION NUMBER: AK103529
  ref <309>: DATABASE ENTRY DATE: 2002-08-28
gttactaatagcccccaaatccccgtacgcgaatcgcatctcctcgtctccggcggccgcggcgatcaactccggcgacatgggcaccgtcaccaccgccgatccgcacgcctccttcctcgccgacaagggcggcaaggtgttcgtcgccggccaccgcggcctcgtcggctccgccatcctccgccacctcgtctccctcggcttcaccaacgtggtcgtccgcacccacgccgagctcgacctcacccgccagtccgacgtcgaggccttcttcgccgccgagctcccccgctacgtcgtcctcgccgccgccaaggtcggcggcatccacgccaactccaccttcccggccgacttcatcgccgccaacctccagatccagaccaacgtcgtcgacgccgcgctcaaatgcggctccgtccgcaagctcctcttcctcggctcctcctgcatctaccccaagttcgcgccgcagccgatcccggagaactccctcctctccggccccctcgagcccaccaacgagtggtacgccgtcgccaagatcgccggaatcaagatgtgccaggcttaccgcatccagcacggcttcgacgccatctcggccatgcccaccaacctctacggcccgcaggacaacttccacccggagaattcacacgtcctgcccgcactgatccgccggttccatgaggcgaaggcgtccaatgccgcggaggttgtcgtctggggcactggctcgccgctgcgtgaattcttgcacgtcgatgaccttgcagatgcggtgatcttcttgatggatcactactcggggctggagcatgtcaatgtaggaagcgggagcgaggtgacgatcaaggagctcgcggagctggtgaaggaggtggttgggttccaggggaagctggtatgggactctagcaaacccgatggcacaccgaggaagctcatggatagttccaagatacaggagatggggtggaagcccaaggtccccctcaaggaggggctcgtcgagacatacaagtggtatgtcgagaatgtcatctctgcgaagaagtagcgccgtgatgatgatggcatgttgttatcaatatcttctggcgccttttaagttggtattacagtcaatagttttcatgttgttgctggctactagatcatacaattatcagttataagctctcccacaaagaagaggtcgttatgttggttgaataatgtggggtcaaactagtatacaattagaatcttaattgatctagaacaatttctgtcgattagagaaagtttcacactttgcaatgtttgatgtcaattggcctgaaaaagttttacacacacggaataagtaagctatgttttgatttatgaaataattttatctgttcagaacagtttctatgctttgtgcccttgttttgtatgctaattatggttgggaggtgagaggagatattaatggaataaattaatttctt

SEQ ID NO: 28088 - DNA, 1002 bp, Oryza sativa
  ref <308>: DATABASE ACCESSION NUMBER: AK103530
  ref <309>: DATABASE ENTRY DATE: 2002-08-28
tggggatgcaggctgccgcacggacgtggacatggagatggagatggagatgtttccactccacagccgccgctctttccaaacccacgcctcacatcaggtttgccgtccgcgaaaagcgcgctgatgctaaggctgctctgaagaacattctacttaacggtggtccctgtcaggaaggaagcaataaacaaaagaggcaacaaaaaggtagcggtaaatcaaagcttacaaactccagctatggaaaaaatccacatagaaaaggcaaaagtgcgcagaagtggaaaaactttgatgaagatgattgcagtgataccccttatgggaattttggcggcaagagatcttttacctggtactggcctggggaggatgacgaaagtgggagtcccagtggatttcagtggcgggatgagtctcaatcaaataaatcaagggaaagagtttggaatgaaagtgatgtagatgaggaagagccttgctatgataatcttcgcagccatagaatatcacttggtttgccgcctttaggtcccttagaacttgatcatattaagtccgcttttcgtgcatcggctctcaagtggcacccagacaaacatcaaggagcatcacaggctgaagctgaggaaaggttcaaacgctgtgtagaagcatacaaggcattgtctggtgctttcaaaccaagtgactaaccctgtctgttcatgaatgaaatctgaagactatcactaaagatgttactggagatcactaacgaggttactggagcttcaacacactaagagacagttgaatctgctaaaaaaaagtgtagaagattgttagacggtcagaccagctctcgatggcatttttaacaattaaacttgtttagagtggtcactgaggaagcgattattcgtgtataatttcatgaaatcagttgaagcgaaacaaatttcagcgctccaatttattcttggaatgccaggcaatatacagtgtctcttctaattc

SEQ ID NO: 28089 - DNA, 2854 bp, Oryza sativa
  ref <308>: DATABASE ACCESSION NUMBER: AK103531
  ref <309>: DATABASE ENTRY DATE: 2002-08-28
gcctcgctcctcctcgctccacgcctccacgcgtgtccccgccgcagccgcactacaccgctgcccccgccggagtcgaggccatcaccagccgctgcttcccccgtcggagtcaaggtcgtcaccagccgccactgccccgcttgagccgaggtcatccccagccgccgccgcactccaccgctgccgcaagccgccgccgccgaggtggttccccgctttcgccgaagataagcttccgttcgttagtctgctaatggaaacaatatttagttttttagatccatcctctcttgctccactagtcagtggtctcaggtttaggcaggagaaggcgatctcatagcaaggtgcaatggcaacatcataccatccctcgcaatgcctctggactaaaggcgatgctgctggatacatgttcctgtatccatgttggaggttgatttcctataagtaggttaattacattgttgatggaatcttcatggcatcaggttctactttgcaaatttacaaattattttttcctctatagttctgtccctacggactgacatatattttgtatctgaaaatgcatttggggcttgatgtggccatgcggattcttgagtgaaatatctagcaagttccatgggtgctggaaatttgaatatagcatgacatccacaaatgggcttcaggaattgagagggagccaatcaggacaagggcctcctgagctaatgttgtgtattgcaggtacttctttgtgtctcaatttaggcaagtgttgtataaaaaaaattgttaatgaagctgatatctcaattgttgtgagttgttcctatgaatacatgtgcttgagcattaaagaaacaaatgtcttcagatatgcactttcatgaattatgagagaagatatggacctcccacagctagctatggagaaacatgcacagtttagacaaaatgtcagagtgcctaggaagacatgttgaagacatgttgggtttcttttttccataaaataaattagtataccatttctacatcttggcaaaggttgtacttgatgatcttttatggccactgtagtattttttgcagttcatggtacttattcaactataatagccctcaagacaagcatatattctgaggtaactcattgtctactaaagttgaaaattttaatttagttcatacttatggtacttattctgctataatagccctcaagacaagcatatgtttttgaggtaactcactgtctactggagttgaaaaattaatttagttcataattgaactggtttatcataaataaggttgtttatgtatataaaatgtccagtggcgcaaaaaggtgcgtgattattcaaagatctaaagtaaagtaatcgatctgcatggtcttttgttcgtcgacgagaactctctgaagtttcattcccaggtatttttcctcctgtgatcatataaatgttatttcgattgcaatgtgagaagaacacatatgaagtccttgtggctgtaggaaaaccattgtatagatagtggagttcatctccttatgcaattgaattagccacaagttgtttatgaaatgcagcagtggctttaacaagaatggaagccttacttcttggggaacttagggtggcctgagctactcatcagttacttagtatgagtccatatccttattaggattagcatgatactgatgctccctgtacgcctgtacccagaatatatatgtgaacgtatacgttcatttttatcttaaataatagaaggttggttagctagatctaaaatgtgagcttttctatggtgtggtgccctggtatataagaggtatagggttaatgctttcagtattctgctttgtttgctatctattaatgcacagatgtctcaagccactgtgtaatttgtaaaattcatgccaactgataccaaatacagagcagtatatggtatatattttttatctaatccttgcatggataatttattgaatttgaattgggggattatccttttattttatcttgtcgaggatctggtggcaacagctctgtggctcaatagtaagaggaggggcgttgagagagcaggaagtgaattgttggctacaattgataaggcatatcgcttcatcaatggggattgggagcaacaagagcagcggcaacacaggccggagaaacattgtgaggagaggactgcacgagcaccagagcaccgcgagtgggttacgagcgcgcgcgggggagcagcacggccgacagggacggtagtagtcgatttcaactttttaataattccacaaacagggatcatttcatttgctccgtacagagagttactgaacaatacatcatatgttctgttccatcatgaatatgtgcagatatgtattcaagacaacctacttctgaattctgatgttaagttgttgacagcaattgagaggtatttaaagaatatgatttgtgacaaattcattttagtgaagatcagcagatcagcaatgctcttaatctgagatcatattcattccggagtaacatttttgatatattcagtctggttgcactgaatattgaacgttgcttccattatttgatctaatgactcagattgtagttgggtcctcaccctctaatctctcctgaaaaatcaatttgattctcctttaccgaacggcagcaacggcttctgttgatccaggtagtactattccagtcaattgagaattttttgaagatcgcatgaaaatgtgatattgcaagggaatgtacatatttgagtttgtaaggaattcttttttgatatttttctatagatgacccttgcatttccg

SEQ ID NO: 28090 - DNA, 1203 bp, Oryza sativa
  ref <308>: DATABASE ACCESSION NUMBER: AK103532
  ref <309>: DATABASE ENTRY DATE: 2002-08-28
gtgttggagccttggaggcccaaacacgaagaccggcctcggcccaattcggactctctccccatctcgacggcggcggcggcggcggcgatggcgtccaccggcgtcaagctcatcgacatcgccgtcaacttcaccgatggcatgttcaggggcatctaccacggcaagcaatgccacgccgccgacatccccgccgtgctcgcccgcgcgtgggcggccggcgtcgaccgcatcatcgtcaccggaggctcgctgaaggagtctagggaagcgctcgagatcgccgagaccgacgggggctgttctgcacggtgggcgtgcacccgacgagatgcggggagtttgaggagagtggagacccggaagggcatttccaggcgctgctggctctggcgaaggaaggaattgcgaaaggcaaggttgtagcagtgggagaatgtggtctggattatgatcgacttcacttttgtccatcggatgtacagaagaagtacttcaagaagcaatttgaattggctgaagcagtaaaattgccaatgtttcttcacatgcgggctgctggtgaagacttctgtgagattgtgtcagaaaatctgtatagattccctgggggtgttacacactccttcactggaactgcagaggaccgtgataagcttctttcctttgaaaagatgtttataggtattaatggatgctctctgaagactagtgaaaatcttgaggttctacaaggtattcctgcagagaggatgatgatagagacagactctccatactgtgatattaaaaatactcatgctggaatcaagttcgtgaagtctgtctggccatccaagaagaaagaaaagtacgagccggattctacagtaaaaggtcgcaatgagccctgcttagtcaggcaagttcttgaggttgtagctggatgcaaaggaattgctgacattgaaggcttaagtaaaactctgtaccacaacacgtgcaggctcttcttccctcaggacctggatgcttctgctgatgcacagcttgagagtggtgcgtttattcaaaatagctgatgggacatgacagagcgtttgttactttgatattcacttaacgatgtttgctaccttttttttttttttttgcttggttaaagatcttgtacttcgacaattgccaaattggcttgctatgagagtgtcgttcatgttc

SEQ ID NO: 28091 - DNA, 1364 bp, Oryza sativa
  ref <308>: DATABASE ACCESSION NUMBER: AK103533
  ref <309>: DATABASE ENTRY DATE: 2002-08-28
ggcgggtcgttcttgtaatagttgtgctcatgacattgctcgtcggcggcggcacgccccggcgagggcggccacggatccggcccccacacggtgggatccagccttgccgggccggatctgtctcggacactgcctggccagcagtgatgggtgcggacggcggctggtgatggcaactggcgacggtggcggcagcagctagcggcggtggtggctggcgatgacgacttccgatggcggtggcggcggcagctgttgactgcggcggctagcgatggcggctggcgacggcggctggtgatggtggttggtgacggcggcagcggcagacgactgccgacggcggtggcggcagcagctgttggctgcggcggctggtgacggctgcagcgacagacagcggtgggaggaggcacggtggctgaggtgggaggaggcatggcagcctcggacggctagccgagggcgtggcagatgactgcatctggccgacgcgacagcgtttggaggaggggttggagaccggcttggcgcaaagaggcgcagccgatggcagcggaggctggctcggcgcaagaggcgcaggcggtggagatggaggccggcttggcgtgagaggcgcggctgatggggggaggccagattggtgcgagaggcacatccggtggaggaggccggcttagtgcgagaggcgtggccggcggtggagaaggcgacctcggagcggggaggagctgccaatgaatgtggcgtggtcttcggcacacgaaggctggccggcggggggcgtcggtgtagtggtcccacatgttggcagaggttgagtggtggtggagtatcggtgcatcagccgtggattcgcaggtggtaagtagcgggtgaaaacccagcccggccttggccggaccgacaacgatggttaattccccctcctgagggcattgtcatgcagtctcatccctcaagggtggttgccgggcgaaagcccagtcttgactccttttgatcccgactgacggcggcggcggttttccgtcgcttctcttcttgaagacgtcgttttggcataccctagccgaagcctctcgaacgattggtgcaagcacactctaggagttggctttgcgttggttgtgagggcgttcttttgggtgatctcgtatgtgttcctttgttggtctagtagcggtcggtcacgtttagcggcggctggtccggtgttagccttctcccgatcttgtgtgttggtgctatcggtgtgtgggtggtggtatattttttttctttttcctggttacgacccttcagggttgtaatcttgtaatttttttctgctctatcaatacaacgtgtgagacatt

SEQ ID NO: 28092 - DNA, 2196 bp, Oryza sativa
  ref <308>: DATABASE ACCESSION NUMBER: AK103534
  ref <309>: DATABASE ENTRY DATE: 2002-08-28
gaccgctctccctctccccgtcaggtgcgttcgtcggaaatcatcgggaaaaaccccgaaatcctctcccagctttccctttttttttttcccttcttctccgcgcgcgtgttctcctcgatctctccgatcatcatcgcgtgtggtggccgattggctgcggttcccttcccggaaattctgcggcgcgcgccgccatttttatccgtctgtctacaggaaacaatgagcagacgcaacagccgcaccatctatgtaggcaatctccctggggacattcgtgagagggaggttgaggatctcttttacaagtacggtcgcattttggacattgacttgaagattcctccaagacctcctggttatgcttttgtttagtttgaggatccccgtgatgctgatgatgcaatttgcggccgtgatgggtataactttgatggctacaggttgcgggtggaattagctcatggtggaagaggtcaatcttactcatacgatcgcccaagaagctatagcagtggacgacgtggaggtgtttctaggcgttctgaatatcgcgttatggtcactggcttaccttcatcggcatcatggcaggatcttaaggaccatatgcggcgggctggtgatgtctgcttctctgatgtataccgtgaggctggagcaaccgttggaattgtggattatacaacctatgaagacatgaagtatgcgattaggaagcttgatgactcagagttcagaaatgcattttcacgggcatatatcagggtgagggagtatgatgatagatcaagaagcagaagccgctcttactcaagaagtcgtagttacagcaggagcactatggcagcactaattgttgactgcattgttccacagatctgtttctcggtcaccgtcacctgtggatgaaaggtatatccttttataacatcagctttttactggcatgccttttttgtcgttaaagagaaacaggagtatgtgttggaatttgggtttttatatactttggaacttccactgtggttcataaaacatatgattgaaaagcttgtaatgtatttccttttttttgaccgactaatgtatgtctccttttaaattgatatgacttaaatttcctctatggcccaatgactaaaacacagtgctggtggctaacttgcaatgttcaaggtttgcttttgtttttcctagatctggccatgcggcaatctggggactgctttcatagattttggatatgttgagaatcgaaaggatggtttggaactttggatagtagagctggattgtgatgcatgtatggcaaatgggcaacaaccagtcctaggagcgagctaggcctgacagtaaggatatgtggagtggatttgtgttattattgagaatttgttgaccgtaggcacttcaatttcatatactgcatgacatggacctaacttacatgagatctcaaagttttcttttaattattcttgcatcctgataaaacaagattatggtacttggtaagcatttttctggaatatgtacgtgcttttttcacaacaaaagaaattgatcctgcttagtttttatgcggattctgttgaaatagagattttgttttgttcattggcacatattagccatttagcatgaatacaaaaatgcttacttatcagtgtggttcttctgtaatttgttttgatatttctgttagtagtttttggatgaaatcacactgagtgattggttttgcctgtgaaattttgcagatcaatatcaagatcacggactcctgtttcttcaccttctcgtggaagatctgttagtaaaagcccaagcaggagcttatcccgctctccctctccggtgaagtctgattgaacatgaaaaccatccagactgtgacggctacttaaggatccaggaacctggaactcgaggatagcatggattagatcaaatcatcctggttatggcttcactgcgctacaggcttcgccctttgtttagtaggtcgacttctgtttaatattattcatattgcattatatttgcgaaacagagatcatgtgttctgtagtcatagtcccagtacttattttacatctagtaagtggaagaaactatctgcacattgttgtcgactgtattttaaatatctgatgccatatatatgttgatgtaccacctttggttgtc

SEQ ID NO: 28093 - DNA, 2302 bp, Oryza sativa
  ref <308>: DATABASE ACCESSION NUMBER: AK103535
  ref <309>: DATABASE ENTRY DATE: 2002-08-28
ggcatcccgtctactgaccacacacggccggacggaagacccgaaccgtatcgcctccacaatccatcccccagaaccataccacgcgttcccgttcccctcctaaatactcgatcaatatcaatcaatctccgccaactccctcgaatcgctcctgaataacttagttttctcttgttagattagggtttcgagtctttcgacgtcctgcttgcttgcagggagattctgatgccgaagaagccgtcgctgtcgcgggttgcttcagagacgcggctgctgttttctagctgggaacctgaatccccgttggatgctaccagcggatccggaaaagatgcacccgccgatcaacaggaaggcgacgggaagcggggccgacaacgctcgcctggtgacgaagcgaggcctaagcggcagcgcaagacgaagaagaagaataagaagcagttggatttattggagcgggaggacgatcccctaatccaattgaggtcattgaaggatcgattcaagggtcgattgaaggagggcgttgcttcagcccgattgaagtgtttagacacactattgaatgagtcgagggatttatcgcaggggaatgagtccaaggggaatttgttgaagagcctcattcaaaaggcagagttggatttgtggcaggtgaaggaactggaaaccgatcccacgtccggtgctagccaatccaaagaagaagcttctgctgcagcttctgatggacagggagacgataaggaaaggggtgacttgcaagcagtcgaggcctatggttctcctcctggtaaggagaaggttgacttgcaagcagctaaggactcttctcccactgctgggaggaagggaaagggcaagcgtattatagggtatgaagcacaacagaaggaaagcaacattcaagatgttaaaacatcaagtcaacaagaaactagaaagccaaagaggaagaagcagaagaagaggcagaggcgcaagatggaggaatccacggaaaatctatcatgccgcagtggcagcagcccatcctcttctcatgatgcaacaagcacatcgacaatagagggggagccagaacaaccatcttttggggatcttgcgagcattgcacaagaccatgatgacaagattgcatctgacgttgttgacatcaaacaagaacaagaatcagcagaagatatcctagctctcctcgacatgatggataaggatgccatccaagaaaaattcaattactatctcaagcagctgggctttgagtcaaatgtgtatgatttttggtctgaaacctatgagccagagcaactcactgcgttgcacgagcggttagccatctaccgcatcgtaggttatgagctatcaaagggtaggaagcttggcaaacaggatattgcaaaactgaaagagcagtacaatccgtccattcttcgtaaggaaggatacttccggcactatgaggagagtcttgagtggtacttcgatcttgaatggtgcaagtactctggttttcaagactatcagcggctagtgcttcatgataatgttgagttcttagagtgggagcattaccacttaaattataatacctatgaggatgatctagcatatgtcaggtatcgtgcacgcttagcaaatgagactaagtggattgaagattatctggcccgtgacataactcaggctgagtggcgtagggttaaggatatagcttcagttcaagcactgaagattgcaagagtctctggtggtgtcaaggcacaggcagctttggctggtttcagagatcatatatggagcattcagtttgatttcaatcactataaggattttgatggtgtttacttcaagatttggaagcgggttgctaagagaaagatgaattttagagaagctttgttggaagtgtatagagaagatatgtttcctgtgcgcaagaatggtattaagtacgaacttgataatactcaactaagattcaagtcgatgaaagaaaagtatgatgcccacgtggcttgccttgatgagtcggtgccagaagatgaagttcgtcagttgatcaaagaggccgttataaaaatgaaaccaaaaccacatacctatttggactacgccaggaagaagttacagatatcaatgaatatcgatttgattaccaaaagtacgtgtactcttctcaattatcaaacatgattcaatgctaatcaatgccgtttgaaagatttttagctttcttagtctgagaaatatgtctttcgtttgaattcaataactagtaatctgtccgtgc

SEQ ID NO: 28094 - DNA, 1666 bp, Oryza sativa
  ref <308>: DATABASE ACCESSION NUMBER: AK103536
  ref <309>: DATABASE ENTRY DATE: 2002-08-28
gagtcagtccactccactccccaaaccttctcgacccttcttctcccctcccctccccccaccgtcgcgcgcggcgtcgccttcctcctccgcctccgccgcgctacaaccctaggccctcccggcgacggtggggagcgcccgcgcgatgctgccgcagcagcagcagcagcagaagcagcaggcggcggcgctgatgccgccgtccatgtacgcgatgccgccaccgccgccgctccaccaccaccaccacccgctcctcgccgccgcgccgccccagcagcagatagagccaatccttactggaaatctgcctcctggctttgatacgagtacatgccgcagtgtatatgttggcaatgttcatgttcaagtcacagaggcacttctccgagaggtttttcagagtactggtttagttgaaggatgcaagcttatacgaaaagagaagtcatcttatggctttgttgactactatgaccgcagatcagctgcattatcaattttgacacttaatggaaagcaaatttttgggcagcttatcagagttaattgggcatatgctagtgggcagagggaggacacaacagaccatttcaatatttttgttggtgatcttagcccagaggttactgattccgcattatttgcattcttctctggatattccagttgctctgatgcccgagttatgtgggatcaaaagactggaagatctagaggttatggctttgtttccttcaggaatcaacaggatgcacaaagtgccataaatgacctaaatggacaatggcttggaagtcggcagatacgctgcaactgggcaacaaagggtgccagcaatggcgagcagcagacttcagattcaaaaaacgtagctgatctgactaacaatttgacagaagacgggaaggagaaagcaaatgaagatgccccagagaacaatccacagtacagaactgtttatgttggaaaccttgctcacgaggttactcaagatgtgctccatcgtcttttccacgcacttggagctggggccattgaggaggtccggatccagcttggcaaaggatttggcttcgtcagatacagcaaccacgcagaagccgccctcgcaatccagatgggaaacggtcgcattctaggtggtaaaccaatcaagtgttcctggggcaacaagccgacgccacccggcaccacgtcggcgcctctgccccctcccgccgctcccagcgtgacggcggccgatctcctcgagtaccagcgcagcctcgccttgagcaagatggtgtcaagccaggcgctgatgcaggctcaggcacagcagcatctgaagcaggcaatggggatgggtgcaggcgtgagccaggccatgtatgatgccagcttccccaacgttggcccctcgcagcagcagctcatgtactactgaataaaattcctgcgagctcgtcgctgtaatttgtgactcgatcagtctgatctctttttttttctggttttgttttagctaatgttactttttttacgtctatatttagagtgtttctggagctattttcgatgttgtttcgtacatggatggatggagaatgtgtaatggtatatgtgtgtgaaggatgtaagctgacaattttatataatcttagtctaatgttattgctgc

SEQ ID NO: 28095 - DNA, 2130 bp, Oryza sativa
  ref <308>: DATABASE ACCESSION NUMBER: AK103537
  ref <309>: DATABASE ENTRY DATE: 2002-08-28
gatttctattcccctgcgcccccacaccgaaaattctctgtcgcgcgcgctccttcctcccgtctcctctcctctcctccgctcctcgcgcgcgccatctcgcggaggggatcctgatctgcaagaagttcttctcttaatttcagagccttaataacagtttgagtttgtttgttcccccgcaaaaaagagtttgggggggttcaattgaagttggatccgccgcccctgcagatttggtcgcctagcttccttacctatggcggttcaatctgcagagcgcggcgtggaggctccacctctgacgctgtcgatattcgagttcaacagtaaggttgtgtgtgtgtgcgcctccggtgacggtgatgccgcccgccgcctgttgatccggttcaatgctttttgttgatgcgagcgagtatgggaattcttcgtgtctgatattgggtgtgcgcgcgcgccttgctctgcaggtgatgcaggacgagctgcagaagctggcgctcaaggtgaaccaccacgaggagaacatcaggtttctcaagtcggagctcaatgccgtcgaggactcgtgcgctgacctgggcattaaaataggcaattattattcatcgatggcggcaattgcaaataatgacacatctgttgaagaagctgaacaacgcactattcaaagtatactcaaacaggacgagacagcagctgggattatatgccaactgaagattcgtcattatcagcatgcatcaaagctgccactgatgaaagatgtccttggtgtcgtagctaccttgggaaaaataaataatgacaacctcagcagggtactctcagagtacttgggattggacaatatgcttggtgtcgtctgcaagacttatgatggtgtcgagggtcttgaaacatatgacaaggaaggtatggttgataaaaccagtggcattcatggactaggtcgcacaattggaaaatttttagatggaagattcactgtcttttgtcttgaaaatataaagccattttctggtgattttatgatcgatgatcctcagaggaaacttcttttgcataaaccaaggttgcctagtggagagttcccacctggttttcttggttttgcagtaaatatgatacatttggaccaggcaaatttgagttgtctcacagctgggggccacggtcttagggaaactttattttacagcctgttttctcagttgcaagtctataagactagagctgaattgcgaaatgctattcctttgataaatgatggtgctgtttctcttgatgggtctatactaagacctaatggctcattctgcctaggtaataggtatgcaattatatggatttatcctttaacatcacatcatatacttttatttgatcattagtgttctgcatattgtgggtccttcggtgatatttaattgtcctttcattttatgagtatatgcgtgatacattaccctggtttgcttactacataaagtctggtaacactaatttgcactgttctgtaacaagcatattaagcttaattccacctcttctttttgttaatgattatacatgaccttacttttgaagggcaagcttaggaatacaatttcctgtaactgcaaatcttggggtctcaaacttacccgtaactatcactgaactggaggagcaagttaaacataagaattgggaaaaggaaaggcttctcgaggatataaaaagacaagaagatttgttgaaccaagttaaggatttgttcagcaagaaaaaggaacagttcatggcttatatcactcaaccaggaatgttacagagagcatcgcaggcttcaccgacaattccttcaccagctactcctggaagcaatccatttggatcaaggcctccccacctgcggtaatagcataagactctaggcatttccttcagattggagtttgccagtgatagatgatggcttgatggcttcatgccgtcagaatgcattgtgcaacaatcttgatggcattcgaggaaaaaaaacaatcttgatgttactggcataccatatgttgctaagttagtctgtcattttgctagttgcaagttgcaacagattatactctcttagtttttttttaaccc

SEQ ID NO: 28096 - DNA, 1150 bp, Oryza sativa
  ref <308>: DATABASE ACCESSION NUMBER: AK103538
  ref <309>: DATABASE ENTRY DATE: 2002-08-28
ggcggccaaccatgccgccgtctccctcacctctcgttcccgcctcttcgccaacagagggccgccgccgccgccgcccctatcacggtcgcctccttcaagaacacaactgcgcgcacccgcggcgcgtgacgcggccggcgtcatccccacgcttctcgccggcggcggcagccggtgtcctgaacccttcgaggagacccctgcgagctccatcatcgtggtgctcgatgaaatgtcgccatggagatcggtttactcatcgaggacatcggcgtgcagcataacagcaggagacgtaacgtaccacctcaggacgcagaatttggaagatgctcagtgcataccattgacggcaccatattgagatgtgtacctgagaacgccaatggaggcagtacgaggaatggaaaaggtgaacactttggcaagggaaaagcctggtgtagtaggagcctggtagcccagagatatagaatggaggcagtgctactcccttgggatgagatgctgcgatcgacttagtaaactgtttaactgacttgaacacctgattgaaatcattgccagacagatcattcaggaagaactggagttccatgggatggcacctgagctcatcatggtgctgagcatcagctaccgtgttgatcacatcggagacgaagaggagagtgtttgcatcgacagaaaagcctaggtcagcaactatcatagctcgaggatggagagccatgcacacctgtctcacagccttgtcaagcaccggcttggtcttgagcaaagcctttcgctagtgcaaaaaaatacaagtatatgccttgtcagctgtggaatacatccatgaaacgtgtggtggagttgcatagagatggttaattggttattgaaggtacatcatgatcagtgtggttgcggcttgggcttgagaatacacacctgaagcctagagttgtttgcatagttatcctctgcttcccctattgccatatggaagtcatgctccaacttcatggctaataacaagagcacttcagaaactctcgctgcaatcagtttgctgatttgcttacttggaaccactgcgcatcttcatctagtactctttgttctatatatagagtataaaagagtggtttgttttgctacc

SEQ ID NO: 28097 - DNA, 1668 bp, Oryza sativa
  ref <308>: DATABASE ACCESSION NUMBER: AK103539
  ref <309>: DATABASE ENTRY DATE: 2002-08-28
gacccgtctcgccgctccatctccaagcccgaatccccaaaaccctagcccaccccctgccgccatggccgcctcccccaccggctcctcctcctcggcccccgccgccgcggcggcggcggcggccgaggccaccgacgggccgaccctcagcgtcgtctcgaagcggctccgcgcgctgcggaagaagcacaaccggatcctccagatggaggagtcgctcgccggcgggaggaagctcaacagggagcaggagggggtgctccgatccaagcccgccgtcgtcgcgctcatcgacgagctcgagcggatgcgcgcccctctcgccgccgccctcgccgaggagctctcctcccgccccgccccctcctcctccgccgcgccgccgccccccgcatcctcctccgccgcaggcgccgcggattcgtccgtcgtcgaggatctcctcgcgctcatctacttcggcaccctcttcgacctcaagccgcagaccgagttcgtcgccaccatggtcgcgcgcgcgcaggagcgggactgctgcatcacctacgactacgtcacggaggacgccgccgacctgctgcaccagtccgatctcgacaaggtgtctgctctggccgccctcgccgcctcgcgccctgccgcggcggtgggcgtctcgcaccgcgacgcgctccagtcctgcgcgcagcacgcccgcctctggcttcgccgtgccgatgagccaatccaccccgaatccagcatcacttatgcagcggttagggcgaagttggacaagatcatggcttcagactactacacagcgcaaccggagatgccggagatgggggctgcggtcgatttgtcggctgctgtgcaggagagcatggttgtgtcaccagaggcgccggctgtggaagagagccaggctgagggacacaaggatgagaaggaggcttcggaggctacagaaatctacaacgataatcagcctaatgtagctgatgctcagaatgtggaggatgaagccccggtgaatccttctgaagagttctcagcagcagaggtggagcaggagaagtttgaagcagatgtggaggaacaagagaggaatgcagatcaacagttcacttctcgacggccttaccagaaccagcgcggtggtggtggtcgtggtggtggcaggaggggttaccagaatggaggtcgtggtggacgtggggggcgaggaatgggcggtggcgggtaccagaatggtcgtagtggtggcggcggcggtggctaccagaatggccgtggtgggggtgagggtggtgggtactactataatgagcctggttactaccagcagagggggtacagcaacagaggcaggggtggtcgctctggtggtggcaactcttattacaacaatcaaggtggaggttcgcagggaggtggccacgcccatcctgggagggttgagctgggcgcaaacgcttagcttcctaactattttgcttggaggagtgagtgttacgcgaggagaggacataatatgtgggagccattttgttattatagaactaacttagccctttattatgtcaacatttgcccccctcagagttcttttgtcactccaatgactttcatatggatggttggttgataatgcggaatactttggggaagtagtttaaggtc

SEQ ID NO: 28098 - DNA, 1533 bp, Oryza sativa
  ref <308>: DATABASE ACCESSION NUMBER: AK103540
  ref <309>: DATABASE ENTRY DATE: 2002-08-28
gagagacattcgcatcccaaaaacagaaaactaactgtacccccgagtgcttcctgtggcgccaaaggagaaaggttgcagcaacaagactagtagaggaaaggcaatggtgaggaggaagtcgaagtcgccggccgtgtcgccgacgacgctgggtgacctccccgacaagctcctcgagcacatcctcgtccgcgtcgcgtcgccggtctggctcacccgcgccgcagcgacgtgcaagcgatggcgccgcatagtcgccaacgacaactttccgtttcatatggatcgccggctcccgaatccggttgccggccactaccattattctcgccgccgggccgacggccgcggccgcagcagccggctgatcaccttcgtcccctcctcgtccgctgtcgcgctcggcgtcgacgcgcgccgccacttctccctcgacttcctccccggcggccgctcctcctgggacctcgtggacagccacagcagcatcctcctcctcgccgcaaccagctcgacacggcgccgcggccaccgccacggcctcttccccgacctcgtcgtctgcgagccggtgacgcggcggtacaaactgatccctcgcatggaggagatgaagcaccagcgctgcctcggcgtgttcctgcaaaactaccccacgagcagcaccagcaacaggagcagcatcatgtcaagcttacgggtgatttgcgtggtgtacatcgagtacagcggcgtgtccgatggcatgggcaccgtcagggcctgtgtgttcgacccgaacggaagcaacagctggaaaccgaggccacgcagcgcctgctggtacatgttcaaaccgtcctggaacatggccaagcacggcatacatctccggggctctgaacacgcgcgccttctcggccacgcggcgggcgccgtgttctgggccgttggaggtgatgacaccttgctagtcctcgacaagtggaggactgagttcgaggtcctccgcttaccgggcagtgtccgagcttcggggctccgagcgatcgttgatggtggcaatggtgacaacgatggcaagttgcgtgttgtatgtttggatgaggaaaatgtcgtaagggtgttcgcgacatggcggggtcagcatagcaacggcgagtgggtgcttcagaagagtctcaggttagaggagtccaccatgggattggctgggtacaaggctggacgcggcggcgccgccatggttgtcgcggcggcgaccgccggatcggttgtgttagctccggtggaagggatgacttggatgttctccgtcgaccttgagaccatggagatagctgaatgcaaggaggtaagcgtggctgtttacccttgtgagctgccatggcggcctacgctgcgagcttgtgtaacgcgttgtgagagacggggccgaggtcgttgctctcacatatgtatttgtgacgatgcttaatgttcttaactttagaagttaatgttctatactggaatttgaagacctcctttcaaacttgtgtgatttgcgcg

SEQ ID NO: 28099 - DNA, 1188 bp, Oryza sativa
  ref <308>: DATABASE ACCESSION NUMBER: AK103541
  ref <309>: DATABASE ENTRY DATE: 2002-08-28
ggagtgaaaaaaaaaaaccccaaaagaaagaaatctccttctctctctcgatcccgtctcgtctcgtcagtctgcacccggttgcctccccgccgctctcctctccggtctactcctccgccgtcgccgtcggcaccgccgccggagctcctccctgctccctctactgggttggcggggagtggatcggggatctgcacgcaggggccgatttcttctcttcgtaaggagtagataacacagaatagttgaagatgagcagcataggcacaggatacgatctgtccgttaccaccttctctccggatggtcgcgtcttccaggttgagtatgccacgaaggctgtcgacaacagcgggactgttgttggaatcaaatgcaaagatggaatcgtcctgggtgtggagaagctagtaacttcgaagatgatgctggagggatctaataggaggatccattcagtgcactggcactctggcttggctgttgctggtttagctgcagatggcaggcaaattgtttcaagagcaaaatcggaagcggccagttatgagaaggtctatggtgaacccatttctgtaaaagaattggctgatcgtgtggctagctacgttcatctttgtacactctactggtggctcaggccttttggttgtggagttattcttggaggttatgatagggatgggccacagctctacatgatcgaaccctcaggagtctcatacaaatactttggtgctgctctgggtaaaggaagacaggctgcaaaaactgaaatagagaagttgaagctttccgagcttacctgccgggaaggcattgtggaggttgcaaagatcatttatggagtacatgatgaagctaaggacaaagcttttgagttggaattaagctggatatgtgatgaatcaaatcgccagcatcagaaggttcctgctgatcttttggagcaggccaaggttgcagctcaggcagcgcttgaggagatggatgctgattaagaggagacccgactatgttctacgtttggccactgatgaaatctttgatgtcattactggcacacagggacatggccattctgtcggattttaaaacttcgcatgtacttatggtactaaattcatggaaagtttgatgctggacagtgaatggatatctgacttttgactgaacttgtccctt

SEQ ID NO: 28100 - DNA, 819 bp, Oryza sativa
  ref <308>: DATABASE ACCESSION NUMBER: AK103542
  ref <309>: DATABASE ENTRY DATE: 2002-08-28
gactggcaaacctacacacactattgagcctctgtcacgagaagccaatgtactcgtgcgaccacgaatgcacggcgccaacgcacaccgcgttcggcgccaagtaccagccgtgcatcggtgtctcggggcgccctgaccatcacgccgtcgggaggctgcagcagccggctggcaaggccgccgccgccgccgtcgtttccgcggccgcgcagcctcagcgcgccgccaagaagaggcatgcggcggcgccgccgccgcgcccgtcggcgtcgacgtcgcgccgctcgtcgaccaccgtggtggcgaccgacgtgtccagcttccgctccatggtgcaggagctcaccggcttcccggcggccgccatcttccggccgctgcctcgtaggatccccgtccacgcggtcaacccgtcgcccgcggtgcgtgggtacggtggtggcgcgcttcaggggcacggttcggacacggcgactgctgccggcagcagcagcagcagcaacccgggcgtctcgaccgtgcagctgatgcagtgctcgccgcccggcgtgttcgatgggctgccggaccttgggtcgccggagttcgactcgtggctcgatttgtccgacgagtaacctctccttgtcggactggtcaatggaagccaatacaatactgtagtaaaggtttggtaattggcagtacagtactttctttctgcgcatgcatctcttaaggttagtgtgttataacatccttgaaaaaaatgatggcgtttgtactcaagctttcccaaatttgcagaaatatgcgttaatacactcatgtaatccc

SEQ ID NO: 28101 - DNA, 1752 bp, Oryza sativa
  ref <308>: DATABASE ACCESSION NUMBER: AK103543
  ref <309>: DATABASE ENTRY DATE: 2002-08-28
gcttctctctctctcgactctcgacgacgacgcggcggcggcggcggcgaggtgggaatggacatgccgcccacgccccttccgccggagaccgccaacacctcgcccgctcccaacggcgccaccgccggaatccgggttgagaactgctacgtcttcaagagccggctgcaagagtatgcacagaaaaccggcctccagactccagagtatcataccttcaaggagggaccttcccacgagcctgtcttcaagtccacagtggtgattaataataccagctatgactccctgcccggattcttcaacagaaaggctgcagaacagtctgctgctgaagttgccctcatggaaattgtcaagtccataccagccaacgcaaatatcccagctgttcaagagactgggctgtgcaagaatcttcttcaggagtatgcacagaagatgaattatgccattccatcttatatttgcaccaaatcagcctcaggcttagctcctttcatatgcactgtagagattggtggaatacaatatattggtgctgcagccaggacaaagaaagatgcagagataaaagctgcccgaactgctcttctggcaatccaaggtcaatcagagggttcggcaaatggtgcaacaaaatatattgtagttcctggtaaaagggtaggtaaggaggtagagaaaaggccaattgaaacaccgaaaccacttaaagtaaagaaaggtggtttcaagaagaaatggaacaagaggaaattcatgaagaaggatggtcaagctgttgatgtggaaaaggatgaagctagagtggctggagatgctcacgattctgatgtcctaatgcagccaacagtaataacacaggaggcatcttgtggcactctgttcctgcaaccttgtgaggaagctaaaagagtagaagctgagccacctagagatattgaaatggtacagcctgataaggagaaccaacacagtgacgctgcattggtgcaacctgatgatgaagctagagtagaacaggagccatccagagatatttcagtggtgcaacctaatgaggaagctataagtggtaagcaggaaccacccatcgatgctgcaattctgcaacctaaagaggaagcttcaagtgtaaagcaggaaccattcatcgatactgcaatgctgcaagcttgtaaggaagctggaagtgtagaacttgggccagccagagatactgtaatttcccaacttaatgagcaagatagggctgtaaagcaggagccagctggtgacattgtagtgccacaacctgacgtgcacgctagggtcgtaaaggagtagacaccgagaacggaaactaatggggaagctacgaacatgaaggagacaccaaagaactctgcaatatgtaattctccagagacaaaggattttggaaatattacagcaatgggttcagatcctcccacaactaatatgagcgaagaataagccgtggttgttgaatcaaaatgcaatagccttccagtgtcagtagtgtgttcacctgcagaggtgtgaaacctgaatggctggcttttccagtttaaaaagaggcagctggaataggaagatgtatgtgggctgagaatagttagttcatatttgtcattgttagctaggcatttgtatgcctgatgatatgaatgaaatgtattgcctgctgctttagtgagtattactttgaaaagaaggggaaaaaaaatgaaatcgaggtttctg

SEQ ID NO: 28102 - DNA, 2499 bp, Oryza sativa
  ref <308>: DATABASE ACCESSION NUMBER: AK103544
  ref <309>: DATABASE ENTRY DATE: 2002-08-28
ggctccccctcccgcatcacagccattcgccacttcaccaccaccaccgccataatccgtctcgccccgatccagccggctcgtcaccgacgcgacgccgccgcggccccccagatcccgtcgtgcgcgcgcgcgatctgctctcgcaggcgaagatggcggcttacgagcccaagaacattcttataaccggcgctgctggtttcatcgcatcacatgtggcgaaccgcctagtcaggaactatccgcactacaagattgttgtcctcgacaagctcgattactgttccagcctgagcaatctcaacccttcacgtccatcgccgaatttcaagtttgtcaagggtgacattgcaagtgctgatctggtgaactaccttctcacaactgagtcaattgacactatcatgcactttgctgctcagactcatgtggataattcatttggcaattcctttgagtttacaaagaacaatatttatggtacccatgtccttcttgaggcctgcaaggttactggtcagattagaagatttattcatgtgagtactgacgaggtgtacggagaaactgatgaggatgctgtggttggcaaccatgaggcctcacagctgcttccaacaaacccatattcagctacaaaagctggggctgagatgcttgtgatggcttatggaagatcttatggccttcctgtgattacaactcggggcaacaatgtatatgggccaaatcagttccctgagaagctcattcccaaatttattcttttggcaatgagaggcttgccccttcccattcacggtgatggctcaaatgtcagaagctatctgtattgtgaggatgttgctgaagcttttgaggtggttcttcacaaaggagaggttgggcatgtgtacaatattggtactgtgaaggaaaggagggtgattgatgtggccaaggacatatgcaagctctttggcttggacaccgagaaggtcatcagatttgttgagaacaggcctttcaacgaccagagatacttcttggatgatcagaagctgaagaaattgcgatgggcagagcgcacactatgggaagaggggttgaagaaaacaattgaatggtacactaacaatcctgattactggggagatgtcgcaggtgccttgctccctcatccaaggatgttgatgacacctggagttgaaaggcataactggactgatgagatcaaatctctttccacttcaccagatgaagctaaggaatctagcactgcggttcctgcagccactgccaaaagcaccagcagtgcccctcaaaaggcctcatacaagttcttgatatatggtaggactggatggattggtggtctacttggtaagatatgtgagaagcaagggattccatatgagtatgggaaaggacgcctggaagagcgctctcagctcttgcaggacattagaaatgtgaagccaactcatgttttcaatgctgctggtgtcactgggaggccaaatgttgactggtgcgagacccataaacaggatactatccgcaccaatgttgttggcaccttgaaccttgctgatgtttgtcgtgagcagggcttgctcatgattaattatgctacaggttgcatatttgagtatgatgctaagcaccccgaaggatcaggaattggttttaaagaggaagataagcccaactttactggttcatattattccaaaactaaagctatggttgaagagctgttgcaagaatatgacaacgtctgtacgcttcgagtcaggatgcccatatcatcagatttgagcaacccccgtaacttcatcacaaagatagctcgttatgacaaggtggtaatcatccccaacagtatgacaattttggatgagcttttgcccatctccattgagatggcgaagcgggactgcaggggcatatggaacttcaccaatcctggggttgtcagccacaacgagatcctggagatgtacaagaaatacctcaaccccgacttcaagtggaccaacttcactcttgaggaacaggccaaggttatagttgcaccaagaagtaacaacgaaatggatgcatcgaagttgaagtccgagttccccgagctactgtccatcaaggattctttggttaagtatgtttttgagccaaacaggaaggttcctgctaactgaagatttacgggcgcggtcgggagttatggaggttacgagcgcgggcgggagttatggaggttattgcacggatgcagttgtgaccatacttttttttgtagtttttggttatatctggtgttttgttaagatacatgtaggtgaactacataccgttcgatacttaacctatttatttatatattcatagcaattcgtgtgcacggcatgtgcatattattttttttgctttggtttgtgcggtggttcagaatgtatctcacctctacgttgtactctttgaactacttactctatctaaaaaagggcaattctt

SEQ ID NO: 28103 - DNA, 3628 bp, Oryza sativa
  ref <308>: DATABASE ACCESSION NUMBER: AK103545
  ref <309>: DATABASE ENTRY DATE: 2002-08-28
ggacttcgccgccgccacagcagccgccacggttcccttcccttcgccgtcgtcgaccaccggagtccggagtggcggcggcgggatgttctagaagaaggatgcatggtccggagtccggggcaacctttgccgcagaggtcggcgtcagcagatgcgtgggaggatttcacatccgcgcgtaagcactagggcatttcttgattgggatggtgtttgatcttgagaatattcaggcgttatatctgacggaaacaaggggggaaagggtaaacattaggcaataataccaagtttttcttgcacaaggcagataagacaaacacaggaattgtacacaggcattagttcaagagccccactaatgaaggaaattaaacccatgacagttgggaagggagacaaacaagcaaacatactaaatattggtgctacaatgcaagccaacaattggtgcatggaagaggagtaagagccccttcagcatctttattcgatactagatactagatacaagttgaagtacttcagaagtagctggagaagcaacgtcaacaggcaattcaaagtggaaaagaaatagcaatgttaagcatccttttcctccagggcacacaatgagttgaagccatggcagtttattcagtttgcttcatccgtaggcaccagtccttgtgcatgattagttccctgctgctggaatgtgcttcagactggggtcattggggtgtgcactgatgtcatgcagaatcactccaatcttctccgtgtcacagtcaccgtgaagctggagctccctgaagcttaggaggtgatcgatcccgacaagagaatccattatggtgaaacgccagaccaacctctcgagcctaggagctgctccctcatcgaacctgatgctgacaatgtctgagttctcgatcaaaagaaactggaggtttctgaattcccttccggagatggtgaggttgcctgggatgtatgacctgtgtcggagcctgagatagcgcaagcccacgagcttgcccaggacatggatagcactctctgtcagggaggtatcacgcagagtaaccttggtaagtttgtggagatgttctatccacagaggcaatccacttctgatgccagagattgtcaggctctcgagaaaccttgggagtgtggcatccatcatgctcatgtcaaagcccttgcttccatcatcggcagaagatgatctgatttggacggacagagagcgtaggcacttgtgcaacgtgccgattacatgaagcaaacaatcagaaccatccttatcagcatcatggaagaccacacctaatttcctcagcttcagtagctggctaacagcagtcaactcctttccaccatgtgaaacttcaatatgggatagtatctccatgtttctcatcttcccaattcggtggggaatgtggacggcagagaatgattcctgttgcctgacgatgtcttcacttggacagacagtatggcctgagagcaaatgcttgagcctagggagcactaaagatttcctggggaagacactgacattcgtctgcctgatgtctagcgtttccaagtggatcagcttctccatttccttcggcagttcggtgacatctgtatcccgcaggctcaaatacttgagcgaatatatgccacagatgttcttcaggtggcgcctcttcaaacctttgcagctatccaaatctagcactttgagcagacacagcaaagaagacgatggcagggacttgagaaaggtaagaatatcatcgataggttcagacagagatatatgcaactttgtgctgaagcggattgaaagatggcgagccagttctcgtggtgccaaaaccgtgacaacaaaagtagtatcatatcctccggataccagatcagtaatgacatcatgaaccaagtcaagtaccgtgcaggtcttgaccttgcctgaagcatcaatgtcgcttggacagagaagcagcctgccaacaagggaatcaaaacagttatcagcttgttctagtgcattcatttcttgtccgtcagtgatgaggccttcaacaatccatcgtcttactaagctggtcctcctgattttgtagccaggtgggaaaatagatagatacagcatgcaactccgatacttattaggcatatcaaagtagcataactctaccatcttcttaggccagtaatcatgcagtgatcctctattgcctagtgcatcgtacacttggcttgaagaaccactctcattataatacagaaaccgaaggagcatcttcataaagtagatttgaggttcaagatagatcaacatgcatggtagaattttccgtagccaaccttccctttcatgtttaagcagagatatagctctactgaggaagaagttgagaacatgaccggagctatctggattgaaggttttatacggagagaaagtctgggccactttatcatcattatctgttgtgactataatggcactaccagcaggacaatcatctgggaaagcaagctttatatgatcccagatcaatttgtcacggacatcgtgaagaataacaaggaagattttacctctcaaatagcaccgaatcttctccaccagctcctcctcgttccagccatccatttcactcctgaacttgttcagagggagaacaacctgacatagtatatcttttaatatctgaacgtgagattgagctccgttgacagtgatccaggccttgcagtcaaataagatggcgacggaggagtcctggtaaactctttcagcaatgatcttaccggcttccacgccgactcccacaatagtgctcttcttcaggttggctggtggttcagcgaaagcaaaagaacgtctccaagcagtttcatctccatgttcaccatcgtcatcctgttcccacaattgacttaaggtgtcaaagcgggggcaaatatcatacgttttccgccggtcgttcacctcactcagtcggaccttgatgtcttggatccgcgaggccagccggtggcagacggaaaggttccggacaagacgggagactcgctggaagtggctgaggaggcccttggatggcggccggccggctgcgacacactgcgcatactgctcaacgcagtcctgacagtcgtgggcgagttccaccgcctgcttgatccatggcgcgcacttgttgtagtggtggcggtcgagggtgctggcctgctgtttcaggagcagcaggaggaaggcgtccatcatctccatctcgtccttgatgaactgcatgtcgcggcggacgcggccaagcagccgtgccttgtcagcgagcacggtgctgatgcggcccagcagcgtgtcgaggacgcccttgactgagccgatcacgagctgatctgccatcgccggcggccacaaagatcgatttgcatttgctggttggtttcagtgggtggtgatcactccaagcaagctaagggagtgaagctaaatagcaggagtacttggctagctagcgctgcacctgcacgtggagtggctcgcattcgttgtatggctgacccatcctccgctgaccttaattgtggattagttttaacatggaacgcgtggttgactttctcc

SEQ ID NO: 28104 - DNA, 2494 bp, Oryza sativa
  ref <308>: DATABASE ACCESSION NUMBER: AK103546
  ref <309>: DATABASE ENTRY DATE: 2002-08-28
ggtgtttccctcttgccgcttctctcttcttcttcttcttgcagcggccgtgctcgccacaacgatccatggaggggtgccaattggtagcgaggtgtagtagtagtagtagcagtagcaggatggaggtggaggaagaggcgttctttgacacgcgggaggagctgctgccgccgtcgccggcggcggcattgccgtggtcgggtgggctcgacagcgtgcggcagcggagggagcggttcatgcgaagcatgggcctggagcgcagcccgagcctccgccaggcggatttcgcggacgtcgtgggcgatgtggaggaggagggtgaggtggcggcggaggcggagatcgggaggtggtcgtcgcagtcggacgagaacgagtgctccatgtcgagctggtcgacggaggagacgacgagctacgacgacggcgcgtcggatgacaactccgtgagtggatccggcaaggcgagcaggagcttcagctcgctgtcgttcatccagaggctcatgagccgcaatggcaagccttctggtgctccgaagacgatcgacaggaggagaaatgggtggctccggaggctgggcgtcagtgcttgtgttgtggatagtggagcagcagatgaagccagcaccagttcttcagatagtgagcaaattggggctgggaggtatgaaagaatcaaggttcactcgtaccggaagcggtcgaaggaattgtccgccgtgtatcaggggcaagtgatcaaagcacatgatggtgccatcctgacgatgaagtttagtcctgatgggcagcttcttgcaaccggtggagaagatggagttgtcagggtttgggctgtcatgcagtccgaggactgcaaaattccactggatgatccttcttgcgtctacctaaaagcgcggcgcaagtatgggcttgctcctgtgaatgccgagagcgagaagaaatcgaagatcaatggcctgaaaaaatccgattctgcttgtattgtggttccaacgatggttttccagatctcagaggaaccagtgcatgagttccgtgggcactctggtgatgtgcttgatttgtcatggtcgagcgataagcatctactgtcagcatcaacagacaaaactgttcgcatgtgggaaattggatatgcaaactgcatcagagtttatccacatagcaactttgtgacttgtgtccaatttaatctagctgacgagaatctcttcattagtggatcaattgatggcaaaattcgtgtttgggacattactagaagcagtgttgtggactgggtggatattagagacatagtaacagcagtttgttaccggcctggtggaaagggagtggtggttggtactattactggaaattgtcgcttctatgaaatatctgacaatctgctgaagctagaaacacaaattgctctcaatggaaagaagaaatcatctctcaaaagaatcacaggctttcagttttgcccaagcaacccaagtaaactaatggtgacatctgccgattcgaagatcagaatacttgatgggaccaatgtgattcagaattatagtggactccgaagtggttcttgccagttgtcagcaacattcactccagaagggcagcacataatttctgccagtgaagactccaacgtttatgtttggagccatgaaaaccagtatgagtgtgcatgcaaacaagcaaaaaccacacagacatctgagcatttccggtccaacaatgcagccattgcaataccatggaatggcacaaaaccaagaagcccagttccgttgtcgtcccaaattttaccaccacaaggagatactttctggtcaatgagcaaggctatcaaatacaattcaagcctctgtggaaaggattcttccattaaaaaaattgtgtcaacgcctgctgctcctggtattttcaatctgaaccaggagttcttcattgagtcctcttgcaaaagttcagcaacttggccagaggaaatgctaccatctaccacagccagtgtaaatttggacgagtcacagttcaagctcttaaggaactgtttccaaggaacatcaaactcctggggtcaagtgatagttactgcaggatgggatggcaggattaggtatttccagaatttcggtttaccagtgcatcagtgaatagtttgagcattggatggaagtaaacgcagcattggcacctcacatggcctcaagaaaagcacccgtgcacccagctatgctggcccagcgtgtggttacttggtacaagacatcacatgcttggtgctcctgctgaattgtacatggaccagcgttgtacataatcaaaccagtggtcctttgagatctctacatcagtggttgttcgtggcaggcccggtagcttgtaccttttgtagaaatctttcagtgtagatcagatttgttcttactccccccactcaattgctcattgaaatgatagaaattttagtctcatctgagtg

SEQ ID NO: 28105 - DNA, 1574 bp, Oryza sativa
  ref <308>: DATABASE ACCESSION NUMBER: AK103547
  ref <309>: DATABASE ENTRY DATE: 2002-08-28
gggaagatacagcatgcgatcaagcaagagcggttttagccatcaaagccgaaagccatccgggcattcgctctcccctcgctgctagctagctttgcttgctaatctagagctaagcaccaaatggtcctgattgttcttctcgcttctgaattgttgtgacctgtaactacaaaggcatagttaggtagatatagaaagagggggggagaggggccggaggccggagcggcgggggcggcggcgagatgaagctccacttcgtgctcaggttcctgttcggccccgtgccggtgtacttctcggcgctggccatcctcatcctgctgacgaacgcgcagtacttcgggctggtgggcgtcaccgttccccgcgcgacgaagctggcgtcgtcggcgccggtggtgagcgtgatgaagtactgcgacatcttccgcggcgagtgggtgccggactccgacgcgccctactacaaccacaagacgtgttacatgatccaggagcaccagaactgcctcaagtacggccgccccgacctcgaattcctcaagtggcggtggcgcccctccggctgcgagctgccccgcttcgaccccgtgcagttcctacagttcaaccgtcacaagtcgctcgccttcgtcggtgactcgctggctcgcaaccacatgcaatccctgctctgcctcctctcccaggtggcgtatcccaaagacatgtcggcgaacccgacgactcagaacaaggtgtaccactacagggggtacaacttcaccgtcagcatgttctggtcgccgttcctggtgaaggcgcgtgagcccgaccacgacgggccggcgcacacgggccactggggcctgtacctcgacgagcccgaccagtcgtgggtgtccgagatctcgcggttcgactacgtgctggtgtccgccgccaactggttctccaggccgtcgctcttctacgagaagcggcggctggtcgggtgcagcttctgcagcaggcagtacggcgtgccggacctgacgctctactactcgcagcgccgggcgtggcgcgtggcgctgaaggcgatcaacgacctggagagcctccgcgggcgggtgatcgtgcggatgctgtcgccgatgtcgcacttcgagaacgggacgtgggaccagggcggcaactgcaagcggacgcagccgctccggagcaacgagacggtgatggaggggcgggacctgcacttctacacggcgcagatggaggagtaccgcgccgcggagaaggtcgcggaggccaagggccggcggatgatgctcatggacgccacggcggcgatgctgatgcggcccgacggccaccccagccggtacggccacctgccgaaccagaaggtgcagctctacaacgactgcatccactggtgcctgccaggccccatcgacatctggaacgacatgctcttccagatgctcctcgtctaacgcgatcgatcgccaattcgccatcggtaaatgcgacttctactgcacagacaggattgctcttgctgttgtttcaaagcagttttgacaaggatttattcgaacttcccc

SEQ ID NO: 28106 - DNA, 2145 bp, Oryza sativa
  ref <308>: DATABASE ACCESSION NUMBER: AK103548
  ref <309>: DATABASE ENTRY DATE: 2002-08-28
gctctccccagcctcgccgcccggccgcacctcgtcccctcgcctcgccgccgcctcctcccccacgcgcgcggtcgtccagccatggggagatcgtcgtcggcgacggcggcgggaagtaagaagcggaggtccaaaaccggagctctaaccctaggggaggtgaagacgcttggcgaggagctcctctcgtcgcgcgccaacctcaaccacgcccccaccctcctcgcgctcctctccccctccgcgccgctggacctcgcgctggaggcgctcatctcgctccagtcgttcttcgtgcccctcctcccttccatcccctccgccgccgccacggccgccgcggccgcgggggatgcagaccccgagcttgtgtttaggtcctggttgcggaagcgtttcgacgagctcgttgcggcgctcgtcgagctcaccgtgtctccgcacagtgatgatgcaatcagggatctggcacttgatgcgctcatggatttcgtgaagctgggcaaggatgggagattccagtcggcaatttaccacaagtttatccacaatttgattcatgctaccgactcaattgatcctttgctagagttgcttggaccaaagtacttcatatacactgatgtttgttacttcacttacactagcttagacaagatcgccagcagtataggcaataaagccaccggttctgaaaagagtgtcttgcatagtggcgatgatgggccagaagacagaggcactatttatgtacgcaatatatacaatactttggcgcatattcctgccttggattttcaggagtcaaagtttaatatgtggagtactgttggcctttcttccaaaggagaaaagaactcatctgaggactgctctgctacttacattaacaaaaaactcaaatcaaagttcagcaaagcctggatatcctttctcaagctgccacttccgcttgatgtgtacaaggaggtccttgcaacaattcataagaatgtaattccttcaatgtcgaacccggccatcttgtgtgatttcttgactagatcatatgacattggtggtgttatcagtgtgatggccctaagtggtcttttcattcttatgacacaacatggcctggaatatccaaaattctatgacaaactctatgcattactgactcctgctgttttcatggcgaaacatcgggcagttttcttgcaacttctggatgcatgtctgaaatcttcatatcttcctgcatatcttgctgccgcgtttgcaaaaagattgagtagactaaccctttcagttccacctgctggcgctcttattattattgctttaattcacaatctactgcggagacacccgtcaataaattttttggtccattgggaaattgatgcaaatgattctgaaatctttaacgaagctagtcaacgtaagaaggttggcgctgatcctttcaacaatgaagagactgaccctgcaaagtctggtgcaatgcgaagttctctatgggaaatagacacactgcgccatcattactctcctgctgtttcaagattcgttgcttcacttgaaaatgatctcactgttcgggccaaaactactgagatgaaaataacggactttagttcaggctcctacgcaacagttttcagagatgaggtacgacggcggataaaacaagttccccttgctttctacagaactacaccaacttgtttatttcaagagtcagattttcctggatggacttttagggatcaattcaaaaacatggcagaaactagtgtagaaggcaatgggatcagtacggtagatattagcaacagctcgcccgccaaaaggttgcggatggagacctgagtagggacccagacagggtgtaccatcttgatccaagttttggaccgtttaagagggggaccaatggacctgttgtatggcctaccattttagtttcattttgtttttttaacatattggaaacaattatgaaattaagttgtttttaacagtccaccagtgttgcaagttttgaactgaaaggagtgaagtatgaattacgcgggtaatcttttgctctgattactactaccagtgaaagatgtagccttgaaagttatcaactctagagtaaatgccatttagctc

SEQ ID NO: 28107 - DNA, 2247 bp, Oryza sativa
  ref <308>: DATABASE ACCESSION NUMBER: AK103549
  ref <309>: DATABASE ENTRY DATE: 2002-08-28
ggtgggcccactagccaccgcagcgcagcgctccctccgcggcggagatggcggcggcggcggcggaggatgcggctgtgccctcgcctccgccgagcttgctgtcgctgtgcttggaggcggtggcctcccacctcaccgccggcgcggggggcgtcggccaagccggtggccggtggggccgcgaccattacgacggcggggagggcggcggcgacacgatgattacgccggaggaggtggcggaggcgctgccctgggagctcctccaccgcctcgcgtccctcctcccgcccgccgcgctcgaggcgctccaccacgccgcccacgatcggtgctgcttttcagctgccactgctgctgtttgggtttgcgggacctgatggtgatagacgtgggataaaacgatcaaggtgtgaggatttcaaccctgaatggcaagcattgttcggacttcgttggccccgttgtgataatgctggacatgatggcttgcttactgtggattggcagcgacagtattgggaaaagcatctgcaggagtgccttgacgaagctgctgagagtgccttgcttccttctttttgtggcagtattgatgagctgactataccagctaaaatcgtgagttgcattctccacaccaaggacatacctcaacagtattcaagattgtcgtttcattgcagcagttttggctgttacgcgaggtgtttgagattgcaaagtgttctttgcacagcagaaatttctgatttgttgcaaggtagcaagctggaaaagttgatgtttgtaagaattatatcagacctggaggtcattacaatggctatcacttaacgatactaagatgcagccattatttgctaaaataattgtccatactcttcttggatcatcaagtggcatacgaactcttgagatatcagaaaacaatattgcaggctggttaaagacaatggataaaagatttgcatgcttttcatcagcactggagtcaaatatttctttgaactccttgacccttcttaacctgaggggtaacaatttgaacaagggtgatattgaagatctatgcaaaatcctagttaagatgcctaacttgagagatttagatataagtgacaatccgatcatggacgaaggaatcagattgcttatttgttttatttcacggacccttcgcaaggaaaaatcactttcaaggttaagagcagagaactgtgacttgaccaatattggtgtgactgaacttcttgaatgcctttcatctgtgagtgaaccacttaatctgttgtctatagcggataatcatctgggcagttctgttgcagttgcattggcgaaatttttgggttcaggtgtaagggagctaaatattgaagatattggctttgggccactaggcttccaaatccttgaggaagcattaccagcggatgtagccctttcccatataaatgtcagtaagaatcgtggtgggattagagccgcacgatttgtttcccgattaataaaacaagcaccaggccttgtgtcagtcaatgcagggtctaacctcttgcctcctgaatctatggaagtcatctgtgatgtcttgaagcagaaaaatacatgtaacctggagcggttggatctgatgggcaacatgcatttgtcagatgctgcctttcctgcagcacttgaattcaggaagcacggaaagcaaatcctgattgttccttcacagccaggtgcctgtgctccatatgatgacgacccataagcaagacctgttatattgataatcatgtaacgtgcttcggtatctgaagcgggactcgacaatgaagcatccgcatgctggttttgtggcggtatggctcataccatggcttgtggcatgccttcctgctgggaatgggttaatgtgctggatcgagatggaaccaattgttggatcagtttgcttgccaggtattactccctggcctatttcggcctggggatattgctgcgtcgccagcatcacctgcatcaatcagtgtggtggcatctatgttggagatgggacaacgatgattgacttgtgagtgtcatgattgatggaagaatgttgtatcatcttagtgggtatggggcagtgttatgttttgatccaggaaagggaaatgattgagttcatacttcacacccctccttggaaggtgagtttttgtaagttggatcagtgtactatatctaatatcccatatcatgttgagatcc

SEQ ID NO: 28108 - DNA, 1471 bp, Oryza sativa
  ref <308>: DATABASE ACCESSION NUMBER: AK103550
  ref <309>: DATABASE ENTRY DATE: 2002-08-28
tcaacggtacaagaaccaccatcacttccctaccactccactactagccactggccattgctcctctcctcccactcttcttctccatctcctctcctctcttctctcattctcttccctgcaacttgcaaacagtgctctgcagaatgaccaaagatgaggatttcaagctggtcaagatccagacccatgtactgagggtgaacatacactgtgatggctgtaagcacaaggtgaagaagctgcttcagaagattgaaggcgtgtactcggtggccttagatgtagacaaccataaggtcacagtgactggcaatgtggactccgatacattgattaggaagctcaccagaggaggtaagcatgcagagctgtggtcacagcagaagggtggcagcaaccagggccacaggggcagcaacaaccagcagaagcagcagcagcagcaagggcagcagcagcatggacagcagcatcagaagcaaggtgccaacccaagcaaggatggcaacaagaacaacaacatcctcaaggaccagggcaagcaaggaggtgttggaggcctcatccagggcctcaaggccttcaagaaccagcacagcaagaaccagctccctgagcttgattcagaggatgatgacttgtatgatgacgaagacgatgagtttgatgatgactatgaggacgatctccgctttcttggagacaagatgagccagcttggtttcctcaggcagcaagctgcagctgcagcggcggccaatgtcaagaacaagaatgccaacactgccaccgtcaacaaccaccacaacaacgtcaatggcaagaaaggtggtggcggcggtggcagtgctggaggtggaaatcaccatcagaacaaccaccaccagaaccagaagaatcccaatgtgatcaacatggcagcagccaatgccaagatggccaatggtgcccagaagaacactggcgccatcaatggaatgatgggcctcaaccatggcctcggaacagccggtgccactcctggttttcagggctacaccggcttcaaccacccgtcctatgcttctgccggctatggagggcttcaacaacagcacctccagcaacaacagcagagcaacaatctcatggcaagcatgcagggttaccatcatcacccagcagccacggcggcgatgatgaacaacctgaggggtctaaacaacaacatgatgatgatgcatcagccacaacagcagccacagatgatgtaccaccggtctcctcagattagcccttacaccgcctactacaacccttacagctactactaccaccctggcgccgccggttatcatcccgccagcaatggcgatgtggagaccatgttcagcgatgagaataccaagggttgtgttgtcatgtagtagggatgctgttacagtgttacaatgtagaggttggtgatgaagcatgggaatggttatgc

SEQ ID NO: 28109 - DNA, 1431 bp, Oryza sativa
  ref <308>: DATABASE ACCESSION NUMBER: AK103551
  ref <309>: DATABASE ENTRY DATE: 2002-08-28
gaccttccgcctccgcaagaaagaaagaaaaagaggggaagcaaagcgcagaggcggccgtcgcagcagcaacacaagtcaggggaggagagagaggccgcgccgccgcagatctgtggccgcgttagggtttcttcgccggaatcgagcgaggaagtaggagggagaggaggaggaggaggagggcgacgagtaggaggcggcggcggcggagatggacgtggtgaaggcggcgcagctctcggggcggacgctggagaaggtggtggtgcacccgctggtgctgctcagcatcgtcgaccactacaaccgcgtcgcccgcgacacccgcaagcgcgtcgtcggcgtgctcctcggcacctcctcccgcggttccgtcgatgtcaccaactcctacgccgtgccgtttgaagaggatgacaaggatccgaggatctggttcctcgatcataattaccacgaatcgatgttttccatgttcaagaggatcaacgccaaggagcatgttgttggctggtacagcaccggtccaaaactcagggagaacgacttggatatacacgcactattcaataactatgttcctaaccctgtcctggtgattattgatgttcaacccaaggagttaggaatacccaccaaagcatactatgctgcggaggaggttaaagagaatgctactcaaaaaagtcaaaaggtgtttgttcatgttccttcagaaatagctgcccacgaggttgaggaaatcggagttgagcatcttctgagggatgtcaaggacacaacaataagcacgcttgcgacagaggtaaccagcaagcttgcagccttgaaaggactggacgcaaggctcagggagatccgtgggtacttagatcttgtaattgaagggaagctcccactgaatcatgagattttgtaccacttgcaggatgtgtttaatctgctccccaatctcaatgtaaacgagcttattaaagcctttgcagttaaaacaaacgatatgatgttggtcatatacttgtcttctcttatccggagtgtcatcgcactccataacttgatcaataacaagatgctaaacaaggagcatgagaaagccgaggattcgaagccaaccgccatacctagtgctgctgggagctgaatgtgctttatttgccttagattttggacccagtggaagccaaaagaattgtgacatgttagcatgatggcgtttgaaccaattgtctttgaccttggttttacactttcgatgtttatttcatgtacgataaggtcaacggcaaactttacattctgtgagcttaggtcatactacctcttgagctttcatcttgatcttatatacaatgtttcatggggtgcatcatgttttgtgatgcggattgtcgtacgattaacttctagtaaatgtttacttgacgc

SEQ ID NO: 28110 - DNA, 1425 bp, Oryza sativa
  ref <308>: DATABASE ACCESSION NUMBER: AK103552
  ref <309>: DATABASE ENTRY DATE: 2002-08-28
ggcgtttgagcgacggagagagttgcatatagagagagagagagagagaatgatggattagctagctagcttgttcctccgtcggctcgggcggtcctcttcgaattggatcttcttcttctactcacatacacacacactcgatcttgtgcctctgcagcacacggtagtgttggttgatggcaaatcctagtcgtcatagcaggtcaggtgatggtaatggttgggctagccccgagcggacgatggtgtggaggacggagctcaagaagaagcagatgaagcaggttgtggtgggcgtggtgtactacctgtgccggcaagacgggcagctggatcacccccatttcgtccacgtccacgtcccctccgactccgactccgatcatccgcggccgcgcctccacctccgcgacttcatcgcccgcctcagcgacctccgcggcgccgccatgcccgccgcctactcctggtccgccaagaccacctacaggaggaacgccggctacgtctggcaagacctcaccgccgacgacctcatccccgcgccatcaaccaaccatgaggagtatgtcctcaagggctccccgctgctccaccataactccaatacgcccgcgcagcacaggaggtgcatgacatcctttgacctcgccgactatcaccgcaccaccgaccctgtccctgtcccggcggcggcgcagcagtccttaattggcattgatgagatatcacctccaccgtcttcaagcagccccgacgacaccaccacccagcttgttaccctgaagcagaagcaacaggaggaggatggctgcacgccccagcaacaagcggcgacgacaccggcagggcggatgcggacgtcggcgatgctgatgaagctcatctcgtgcggcgcctcctccatcaaggagctgcagggccaagcacaatcacaacgctgccgtgctactgcttggcataacaacaagccggacatcatggaccaccgtgactacttcagtggaagcttgctggacaacaacacaaccacccaccctatcgacctcaccctcaggagatcatcctcttgcaatgcccacaggggacagagtagtaggcttggcgtggtggatcaggatggcgtcccgaggaggcaacagctgcacgccaaatcgacggcggcgcgcatggacagcccggagacagatcagatcagatcatagaggaggggatcagcaagctaagctaagctaagctaatgctcttgtcaggcaactcatccatcgaatgataccaaaatgtttcttctgttactagtactacactagttagttattttatttccctttttttttcatttcaacaagttagtttgttcgtttgagcgcgcgattcgatcagttggtgtgaaaacgaaaacgaaaacgatggaacacacgt

SEQ ID NO: 28111 - DNA, 1236 bp, Oryza sativa
  ref <308>: DATABASE ACCESSION NUMBER: AK103553
  ref <309>: DATABASE ENTRY DATE: 2002-08-28
ggtctcacttcaccagccgctcaatcctctcccaagaatcgatcggccggccatggcggcagcagcagcgacagctccggcggcagcggtggtgcggcgaatgaagctggggtcgcaggggatggaggtgtcggcgcaggggctgggctgcatgggcatgtcggcggtgtacggggagcggaagccggaggccgacatggtggcgctcgtccgccacgccgtcgccgcgggcgtcaccttcctcgacacctccgacgtctacgggccgcacaccaacgaggtgctcgtcggcaaggcggtggcggcggcggcggcgacggaggaggaggtgcaggtgcaggtggccaccaagttcggcatcacgccggcgtgggaggtgcgcggcgacccggcgtacgtgcgggcggcgtgcgagggcagcctccggcggctcggcgtcggctgcatcgacctctactaccagcatcgaatcgactccacggtgcccgttgagatcacgatgggtgagctgaagaagctggttgaagaaggcaagatcaaatacattggattatctgaggcctctgcgtcgacgataaggagggctcacgtggttcatccgatcaccgcagttcagatcgagtggtcactgtggtcaagggatgtcgaagaagacattgttccaacttgcagagaacttggcattggaattgtggcgtacagcccgctagggagagggttcttctccagtggagctaaactggtcgatgaacttcctgacgacgatttccgcaagagcctacctagattccagccagagaacctcgagaagaacgcggcgatattcgagaaggttaatgccatggcagcgagaaagggatgcacatcgtcgcagctcgcactggcctgggttcatcaccaagggagcgatgtctgtcccataccaggaaccacaaagatccacaacttcgaccagaatgtgggagcactgtcagtgaagctcacacctgacgagatgtctgaacttgagtcgtatgcttcagctgacgttgtgcaaggtgacaggtatcatggtacttttctgaacacctggaagaactctgaaactcctccgctgtcatcgtggagatcaggcaattaattagtcagagagattgtcatctgctgggagtttgatggagttttattgtcacaaatatagatagcttggtgtatcaatcacatgtttattatgcaaataaaagtttgtatggattg

SEQ ID NO: 28112 - DNA, 2348 bp, Oryza sativa
  ref <308>: DATABASE ACCESSION NUMBER: AK103554
  ref <309>: DATABASE ENTRY DATE: 2002-08-28
gacatccccccccccccttcccctcctcaccttcccttctccggttctcagattccacccaatccgccgctgcgtcgcgtgtgctgttcggcgaaattccaagccccaattccccacatctcatggttctctctcccatcgcctccgccgacgtcgaccgcctcctttgctgctgtcgccggtgttgttgctgtcgccggtgttgttgttgttgagggggtaacggtggtggtggtggtggtggtgaggggttagaggggctagggttgcggatttgcggccaattggttgggggatttcgaagggggaatggatctctcgcggccggaatcgtcggacctgtcgctgggtttccactcgctcggccacgcccgcgggcacgcggtcacggggccgctgcggctgttcgatgacatggaggacgccaagccggagaagagcgtcggtggcggcggaggaggagggggaggaggaggcgaggaggaggatggggaggaagggggcgaccagcacttctccctcctcggccacgcgctctgcgtcaagcgtccacgccgcgcgctctacggaggcggaggcggaggcggggcaggaggtggaggaggaggaggaggggaggcgtcctcctgctcgtcttcctcctcgtcgctgcacccggcgaagcggcaggcgacggcggagcgcggcgcggatctggaggcccgccgcggcgccgtccgcgcgtggggcaaccaggcgctggcggaggccgacccggacgtgcacgcgctgatggagctcgagcgcgaccgccaggtgcgcgggatcgagctgatcgcgtcggagaacttcgtctgccgcgcggtgctcgaggcgctcggcagccacctcaccaacaagtactctgagggccatcccggggctcggtactatggcgggaaccagcacatcgacggcatcgagcgcctctgccatgagcgcgccctcgccgccttcggtctcgaccccgcctgctggggggtcaacgtccagccatactcctgcacctctgcaaacctagctgtttacacaggtctcctcctgcccaaggaccgtatcatggggctcgagccgccttccggtggccatgtcagccacgggtactacacaccaagtggtaagaaggtgtctggagcatccatattcttcgagagcttgtcgtacaaggtgaatccgcagactgggtatattgattacgacaagcttgaggagcgggcaatggatttccaccctaagattctcatatgtggtgggagctcataccccagggagtgggattttgcacggatgaggctcattgctgataagtgcggtgcggtgctcatgtgcgatatggcacatatcagcgggcttgttgcggccaaggaatgccgtagtccctttgattactgtgatgtggttacatcaactactcacaagaatctgagaggtcctagaggtggtataatatttttcaggagagggaaaaacttaaggaggcgtactggatctttttctcaagcggatgagaatgattatgacttcgaggacaggataaattttgcagttttcccttcaatgcaaggaggaccccataataatcatattgcagccttggcgataactctgaagcaagtagcaacacctgaatacaaagcatacatcatacaagttaagaaaaatgcccaagctttggcatcagccttactcagaagaaaatgcagattggttactggtggcaccgataaccacttggtactttgggacctcagaaatttaggcttgactggaaagaactttgagaaggtctgtgaggcatgccacatctccataaataagatgccgatatatggggataatggctcaatatctcctgggggtgttcggattggaacacctgcaatgactactagaggttgcttggaagatgactttgaggtgatcgcagatttcctcatcagagccacccaaatagctagtaatcttatgaaagaacatggaaaaatgcagaaggaattcctgagaggcctacagaacaataaagatatcatagaactccgtaaccaggttgagaattttgcatcgcagtttgcaatgccaggttttgatgtatgagtgtgcatgtatgtgtacatatcttggtgaggttgtccagattcatcaggaattagcaaccgtttcactctttgccgaagtgtttctttcaacaggagcagaatagggaaagatcgttttttcttttgttggaaattggtcttgactgaagctgtacatgcatacttctgagttgtcatttatgtaacgtattgaaccttcatataacggctttgtataggagataattttcctcc

SEQ ID NO: 28113 - DNA, 1154 bp, Oryza sativa
  ref <308>: DATABASE ACCESSION NUMBER: AK103555
  ref <309>: DATABASE ENTRY DATE: 2002-08-28
gagttctccggctcgccgcgatcacacgactccacggccgcgcggcggcggcgtcgccggctgatccgcccccgcgagcgaagcggaaaggatggcggcgctgcgcgtcccgctccgcgcgatcctcgccaccccgcgcgcggcggggccgcgcctcctcctcccgctccacgcccacctcctcgtctcctcgttggatattgataggctcgctccatcaagaccagtatttaaactttgaccagacaagaggttttcaccaaatatcatagttcctgcagccagtgctcctgctccaagccccattccaaaattcggtgtgctgttttgacctcccattcttggtggcacatttatgtaggtctgtggcactggcccccttgttggatactgtggtgtaaagaaactggggtttgaagttggatgtggcaggattagtggaaccattgtgggttggtaactgtagttgcttcctggtggtgattgtcctgggcgagtggcagcggtcactggcatggagttgctgtaatgatcaacatcttgggtgtaccccttaaaatgactggaaggcattggtggataattgtaaactggaccatcttctatagctaatgtgatgccaacctgatctggatacggatggagatatcaacaaatccatggggtttgtctgacttcttcctcctaagctgaaaacttgaagtctcctcagttactcccgaaggatccttgccctgtgaaaatttatcaaagtactccttcatctggatgactgcagttccctggagatgctcccttagaaatacgggctctctcctgtaaacttcaacttacttgctgtttggatcaatccatgcaactgaaaaccactgtggattcaacaatgttgatctgcggcctaaaccacgcgcggagattatgcagaactcgactgatattttcgtcatttctgtgaagaggaaagttggggtggtatcagaattgtgatcccgacccagggaaatgttgcgggatttgtcatcccataggtaacttttagggctttaccttgctacaaagttattcgcgaacttgcttcgtgtttactctattgcttcagggtcatggaatcaattctaaagttaggcactatgagggagaaaaggatagttgat

SEQ ID NO: 28114 - DNA, 1051 bp, Oryza sativa
  ref <308>: DATABASE ACCESSION NUMBER: AK103556
  ref <309>: DATABASE ENTRY DATE: 2002-08-28
gacaatctgtgctttgaatttgttagagatcagggcggcttgattaagcaagattaattcattcaagattcaaccatgaggctgttcgaggagccaccggcgaagctcacccactgggctcacccggagcacgagctgacgctggccgccaccgccggggcgccgttccggtgcgacgggtgccaggagcccggcggcgacgggccgaggtacaggtgcgcgccgtgcaacttcgacctccacaccgactgcgccctcccgccggccaccctgcagcacccgctcctcttcaagggcggcggctgcaccttcgtcttcctccgcgagccccccgcgcccgccgccgccagccggcagtgcgacgcgtgcggcgacgacgtgcgcgggttcgtcttccactgcgccgaccgcgacctcgacctccacccgtgctgcgcgagcttggaggaccgcatcgtcacgggcgggggcggcgacggcgacggccgcgtcttcgagctcaccaaggcggcgtcgtcgtcgtcgtcgcggcgccgctgcggcgtctgcggggacaagtcgcgcaggacgttctggttctaccgcggccgcttcgacggcgaggacgtgttcatccacgtggcgtgcgtgaaggagctcgccgtgcggaggtgggaggcgagctaccgccgccgcagcggcgccggccagatcgcgctcgccggcgcgccgctcatggagggcgccctgcagagcctgccaaggaggacgcggcggagcggcgggttcgagcggttcagcaagatcgtgggtgtcatcgtgagcgccataatcgccgtcatcttcgggaatccgatggggttgatcgccgcggtggccggccctgacggtcttctccgcgggtagaagacgagtggaaaacagtgtgctgctaattagcaacagtcaacgagtgcgtcacgtgtagagtgttcttctctatgatttttttttcttcgtataaacccgaatgttttatttttaatcttgtggtgggtttggaatattttgaacaaagattggttcgttcatt

SEQ ID NO: 28115 - DNA, 1358 bp, Oryza sativa
  ref <308>: DATABASE ACCESSION NUMBER: AK103557
  ref <309>: DATABASE ENTRY DATE: 2002-08-28
gttgctttcaaccttttgttccacataccagtgtggaccggggttctcattgctggctctagcacgcttcttcttcttggactgcaaagatatggggtaaggaaactggaggttgtggtcgcgctattggtgtttgtcatggcagggtgcttcttcgtggagatgagcatagtcaagcctccggttaatgaggtccttcaaggattattcatccccaggctcagtgggcccggtgccacaggagactccattgcccttcttggggctcttgtaatgccgcacaatctattcttgcactctgccctggtgctgtcgaggaatacacccgcatcagcaaaaggaatgaaggatgtctgtaggttcttcctctttgagagtgggatagctcttttcgtggctctgcttgtcaacattgcaatcatctctgtctccggcactgtatgtaatgcaaccaaccttaccagaagatgctgtaaaatgcagcgaccttacattggactcctcatccttcctcctcaggaatgtgctaggaaagtcaagtgcgacagtgtacggtgtagcactcttggcttctggacagagctcgaccattactggcacttatgctgggcaatatgttatgcaggggttcctagacatcaaaatgaaacagtggcttcggaacctgatgacacgcagcattgccattgtgcctagcttaatcgtctccatcattggagggtctagtggcgccggtcgtctcatcgtcattgcatcgatgattctatcctttgagctaccatttgctctgatccctcttctcaagttcagcagcagcagcaacaagatgggtgaaaacaagaactccatctatattgttggattctcctgggtgctggggttcgtcatcatcgggataaacatctacttcctcagcacaaagctggtcggctggatcctccacaacgcgctcccgacattcgccaacgtgctcatcggcatcgtgctgttcccgctcatgctgctctacgtcgtcgccgtgatctacctgacgttcaggaaggacaccgtcaagttcgtgtctcgtcgtgagctgcaggccggcgacgacaccgagaaagcacaggtagccacctgcgtcgccgacgagcacagcaaagagccacccgtgtagtacccttccagaccggttaccggtgttggctggtttttattggatagatgtttaggtccaattttttttatataaaaaatccaatagatgtttaggtccaaatttttgaattcaaaaaccggttagcagtgataaccggctgaaattttggcccatgggagtagattgttgctttttttcttagtgattagttattggcagattg

SEQ ID NO: 28116 - DNA, 1413 bp, Oryza sativa
  ref <308>: DATABASE ACCESSION NUMBER: AK103558
  ref <309>: DATABASE ENTRY DATE: 2002-08-28
gggacgggaccgaggacagatcacatcaccacagtgtgggtgtaattaaggttgggaaacgagtaattagcttaggttaattaggattcgatccatcgatacgatggcgttgagaagaatgggcatcattcttgtgctcttggccattgctactctgctctcgccggcagtgtccgcacggttcatctctctgcccaccgaccatcttccaatcactacgccgcccctcgccgacggcctcggcttcgacctctacagcgactcgtgcccgcagctggagaccaccgtgcgctccgccgtgcaggcggcgctccagcaggagatcgccctcgccgccggcctcctccgcatcttcttccacgactgcttcccccagggctgcgacgcgtcgctgcttctgacgggagccaacagcgagcagcagctgccgcccaacctgactctgcaaccacgggcgctgcagctcatcgaggacatccgcgcccaggtgcacgccgcatgcggccccaccgtctcctgcgccgacatcaccgccctcgccacccgcgacgccatcgtcgcctccggtggtctgccctacgacgtgccgctaggccgcctcgacagcttcgcgccggctcccagcgacgccgtcttccagctcccgcagcccacctccgacgtctccacgctgctcagcgccttccagacccgcaacctcgacaacgtcgacctcgtcgcgctctccggcggccactccatcggcagggcgcgatgcagctccttctccaaccgcttccgcgaggacgacgacttcgccaggaggctcgccgccaactgctctaacgacggcagccgcctgcaggagcttgatgtcaccaccccggacgtgttcgacaacaagtactacagcaacctggtggccggtcagggggtgttcacctccgaccaggggctcaccggcgactggcgcaccagctgggtggtcaatggcttcgccggcaaccactggtggttctacggccagttcggcagctccatggtgaagctgggacagctccagggtccttcagggaacgtcggcgagatccgccgcaacagctgcttcgtgcccaacagccagatcatccttgcggccgccggcgacgatggcttcacggcatctgcttgacatcatcacgtcaaaagtcttgtgttgtacaagactcgatcttgttcttgatctgagcactagctagccgtctcgtgcgtgcatgataatactgcgtacgtactttgtagtgcagtgcgtcccacgtacgtgacgtatagtttaataagagtatctttaatctgttgaagatgccttggctcgtcgtcaatcctttgaggtacgatcgagagatgtttgagaattataatactcaatccgtttccaaatatttgataccgttt

SEQ ID NO: 28117 - DNA, 2918 bp, Oryza sativa
  ref <308>: DATABASE ACCESSION NUMBER: AK103559
  ref <309>: DATABASE ENTRY DATE: 2002-08-28
gagtaacccacgctgcggcgctccccccacgccaccaccaagcaactgttcggcggaatgccacactagaggcgagacccaaggacacgctccccacgccgcaaacaaagcgccgccgccgccgccgccgagatgaagggagcaatgccgccgcggccgttcatgatgccggggcctgggggcccgatgcccccgccgcagcagttcggcctggtggagacgcgcccgccgctggccgccgtgctgcggccgcggttcaacatcccgggcctccacccctccgccgccgcggcctccgcggcgggcaagatcgcgtccacctacgaccttgtcgagtcgatgcggttcctctacgtgcacgtggtgaaggccaaggacctccccgctgtctccgccgccggcaccatcgaccccttcgtggaggtgaagctcggcaacttcaagggcaccacgccggtcctcggcggcaaccacaacccgtcgtggaagcaggtcttcgccttctccgcgacgcacctccaggcgcacgtgctcgaggtggccgtcaaggccaaagatctcgccggcggcgacgacctcatcggccgcgtggggttcgacctctccgaggtgccgatccgtgtgccgccggactccccgctggctccccagtggtaccggctcgagaacaagcgtggcgagaagacccgcggcgagatcatgctctccgtgtggctggggacccaggccgacgaggccttccccgacgcctggcattccgacgcccatgcggcggccggcccgggggccgtcgcctccacgcgcgccaaggtatacttctcccccaagctcgtttacctccgcgtcgccgccatcggagcgcaggacctcgtgccgctggacgcgtcgcgccccgcgaacttctgcgtcaagctgcagctcgccgggcaggtgcggcgcacgcgccccggcgcgccgcccggcacgttgaacccgatttggaacgaggagttcatgttcgtcgtgtccgagcccttcgacgagccgctgttcgtcaccgtcgaggaccgcgtcgggcctggccgcgacgagcctctcggccgcatcatgctgcccctcaacgccgcaatgccgcgccatgaccacttcggcaagccggtggagccgcggtggtacagcctcgcgcgccccagcgacgatcctgacaagaaggaaggcaagttcgcgagcaagatacagcttcggatgtcgctggactttgggtaccatgttcttgatgagtccacctactacagtagtgatctccagccatcatcgaagcacacacggaagccaagcattgggatccttgagctggggattcttggagcacgaaacttgataccaatgaaggggaaagatgggcgcaccaccgatgcttactgtgttgccaagtatggaccgaagtgggtgcgcacgagaaccattctcaacactctgaatcctcagtggaatgagcagtatacttgggaggtgtttgatccttgcacggtgattacagtggtggtgtttgacaataaccagattggcaagaatggcgatgcccgggatgagagtatcggcaaggtgagaatccggctctctaccctggagactgacagggtgtacacccatttctaccctttgttggctctcaagcccagtggccttaagaagactggagagttgcatttggctgtgcgatttacatgtacggcatgggtgaacatgattgcgctgtatggccgtccattgctgccaaagatgcactacacacagccaatctcagtgatgcagttggattacctgaggcaccaggcaatgcagattgtcgcggcgaggcttagccgtgccgagcctccacttcgcagggaggttgtggagtacatgctcgatgtgggatcgcacatgttcagtctccgccgcagcaaggccaacttctaccgtatcacctcgctgttctgtggttttgcagcgacggccaagtggtatgatggcatcagaagctggcgaaacccaattacaaccgtgttggtgcatatgttgtttctaatactgatctgctacccagagctcatcctgcctaccatcttcctctacatgttcatgattggattatggaactaccgttacaagccaaggcatccaccttacatggacactaagctatgccatgctgagtttacaaacccagatgagcttgatgaggagtttgattcattccctagcagcaggccagcggacattgtaagaatgcgctacgatagactaaggagtgttggaggtcgtgtgcagacagtcgttggtgacctggcgacacaaggtgagagagcccatgctttgcttagctggagagaccctcgggccaccgccatcttcatattcttgtccctggttgttgccattgtgctgtatgtgacaccattccaggttctgctggttattgcaatgctatacctgttgcgccacccccggttccgcagcaggatgccctctgtgcctttcaacttctacaggagattgcctgccaagtctgatatgctcctttgagcccaatgcattgagaacaagagaaaatggaggaaaccctgtaactttgtttctctcttccattcagttccctactgattagcatcagatcagatgtgaatatacttaaggagttggtaaattagaggcaagttagcggccagggaataatgtgttcattcgaatgttatttgctcagataggcagaaagaagggattgactggaccccttcgagtttgggggggcagagtttgttaatgtcgtgtttcttggggtaagaacaataggcaggcgcaagctaatcttcagtgtattttgtttatggatttgtgccaattttgttattttcttcatgtaatcatgtactacctgttggatgatgatgttttgc

SEQ ID NO: 28118 - DNA, 3185 bp, Oryza sativa
  ref <308>: DATABASE ACCESSION NUMBER: AK103560
  ref <309>: DATABASE ENTRY DATE: 2002-08-28
ttggtgacattgtcttatttggtaacaaggaccgtctgcacatcggaaaggagttgtcaaaagtatatttggatgatcgtgtccataagctgctgaggtatttcaaacgagaagatggttggaaggcacgtgtggattctgtcatgaaattccttatgaattgcatttctcgttaccaaatgtccctagatatacagcaggcaagcagtgatggatgcaatcttacctttaagaagtatttcacaagtaaattcagcacattagtaaaagaattagcaaggtgtattgatacattctttgatcatcttccaactgattccctgggcaggaatttggacaggatgatgtttgccaaaagtttgttagataaattgcaacaactgctgtgtgcagatgatgtctctgatgagcttcttttcacaattttcaagccttccgatgaacctattgactcttttgatagccatgaccagacagatgatgcaactgttgatcttcatgaccatgatatctccctagatgaccctttggagataaagtctctttgtatcaaaaccctgatggatctttcaaaaatgcggcttccttgtgaagacaatgagagttcgattcgggacttatgcttgaaacgagcgaaactggtattctgcactgcttctagttcatttgagttgttcaggttgcaaaacgtgatgcctataagcatcttggttattgatgaggcagcacaactaaaagaatgcgaagcactggttcctctcttgctcccagggatagagcacattctgctgattggagatgaaaaccaattatcatcattggtaaagagtaagattgctaaagatgctgactttggccgaagtctctatgagagattgtgtacaatgggttatagaaagcatttgctggaagtacaatataggatgcaccctggcatcaacaaatttccaaatgccaacttttatgataaccgaatttctgatggtcccagtgtccaacaggaagactatatgaagagttatctccctggccctatttatggtgcttattcattcattcatattgaaaacgatatggaaatgcttgatgaacttggccagagttccaaaaatatggttgaggttgctgtagcgaccaatattgttgaaagacttgcaaaagagtgctctgagaagaggcagcgaaccagccttggtgtgatatctccatatactgcccaagtaattgcattgcaagaaagacttggaaaacagttcaagaatcatgagtttctgtctgttacagtaaaatccattgatggatttcaaggtggagaggaggacataatattgatttcaaccgttaggtccaacaaaaatggcaaagtaggattcctctcggatgctgggagaattaatgtggctctgacaagagcaaagtattgcctttggatccttggaaatggagccactttgctggcaagcaattcaatatgggcagaattagtccatgactcaaaacgacgtggatgtttctttaatgcccttgacgacaagaatttagcagaaataattatgcatgcaaccaaggagggagagcagaggaaccaaagagaacagaggagtgcccacaatgcaaatcgatggtcatcagggtcatcgaggcatgacataattgctgctggcaacagtcgaccaatgagatggagtcactttccaggttctggaaacacaaggagaagcaatggccacgattcacgactaaatgtgtgtcacacaaaagaggacatgcatagaacacactttcagcaacgcaagtcctatagtggtgactattcacaagttgctcctcctaatcaatattggcacaatggcaacagaccatcccgtggcagttatggttatctggaagtgtttagagaacatccaaatcatcattctggtcaggactcacgtactagaagttatcatgaaaccatgtgcagtactcctcaaacaggcaatgggaggtttccttattctggatcaattcagagggagaaatcacagaggcaaactagtatccttggtgaacggcaacctttaggaggtgacggcaataaaggatttcaggatgggacttctggttatccatgccggcgcaattcttctcaaattaggccaaatacatatgaagccggtgctcctgaacttcaaagtatgaataagcacagggagttcagtagttatccacaacaagcaccatataggacttttggtggtcggggtagagggagacctacatatcatggtagaggtaggggaggatggtatgaacggaccaataaccattggatggaagaacctcatcaggtgcagaatgccacctgtaacatgccagttactatgcagcaagggatgaaaagaaactggtgcgaagcagaagcatcagattcaccccagcaggtcaatgcaaaaataagatccgaaagtgcagatcgacctcatttgcatgacgaacatggaggttatggaactgcatctcaccaactgcctgcaattaagcccgaagatgtttccgagcagcagtgtgagatgaaaacagacagctatgaggcagaagcatcagaatcaccaaatgacagcacaagagtaaggcctgaaagtgtagagcaaccttattgtcaggcacagggtgacagttctggagctgcttcccaggaaccggttatccctgagcagagagggatgtcaggtgacttgtgcgaagcagtatgccaccagagcaacacgtcaggttcaccaaacaggggcagtactgaagtaacactcgaaggtgcagaacaacctcattgccaggcgcagcctgacggttcgggagttgcttcaaatgaagcgcctgttcctgaacagcgatggacggaaggggacttgggtgaagcagcagaacctggccagggcaatgcagaaaataaagctgaaagtgcagaggcagatagctagacttttgagatcagatacagacatatagatttccagtcctttttttttttgctctgtataggatagtgttcccccttttggtttatatccccaaaatgtgtataagcaagcacgtggtgtgtaaatctttttggctcctcgacagtagggagaacctaggaaccaacctgggaagcaatacgtaaaagactagaaggtagctcaataaaaaggaaaagaaagcgt

SEQ ID NO: 28119 - DNA, 1655 bp, Oryza sativa
  ref <308>: DATABASE ACCESSION NUMBER: AK103561
  ref <309>: DATABASE ENTRY DATE: 2002-08-28
gattccgcatccccttctctcggtttctcccacaaacacaaaaccctcttctccccttctctgctaccagtagtacactacaggctactactactactactactacaccaaatcaccgcgacctccacctccacgcctccgcgcgcgatgctccgcctccgccgcctcaccggcgccgtctccggcggcctcgcccgctacctctccacgcgcgccgcgtcgccggcgcggcccccgtgggcgctgctccagctgtcgaagatggaccggtccggggcgtcgtcgcagccgggcgcgtcgctccacgccgactacccgccgtgcgtctcctacctcaccttcgccgccagcttcgtcgacccccgcctccgccacgacgccgagtccgagatgttcggcacggtctccacggacgtccgcgccacgagcggcgacggcctcgtccccgtccgcttctacgactcccgcaaccacctccccaccgtcggcagccgcggcggcgagccgatgcgcgagtgggccctcgacggcgtcgaccgcgacccggaggtgacgcggttcatctgcaacccgctcagcggcgagatgtaccgcctccccgacctcaacggcacgaagaagacctcgaggtacctccacttcgggctcctcacccagtccgatgccggtcaggggccgcctgctcggtacgcggtggcggagctcgacggcaaccgcgaggaagacggccaggggtggctcgtgcggcgatttctctcggattccggggagtgggacaagctggtgggcatgccgtccccattgccagccaggaggacggtcgacatcgaccacgaggtggtggccttcggcgaccggctatggtgggtcgatgcgagctggggcgccgtcaccatcgaccccttcagcgaccggccggagctccggttcgtcgagctgcccaaggagagcgtgctgcctgaccttgacgacgtggtgatgctaagggagcttggcaagtacaggcgcatgggggtcagcgagggcaagctccgctatgtcgaggtgtctttggggaagcagttcttgatcaggtcgttctcgctcgccgacgacgacgagggcggcgactcctggacgctggagcacgaggtggccttcggcccgatctggaaggatgagcaccacgcgtcggttcccttgggtggcatgccaaggattggggccattgatccactgaacgccaacatcgtgcacctcatagttggtgatcagatgctcagcatagacatgattaaggagagggcgattgacagttctcgtttgggttgtgctgactttcccctcctgccttgtgtactcccaccgtggcttgaatcaagccagattcctgaagggatccattggagcaagaaggccaagatgaaaagcaatactccgtcatactcagacatgtcggttcatgtagacatagaactgaagaagtgaattttatcagcttttgatctcatgggtttctcaaaattgacagacgaggtttttctggagaattaggaggcgaatggtgatggtttctgacacaccttgtgggaatgctgtgaaaagtttgggttttggggctttcctgatgaactttgtggcccctcattttgacaaattctgggaaacattttgcc

SEQ ID NO: 28120 - DNA, 2839 bp, Oryza sativa
  ref <308>: DATABASE ACCESSION NUMBER: AK103562
  ref <309>: DATABASE ENTRY DATE: 2002-08-28
ggagtctccatgccgtgctcgcgctattaatgtggtggtggtggtggtgaacggaggagggagggagcggcgcgcggccgtggcggtggaggtggaggtgcggaaaagccgcggcgttgttgtcttgcgtcgtcgtcgttgtggttgtcgttcgtgtttgggggggagcatagtccattggggccttgcaagatgattgaggggaggaggcactccgttgacatcccgatttcgagggctctactggccgtcatgaggtccagatctctgagggaccctgagaccaactcgctggccaagttctcggcgaagaagaccatctgggagggttgttctctcgaggaagatgacctggaggagagcaattatggtaggcacagctttagttacaacatgtatgatcatctccagaggaggagggaggagtttggggacagcgcgaggtctggtcggctggtgaactcgccgatcaacatcatcaaggccaatgcgagggtcaaggcggcgcttcataaccagacctgctcctcggtgatctcggggatgtcaagggcaacaaaggacagggcatcctctttgatgattgaaggagagcaattgggtcggagggagggagctacatttcaagaaagcgcgagaagtttgcttcaaaagtaccggcccaaggctttctctgagctggctggacaaaatgttgttgctcagtctctttcaagtgctgttttgaaaggaaaacttgctccaatctatctcttccatggtccacatggcataggaaagacatctgcagctagaatatttgccgcatcactgaattgccactcttcaggtgggaaccagccttgtgggcactgtgaggaatgcatggccatattctcaggaaacagtagcagtgtgatagagattgatgcttctaaactggattgcaaatctagagttgctgccttgctgaggaatgcctgtgaagttcctgcttcttcgcacttcaaggttcttattgtggatgattgccaacacatggataaggagggatggtactctgtctacagtagccttgaaggcatccctgacagctcaatctttgtgatgatcacatctgacattgataaactgccaagtaattcagttggatggtgccagagctacaggttttgcaaggtagacgaagcagagatcgccctccgattgagtaggatttgcataaatgaaggtatggagttcgaggccgaagcactggagcttattgctcgcaaggccaacggttccattcgagatgcagttcaaatgcttgaccagcttactctgctaggaaaaaggatcagcaaatcagtaacatgacctaataggcgatgtctcagatgaggagttgcttgatcttcttaatctggctttttcatcggatgctgctaccattgtcaggagggctagggagcttttgagctcaaaggttgaccccctgcagttattagctcagcttgcaaatcttatcatggatattttagctgggaggcaccagtcagattcccaagaagttagaaaggttactggtaaacatacatcggctgaaattgatgtgcacaaacttagaaatgcactggaaatactttctgaaactgaaaagcagctgaaaaccacaaagaaccagtctacatggcttacagcagcgctgttacagtttaatatgagagagccgtactgcctagatgatgctgcagtttcaagcatgttcacagagagtcagacagatgatggggctgctatcttgaaagacgaaagcttagataccagttctcatctttgctatcagaacaaaatcggttgtttagatatgaacttaggagatccagatgtgctcgagaccatatggattaaggctcttgagaactgcacgtctaaaccacttcatagtctgttgagaaaagatgggaagttgtcatccctgtacaccactcaaggtgtagcagttgctgagctgcagttctgccaccccgaggatgtacctacaacagagagcttttggaatccatttgtggtttctctgcagaatttgctaaagtgcaatgtggatatcaggatcaatctttccccaatctccaccagcaacagagttgtatccaagaattcatcagtaagcctggtcatgcaatccagagaagatcaggagacagaagatccagttgccgcaggttgcagaacagtagcttcatcaagaaaagagtgcccttctccactcgcggtgcaaccaaaggagaagccgtcgcacattctggggtgcctccatgctacagatggcgacgcggtggataccgagtcgaggatcttgagctatcagaagatttcagtcatacctgaagcatccactccaggaaatggttccttcaaagctggagggcacacaccaaaggttgacgaagccagagctcgccgaggctgtttctcgaagcttctacagcgccgtgctggtgctccttatcaaaatggagctttgcctcgcaggggactgttcaaatgctgtttctgcaagatcagaccagactgcaagacgaaagtggaagaaactgatgggttccaagggcacagtaaaaactgaaacaagggttgatgatcaagatgatgaatttcatttggttgaagctgactacaagttgtccattcttgtatactgttattttagatgggctctgggttaagatcacctcagtttagatgaaagtatgtgaatctgttaactgcatctctcttgtgagttctgacacaatagatgcgcatcactgactgaaatgttttgaacatctctggtagtagctcaatgattgaccatcagttggatcacatatcc

SEQ ID NO: 28121 - DNA, 1422 bp, Oryza sativa
  ref <308>: DATABASE ACCESSION NUMBER: AK103563
  ref <309>: DATABASE ENTRY DATE: 2002-08-28
gactcctctcgtctcgcgtgagtactcgcgacctcaccgccggcggcgacgagcggcggcggcggcggttggggaaggaagggggagggagagcaggaaatgcggatgctgtccaaggcgtgctcgctcgtggcctcctccctcccgcggtgctcatcctccgctgcccccacgatcagagggcagccgtcgttgctgccaagcgtgcgcaaggaatggcttggcaagccgctgctgtacggaatcggcacgctgctcgtcatgcctctgaggacgctgcacggggtgggacggatgtttggcgctgggcggttcctctgcaacatgaccagcgtctcgtcgtcgctgcaaattgagctcgtaccctgccttcaagataactatgcttacatcctacatgatgttgatactggaacagttggagttgtggacccttctgaagcaacgccaatcataaatgcactagaaaaaagaaaccagaacttgacctacatactgaacacccatcatcactatgaccatactggtggcaacttggaactgaaggcaaaatatggtgcaaaggtgattggttctgcaaaggatagggatagaattccaggcattgacataactcttagtgagggtgacacatggatgtttgctggtcatcaagttcttgtaatggaaactcctggtcatacatcaggtcatgtgtgctaccacttccctggatctggagcaatatttacaggggacacattgtttagtttgtcatgtggaaagctttttgaagggactccacaacagatgtactcttcactccagaaaattatagcacttccggatgagacaagagtgtattgcggacatgaatatacattgagcaattcaaagtttgccttgagcatagaaccaggaaataaagacttacaggaatacgctgcaaatgccgctgatctccgcaagaggaatacacccacggtgccaacaacaattgggagagagaagcagtgcaatccttttctgaggacctcaagtccagagataaagaataccctgtccatcccagaccattttgatgatgcacgcgttcttgaagttgttcgacgagcgaaggataacttttaactaaccataaaaaaggaaaatttcacgtccatgacccaattgtcatgttgaggagagaagcagacaaagaactccacaagagaaacaaaagaactacaaggtatatgatgactacataagatcgagctagtttgtttctaaaatgcttcggcaaaattgtgtcgcggtgtatgtagcttttggcagtggttgtaaaatgtcgtccaatagcagctggtgattctttctatcaactacaaataagtgtgatctgttatcatcaactctgtaaaaagaatgcgagttagagattgatagttctcccagaatctc

SEQ ID NO: 28122 - DNA, 2581 bp, Oryza sativa
  ref <308>: DATABASE ACCESSION NUMBER: AK103564
  ref <309>: DATABASE ENTRY DATE: 2002-08-28
gatttttctactgcttttactgcgccccaaatcaacccaccctccgcggcggcggcgcgattactcccgtgctcgctcacttaaccctagctccctcgccgccgccggcgatgtcggcgccgcccgcgccgccccatccccagccggaggagctggaggtggcggaggaaccccccgccgcggcgggaggagtggggaacgacaaggtgctcgcggcggcgcagcacatcgtgaagtcgctggccacgtcgaagaacgccgcggacgacatgatccgcatcctctccggcttcgaccaccgcttctcctccatcaccgccgacctcttcccctcgcccttgccgtcgtcgggcgccgggcccaccccgcctccgcctccgccgccgcggggggcgttcgaggccgcggagaggctcatccggcagtgggacgcgacctcggagctgctggtgttcgagggccccgagggggacgtcgccgactacctcgaggcggtcgacgtcgccgtcgaccagctgctctccggggtgggggccgccgccgccgacgccgaggccgaggcggcgggcgtcgtggtgcagctcgcgatggcgcggatggagggggagctccgccacctcatggtccgccacgcggtgccgctggacgcgagcgggctcttctgctcgctgcgccgcctctccctcgagtccatggacgacctcgacacctcctccgagttcgatcccatcaccccgcacagcctggagggcggcccggacaccgctcgcaacgccagcctcgtggggaaccccttcgacgaccaggtgttcgacctggtgcgccctgaggccattgacgatctgcgctccatcgctcaaaggatggaccgcgcggggtatgccagtgagctcgagcaggtctactgtggcgtccgacgtgacctgctcgacgagtgcctcgcggtgctcggggtcgaacgcctcagcatcgatgaagtgcagcgcatggagtggaagcttctgaatgacaagatgaagaaatgggtgcatggggtcaagacggtcgtgcgttccctgctgaccggtgagcgccggatctgtgatcaggtgctcgccgtgtctgatgagctgcgtgatgagtgttttgttgaatctaccaagggttgcataatgcagattcttaactttggtgatgctgtggcggtgtgctctcgctcgccggagaagctctcccggattcttgacatgtatgaggcacttgctgaggtgatccctgaactgaaggagctgttctttgggaattatgggaatgatgtaatctgtgatttggagggggttcttgaaaggcttggggacgcagtgaagggcacacttctcgagtttgggaaagttcttcagcaggagtcatcacggcggcctatgatggctggtgagatccacccaatgacacgttacgtgatgaactatcttcggttgttggttgtttacagtgatacgcttgacaaactcttgggtgacgattctgctggagatgttgatcatagtgatacgcatagaggtggtgatgatgaggaggagtatttggagagcttgtccccacttggacgacatttagtgaagctgatatcttatctggaggcaaatttggaggaaaaatcaaaactgtacgaggatggtgcactgcaatgcatattttccatgaataatatactctatattgtccaaaaggtgaaggactctgaacttgggaggattttaggtgatcactggatacggaggcgccgtgggaagattcggcaaaattcaaagaactaccttaggatatcatggactaaggttttgtcttttctcaaggatgatgcacacggcggcagaagcggaagtggaagtggtagtgggaatagctctaggatcaaggagaaattcaagaacttcaacttggcctttgatgagatatacaggagtcaaacgctctggaaggtaccagatcctcagcttcgtgaagagctcaagatatctatctctgaaaatgtgataccagcataccgtgctcttctgggaagatatggtagtctagtggatagcggaaggaattcaggtagatacatcaaatacaccccagaggacttggagaatcagctgtctgatctatttgaaggttcactagggcctgccaaccattctaggagaagatagtagctcccatttgactaaatttggtgacaggtatgcttttgctacaagggatgctatgtgtccgaactgctgagtcatcacatggactgattggtgccttttgagtttagattgtccccttggttattacaatattgtaatactatacaaggatcccttcgtttttctccatcagattatatgtaccaagaagtgatgtacatacattgctttttcagtgtgttcatatccttgcacacttcatttccatgatccagtacctttgcactttgtagggtggccagttcttggaatagatcagacaagtaataggcatttgttgctggagcaatcttatctggcaagatactgatatgaattaaatacatttattgtcgattctgaaataaacgtaattttagttc

SEQ ID NO: 28123 - DNA, 2832 bp, Oryza sativa
  ref <308>: DATABASE ACCESSION NUMBER: AK103565
  ref <309>: DATABASE ENTRY DATE: 2002-08-28
gatccattgcaacggcaacatacacacaccaccaccaacatagcttcttttgtcactgactacagtatcacagaatgctgggagggctcaaggacaagctgacagggaaaaatggaaataagatcaaaggcttggctgtgctgatgagccgaaaattactggatccaagggacttcactgcctcgctcctcgacaacgtccatgaggtctttggaaacagcatcacctgccagcttgtcagcgccactgttgccgaccaaaacaatgagggcagggggatagttggatcagaggcgaatctggagcaggggttgacagatttaccatcggtatcacaaggggagtccaagctcacagtgaggttcaactgggagatggacaagcatggtgtgccaggggccatcatcatcaagaaccaccacagtaccaagttcttcctcaagaccatcaccctccatgatgtccctggctgtgacactattgtgtttgttgccaactcctggatctaccctgttggaaagtaccactacaatcgtatcttctttgcaaacaattcttaccttcccagccaaatgccagaagcactgaggccataccgtgaagacgagctgaggtacctcagaggggaggacaggcaagggccgtatcaagagcatgaccgcatctaccggtacgatgtttacaatgacctcggtgaaccagacagggacaacccacgccctgtcctaggtggctcgcagaagcacccctacccgcgtcgtggccgtactggccgaattccgaccaaaaaagacccaaactcggagagcagattatcactgctggaacaaatttacgtgccaagcgatgagcgcttcgcgcacctcaagatgtcagactttgctgggtactcgatcaaggcaattgttcagggcatcttgcctgccattcgcacatatgttgatctcacacctggtgaatttgactcgttcgaggacatcttgaagctctacaggggaggcctgaagcttcccagcatcccagcactagaggagctgcgcaagagcttccctgtccaacttatcaaggacctgcttccggttggaggcagctacctgctcaagttccccaaacctgatatcatcaaagagaacgaggttgcttggaggacagatgaggaatttgcacgagagattcttgctggtctgaatcccatggtcatcaggcgtctcacggaattcccaccaaaaagtactcttgatcctagcaagtacggtgaccagactagcacaatcaccccagctcacattgagaagaacctcgaaggcctcagcgtgcaacaggcactggatagcaacaggctctacattctggatcatcatgatcatttcatgccattcctcattgacattaacagccttgatggtatcttcacctatgccacaaggaccctgttgttcttacgtgatgatgataccctgaagccactagcaattgaactgagcttgccacacatcgagggcaacctaacatctgcaaagagcaaggtccatacacctgcatcaagtggcattgagtcttgggtgtggcagctggccaaggcttatgttgctgttaatgactccggttggcaccagcttatcagccactggctcaacacacatgctgtgatggagcccttcgtgatcgctacaaaccgccagctcagtgtgacacaccctgtgtacaagctcctccagccacactatcgcgacacgatgacaatcaatgcattggcacgccagacactcatcaacggcggtggcattttcgaacaaactgtctttcctggcaaacatgctctggcaatgtcttcagcagtttacaagaactggaacttcacggaacagggccttccggatgatctaataaagagaggcattgccatcaaggacccatcaagcccatccaaggtgaagctactgatcaaggactacccttatgcaacagatggcctggcgatctggcaagcaatcgagcagtgggtcactgagtactgtgccatctactacccaaacgatggtgtcctccagggagatgtggagctgcaagcatggtggaaggaggtgcgggaagtcgggcatggtgatctcaaggacgcggactggtggcccaagatgcagagcttgcctgagctcaccaaggcctgcaccacaatcatctggattgcatcagcactccacgcagccgtcaatttcggggcagtacccatacgcgggctatcttccaaaccgtccgaccataagccggcggccgatgcccgagccgggttccaaggagtacacagagctggagcgagaacccagagaagttcttcatccgcaccatcaccagccaattccaaaccattctcggtgtctcgctcattgagattctatcaaagcactcagcggatgagatctatcttgggcagcgtgacacgccagagtggacatcagaccccaaggcactggaagcattcaagaggttcagcaggcagctggtggagattgagagcaaagtgttgaacatgaacaaggaccccctgctcaagaaccgggtcggtccagccaatttcccctacacactgatgttccccaacacgtcagacaataagggggcggctgaggggatcactgccaggggcatccccaatagcatctcaatatgagactgctgcacgcgtcacgcgctgctgagttggtgtaggtttgtggctgttatcttaggccctagggcacaagcaatgaagctgcatagtactatttgctacaaattatgcaagaataaagttttagtgctaataataaagttactgttgtagtgtttgtccct

SEQ ID NO: 28124 - DNA, 2868 bp, Oryza sativa
  ref <308>: DATABASE ACCESSION NUMBER: AK103566
  ref <309>: DATABASE ENTRY DATE: 2002-08-28
ggtcttcgtcttggatttgcttactcttcgagaagcttctagaacataaaggacctaggcagggggcccaatctaccgtgccaagtcttccactcctgcttcttcccaccagccggcggcaccggcaagagttggccgccggccgccgcgtcggggaaggaggcggcgccatttgctaaccactccgccctggcctcaaatccaagatccacagatttggtgctcgccacctgttcgacgtaatgccgcacccgcgaccgcgaggcgggggtgatcggcttggcgccctcccggacgaggccctgcagcacgtgctgcccttcttgccgttgccggaggccgtgcggaccggcgcgctcgcgaggcgctggcgccacctgtggaagtccatgcccgtcctgcgcattaccggcgaggggagggtgctcaaccggagcggcgtcaggaggctgaacagattcgtgaaccacctgctgctcctccgtgaccgcagcgcgcgtctggatgcgtgtgagataaacctcggtacgttccggagccaggatgatccacaaattaacctgtggattcgccacgtgctgctgtgtgaagctcgagaccttcgggttcatctaagcattgataacaacagctttgaaatggaaaacctggcattagtctcccggcatttgacaagattggagctttccaatgtggtgctaaaagaccacttcctcaatttctcgagctgcccagcacttgaggaactagtgacgaggaattgccatattgaagctgaagagatcttgtctgaatccctgaaatggctgaccgcagttgactgtgtattttcttcctatccccggactcgaatttcactcccaagtcttgtcgcactggagctaactgagccttgggggagcactcctgttctggaaagtatgccatctttattaacggcatctataaaactcactgactgtgatgaccattgtggtaaagaagaatttgggggttcatgcgacgataatgcctgtgataattgtggtgctaatggggggagcagcggagattgcgtgctacttgatggtttatcagaggctaaaagcttggagctgatagctaaacctagagtgttcatattcagaagtgatttgatgtggtgtccaacatttggtaagttgaagacgttgttactcaatgagtggtctgtggcaattgatcttgttgagctgatatgctttctgcaacatacacctgttctagagaagctgactcttcaactttgcgagggacctgtcaattggatggaaaatgaagggagctacgacccaacagaaaatccgtttgcatctaagcaacttaaggtagttgaagtcaagtttgaaaagtttgatctgagagttcacaaaattataatgatcttcagtacctatggcgtaaatattgagcaaatctatatccagcgaagtgtggtacattctgaagagcctacggatgattcaggtgctggaccttctcgggttcggacaccgccaatttccacgtcggagaatgctcaattgaaaatcacgattgatcaaatgttaggtcagcaacaggagttactggcacagcaacagcaacagcagcatttcctatcccagttgcagcggcggcagcagatcctctgtgatatcacagcccagctttcgaaatatgctgctcctcccatttctcagaggcctccacaagctaatctttatccttcagatatgtcaagtaagctgatattcgacttttattacggtgaaggcaatgttagatgtggtcagaatggggtagatttgtctgagttcaagtgtatggctaggggcattgctagggctgccaaaaggagttttgaggctgtatgcaactggttgataagaggctttagaatagatccacagactcatggccttacaatttatgctatggttagccgtgaacccataggctatttttgggaactaatgcctatagattgcaccgatatatggagaagatatgtggagatggcatgcgaacgttgttggccacttgctattcttgttcatgtgtacgagaaggggaacacataggatgtggccatgggggatgacgagggaccaattattcctagtgatgtgggaagcatggaagtggaaacgacagagaaaggcaatcatgaactgcaagaaaccatggtggctgaagaacgtgggaaggacgctcaaccggcgcggagtcaggagactgaacaggtttgtgaaccacctgttgctcctccgtgaccgtagcacatgcctgaatgcgtgtgaggtaaatctcggtgcgatctggagccaggatgatccatgtatcaacctatggattcgtcatgcccttctgtgcgaaactcaagctctacaggttcatctaagcattgatagcgacagctatgaactggaagatgtggctcttgtctcccagcatttgatgaggttggacctttgcagtgtggtgctaaaagactactttctcaattttttgtgctgcccagtactgaaggagctattgatgaggaagtgctgtattaaagctcgcaaaatctcatccgaatccctgaaacggctgactgcagttgactgttcattttattcatatccccgagtacgaatttttctcccaagtcttgttgcactggagttaactggacctcaggagaatactcctgttctggaaagtatgccatctttattaacggaatctatagaactcacttactgtgatgatcattgtggtaaagaagaatttgggggtttatgtgactataatgcctgtgacagttgtggtgctaatgggggcagcagcggatattgtgcatatttctatttaaagatatcattc

SEQ ID NO: 28125 - DNA, 1918 bp, Oryza sativa
  ref <308>: DATABASE ACCESSION NUMBER: AK103567
  ref <309>: DATABASE ENTRY DATE: 2002-08-28
gtttcgcggcggcgctgctgtacctcgccgtcgcggtccggcgcggccgcggcgccggcctgccgccgggtccgacggggctgccgctcgtcggcagcttgctgtccctcgacccggagctgcacacctacttcgccggcctcgccgccaggtacggccccatcttctctatccgcctcggctccaagctcggcgtcgtcgtcacctcgccggcgctggcgcgggaggtgctgcgcgaccacgacctcgtcttctccaaccgcgacacgcccgacgccgcgtgctccatctcctacggcggcgggcagaacatcgtgtggaacccggtcggccccacgtggcgcctcctccgccgcatctgcgtccacgagatgatcggccccgccggcctcgacagcctccacggcctccgccgccgggagttcatggccacgctccaccacctgcgcgcgcggtccggcgagcccgtcaacgtcggcgcgcagatgttcctcaccgtgatgaacgtggtgaccggcgcgctgtggggcggcaacgtcggcagcgagagcgagcggacgacggtggggaaggagttccgggagctcgtcgccgacatcaccgagttgctcggcgcgcccaacgtgtccgacttcttcccggcgctggcgccgctcgacatccagggcatccgcaacaagtccgacctgctcgaggaccgcttcgacgacatcttcgccaggatcatccagaagaggaccgagtccgaccatgccgccgccgccggcgagacggcgtcggacttcctcgagtacatgctcaagctggagaaggaaggcggcgacgggaagaccgccttcaccatgaccaacgtcaaggccctgctcatggacatggtgatcggggggacggagacgacgtcgaacaccgtggaatggggcatggcggagatgctccagaacagggggacgctgcgcaaggtgcgggaggagctcgacgcggtggtggggcgcgacggcgtggtggaggagagccacctcccgaagctgcactacctgaatctggtggtcaaggagacgctccggctgcacccggcgctgccgctgatggtgccgcactgccccggcgaggacgccacggtgggcggccaccgcgtcccggcgggcgcccgggtgttcgtcaacgtgtgggcgatccagagggacccggcggtgtggaaggacccggaacacttcatcccggagaggttcttgccggcggacggcggcggagggcggaggctggacttcaccgggagcgagcaggagtacatgccgttcgggtccgggaggaggatctgcgccggcgtcgccatggcggagcggatggtggcctactcgctggcgatgctggtgcaggcgttcgactgggagctgccggccggcgagcggctggacctcgccgagcggttcggcatcgtgatgaagaaggccacgccgctggtcgccgtgcccacgccgaggctctccaaccctcagctctactccgcctagataccaaaggttttaaatctcgggctataattgtagctagctattcgaaaatgatctagctatttactctcatatgcattttagctgttatttaccgtttgagataatctaccacaaaatatcttagtctgctatttaaaacactgctagatgctgatgtcactccatcaatcaaatacactcaagtcaaatgttagtgagagttcagttatgttcggctctgttcatcggcacgaaacaatttttccgagctggtgtgttagctggagaatgtccatctatgctttcatctaggaatgtatacttaatatattttcagctaaatatgtatgaaaagataatgatatatactacaaatattgtgtgtattgccgataaataaaggatggagatagaaatttacaccg

SEQ ID NO: 28126 - DNA, 1627 bp, Oryza sativa
  ref <308>: DATABASE ACCESSION NUMBER: AK103568
  ref <309>: DATABASE ENTRY DATE: 2002-08-28
gacacccccatcccctctctccgcgcctcgcctcgccacccgcatcgccatctcgcaccgccacctcctccactctcggcggcgggggcctcatcgatggcgtcgaggatggcgctccggcccaacgacgtcacgctccgcctcaccccgcccctcgccgccgccgcgcggcgcaaccgccgcgccgccgccggcggtgtcagggtctacgccgtcgcgtccggggccgtctccaccaaggttgagaacaagaagccatttgctcctccacgagaggtgcacgtccaggttacacattccatgccaccccagaagattgaaatattcaagtctcttgatgattgggccagagataatattttgtcccaccttaagcctgtcgagaaatgttggcaaccacaggattttcttcctgatccagcctcagatgggtttcatgatgaagtcaaagaacttagagaacgtgccaaggaaattcctgatgattattttgtttgtttggttggagacatgattacggaggaagctcttcctacgtaccagactatgcttaacactctcgatggtgtccgagatgaaacaggtgcaagccccactgcctgggctgtttggacaagggcatggactgctgaggagaacaggcatggtgacctcctgaacaaatatctctacctcactggtagggtggacatgagacaaattgagaagacaattcagtatcttattggctctggaatggaccctaggacagagaacaatccttatcttggattcatctacacctccttccaagagcgtgcgaccttcatctcacatgggaacactgctcgccatgccaaagactttggcgacctaaaacttgcacagatctgtggcatcatcgcctcagatgagaagcgtcatgaggctgcatacaccaagattgttgagaagctgtttgagattgaccctgatggcactgtgcttgcttttgctgacatgatgaagaagaagatctcgatgcctgcccacctgatgttcgatggggaggatgataagctctttgagcacttctccatggttgcacagaggcttggtgtttacaccgccaaggactacgccgacatccttgagttcctcgttagcaggtggaagatatctgacctgactggcctatctagcgagggaaacaaggcgcaagactacctttgcacccttgctgctaggatcagaaggctggatgagagggcacaatcgagagccaagaaagctggtacattgcctttcagctgggtatatggtagggaagttcaactctgagcatcagacgccattgcgacttcttcgagctccagtgttactactgtccgtgcttgtcgagacacattttgagaacaataccaggtgtgtcttgctacatagttcttcaggttgaccaaatgaactgagggcatatgttcgtggtatctttgcttagagtgatagagagatttgcgtctgtgttttagctctttttttcttttctgccttttcatgtacaacttctggccgtgtggattggacatgtactgaacgtgagtctgtcgttggccgtgtcaatctgctcgtgtgtttaaactggctgctgttcaggtctgaaaattttgtg

SEQ ID NO: 28127 - DNA, 1369 bp, Oryza sativa
  ref <308>: DATABASE ACCESSION NUMBER: AK103569
  ref <309>: DATABASE ENTRY DATE: 2002-08-28
gtcccatctcgtcgtctcctccgctccttgagccatctcgcggccgaacaggggagggggcgccgatctccatctggcgagaagagcaggggaggggatcctggtgaggactacaaaggagggattcaagtttgagtctggattaagttggcagcatgtcgtcaaacaagatagagcttgaccacaaggacatggtccatgattctgccatcgactactacgggaagagccttgccacagcctcctcagactccaccgtgcagatcagcagcattggaggtgcatccgcgccatcccagctgcttgcaaccctcagcggacactatggacctgtgtggcgtgttgcatgggcccatcccaagtttggttcgattcttgcatcctgcggctacgatggccgtgtcgtagtttggaaggagggtgcagctgggcaatggtctcaggctcacgtattcgacaaccacaagtcttcactcaactccattgcttgggctccgtatgagcttggcctttgccttgcctgtggctcttccgacgggagcatctctgtcatgaccatgcgcccggatggaggatgggactccacaacaattgagcaagcacaccctgttggggtgatggcagtctcatgggctccagcaaccgcactcggttccattgttggctcaggggaacttgtccagaagctcgtctctggtggcttcgactgtgttgtcaaggtgtgggcttttgtcaatggcagctggaagctggatagcgttctgccctccgacatgcacacggactgcgttagagatgtatcctgggcacctgttttgggcctcgcaaagtttacaatcgccagtgcctctgaagacggtaaggttgtcatctggaccaaggggaaagagggcgacaaatgggaagggaaggtgatgcatgacttcgaggctccggcatggagggtgtcctggtcactgaccggaaacatactgtccgtggcggccggctccggcgatatcacactgtggaaggaggcatcagatggtcagtgggagaaggtgaccaaggtggagccataggaagcctcggctgtggcctgcagtttgcatctcatatcagattcagtcagatacatgtttctagtagcaatggaatccacgagtgtactgatagatactcaaattctcacttgttatcatcatcatctttggatggatgttgttcttacctgaacagagttgtgctgtgtctgtttagacctgtaatttactggtgcaatggtggtttcttagtactgtcaaatgagacatcagacatctatgagacgattatagtctagtttcttccttgcgctttgacatagttgaataaagcaatttcttatccc

SEQ ID NO: 28128 - DNA, 1621 bp, Oryza sativa
  ref <308>: DATABASE ACCESSION NUMBER: AK103570
  ref <309>: DATABASE ENTRY DATE: 2002-08-28
ggcgatgtgtatccttcccgagcacgcacactcgccgccgcactccacttccccaacacgccgccgccgccgccgccgcccgagctcgccgcgatgtcatggctcgcgcgctcaatcgcggctaccctctcttcttcccactctgatgaagatggcgataacctcgaggcgagcagcggcgacgaccatagggacgagcagccggacaccccgagcggcggcggcggcggagtcaagggcgacttgtcggagctgaccgactccctcacccgcggcctctggggcgtcgcttccttcctcgctccgccgcctgcgcccgccgccgaagccgcggagacggctacgggggcggtgggggagggggaggatggggctcggtcgccgcggatcgccgggatccggagcgacctggcggagatcgggggcagggtgaggagcggaatctcgttgctctcgaacgccaacgccgtggcggagatctccaagatcgcctcgtcgctcctgccgttcgggcccggagaggacgacgacgacgacgacgatgccgaggctgtgggcgtgaccgaggaggtggtggagttcgtgaggcacatctcgacccatcccgagacgtggctcgacttccccttgtttgtcaacgaccggcacgcggatgattttgaactgtcagacacacaatatggacatgcattggctatagagcgtgttgttccaagcttgtcatatcttaggaccgagctttgctctaccaatatgagtgaagcatgcttttggaagatctattttgtgcttcttcactcaaaactcagcaagcaagatgctgaacttctttcaacgccacagatcctaaaagcaagagaagtattattgcaaagttcaccgacaaagaaaaggctgggacctgatgatggttcatcacaaaactggaatgttgcatctaccaaaggtgacaacagtggaatgtctgaagcaccttcattggaagaagcaacttctgtaccgatgaatgtggttgaggctgacaagcatccgatttcagtcgctgaggtggaaataatagacaagtccgtggttgaagaagagctggtggtgaaaaatgagaccaagagtataccttctgactctgagaaggctaatctgcatatcacctcggacgatgatgataaagaggtggaggactggctgaaggatgtggctcctgtgtccagcaaaacaggcaacgtcaattcagcagggcaggaggaagacatatccttcagtgatctggaggatgaagaggatgattgagagacggctagcttaagcagcgcagccagtactagttccctcggttcaatgtcgcaaacacaagacaacggctagcttcatgaagaacatcaactgttactgaatgatcgaaactctgcagctacagcaaagggaaccgtgttgttgctgagtgacggattcatcctaattgcatgttgatgtaatgatgtatttatgttcgctctctttttgtacatagatatatacactatgtcacctgcgtgtgcactgtatatccacgatagcgtgcagcactcatacttactggattctgaatgcaagatatcctctcatttgctgtcaaatgtcttag

SEQ ID NO: 28129 - DNA, 1800 bp, Oryza sativa
  ref <308>: DATABASE ACCESSION NUMBER: AK103571
  ref <309>: DATABASE ENTRY DATE: 2002-08-28
gggcgggcggctgaggctttttgttcctcctcctgtgagaagagaggaagaggcggatcggattgggattggggatccatccatcgatcgattttgccttgccagttttcatccggctccgattccgcctctcatcctccttccttcccttgattcctctcctctcctctcccctctgagtcgggtcggggtcggggggagtagggtttctctttcgacttggcggcggcgactcaggtcggcacctacttccttcgcaactactacaacctcctgcagcagagccccgatgtcgtccaccagttctacaacgacgccagcaccatggtccgcgtcgacgacctcgctggaaccaacaccaccgccagcaccatgatggatatacactccctcattatgtccttgaatttcacccaaatcgagatcaaaacagccaactttctcaactcatggggtgatggtgtgctagttatggtatctggtcttgtacagaccaaggagtacagccaccaaaggaaattcatccagatgtttttccttgctccccaggaaaagggttactttgttctcaatgattatttccatttcgttgacgaagagcaagtgcaacctgcacctgttattgcccaggacaacttcgagaccaacatggcatccaactccgtcgtcgaacctgagtacattcacgaagaggaaaatcaaagtgctgtcccaataacatctgaagaaagtgatgctgttgagaactatacttactctgagccaccacagcaagtagtttctcagtcagacaattggggagatgagcctcttcctgaagaaccaatttcttcctttacaaatggaatggcgatggcaccggaggagccagtgcaatctccacctgttccacctcctcatgtagaggaacctgttggtgaaccagtaaagaagacctatgcctccattctaagaaccgcaaaagctccactggtgttccctgtagcccagccagccccgactagacctcaccaggcaaccgagacaaaccaggctgcacagcattcggttatgacttcgtctgtggcaaccgagaagccaaaaaccgatgtttatggtgaatttgctgtccaggatgatgaagagagcaaatctgtctatgttgggaacgtgccatcttctgtatctgaggctgatcttgagaatgagttcaagaagtttgggcggctcattcctgatggtgttgctatcagaagccgcaaggagaccggaggctactatgcgttcgtggaattcgaagaacttagtggtgttcacaatgcattgaaggcttcaccaattgaaataaatgggcggcagatatatgttgaggagcggaagcctaacagcggcataagaggtggaagaaggggaggcagaggtcgtttcggtggaggagggcgagggtatgctagagggggaggcgacaacgaatatgcgggcaaccgtggtagtggcaggccatcaaatggctaccagcgtgttcctcaccatgagaggggcattttggggagccacaacgcaagaaactaaatggttcaccaccccatggtggtggcctggtgggatatgcatatgctgcaagcatgaggttttgatccgtcaaaagggagggagagctgcataactaagaactactgggttgtttcctccgttccgttaggttgctttttttttttggttttgggttttgtcgcagcagcagtttgttgacgaagaatgtgtggtatccaactttggctagacgttttattatgatgcaaatgcccgtccttgatgtgc

SEQ ID NO: 28130 - DNA, 2764 bp, Oryza sativa
  ref <308>: DATABASE ACCESSION NUMBER: AK103572
  ref <309>: DATABASE ENTRY DATE: 2002-08-28
tggtttatcgaatcatcgttgattactcgattggttaagaaagcgaagagctttgccccaatgctcagggaagcagggacaaactgagctgtgagaagtaggtaggctgcctttcagatttcagattcttttccacatcttcccctttctccccatcactttcctgcatttgtacctgtcgctgctgattctagaaatccagaatttatttggatgaactgagaggtgtgaaagacagagacagaggagaggaggatggggttcttcttcttcgcgtcccgtgctgctgctcggttcttgggcgaggctaggatcatccaccccggcgtctccaccgctgcgcttcttgttgcagcagccagtggtggaggccttgtggcgtatgctgattctgctggagagaatgcatcatcagagacatctcaggaggctcccaggaagaagaaggttgtggttcttgggactggctgggctgggacgtccttcctcaaagatcttgactgctccaagtatgaagtgaaagtcatatcgccccggaattactttgcatttacacctttgcttccgagtgtgacttgtgggactgtagaggcacgcagcatcgttgaaccgatacgaaagatgcttgagaaggtatgccttgtgttcatcaatagaaattccgatacgaaagatgcttgagaaggtatgccgtgtgttcatcaatagaaattcttgagccatgttaatttagccatctatgttactttggctgtagttgctggagtgcagaattgtggactgacacattgattgagtggttgtgccctattgttcttttgtagaaaaggaaagatgttgcattctatgaagctgagtgtttcaagattgatgcatcaaagaaagctgtccattgccggtctgccgttggaacaaattttgatggcaatggtgattttatggttgattatgattatttagttgttgctcttggggctacagtaaatacattcaacactcctggtgtgatggagaactgctactttctgaaggaagtagaggatgctcaaaagatcaggaggaatgtgatagactgctttgaaaaagcttcacttcctaacattagtgaagaggagaaaaggaagattcttcactttgtaattattggtggtgggcctactggggttgaatatgctgcagagatgcatgattttcttgttgaggatctggtgaagctatatcctgcaattcaagattttgtgaagataacaattattcagtccggtgaacatatattgaacatgtttgaccaacggatagctacatttgctgaaatgaagttccagagagacggcattgaggtgaacacagggttcagagtggtaaaggtctctgatgatttaattacaatgaagagcaaatcccttggtgaggtatcagtaccatatggaatggctgtttggtctgctggcattggtactcgtcccgtcattatggacttcatgcaacagatcggtcaggttgttaaatttaaataaggtcgtttagtctgctggtattgaaagttgaaacttgtccagtttgcctgatcatgttttatttcaagcatttaattgaagtatccaaatgttctctcctttaacagactaatcggcgtgtcttggcaactaatgaatggttaagagttcatgagtgtgataatatatatgcaattggtgactgtgcttcaataactcaaaggaaaataatggatgacatttcaacagtatttaaaatggctgataaagacaactccggcactctaacactcagagagataaatgatgttcttgaagacatttgtataagatacccacaagtagaactgtatatgaaaagtatgcacatgcttgacattagggatttgataaaagatgccataggtgattctcacaaggagtcgatggtggttaacatagaggagttcaaaaaagctctgtctcatgtggattcccaagttaaaagtattccagcaacagctcaggttgcagcacaacaaggacactatcttgctgaatgttttaacaagatggaccaatgcaaagaacatccagaaggtccgttgcgcatgacaggaacaggatcaggacgacacaatttccgcccattccggtacaagcatcttgggcaatttgcacccttgggtggggagcaagctgctgcagagctcccaggcgactgggtttccatgggccatagcactcagtggctctggtactctgtgtatgcaaggtaagaacctgctgtcagcagcaaggccatcctctaccatctgtctgaactctactatctgtctgaactctgaagaaatcaaccatggcatctcattctactactgctctctacttcattcacagccttatctcttgcatcatgcctctgagcttactacaattcgtttagctgcaattctaccctgagagtttgtttctttcctccatgttttgtgtagcaaacaagtgagttggcgcacacggatgctggtggtatccgactggactcggaggttcatatttgggagggattcaagccgaatttagcactgccaaatgctgcatcatttcttgtagagataacattgctgaataattttgttgtctttggctgtgtttagttcgtgtgccaaaaaaaaatttttgaagtatacggacacatttgaaatattaaatgtagactaataacaaaacagattacagatttcgcttataaactgcgagacgaatctattaagcctaattaattcgtc

SEQ ID NO: 28131 - DNA, 1858 bp, Oryza sativa
  ref <308>: DATABASE ACCESSION NUMBER: AK103573
  ref <309>: DATABASE ENTRY DATE: 2002-08-28
gtgtagtttggctgcttgacctttgtactgtgcttgtgctgtggtcgcggacgacgatggctgcgcggtgctgggtatggggcttcgtcgtcgcgctcctggctgtggcggcggcggcggatggggaggaggaggaggggaagtgggagccgctgattcggatgccgacggaggaaggggacgacgctgaggctgctgctcccgctcctgctcctgcggcggcggattacggggggacgaggtgggcggtgctcgtcgccggctcctccggctacgggaactaccggcaccaggccgatgtgtgccatgcgtaccagattctgcagaagggaggagtgaaggaggagaacattgtggtgtttatgtatgatgacattgcccataacattctcaatccaaggcctgggaccatcatcaaccatcctaaaggtggagatgtttatgctggtgttccaaaggactacactggtcaccaggtcaccactgagaacttctttgctgttctcttgggcaataaaaccgcagttactggagggagtgggaaggttatagacagcaaaccagaggatcacatcttcatctattactcagatcatgggggtcctggagttcttggtatgcctaacctgccgtatctttatgctggtgattttattaaagtgttacaaaagaaacatgcttccaacagctactcgaaaatggttatatatgtcgaagcatgtgaaagtggcagtatcttcgagggcttaatgccagaaaatcttaatatttatgtcacaacagcatccaatgcagttgagaatagttggggaacatactgccctgggggggaaccatcacctcctcctgaatatattacatgtctaggtgacatgtacagtgttgcttggatggaggacagtgagactcataatctaaagaaggaaactatcgaggatcagtatgagctggttaaaaaaagaacatcaaatgcaaataagttaaatgagggctctcatgtcatggaatatggtggcaagacattcaaggatgagaagctcttcctctatcaaggttttaatcctgcaaatggcaacatcacaaatgaattgatttggccagtaccaaaggctacagtcaatcaaagagatgccgatcttcttttcatgtggaagaggtatgagcagttgaatggggtgtctgaagacaagctgagggctcttagggagatagaagacaccatagcacacaggaagcatcttgacagcagtatcgatttcatcgggaagcttgtgtttggttttgaaaatgggcctttagcccttgaggctgcaagaagctctggtcaaccattagtcgacaactgggattgtttgaagaagatggtgcgaatttttgaatctcaatgtggatcactcactcagtatggcatgaaatacatgagagcatttgcaaacatatgcaacaacggtgtctctgaggccaaaatgatggaagcaagtatcaacgcttgcggccgttacaactcggcgagatggagcccaatgactgaaggaggacacagtgcttgatccccggctatatacaggtaaaattgaataccaaaggccccggaggtttgcagacctcatttgtgtgaacttctgtatataccatggagacaacaatatagctagcgacccaacaatatggccccttgtgtgatggctaatcagtaggtgtcatatgcttgttgtacccaacaatatggcttgtgtgtgatgtggccctctgtaaattactcgattagcaatcgatccaagaatgattatgaccaaatatgtgcatgatgttgtcttcagacttgataataaacaagtaggccaattattagtggacg

SEQ ID NO: 28132 - DNA, 3564 bp, Oryza sativa
  ref <308>: DATABASE ACCESSION NUMBER: AK103574
  ref <309>: DATABASE ENTRY DATE: 2002-08-28
ggccgtcccactttccagaaacaccctccaccccccacctcaccggcccctccgcgccgcccgcacccggcgcggcgagctaggtcttcccgtcgccgggccggcgttcccaccacccggccgccaccatggggttcgacgacgacgacgaggatctcgtcgtctacgggacgccgatcgagcgggaggaggacacctccgcacgcaagcgccgggccgtcgccgaggccggccagctccgcgccctccccgcctggaagcaggaggtgagagatgaggaagggcgaagaaggtttcatggtgcatttacgggaggtttctcagctggttattacaataccgttggcacaaaagagggatggactccacagacttttacatcgtcacggaaaaatagggctgagatgaaaaagcaaagcatatacagttttctcgatgaggaagacataaaggatatgggaggtaatgccttggaaacatctcagcagtatgatacatttggttttacagctacagaacatgcccgaaagcaagcttccaaggagcagaaagagagaccatcggctatacctgggcctattcctgatgagctggtggtccctgctactacttctattggagtgaagttattgatgaaaatgggctggcgccaaggtcgttcaattagagatgcacatgctgactccttatacgaatcgcgcagggaagcaagaaaagccttccttgcactctctggtacaaaaactggtggtcaaaaaatacaagttgattcacacaagtctgataaggatgatggtgccacagaatcatttgaggagttacatgcctctggaaatacccctgtatacgttcttcatcccaagcaggacttgcatgggttaggttttgacccattcaagcatgctcctgagtttaaagataggaaaagattgcagaagtcagcgagggaccgtaatagaagtgatgtttcaatgagggggagtcttctgatttcaaactcaggacaatatgctcctggctttgggattggagcacttgaggagctaggtgttgaagatgaggatatttatgcatcaggttttgcttatgaacaaatggaagttgatattgagccttcaaaaacagccagcgatagtaattataaacttgaagacaggaaaagaggtgtcttcctggcttttaaaatcgcctcaagttctgagtacaagcttgaaagatttgatcctcctgagatcccatctgattttgatggtcgccacaagtttctaactccacgacaggatgttaataacctttctgatctggctcctcctgaggttcctgctccagaagatactagcttgagattattgattgagggttgtgccgctatggttgctcgttgtgggaaacatattgaggatttttacaaagagaaaagcaaaacaaatacacagtttaatttcctcaatgaaggagatggctgtagctactatgcaaggaagttatgggagtatcagcagaaatatattgaccagcaaaagcctgatactgtgcaatccaagtcttctgacaagttgactgctgaaaatcgtggaaagattcttggtgaaaggccccttgatagaagcactaaatcatctagctcatccttccctgcaaaggaagcaattcaactgcagtccaatctggctgacaactttgtgaagccaatatctcttgacggcctaccagagtatgaaaagcctttcagaaatgatcctgcaaagcaagcaaggtttgagcaatttcttaaggataaataccaaggaggccttcgccctgcaaatcttatacctacaagtactatgtcagatgttgaccgtgcccgggaaagactagattttgaggctgctgctgagacaattgaaaagggcaaggaaaaaaaggctatggatcctttatcattgttgggtttatctggaataaatgagcaacgttttgtatcatctactgaatcagagagatctatacctgcacgagatgagaaatcaatttatccacgaagggaggaatttgaatggcgaccatcaccaatactgtgcaagcgttttgacatagttgatcctttcatgggaaagccatttcatgttcaaaggccaagaagtaagatggacagccttatcttcatgtcagaatccaccacgaggacaaacgaagtggaaagttcgagtattgctccacagcatacttctgtggcaggagcaacagagacagaagcaaagggagctgcgactgaccctgaaattgagtccagcagtgtgcagagacctgttgatctttacaaggctatcttttctgatgattcagatgatgatatggctgaacctcttgctaatcaaccagtggatccagtaaagaccagtgaagatgccaatatggttctcaatcgtcttgttgctgaggatttcctagaatcattgggtaaagaactggggttggatgttccaccagaaaagcccacaccacccaatgtcttatttagatcagaaacaccttcaacagctaatgcaattggcatatctagaaacagaaaggcaattacttgtcaggaaataaaggagaacgagagtgctcttgacaaggaggaaattgccaatgccagtgcagatgttccatcagataatgttgaagagcttggtttgaaatatgagaagcaggagcatagagctgagaaaagcaggtcacgctcttcgcaccgtcaaacccaaagtggtagtctagattcagattcgacctctgatcagcataggagtagggagagaagatcacgccataaaattcgaagtggaactccaggttctgattcttctattgagcatcataggagtaagaaaagaaagtcacattcaaagcatagaacacgcaggagtagaagtccttatgctgattccagtgacagccaatatactaagaggaaacaccgtgagaaaaggcatcaccggactcgcaatcctgatactgattctagtgatcatgaatatgaggaaagacataaatccagtagtcgaagatcatctgataaagacagatccagaaggcgttctagacaccacaaacgttgaggaaaagattccacaaagcattcattagtgatagctacaagaagttttgagggaaaaatcagtgaagagaaatccccaatcaaggaaattctggtaaactatttcaggacacacatatggtgactgttgaggcagatattcttattaagtgctttacacaatttttttcttaattagtttgctgtcctgtaatccttgggtgcaaccattttttcttttctgcaatgtactgcatagtgccccatgttcacaacatttaattgagtcagtgggttctgtacatacatgtgcaatcatagactattagacatactaggatcttctctctattaatctacaggatgtagtgttgctgcagttagtaggatttgtaaccgccctatttatgtaacaaacttttttctccttaattaatttgcatattctccaagaaggaaaaactataggatggatgcttatggaaagattgtgttttgctggt

SEQ ID NO: 28133 - DNA, 1107 bp, Oryza sativa
  ref <308>: DATABASE ACCESSION NUMBER: AK103575
  ref <309>: DATABASE ENTRY DATE: 2002-08-28
gccatttcttcccgaacccgaacccgcacccgcctcgctcgcacgctgcctcctcctcgtcgtcctcctcctcctcgctgctccgcaagtccgcatcgcctcccccctcgatcccatctcggatcgccgccgccgcagcagcagccgggtggggctgcgcttggcgggagggaggggagggtataggataggggagatgggcggggcggtctccggcggcggcgcgggggcggcgggggcgggggcgggggcggagggggaaggggcgtacacggtggtgctgaatgtgtacgacctcacgccgctcaacaactacctccactggtgcggcctcgggatcttccactccgccgtcgaggtccatggatcggagtacagttttggagctcatgatcacccaacgagtggggtttttgaggtggaaccaaagtgctgcccagggttcatgtacagatgttcaattttcataggccgtacgagtttgaatcccttagaatttcgagatttcattcagagaatggcttcagaataccatggagatacttatcacctcatttccaaaaactgtaaccactttacggatgatctcagtaccagattgacaggaaaaccgattcctggctgggttaaccgacctgcgaagctaggtgccttttgcaactgccttctgccagaaagcatgcggttggagtcaactgggacaaagcacctcgcggactgtcatttctcagatgattcccgcacatccagcaatgagcattttgaagatgaagatcttgaagacaagcacctgctttcacaatcttctgtttctgaagatgcaattgtaaaggaagttcacaggtgacaaactgctgaggctatacagaataatttggtgtgtagtttgtcattcattttgtacattgtaattctgtattccaaaatttagtgcgctctttgtattctaagttgatattcatattattgtggccggtttattgtcatgattaattttgttcattccatttgtacaaacactgtaataccctacctactgaggctccttataggtagtctggaagtcactctgcatgtgtactcttaagtcttaaattcgtttcttgt

SEQ ID NO: 28134 - DNA, 1036 bp, Oryza sativa
  ref <308>: DATABASE ACCESSION NUMBER: AK103576
  ref <309>: DATABASE ENTRY DATE: 2002-08-28
gttgcgcacccacagtggttgttttcttggatggttgccgctgcgccctgacctcacctccctctcccccatggattactccgccatgccttctccttctccttcttcttctgccgctgcggcggcggcggcggcgtcggggtgctgcctcgacaggctgtggagggcgtgcgggggctgcggcgccgccgccgcctccgccgccgggtggacggtctgcgcgctgctcacctgcgtcttcgccgtcgtgggctcattagttggagtcttcatcggcgcgttcatggggatgtccacggaaagcggcatgctacgaggcgcaggcgtcggggtggtctccggcgcggtcttctccatcgaggccgtcgaatcgtgcatcgaaatctggagatcaagtgaatcaggaaaatacagcattatcttcgtgcttgacatcatctctagcctcttcagtggaaggattgtgtgggagaaggtcagcccagcactgcagcgcgcggtgcagagtcagatgagtctactgagtacaccattcattgacaacaatgacctttttgaaaccggaaatacaggaggcatgtcaagagatctaattaacagaatcccaaagaccacattcagcgctgcaaccaatcctgatcaggaaactgataactgttgtgcagtttgccttcaggattttggagcattgcaatttgttcgggtcctgcctcattgccagcacacgttccacgcacgatgcatcgacaactggcttttcaggcacgcatcatgcccgctatgcagggctggtgtgcatatagaccatatacatatgtaaaatagaactcgcagcgcacctggtgtattttcaggcgaatacccgtgcccgcggtccgtatcataagtatagtcttgtacacataggaggcctttttttcttcccagtctttgtgtggagctatgttccagccgcacgtttttttgttacagcaataacaagttatgtactaatatacattctgaaaaaaagaactaaactaacagtctctgaatt

SEQ ID NO: 28135 - DNA, 2546 bp, Oryza sativa
  ref <308>: DATABASE ACCESSION NUMBER: AK103577
  ref <309>: DATABASE ENTRY DATE: 2002-08-28
ggagcgccatcgcgatgccacctcccgccgtgagcacggcgccggtagctccggtcgtcgcgtcgtcgtcatcggcggcggcggcggcgccccgtagacctcgctcgctccgcctccgcgtgaccccgtacgcctccgtatcctcgtcgtcctccccttccaccttcgccgtctccatcccaccgccgcctccagcgaggcattcccgcaagcagctggtgggcagggacggcgcccccgcgaagcccgcgaaacctcgggtgttcttcctcgacgtcaaccctctctgcttccgcggatcccagcgcagcctcggcgccttcgcgcgctggctcgcgctcttcttcgcgcacgtcagcctccgcgaccccgtcgtcgccgttttggacggggagggcgggaacgagtaccggcggcggctgctaccgtcctacaaggcgcaccgacctcgtggccctggtacaggcgccgattcgcgcgttatcgatgttcttcgcgagtgcaatgttccggtcgtcagagtcgatgggtatgaggcagatgatgtagtggctaccttaacagagcaagttttacagaaaggttttagagttgtcattggctcaccagataaagacttcaagcagctgatatctgaagatgttcagttagttatgcccattcctgagattggccgttggtccttttatacgctgaggcattatgttgcacagtacaagtgtgacccaaccgcagatttgagcctcaggtgcttcataggtgatgaagcagatggtattccaggaatacagcaccttgttcctggttttggtcggaaaactgcagtgaaacttctaaagaaacatggttcattggaaaatttgcttaatacagctgcagttagaactgttggcaaggactatgcccaggatgctctagttaagcatgcagattacctgcggaaaaattatgaagttctcagcttgaagaggtatgcttttttcagtaatcatgaatattcaaatcttatgtctggttgtcctacattgttataagtacttaatgtcttcattctttgttgccatatagatggtttaatgccctactgagctgcagagcttacctacagtttcttttatcaagtctatcttgaagtgtaggtagcactcctaatagcaaatgaacttatgctttctcctagcacagggatgtaaagttcagcttgatgacagatggttatccacaagggactcttgcaacgacagcagtgttttgtctgacttcatccttaaatttaacgaagggcagaatatcagaggaaattagtgtattcttggatccatcaaataactccttgctacgggattcctgataagttattcttcttttagcggcctattgttgtagtatcatttcagaaatgcagttcattatagatgcagagtagaaatcgcattgccagcattacagtcgttttcccccaagtcactcatgccctgggctagatatagcatacgtgagatgtactgcctcttcagtttggttaatgttgtagtctagtgctaggactgtaattttgtatcagtagccgttcaaggttctagaagagcaaggagtagtatctaaccaagtaccaacccacattttgataccaagtgcgtggttatgtgcaagctatactgagtcatcaaacagctgcctactcaattcttctcgtctgtcacactatcaacatagcttaaaccaagaagattcaagaagtagcaaagtgtgcattctgaagggcagtcgtgatgatatattgatatgaagtgtcctccgatgcttttagtgagaattggatcttcagggttttttctttctggcattctgcaatgttattaaggtgtagcggcagtttagggtactactccctccggtcacaaataaataacattttgaaatgcgtacaaccaatatgtttaaaccttgattgtcaatttctgtttaaatatttcaattcagcattcaaaagtaatatggttagactcgtctcaaaaatattttcaaaatattataactttgctatacttgttgtagtataagttctatattgtaaaacaagtgcattgatgattgtgtcattatctaaaatgtcacttatgtatgaccggagtaatatgcttgtttttttagataataaagagtaatatgtttggcttgtgaaatctgctaacacccatggacagagaaccctttatttttcttcaacaggaactgtcatcattaagcgactaatgtcgcttcttcttttattaatcaaccacattatctaaaaaaagatcattggatatcctaattctgcaaccttaaacgttgcaaggataatcaacggatgaacaccgaacgttgtaaagggttttcgaaagagcatctcgttgccccgagacacgtggcctgaatctcggtgactttggtcgcgtatactcatacaaggctccaaaaagggttaatagcccaaatagtgggcatcggttttgcaaccgttgccatgaaatggaatccgaggttcagccttcaagtcatgc

SEQ ID NO: 28136 - DNA, 2166 bp, Oryza sativa
  ref <308>: DATABASE ACCESSION NUMBER: AK103578
  ref <309>: DATABASE ENTRY DATE: 2002-08-28
gaatcacaaaccaaccagattcacccaaacgccgaaccaaacttcgcatccccgaatccccgatccccaaatccctaaccctagcctcgcccgccgccaccgccaccgccgccgccgccgcgatgctccgctcgccgggccactccccgcgccacctctccccgtccccggcgccgtccacgcctcgcccctcctccccgacgccctcgtccgcctccgcctccgcctccgcatcggccctcgccgccgccgccactaccaccacctcctccaagcgccgccgcccggaggtgctcgacgaggacacctacgtcgcggccgtcgagcggatcatcgagcgggacttcttcccggacctcccgcgcctccgcgaccgcctcgactggctccaggccctgcgctcccgcgacccgctcgtcctccgcgacgcgcagctcaagatcctcgagcgccgccgccgcgcccagcgccagcgccagggcggccccgtgcccaccccgacgccggccacctccaccgcgctccgctccccgtccttcctcgccaccccctccgtcgccccctccgtcgccggcgacgagggcgccgacgtcgacgacgacgtcgaggccgcgctctcgctcgacgacttcttccgccgcttcaccagcgaggacaacgagtccttctcccgcatcctcgagaaggtgaaccaccgccgccgcgagcgctatgcccacctgctggagcctggtgaggtggcgaaggcgccccagttggaggacgccaagcgcgacaggataaccgatgggtacggcacgtcggggcagccgctgagcaccttggagggtgccaagttcacggccaagaacctgctcatgtactacccggctgaccgtggggaggccccgcttactgatgaggagcgcgccgagcggctcaaggggatgaccaaggagatcgacaggtcgaacaccaggttccatgggaagtcttctgttgatgatggtgcaaaggaggaggaggcagctgctatactttatgcgccagttgcaggttccactcccggaggtatggcataccatgatcctgataaagcgaagaagtacgatttggaggatctaaggaagactccaaacccattctacgttgagtcagggaagaatgcaaacaatgggtatagttttgtgagaacgccatcgccagcacctggcgtggatgagtcaccgttcatgacatggggtgagattgatggaacaccactgagactggacccagaggagacaccgggtggttctgggggaagtgatagggcgcatttcaagatcccacctccgcctgctcgggatgtaaaggcacatctgctgtcaagggatgcagcaaggaagataaaggagcgcactaaaatgttccacaagccaccgctaccatcgcctgtgaggggaggaagtgcaagcccaaggaccttctctcctgcagcacagaagtttgttaggaatgccattgcaaagtcctctcgtaccattgatgagtcgctccgagcgagctacagaggtacaaccccatctgcaaccactccaaagacaaggttttcaagagacccaagcttgggatcacgatctccatcgacaagacagggttccacccctccctggtgatttcaataaaactcattgttgcttatttgaccctccttttcaaaaacgaacatccgtggtgaattaacggtgttaagttagggtttataggaaatccactccagaaatgagatgtaaaatctgcaattcctgtgcaattccaccttgggcccggcattgtggacggagtacagcttccgggggcgcagccgcgcaggttgtgacagtgcacgggcacgtcttggccggggtagacccgctcgtcgtcggtgaagtagatgctgtcgctggcgcaccacggcaggtgccgcgcgtcggtgacgaacgccataccgggtccctgtattagtattagttctcatagtatgttttttgagaggaattcaatttcatctaaaattgcttggtgaagcaaacatgtaaggatttgaggaatggttcactgaggaactgataggcttgagaggaactgattggctcgagagggatcttgtctatgatatatattgaaaactttaaaatcaatatgtggttatttcagttagtatcc

SEQ ID NO: 28137 - DNA, 2687 bp, Oryza sativa
  ref <308>: DATABASE ACCESSION NUMBER: AK103579
  ref <309>: DATABASE ENTRY DATE: 2002-08-28
ggtcatcatagcttgaagctcttcctctctctcctcccatggccgatcgtcgacgccgtcggtcgatctccccatccgtagctcctcttcccctctcctcgcaccaccggcttcgcctccatccggcgagtccatttttcccctttcccctctccctccacctctaagtcaagtcaccaccaccatcatccatgccgactcatggtgagcccttgccgccgctgttccggccatctccctcactccctccacctgccactaccctcaccgggtgcgcgtcgtccgggaacacgtgtgtccgccggcgtcgcaacctctcgaccaccggagcaccggcgcccaacctctctctcctctgtgttctcggcaggaagaagaaggaaagaagaagacgggagaaggagagagaaagagaaaagaaaaagaaaaggagaacggagtgacaggtgggcccttctacagtacaatttcgtattttctagatttaattcaaatctaatctttagaagcccatatctcctacaccatagatccgattccagtcaaacttggacctaaattcatctaaattcaaaagctacattttgatatcaaatttgctattttactattttatttgaaattccttcatgccatttgaatttatatttgactttcgaatatttcctttttactccaaaatagcctttagccactaaaaagccgccggttgaaactttacgccttccatggggacgttcgcgcggtctactggccccgacgtcgaaccgttggttgtaaagcccggcagaacccaaacccaaggtcaaagtgctgctcctggcaccctacgcctcgacgcgtataacagtcggagcttcactattccctcgaccttcacagcacgccgcatagttagctctcgagctctgtgtgatcctagccgctccaccgccacccacggttgttggagtaacactccacccccaccaaacctataccaacctcctattcctctagccgatatgttgtcggtcgacaccggctagagaaaggtatcaaatctactcgttatgctctagcatcgactagcatacaaccaaccaaaccctagccgatatgttgccctacttcacaatcggcttaaataccaccaaaccctaggtatcatactgcccaaacctaccaccagccaatactagccacatactcacttaaccagttatatcctttattctccaagcaaccaaaacccacacatgaaatataagcgccagtagttgcttaatcccttctagcctccaactctctagaatatccgcataaaatatcagcaccgtaatccatataccctataaaataaaatagatagactatatcctaaaccctagccctcctaactgtttatctctttcttgctattatatggattttattgaaattggttcttcatctttcttagtagagtctattttattttggatggcaacctgtgatatttcgaggattggataataaggttgcttatctcggatttatttgcgttggagcaaggcaagttattattcctccccttgagcataattaccctatattctatatctcttttctatgcattagtcattcatgattttgaatgcgtaacctgaacatatagcaaaccagatatgctagcttttgcttagccctgcctagttaggctgcataaaaatataatgaacctagattgggacagtacgtaagatttggttgatttctgggtggctagtactgtcccggtcgatataattgccaccaaatacttatgtcaaacgaacgagtatgaccacagcttcttgaatggggacagacctagatattatgttaattagcaatgtggtacctctgtacagtggttccttttgtaagtcctcgcgcaagaggcaatcttatgccgagcagggcatcttatgatatttaccgaggcgcaggtaaatatattgattttcgctcatgagctgtgtgtgtgattttatgtaaacctggttgagatgacgggggtctctcaacccgttctctctaaaaaccccgggaacgccagaactcctctcgctgctgataacgttacgttcagagcgcatagggactagagttcatggaacaggtgccacaattgttaataacctaatagtgggccatgactaagctaatgaatattggcaagtcatggactgccggtaaagcgtacatttactgcagtaaagtgaaaatgaatctattcgaatagccgtgctcacggatttgagtatcgggactcatatggtatttggttagaaacctaattcaagattttattaaatactgatgcatttcaaacatcataggctttcttcttctacattatctgctttctgcaagtaaatctagtcctactcaaatactgctatttcatacattcatattgaatataatagcttgctgagtacattgtactcacccttgcttcaaccccatctttttcagagtccatttggagttcttatcgaggccgggagttcaatcacataagttagttcccttttaacttaatcttcaagtctaggttatttagatggtttaagtctatagtaaaacagcagagttaggtcattctaaagcttctgctgtaatagttagccacaatctcgtaaataccctattactttatgtaataatatctccttcaaagc

SEQ ID NO: 28138 - DNA, 1226 bp, Oryza sativa
  ref <308>: DATABASE ACCESSION NUMBER: AK103580
  ref <309>: DATABASE ENTRY DATE: 2002-08-28
ggcatcgagcttgaagctcttttctctctctctccctccatccatgtccggccgtcgccgccgtcggccgatctcctccttcgtagttccccttcctcttcccttgcgccactatgctggctccactccggcgaatccattttgcccatctccccttccttttccccttgaatcaagccaccaccacccctctctttaccaccggagataagctcttctactcgccgttccggccacatccctcttcctctcttccatccaccaccctccccgggtgcgcgtcgctcgggaacacaaacctccgccgacgtcgcagcctcccagccactggagcaccgccgccccactcggcctctcctctctcttctctcggctcactgtgagacagaaagaagagaacgaaaagaagaagaagaaaaggaaaaagaaaggctgacaggaggcagacttacgccgagcagggcgattgtaatatttaccgaggcgcaggtaaatatcttgattatctcgcgagctgtatgtgtgaattgtgaaaacctgattgagatgacggggggtctctcaactagttctctcgaaaaacctcgagaacgccagaactactctcgctgctgataacgttacgttcagagcgcatgaggactagagttcacggaacaggtaccactattgttagtaacctaatactgggccatgactaagctaatgattattggcaagttatggactgcgggtaaagcgtacatctactgcagtatgaatattcttaaaactattcgaatagccgtgctcatggacttgagtatcgggactcatatggtatttggttagaaacctaattgaagattttattaaatattgatgcatttcaaacatcataggctttgtccctctttattctcagctttctgcaagtaaatctagctctactaagatattatcatttcatgcattcaatattgaatataatagcttgctgagtacattgtactcacccttgcttcaaccccacctttttagagtcattttggagattttgccaaagccgggagtttaatcatataagttagtttcattccaacttaacttccaagtctagcgtagttagatggtttaagtctatagcaaaacattagagttgagtcattctatagcttctgttgtaataatagttagccacaaacttgtaaataccctattatgttataataaaatctcctttagag

SEQ ID NO: 28139 - DNA, 1608 bp, Oryza sativa
  ref <308>: DATABASE ACCESSION NUMBER: AK103581
  ref <309>: DATABASE ENTRY DATE: 2002-08-28
gctctctctctctctctctctctctctctctctctccccactcgctgcttccgccgccgccgccgccgccgccgcagcccatggcctcctcgtcggagaacgtggaggcgccgcgagacgagcagcgcgacccgccgccgtcaccgccgaaccctagcgtggaggccggggcgggcgaggagatggaggcggagggggagggggaggaggaggtgaaaaccctagagcgggcggaggagctgttcgagagggggtccaaggccatcgaggagggggacttcgtcgacgccgtcgactgcctcagccgcgccctcgagatcagggttgcacatcatggagaacttgctccggaatgtgttagcacatattttaagtatggatgtgccttgctatacaaagctcaggatgaggctgatcctttgggtaatgttcccaagagttcatctaataaggagtccatgaagagtactactaacaaggatgatagtggaagctcaaagacccccggtagcaatactgaggatgctccatccacggataaagctgatgctgaagaagggcaaaactcaactggaaaaggtcaagaggaggaaaacggtgacagtgacaaggatgatgatgagatggtgggagatgaagatgattctgatttggatcaggcctggaaaatgttggatattgcaagggctatagttgagaagagcccagatgacactttggagaaagcaaaaatcttttctgctctagctgaagtctccatggaaagagaggacattgataactcactcggtgactactttaaagctttagccatattggagaaattgtttgagcctgatcatcgtcgaattattgatctaaacttccgcatatgtttggtctatgagttggtgtcgaagatttcagatgcaattccatattgcgctaaggctatttcattatgcaagtcacgcatacaaagcctaaaaaatgacaaagatgctttgttggctggtaaagatgataacgcatcagctgctgatggaggctcagaaaagtccgctcctgagggtgagatagagcagctcagtggcattttgagtgaacttgagaagaagctggaagacttggaacaagcaatgtctaccccaagctctgttatggatgagattatgaagaggattgcctcaaaggcaggtggtgaacagaatgctactgacacaatgccagcggctgcttctttcaattcttcttcacagatggctggatcaagcaacggctttgattcgtcaactctgtctacggcagctacaaccggaagtactggaagcactgtaaccgatcttggggttgttggtagaggtatcaaacgtgctaatatcaagccaatctctgctgaacctcctcccaagagagctgcagctgattcgctctcagtaaaaggtgatagcagcaacaactcagatgttcataccccagcacaagagggcgatgattctgtatcaaagtaatgcattttaccctaggtagtaacttaatgggatctattcggtgccaaaatcctgtcttgcttaatatgtactgctgcatgtccattttctcagaagaactgccaatagggattgcatg

SEQ ID NO: 28140 - DNA, 1908 bp, Oryza sativa
  ref <308>: DATABASE ACCESSION NUMBER: AK103582
  ref <309>: DATABASE ENTRY DATE: 2002-08-28
gggtgagagagagtgctcgtcgtcgatcgcccaaggtccgggacaacccaaaaggccgcggcgacagcggagcagcagcagcagcagctcgcgccgccccccaaccggaagccatggccgcgccgtcggcgatcccccgccgcggcctgttcatcggcggcgggtggcgggagccgtccctcggccgccgcctccccgtcgtcaacccggccacggaggcaaccatcggtgacatcccggcggccacggcggaggacgtcgagctcgcggtgtcggcggcgagggatgcgttcggccgcgacggtgggagacactggtcgcgcgcgcctggggccgtgcgggccaagtacctcaaggcgatcgccgctaagattaaagataagaaatcttatctagctttgttggagactcttgattctgggaagcctctggatgaagcagctggggacatggaggatgtcgctgcatgctttgagtattatgctgatctggcagaagctttagatgggaaacaacgggcaccaatctctctacccatggaaaattttgagtcctatgtactcaaagaacccattggggttgttggacttatcactccctggaattatcctctgctgatggctacttggaaggttgcacctgccctggctgctgggtgtacagctgtattaaagccatctgagcttgcttccctgacatgtttagagcttggtggaatatgtgcagaaattggattacctccaggagtcttgaacataattactggtctgggcactgaagctggtgctccattagcttcacatccccatgtggataagattgcttttactggaagcacagaaactggtaagaggataatgattactgcttcccaaatggtcaagcctgtttcgttagagcttggtggcaaaagtcctcttattgtctttgatgatgttgatattgataaagctgttgagtgggccatgtttgggtgttttgcgaacgctggtcaagtctgcagtgctacttctcgtctacttttgcatgagaaaattgcaaagcgattcttggataggttggttgcatgggcaaagagtatcaaaatctcagatccactagaagaaggttgcaggctggggtcagtcgttagtgaagggcagtatcaaaaaataatgaagttcatctcaacagcaagatgtgaaggtgccacaattctatatgggggtgcccgaccacaacacctcaaaagggggttctttattgagcctactattataacaaatgttagcacatcaatgcaaatttggcgagaggaagtctttggaccggtcatctgcgttaaagaatttaggacagagcgtgaagcagtagaacttgcaaatgatactcactatggtctagctggcgctgtgatttccaatgatctagagaggtgcgagcgcatttcaaaggctatccagtcaggtatcgtttggataaattgctcgcaaccatgctttgttcaagctccatggggagggaacaagcggagtggttttggccgggagctaggacagtggggcctcgataactacttgagcgtgaagcaagtcaccaagtactgctcagatgaaccatacggatggtaccggcctccatccaagctgtagatttgtcattcgtgtcaagagcgacggagcacgtcattacctgaaagcaagatcaaccctgtacattcagaacggacggacagaatcttctttacagttgctcttacggtcttacaataagccttgcatggcaatagcaacttatgaattacagtatatgatactgcgtcatcaagcaagccatgtgtgtgctgtatcagactatcattcgctttgtcgagcacctgcatttgtcaccactcaccactgttaaagcaagaatgcaaaatgcaaaatg

SEQ ID NO: 28141 - DNA, 2027 bp, Oryza sativa
  ref <308>: DATABASE ACCESSION NUMBER: AK103583
  ref <309>: DATABASE ENTRY DATE: 2002-08-28
gagtatcttccccgttccttcccttggcgtaagagaacgagaaatctcccatctctcagtcgtctcccccgcttccttgcgccaagacgagtcgcggctgagcaggagaggggcgccgatctccatccggcgagcagagcaggggaggggatcctggtatagattgttgattgcttgtgcgtgaacacaactaaagcagtaattcttaccgtgtcagcgtgatctgggactgtggccaattgtaccataagtggaaacacagctgcgaagattgtcggtggtcttcgctgataatatattgggcaggctaagtttcaagttcagtttgctgaattcagcgagcctagatgtcgtttcgcagcattgttcgtgatgttagggatagttttggtagcctgtcgaggcgaagctttgaggtcaccctggctggtctatcggggcttaccggccaccatagaggcaagtctcagagtacggttcacgagctctgtgatgcagatctcataatccaggagagtcgttgggctagcctccctcctgagctcctccgcgatgtgatccggaggctggaggctagtgagagcacctggccgtcacgcaaggatgtcgtgtcctgtgctgccgtctgtaaggcatggagggagatgtgtaaagagattgtgctgagcccggagttttgcgggaagcttaccttcccgctctctctaaagcagcctggccctcgagatggaatgattcaatgtttcataaagcgggataaatctaaatcaacttatcatctctacttgtgcctgagtactgctgtacttgcggatagtggcaagttcctcttgtccgctaaaaggcaccgcaaaacaacctgcacagaatatgttatctcaatggatgcagacaacatttcaagatcaagcagcacctatattggaaaactaaggtcaaacttccttggcacaaaatttataatctatgacacacagccctcttataatggggctgtaatccctcctgttggacggagcagccgaagattcaactccaagaaagtgtctcctaagatgccgtctggtagttataacatagctcaggtgacatatgagcttaatgttcttggcaccaggggccctaggcggatgcactgtgtcatgcactccatacctgcctcctcagtcgagcctggtggcattgtccctggccagcccgagcagattgttccccgagctttcgaggagtcatttcgcagcaccacctccttttctaagtcatccatcatggatcggtccatggatttcagtagttcccgtgatttcagcagtgctcgcttttcagacattgctggaggcaccataaatggtgatgaagaggggcaaaataaggagaggccactagtgcttcgcaacaaggcccctaggtggcatgagcagctccaatgctggtgccttaatttccgtgggcgtgtaaccattgcgtcggtaaagaatttccagttgattgctgcaccagcacagcctcccgcaggggctccaactccgtcacaacctgctccaccagagcaggacaagattattctacagtttggtaaggtagcaaaagatatgttcacaatggattaccgctatccgctctcagctttccaggcatttgcaatatgtttaagtagcttcgacacaaaactggcctgcgaatgagggaaacagtgagctctaatggaggcagaactggaaatgcaacagagagcaacttgagaaatgtaatgcccaagggctctagatcatgtttgcattttgttgtgtcgtcttggctgtatttctgcttgtagcctggaactggatttctcagcctgtatgtttcacctggtagcaccatgataggtttcctttgggacagcggttcatgcattgcatttttccatttgtgtggtgtacatgcggttccggatttaagctgaaaggatccgttcatgtctttgttaagctttgcatggatgccgtgttctggtaaagaaaagggaaagattcagtgcttcactt

SEQ ID NO: 28142 - DNA, 663 bp, Oryza sativa
  ref <308>: DATABASE ACCESSION NUMBER: AK103584
  ref <309>: DATABASE ENTRY DATE: 2002-08-28
gagtttgcttttgctccacccaccaccaccgctgcttccaagttccaaccgctccctctctcgtcgctgagctctcctccggtgggcggcgcggcgatggcgggggacccggcggcggcggcagcggcggttggggcgatgaggccgtggaactacgtggtgacggcgcacaagctgacggtcgtcgcccgctcctgcgtcggcaacttcaccgcgcccgatcacctcgacctctcgaaatttacccgtattgagattggagtatctgcttactcatcagggtcttcaggtcagacagatttgcctcgaccagaatatgttccttctgtttgaacctatctattattatggacagcaaataactgtgccttgttgttagcatcaattgttgaaaaggtgttttttaaggttattcataatggctactgttgttcagataaatgctgatatacttttagttgacaagttagaatttgtcctggcagatcaactggttacatgatattcttacaactataactctgtaagaccttttctttccttaccagcctatgcttgatgcacctgtgtatggtagaattgcaacaattgagctcttccgtccatgtgtaagtttgtactctgtttctacagctaaaaaattgaaagattctccctgcctcc

SEQ ID NO: 28143 - DNA, 1312 bp, Oryza sativa
  ref <308>: DATABASE ACCESSION NUMBER: AK103585
  ref <309>: DATABASE ENTRY DATE: 2002-08-28
gggactgcacctcgcagtccggcatggctggacagatgctaccgccgattgcgcttgttgctgtggccatctgtatcaccgcggcggcggcggcgaaggtgccggcgatatacgtgttcggcgactccacggccgatgtcggcaacaacaactacctgaccggcgccgccgtgccgcgggcaaacttcccgcacaacggcattgacttccccacgtcgcggcccaccggccggttcagcaacgggtacaacggcgtcgacttcttggctcttaacatgggattcaggcgcagccccccaccgttcctcgccgtggctaacaaaaccagcaacccattgttcagggggctccagggaacaaactttgcctctgcaggatcaggcattctcgactcaacaggtcaatccatcatcccaatgagcaagcaagtgcagcaattcgccgccgtgcaacgcaacatctcagcacgcatcagccagcaagccgctgacaccgtgctgtcgagatccctgttcctgatcagcaccggcggcaacgacatcttcgccttcttctccgcgaacagcacgccgtcgtccgcggagatgcagcggttcgtcaccaatctcgtatcgctctacacaaatcatgtcaaggatctgtacgttctcggggcgaggaagttcgccgtgatcgacgtcccgccgatcgggtgctgcccctacccgagaagcctgcaaccgctgggcgcttgcatcgacgtcctcaacgagctggcccgtgggttgaacaagggagtcaaggacgccatgcacggcctcagcgtgagcttcagcggcttcaagtactccatcgggagctcccatgccgtggtgcaaagcatcatgaagcatccccaacgactcggattcaaggaggtcacgacggcttgctgcggctccggcaagttcaacggcgagtccgggtgcacgccgaacgccacgctgtgcgacaaccggcacgactacctcttctgggacctgctgcacccgacgcacgccacgtccaagatcgccgccgcggccatatacaacggctcggtccgcttcgctgcgccgataaatttcaggcagctggtggatgaccagcactagctagagcgtggcagtgtcaccgtgtaacgtagtactactaattgttgtacgtcgccgactatgtgtctgtttgtctggtgatattggtgcgtaggatatgctgggctgtgttcatcagtggcttgtgctttaggcggtggtgtagtttggatacacataccaaaatgtcatctccgttattattgttgcccttgttggcg

SEQ ID NO: 28144 - DNA, 1888 bp, Oryza sativa
  ref <308>: DATABASE ACCESSION NUMBER: AK103586
  ref <309>: DATABASE ENTRY DATE: 2002-08-28
gacggcaccaccatcgaacaaagaatagcgcgcacgcattcgcctcgacgccgcatactcgcgtccacgagccccgcgagaaacagctatccacgtcatccgcggcggccgcccgccgttttcccttttccaggcgcgactcggcggccgcacccggttgcgcacgccgctcccccccccccccccccccacgccacgctcccccgcctcgtttcccccgcgcggccgcgccagaaaggggagaaacgcttcacgcgcgcggcgcaccctagcttgggccacgatgccatccgctaacgtgcgcggggcgcagcctagcgccgaccgcaggttaagtacgctggtgcgccacctactgccttcctccgcacgaacagcaaccaccaccagcacctcctcctccgccgccgacgccgactcctccctccaagctttccccaccatggcgtcgtcgtccgtcttcgctggcctcgcgcaggcgccggaggaccccatcctcggggtgacggtcgcgtacaacaaggatcccagccccgtgaaggtcaatctcggcgtcggcgcctaccggaccgaggaagggaagcccctggtgctgaatgtggtcaggcgcgctgagcagatgctgatcaacaacccgtcacgtgttaaggagtatttgccgatcactggactggccgatttcaataagctgagtgctaagcttatttttggtgctgacagtcctgccattcaagagaatagggtggctacagttcagtgcttgtcaggaactggttctttaagggtgggaggtgaatttcttgcaaggcattatcatgaacgcactatatacatcccacagccaacctgggggaatcaccccaaagtgttcactttagctggcctgactgttaggagttaccgctactatgatcctgcaacccgtggactggatttccaagggctgttagaagatctcggttcagctccttcaggtgcaattgtactgcttcatgcttgtgcccacaaccctactggagtagacccaactttggaccagtgggaacagatcaggcagttgatgagatcaaaagcattgctgccattctttgatagcgcttatcagggatttgcaagtggaagtcttgaccaagatgctcaatcagtgcgcatgtttgttgctgatggtggtgaattgctcatggctcagagctacgctaagaacatgggattgtatggagagcgtgtcggtgctttaagcatagtttgtggaagtgctgatgtagctgtcagggttgaaagtcaacttaagcttgtaattaggcctatgtattcaaaccctcctattcatggtgcatctatcgtggctaccatacttaaggacagtgcaatgttcaatgaatggactgtggagctgaagggcatggctgataggattattagcatgaggcaacagctttttgatgctctgaaaacgagagaaactcctggagactggagtcacatcattaagcagatcggaatgttcactttcactgggctcaacagtgatcaagtggctttcatgaggcaggaataccacatttacatgacatctgatgggaggatcagtatggctggtttgagcgggaggaccattccgcatcttgcagatgcaatccatgccgcagtcacaaaactgaagtgaatgatggtagcatagcagctccctccaagaataacatcttaaaaccatccgcagcagtgttctgaggattcagacagtgatgtttgctggctgagcacatcctggaagtttccttgtaatagactcgtgtgacttgcttttgggagcagttttgtaccagtggattcagaaaaagtggtgatttcgaatcacctaataagctccatcggtgatgcttttacc

SEQ ID NO: 28145 - DNA, 1454 bp, Oryza sativa
  ref <308>: DATABASE ACCESSION NUMBER: AK103587
  ref <309>: DATABASE ENTRY DATE: 2002-08-28
gatccctattcgagacagacgcagacgcagagccgaccgagcggcggccgagccgagccgaatcgaatcgaatcgaatcgaaaccctcctccttccaatccaggcggcggcggcggcggcgatcgccggcggcatgaacaagcggccccgcgacgagccctcctcctccttcgcctccgcccccaagcgccagtacggcgcaggcggcggagggtatggggggcatgggtactcggaggagcggagcagcgcgcggcgggtggcggaccactacagcgcgaggtcgaaccagacgctcgaggagcgggagaacagccccatcatccacctcaagaagctcaacaactggattaagagtgttctgatccagctctacgcacaccccggagactgcgttcttgatctggcttgtggaaagggaggtgacttgataaagtgggacaaagccaaggttggatattatgtaggagttgatatcgccgaaggctcgataaaagattgcatgactcgctataatggtgacactgatcaacaacgaaggaagaagttcagttttcctgcacagcttatttgtgctgattgttacgaggctcgtttggatgagcatttatatgaggatgctccgtttgacatatgtagctgccagtttgcgttacattactcatggtcaactgaagcacgtgcaagacaagccctagctaatgtatctgctttgcttcgtcctggaggagttttcattgggacaatgcctgatgctaatgtcatcatcaaaaggcttagagaaactgatggcatggaatttgggaatggtgtttactggattagttttggcgaagagtatgctgaaaagaaattccccgcatccagacctttcggtatcaaatacaagtttcacttagaggatgctgttgattgcccggaatgggttgttccattccatctcttcaaattgctggcagaggagtatgacctggagttggttctgacgaaaaacttccatgaatttgtacacgagtacttgcaaaagccagagtttgctgagctcatgcggaggctgggtgccctaggtgatggaaggcaggaccaaagtacactgtcacaggatgaatgggaggtagcctatctctacctcgcatttgttttgcgcaagagaggccaacccccctcccagcggagggccaacaatgcaaacagaggaaagatgtttctcactgagaacgacatcgatttccttggggtataaagcaaacagaactgtactctagagcttactaacaacttaccgattcaatgcttcatacagcataaaaagaagaaagttgtacctttagtagctcaccagttattcctcgaagctgtacctgttgtatactaaatgtataaaccctataaggactcttgatgcaattttgcagaaatgaatgagatgaataataggtcccgtaataattctt

SEQ ID NO: 28146 - DNA, 2210 bp, Oryza sativa
  ref <308>: DATABASE ACCESSION NUMBER: AK103588
  ref <309>: DATABASE ENTRY DATE: 2002-08-28
gtcgggaagtcgccgagacgaggtgttccgattttgacttgctaccggaatcctcgctgaaagcaaaacccccatctcccgcggcttctcgtcggccgccgccgcggtcgctcgccgtcgccgatgagatccatccacgcctctcttagatccaaattgctgtagagccggcctcatcgccgtagcgccacccgcgtccatgggggactgcgtcgtcgtcgagaatggccaccccgtcccgaaggaggaggacgcgccggtggtagccgtggagcgcctcccggagggcgccgggaagccgcgggaggaggggagtagagggcagaggaaacagggcgggatccgcagggagccgtcgttctcgcggtggtgcaaggactgctccgccatgtccaatgccccccctgggggcgcctcccctgcctcggcggccagcgacgacgattccgaggagttcgagcttccgcttctgccctccgatagtggcggcggcggcggcagccacttgccgatggatattgaggcgggggcagcggcgagatctgatgacctcccgatttcgccgtggttgatcgcgaaggttattgcgctaattgcgagttggtacacgctgagcacctgcttgacgctgtataacaaggagatgctggggaagcacatgtggaagttcccagcgccattcctgatgaacacggtgcatttcacgatgcaggctgtggcatcgagggtgatcgtatggttccagcaccggggcctggagggagcggctagtgcaatgacatggagagattactttctgcgagttgtcccaacagctttggctactgctcttgacataaatttgagcaacatttcacttgttttcatcactgtaacatttgctacaatgtgtaaatctgcagctccaattttcattcttctgtttgcctttttgtttaggctagagaagcccagctttaaccttcttggaatcatactgattgtttcctttggagttctactaacagttgctaaagagacagaattcaatctttggggatttgtatttattatgcttgctgctgttatgtctggtttccgctggtgcatgacacagattctcctccagaaagaggaatatggattaagaaatccctttacgttgatgagttatgttaccccggttatggcaataacaactgcaattctttctattgcgatggatccatggcacgacgtcagggcaagccacttttttgataattcaactcacataataaggagcagcttattgatgcttcttggtggtgctttggcctttttcatggttttgacagaatatgttctggtttctgtaacaagtgctgtaacagtgaccgtagctgggattgtgaaggaagcggtcactattttggttgctgtgcttttcttcaatgatacatttacctggttaaaggggcttgggctgggaataataatatttggtgtcagtctattcaacttatacaagtatcataggttcaagaaaggccatcgtaataagaattgtgacaagaacccccaaacttctagcggtgcttcaaaatatgttatccttgatgatgacgatatggaaaaccagggtaattcaggctgatgtcatcagagagtggactatttgatggattttcatattctggaaatttagttacctatgcctcctcacaggtgactaccatctatacatcttgccttggtatcaagtgccatcgttttttatcttttctgtgcttccacgacttagggaagttgtgttgttattcatgaggatgagcatgaacatgaacatgacgcaaacaatattattgattaagaagacacatttacacaagcagcagacaatctagtcgccaaagaaagattttcatgtcaacaaaaaaggtgcagatatctgtcaagaactgtgcataaatagtattgttatatttgataatacttttcctccacttaggaatttgctaatgctttctttaattggaagagtagagagctcagttttggccagtattggcacgtgcgcggaagaatagcatgagacacctttttcttcgataggaaaatacattgtttatatgtagcaatattgtaatttatgattttctttacttttagctaaatttactgcatagaaatgtgtaaatattacatgataatagaattcttttcccttattttgagattattatatgttg

SEQ ID NO: 28147 - DNA, 2413 bp, Oryza sativa
  ref <308>: DATABASE ACCESSION NUMBER: AK103589
  ref <309>: DATABASE ENTRY DATE: 2002-08-28
gccgcagctcatcttcctcctcctcctcgccgttcttgccgccgcctcatcgcgcaacgacgaggaggcccgcgcgctgatggcgctcaaggagagcctggacccggcggggcgggtgctgggctcgtgggcccgctccggcgagccctgcgggggctcgttcgtcggcgtgacgtgcgacagcggcggccgcgtgacggccatctcgctgcagggccgcgggctctccgggaccctccctccggcgatcgccgggctccggcggctcaccgggctgtacctccactacaacggcatcaagggggctatacccagggagattgggagcctctcggagctcaccgacctttacctcgacgtcaaccacctgaccgggccactgcccgtggagattgccgccatggagaatctccaagttttgcagctgggttacaatcagttgacaggcagcataccaccccagttaggcaagctcaacaagcttgctgttcttgcacttcagtccaaccagctgactggggccattccagcaacactcggcgacctaacacagcttgcacggcttgatttgagcttcaacagtctttttggttccatcccttcaaagattgctgaggttccattgctcgaggtctttgatgttcgcaataattccctttctgggagtgtcccagcaggattgagaagactgaatggtgggttccagtatgtgaacaacaaaggtctttgtggagttggcttcagtttgcttgatctttgtttgtcatcggaggatggcttgaaacctagtaaacccgagccttttggcccagatggtactgtcaagacaaggcaagttcctcaatcagcgaatacggacaatcactgtgagggatctggttgctcgaaatcttcgaatgcatctgtgggagtgcttgttgttggtgtggttgcagtggtgattggcgccgcattctgcggaatatttgcattctcatattaccgccggcaaaagcagaagattggcagctcactggaggtttctgatagcaggctcagcactgaccattaccaacagaaggaagtttgccgaagaagtgcttccccacttatcagtgttgagtactcgaatggatgggaccctttgtctggtggaggcgttgggtcatccggcgaggttggtgatagctttaggttcaaccttgaggaggttgaatgtgcaactcagtacttttctgaggttaatttgctgggtaaaagtggctttgctgcgacatacaagggaattctacgagatggatctgttgtcgctgttaagagtctcaacaagacaagctgcaagcaagaagagtcagatttcttgcgtggcctcaagatgctcaccgtgctgcgacatgagaaccttgttggcttgaggggtttctgctgctccagggggaggggagagtgcttccttgtctatgattacatggttaatggttgcttgtcacagtatctggatgttaaggagggttctggtgctaatgtccttgattggccaacaagagtttccataatcagaggcattgcaaaaggagttgagtacatgcacagtaagaaagctaacaagccatcagtagtgcaccagaacatatcggccgagaagatccttctcgaccaccacttaacgccacgcttgtcggtcccagggctgcacaagctccttgctgatgatgttgtcttctcgaccctgaaggccagcgcagcaatgggataccttgcccctgagtacgccactacgggccgattcactgagaagagtgatgttttcgcatttggtatcgtcgttctccaagtcatcacaggcaggagggctgtctcacagctgaaggtcagcacagttgccaatgaccttgatagcctgatcgatgagaacctcaatggtgtcttctcaagaactgaggcagctaagcttgctgccattgctgcactttgcacaagcgagacggcgagccagcgtccaacaatggaagctgtggttcagcaactcagcaactgccactgaagaactgaagctagctgatgatgggatatcttttggaaaccttcacctgaggtattttgtaagggtagtgaaagggtaatgatccagttgccactgacatgctagtgctgaacattttagtagtactgattaactagtcactctttttctaatgatctcaccatttcatggttagtgtatcactatcctttcaacattagaatgttgaaaactactgatgtgttagatgttgaacctttggttcggttgatcagtatgcaatggatgctgatttgtgaagccatcaggttcagagagaaattcagcatttctaatgtagcagctctggccagctttgtaacggcattacttgcattgaaatgctttaccgtaattcagtttaatgccttt

SEQ ID NO: 28148 - DNA, 1740 bp, Oryza sativa
  ref <308>: DATABASE ACCESSION NUMBER: AK103590
  ref <309>: DATABASE ENTRY DATE: 2002-08-28
gagttcattgaacttcacataagctcaccaagtaaccaaaacacataagctcagcttcagctcagtctcctccatggagcccaagtcttcttcttcctcacactatctgcagccatctgcaacattgccatcaacaagaagaaactcattccaaggagtgggagctgaagctggaggaggaggaggaggcatgaacccattcgggcccacattcagtgacccactctgcagcctcaacctcaaggagacctcagagttcgtgaggtcatccttccccatggctaccatggcgaggagcaacagcagcaacggcgccaccggcaatggcggccatggctaccaccgcgggacctccacggcctcttcatcctcttcctcctcggcctcagctcagaggaggcgagccgagcagcagcagcagcaggtgccagctactccagggcggccattgctgttcttcaattcctcgagccctgcacatcaccagctcgtctccgcgaggaggtcggtgccttccaagtgggaggatgcggagaagtgggtgaggcaggcgtcgtccgaccaccatggcggccatcaccaccaccatggcaagggctccaagcttcaggaggagaagagggcgtcggcggtgaggaggtcggtggatgctgacgtcactgctcttgctctctacactgctcctgctgcagaagtgttcctcaaagacaagttcactgacaatgtggagccctccaaggagagcttcgtgttccggagctcctactgcgagccaacaaagaacacggcggcgcaggcggtggccgccggcaacggcatcgaccaccggcgtgacatcggcacggagatgactccgctgggcagctccaccacctcgaggtgccacacgccgatcaagagcacctcgccggctaggcacaacacgccggcgagccggtcgggccccctggtgccgtacgccggcggtggcggcggcgccggccaggacatctcggacctcgccgactgccacttcgccaagctggacctcggcgcgcagttcgacgccatgctcatcaactggagctccaaggaggaggaggaggaggaggtgtccaagagcttgaggcacttcgaggccagcgtcgccgccgtcggcgagaagcgcggcggcgccggcgactgccggtgggaggacgatgacagggccaagagctgcataaggtatcagagggaagaggcaaagattcaagcttggatcaacctggagagtgccaaggctgaagcacagtccagaaagctagaggtgaagattcagaagatgagatcaaacctggaggagaagctgatgaggaggatgacgaccgtgcaccggcgcgccgaggagtggagagcgacggcgcaggcgcagcacctccagcagctgaagcgcgccgccgagcaagtccggcgggccaaggccaccagccaccatcaccaccaccaccacctcgccggcagcaacgcctcctgcggctgcttcccctgcaatggcagcaacaacatcatcagtggcaacctcctgaactactattagatatgatcagctagccgccatggaagaaggatcaagaatgccaatttgttcgggagatcaacgggttcttgttgattgtagtggatgtttgggacgtgtgaagatggagatgtgggagataatggtgtcatgtgtatcaaaaaactctgatttttcaaggtgatatataccagattgctgaatgc

SEQ ID NO: 28149 - DNA, 1203 bp, Oryza sativa; identical to SEQ ID NO: 28090
  ref <308>: DATABASE ACCESSION NUMBER: AK103591
  ref <309>: DATABASE ENTRY DATE: 2002-08-28

SEQ ID NO: 28150 - DNA, 1422 bp, Oryza sativa
  ref <308>: DATABASE ACCESSION NUMBER: AK103592
  ref <309>: DATABASE ENTRY DATE: 2002-08-28
gagtgcagagtccaaagcctcatgtctgcagtgagcatcgtcgacgtcagctatgtcgctgtgccggcgactgccgcgctgccgccggagccgatcaagctcacggcgatggaagcactgtggctccctttccccgtgcttcaacacgtcctgttctacgaggtcgccggctcgccgccgttcgacagcgtcgtccggtccctccggtcctccctcggcgccacgctggcgagcttcgcgccgctcgccggcaagctcgtctacctcgagggcaccggcgacgtcgccatcgcctgctccgcgtcggacgcggtcaagttcgtcgctgcggaatccgacgccgacgtccgccgcctcgccggagacgagctgcacgacctggcgacgtttcagaagcttgtgccggagctcgacatgggcaagctgccgacgtcggtgctggccgtgcaggccacgcgcctggagggagggctggcggtcggcgtcacggtgcatcacggcgtcgccgatgggaagtctctctggatgttcctggaggcgtgggcggcggcgtgccgcggcgaggcgacgccggtcgcgacaccgtgcttcgaccgctccgctatcaagctgcaccttggcgaggagattgcccggaccgtcttgcggaagtacgcgcctaaattgcctcaggtagccgagctggaaattttcgtcgaacaacggaatcggttcacccgccggacgttcaccgtggacgcgcagcaaatcgagcgcctcaagcagcgcatcgcccgcgacggtgaagcccgcggcgcgccactgcgtcggcctccgtccaccttcgtcgccgtcgtcgcgacggcatggacgtgcttcgcccgatgcaagaccaccgccgcggacgacggagaagtgttccttgtgttcatcgccgacgtccgcgagcgcctcgaccctcccgtcggcgcgggatacttcggcagttgcctgaccgtgcgcgtcgcgaggctcccggtgcgcgacatccacggcgacggcgcgctggcggccgcggcgtcggcgatccaggaggagatcgccaaggtggccgaagacccgctcgccgggtgggatttcttgaggctgatggagacgctggtccccgtcacggagagggcgatgaacgtgtctggctcgccggcgttccggccgtacgacgtcggcgactttggttgggggaagccgaggcggacggagccgatcaggatgaaccacgacggacaggtggcgctggtgcgcgccaaggacggccgcgcggtgcaggtctcggtctccttgctccgatctgcacacatgcaaggtttcaagtcacaattacttgagttattgggatgacagatacattcgattaattatacttcctactcctcattttaagtgcaactatgagtttctgtaccc

SEQ ID NO: 28151 - DNA, 1303 bp, Oryza sativa
  ref <308>: DATABASE ACCESSION NUMBER: AK103593
  ref <309>: DATABASE ENTRY DATE: 2002-08-28
gccctttccttctcattcctcgcggggaggggcggcgccgacgcctcatcgactagttcactccatctccatctccatctccatctccatctacatatacggccgcttccaactgcaatctcctgcctgcccagcgattcttcccacgatttcctttcctgcttttctcatcccttttgtttcttcactccggctcaccgcgcgaaccaatcttctgccttcacacaaccaattcatcaagcagatcgagatggagtgcgagagcaactacagcaaggagcagaggctcaacggcgacagcctcgtcttcgaccttgatgacacgctgtatccggtgacctccggcattggagccgacgtcgtaaggaacatccaagcttatatgatcgaaaagcttggtgtggaagagagcatcagtttggagctatgcgtcctcctctacaagcagtatggaactaccatggccggtttgagggctgttgggtaccagtttgattatgacgacttccacagctatgttcatggaaggttggcttatgagaaaattaagcctgatccagtacttaggaacattctcctaagcttgccaatccgcaaagttgtcttcacaaatggtgacagaattcatgcttcaagggccctcaagaggctaggaatagaagattgctttgaaagagttgtgtgctttgagacactgaacccaacatcatcctctctttcggcagctggtcaggttgaaatttttgatataatgaagcatctggctcatccagagcctggggttgaactaccaaagtcgccaatcctgtgcaagccaaatatagatgccatgcggcaagctctcaaggttgcctccatcaatccgaagacatcgatattgtttgatgacagcgccaggaacatccaggctgcgaagctaataggaatgtatactgtcctggttggaacttctgaaagaataaagggtgctgaccatgcgttggaaagccttcacaacatgaaggaagcattgcctgagctgtgggatgaagctgtgaaggatgaggatgtcaggaagtcaagcaaagtcggaattgagacatctgtgatcgcttaaaactcccatgaatgtttctgatggagaacagcatgagatgagtggatcatttttcagagctcatctctgcactttcttatgtctgaaagtagatgtgctaatttaggggagattttactcttcttcatgtactgtgtgagtgtgtgactgcctgtaataaataaataaataaatgccatctatgaactgacaatacaattcctggcg

SEQ ID NO: 28152 - DNA, 2022 bp, Oryza sativa
  ref <308>: DATABASE ACCESSION NUMBER: AK103594
  ref <309>: DATABASE ENTRY DATE: 2002-08-28
gttcctctcccttctcacgctcgccctcaccagctctccgtcattccgcctcccgttgaccggcgctcctccacatctcctctccatggtcgcgtggatccgccgtcggcggcgacggcaggggtggatccaccgagctccatcatttgtccgcccccgctcgcgccgatccaccgcctctcgcgtcggcagcgacgggaggggtggatccggcgacctccgtcgtctctccgcccccgctgacgccgatccaccgcctctcccgtggatccgccgtcgacggcgacgggaggggttgatccggcgacctccgtcgtctctccacccccgctcgcgccgatccgctcgggctcgtcgtcgcgtcgtttgtgggctgcttcttcacgtccgtcgcctcgctcatcatctccaagctgcatccgccgtcggcagcgacgtgatgggcggatccagctcatcccttcagtcccaactctgtctgggtgtccaggaagagaccggcggcggggagggccagaatggcggcggtggtgagggcggaggcggtggacacatccatcagcccaacgatgagggcgctccggtcgtccaagaacatggccatcacagaccaggccacgacgttgcggcaggccggcgagctggtcatcggcctcgctgcaggggagcccgacttcaacacaccggcctcgctaccgaggtctggacagcgacaccgtgggacagcttgtcggccaggtgatgatcagcgctccctcagcggcgagcgacatcccggtccccctttgtgagaagggtccggtcgaacgcgtcgctgcaattaatgcagcggcgtcattgaaggagggcgtcaccaatgaggcgtccgacgttgcagctgctgctaccacgagtggcaacaacgttccgaggaaggggaggaattctcctccgtactcgggacccgtcggaaggcgccaaacccggcggactcggacgcgtctccccacctcagcgaaggcaaaggctagtgactagtgacgatcagcgagaaggcggcgcaggcgaaggcggcgcaaggtgggaccggtgcggcttccagtgcgtcccctgcagtgacctcgacagatgtagtggtcgctactaaggaccgggaggcgacgtcgagtagccccgccgtcaaccttgtgtctgctcggggcccgtccaccgatgccctcacctggggggagctccaggcggagatggagcgcctcctccaggccggtgctcggggcgtaggccgcgaggtcgaggaggccagggcggcagcgtcgtcagcaaaccagcgtgctgaccagctggtacgtgacttggcggaggcccgtgaggacctcctgaagatgagggagctggtggccggcaacgagaggcagcggcaagggctcgagcaccggatgttggagctcgagaacaatccgtcagaaatccgatgctcgctgcgggtatcgtacaccagcctacaccagctcgccggggaacgtggtgtcacgactaccagctggcctgcaaaatttgcacatgaacgtactacttgcctatagatgatggtggtgtggccgtgtgggcaatattgggtgcatatgaaaatgctgcaagaaaaaaaaagggtgccctttataccgatcaagaaaaagaagtgcattttagcttgatcaagaactaacccaaaagcaggctactcgtcaacactgtttcactccctctcagtgatatgtgttcatgtctattcggccagcaagcacattgcgttcgtcaatacatgctgtcactgcccttttgatcgcccgcagaagagccaccccagcatgcacgcagacaacaagacaacaacaagctttgagttgaagggaaatccagattatatatttgatattagttaattcagtgtctcaaaaaatatcatcaactccaatttgatgaccaaaaatcctctgcaaaactgataattttacaaccttgatgctacagatcaaataacaggactgaatgtgccctagctcc

SEQ ID NO: 28153 - DNA, 2383 bp, Oryza sativa
  ref <308>: DATABASE ACCESSION NUMBER: AK103595
  ref <309>: DATABASE ENTRY DATE: 2002-08-28
ggtagtactggcccgaggtttccaggccgacggcggcgaggtttccccggcgaatcccccatggcagcggtgccctccgccgccgcgccgccggttccggtctcccccggcgagagatggccgccgctcgagtcgagccccgacgtattcaaccagctcatgtggtcgctgggtgtcccggaggacgtggcggagttccacgacgtgtacagcctcgacgccgatgcgctggagatggtgccccagcctgtgctcgccgtcgtcttctgcttccccgatccaacccaggtgcattcatcactttgctccagagtttgttttctgtttcgcgagttttgagaaaaatcaggggctcgatctccgctcacccatacaaatgcataatgtttcctgatttgccttctacaaccgtgtaactccaatataagtggatgatcaatgatcatcttgcgatgtgtcttaactgaaactatgtatactgctgtgagggtcaagttggagcttatatctgttccttcgcatagccggttaggtcgcgtgtctcaatttttttgacttggcttccgtgtgctcgactaaattcgatgctacacccacgtcagtactcttaaatatcattttcaggagttgttcttctcaaaaaggaccattgaacactatatctctttgtcatcattgaaatctctccagattaatgtacaagttccagacttcagtgcttcatatgctgtatagacatgagatcactgaggtgcttcagtgattgttttaatgttgttactatacccccattgcttcacaagagtgcccaaaaactagttttgtggcatgtttgacctgttgaggagagataaaatggccatgacctttgttatgtatgtttgacatctctaataagctataattggggcagaaggttcactatttaatatctccatttatatattctgtcagatattccctggttgttaggtgcataatcttatataaaagggtaatagaacctctggctctatgcatttatagttcaactactctgtgatatacgcatctcaaccaataattaaatgtgtttttttatgatgatatatggacatgttgattgtttctgtgaaatgtgtgtaaagaatctctctctttttaatgtacatttactagcttagtactattatgggtttcagcctttacttgatttacacacttagccctacttcggtgcaggatgcaagtaatccttcacagcatcttttaattactggagagaaggtgagcaaatgtgtttttggcatgatagtgccacctgaaagggctatagcttcacgtaaagagtgctacattttgtttcttaattataacagggtccttaatcctgatagttttacaccaatcatcatggttgcctttaatcatacatgtttctttcatgccttctgcaacaggaaactttgtttttcataaaacaaattgaatcactaggaaatgcttgtggaactattgcgctacttcatgctgttggaaatgcatattcagaaatcagtttgtcggagaattctttcttggacatgtttatcaaatcaacatctggcatgacttcatacgagcgtgctgtgtttcttgagaaggatgatgacatggcaagagctcacttatcggctgccagtgccggtgacacaaagctatctgatgacgttgaagagcattatatatgttttgtcgaatgtgatggaacactctatgagcttgatggtatgaagcctggaccaataaatcatggcccatcatcctctaaaagcttactgcaggatgctgtgaatatcattaaggccaccatgcacaacattcccaactcggtgaacttcaacgtaatagtgctatcaagaaaagcagagtaaagcaaaacagagctttttcagataactgattgaggccataaaggtgaagggctatctagttcagcaaattacacagacttcacactcgttctgtcttctacttgaactaccttgagctgccacggtctaccaggaagaaaattatcgtcgtgagtcagagaatgtatacatcacaactttccatgaataatcgactgatccaacatgactattgcagattcactcagcatctggacctcaaatttaataaagtttcagttacctaggagatgggcttgcccatgcccatccaggagggatgcaccagctgatcaaccagctgcgacatatttcacctgttggccctgtagctgctccctttctcccttgatcggctgatcgcaatgcaacaagacacctttctatgtctattctctgctatttctcaaaccagcatggtgacttgacatttacaccgcctaatatcgctcactcattgccacttctgatgc

SEQ ID NO: 28154 - DNA, 1740 bp, Oryza sativa
  ref <308>: DATABASE ACCESSION NUMBER: AK103596
  ref <309>: DATABASE ENTRY DATE: 2002-08-28
gaggagcacatgctgtcccgttgcttagctcagctcgacagccagtgaagtgaggagacgagaagagcggtcgccatgggcgaggcggtgctggtgtccaatcatgggtgcagcggaggcggaggaagagttggagtcggagtcaggggagcgggaggaggaggacccggcgaggggaaggcggaggggcagcaggggcaggtgctcgccctgctactcgccgcgctacgcaggtcggtggtgctcccgtgccagatggccgacgctgacgacccggcagcagtcgcgtgggggatggagatcggctggcccaccgacgtccggcacgtcgctcacgtcaccttcgaccgcctcaacggcttcctcggcctccccgccgagttcgagctcgagatcccgggccacgtccccagcgccagtgcgagcgttttcggcgtgtcacctgagtcgatgcagtgctgcttcgacgacaacgggaactcggtgcccaagattctgttactcatgcaggagaggctgtacgcgcaggatggcctcaaggcagaagggatcttccgtatcacccctgagaacagccaggaggagaatgtcagggagcagcttaacaggggccttgtgcccgacgacatcgatgtgcattgcttggcaagtttgattaaggcctggttcagagaactccctgagggtgtactggatagcctctcacctgagcaagttcttcactgcaacacagaggaggaatgtgttgagctcgtacggcttcttcctccgacacaggctgcacttcttaactgggttgtagaattcatggctgatgttgtcgaggaagaggagtcaaacaagatgaatgcccgaaatgtcgctatggtctttgcacccaatatgacacagatgtcagatcctcttactgctctgatgcatgctgttcaagtgatgaatcttctcaagacattgattctcaagacgcttagagaacgtgagcatgatgaaagcgaatactcagcaatttcatctcagtcatcttcatctgatgaacttgatgagatgcatcatcatgttgaacaaggtggtgacagtggtagtgacactgacaattttggagatgatggttctcaaagccaaaaagatgttgccaaggtccttcaacaaaatgttgtcaatgaacagccgattggtgcatccaggaggcacacgtcaattgatttccggttgccttacattagctacggcagcgacgatgatgtgtcgcccaatgatattgaagaatgtttcttaaggaggttagaatggaatgcagtgagcaaagatgcttctgagattggcagcatcactgttcggtccaaccaagaggcagggcaactaagcttctccgaagaaaatgatgggtattacagtacagattatcaatctaggaacatactcctaaaagattctgttggtatccaaagcactctaccgagggaaaccgaaagcagggctgaaattacaaatgacgaggtacaagacggcgctgaagtggaggtaactctcgagcaataatcagaccttcaaaggatggaggtcttacgtttcgttatcatcgtccatgtgttttaatatgatcttgtactatgattcaagccggtcaacacagggttgatgaaccttatcctagtagtaatattcttcggatgctctatagttctctgcctttgagctgtttaatgtatttgtgtgatttcattaactcgggattttact

SEQ ID NO: 28155 - DNA, 2514 bp, Oryza sativa
  ref <308>: DATABASE ACCESSION NUMBER: AK103597
  ref <309>: DATABASE ENTRY DATE: 2002-08-28
gtttcggtggaaaggcaatgaaagcaacacatgttgcaactgcttgcgctgtggcagcattcaagctgcggcgcccagttcgaatgtacctcgatcgcaagacggacatgataatggcgggagggcggcatccgatgaaggccaagtactccgtcgggttcaagtccgacggcaagatcacggccctgcacctcgatctcaagatcaacgccgggatatcaccggaattcagcccggcgatcccgtacgccattgtcggggccctgaagaagtacagctggggcgctctcgcgttcgacatcaaggtctgcaagacgaacgtctcgtccaagtcggccatgcgtgctccgggcgacgcgcagggctcgttcatcgccgaggccatcgtcgagcacgttgcgtccacgctctccgtggccacgaacaccatcaggaggaagaacctccatgacttggagagcctcaaggtgttcttcggggacagcgccgccggcgaggcctcgacgtcgtcgtacagcctcgtcatcatcttcgacaggctggcctcgacgccggagtaccagcggagggccgccatggtggagcaattcaacggcagcagcaggtggaagaagcgtggcatttcttgcgtgccgatcacctactcggtgacgctccggccgtctccggggaaggtctccatcttgaacgacggctccatcgccgtcgaggtcggcggcgtcgagatcgggcagggcctgtggaccaaggtgaagcagatgaccgccttcgcgctgggccagctgtgcgatgacggcggcgagggcctcctcgacaatgtccgtgtcatccaggctgacaccctgagcatgatccagggaggatggaccgccgggagcacgacctccgagaccagctgcgaggctgttcggaagtcgtgcgccgcgctcgtcgagcggctcaagcccatcaaggagaaggctggcaccctaccatggaaatcctttattgcgcaggcaagcatggctagtgtaaaactgacggagcacgcgtactggacccctgacccgacgttcactagctacatgaactatggagctgccactagtgaggtggaagtcgatgtgctgacaggggcaaccaccatcctgaggagcgacctcgtgtatgactgtgggcagagcctgaatcctgctgtcgacttaggccaggtggaaggcgcgttcgtgcaaggtgtgggcttcttcacgaacgaggagtacgcgaccaacgccgatgggctggtcatccacgacggcacatggacgtacaagatccccaccgtagacaccatccccaagcagttcaacgtcgagctcatcaacaccgctcgccatcacagccgcgtcctctcctcaaaagcgtccggtgagccgccgctgctgctggcgtcgtccgtgcactgcgcgatgagggaggcgatcagggcggcgcggagagagttcgccgctgtcggcggcggcaccggcggctcagatcaggtgacgtcgttccagatggacgtgccggcgacgatgccggccgtcaaggagctctgcggcctcgacgtcgtagagaggtatctcgagagcttttctgcaaccaccgcctagtgctgggagaaagccgaaatggcttcgcatcttggctggaagaaaattatgcaggacctcagtccttcgcccacccagaaagacttctcatcttgagtgacacgtgtccgcacgaatcttgatgtagtcatcttctacctgagctcaagtcaagtgcagagtgccaaactttccctttctctctcctctccactctccacctcccttcctcctcctcggccagggagggaaggttccacttgctagaggcggcgagctcgccaaactttttcatcgtggcgttgtctctcctctccactccactctcatctcaccacctccttcctctctttcttcctagccaatttttggccggatgaacagcaacagcggcgagttcgtccaatcgatggtcacagactagcaaccttaccagcctcccaagctaagagcacaagtactgggtgccgagttgccgactagacatgctacattgctgctcttgcatcatgttgcatcccgtgccggagattgggcctctggctgtgcagaaaggagccaggggaggtagggactgggaagtggaaagggagaggagagagggattggggaatttttcggcactttggtctgaggtagaagatgactgttctctgctctaagattcgtgcgaacaagtgtcactcaagatgagaagtctttccaaatgggcgaaggacccaggtcctgtataaacaccaacaataatggggctgctgacttgtatgttgatgagtttttttttttatgtatgttgattactggaaatgatgtttaactatttattttattttaaaatatcatgcagttatatttattttgctgtaacttatatttttatatctttactaaatttttaataaaatgtatggtcaaatgttatatc

SEQ ID NO: 28156 - DNA, 2472 bp, Oryza sativa
  ref <308>: DATABASE ACCESSION NUMBER: AK103598
  ref <309>: DATABASE ENTRY DATE: 2002-08-28
ggctggccgcaagcgaagtcctctctcttcacacttcacacacgctctcggtctcggtctctcgctttttaccacactactctgctgcgaccgcgaagggaggggtgtgtgtgggttggatcaactaccccagctactgccgtgccgagggaagcgggagcgccgccctagcgaccgcaactgcaggcgcgcatttcacgggattccgtgggctgtgctgtgctgtacagaccggcgacgagccgccgccgccgtggaggatcggctacttatctgacataaacaaacgaagatgctgctcgtctagttccctgatttggagattcatcaaatgggtcatctcagtattagaaatcctttgtctcttctgctctcactgcagttgtcacttttgttgttcaatcccttgtctgtagcagacttaacctctgaaaagcaagcccttctagactttgcctctgcagtgtatcgtggcaacaggctcaactggagtcaaagcacatcattgtgttcttggcatggcgtaaaatgctcaggagatcagtcacacatatttgaattaagggtaccaggtgctggtctcattggagcaattcctccaaacactcttggaaagcttgactctctccaagttctgagcttacggtctaatcgtttagctggaagccttccatctgatgtgactacgcttccttccttacgatccatataccttcagcacaataacttttcaggagatttgccttcctttttgaatcctaacctcagtgtagtggacctctcctacaattcctttaccggtgaaattcctataagcttacaaaacctttctcagttatcagtcctgaatttacaagaaaattctctctctggatccatccctgatctcaagcttccaagtctgagactattgaatctgagcaacaatgatttgaaaggccaaattcctcagtcgcttcaaacatttccaaatggctcattcttggggaatcctggattatgtgggccacctctagctaaatgcttgcttcctgattcaccgacgccttcaccagcatccccttcatcagcaccaactccaatgtcagcacatcatgagaaaaagtttggcgccggattcataattgcagttgctgttgggggcttcgcagtactgatgtttgttgtggttgtgttggttgtgtgtaattcaaagaggaaaggcaagaaagagagtggtgtggactacaagggtaagggcactggtgtcagaagtgagaagccaaaacaggagttcagtagtggcgttcagatcgccgagaaaaacaagttggttttcttggagggttgctcctataccttcgatttggaggatctactgagagcttctgcagaagtccttggcaagggaagttatggaactgcttacaaagctatacttgaggatggtaccgttgttgttgtcaagagactaaaagatgtcgtggcaggaaaaaaagagtttgagcaacagatggaactaattggtaggttaggtaaacatgcaaacttagtcccacttcgtgcttactactattctaaggacgagaagctcatcgtctacgattatctcaccaatggcagtttctcaaccaagttacatggtatcaggggtgttactgaaaagacaccattagactggagcaccagagtgaagataatccttggaacagcatacggcattgcacacgttcatgcagaaggtggcgccaagctcacccatggcaatattaagtctgcaaatatcctcctcgatcaagattacagttcttatgtttcagactatggtctaactgccctgatgagtgttccagccaatgcatctcgcgttgtggtcggttatcgcgctcctgagaccatcgagaaccgcaagatcacccagaaatccgacgtctacagcttcggcgtcctcctcatggagatgcttaccggtaaagctccactccagtcgcagggcaatgacgatgtcgtcgacctaccaagatgggtgcactcggtggtcagagaggagtggacagccgaggtgttcgacgtcgagctgatcaagcagcaaaacatcgaggaggagcttgttcagatgctccagatagcaatggcttgcacatcaaggtctccagatcgacgcccatcgatggaggatgtgatcaggatgatcgagggactgcgccattctgcttcagagagccgagcttcctctgatgaaaagatgaaggactccaatccaccatcggtttagttatgtgctcctgtgttcatatgcctcaccaagctgcgagttgcagatcatttgattcttagctaatttgtgattgagttcatgctaaacatggtcgacattagatgcagcctcagaaagctgagcatattctgattggaacttatgagtcttgaattcttgattcttgacaagtgtaggatttttttctctgggaattttgattgttggaattgtgc

SEQ ID NO: 28157 - DNA, 647 bp, Oryza sativa
  ref <308>: DATABASE ACCESSION NUMBER: AK103599
  ref <309>: DATABASE ENTRY DATE: 2002-08-28
ggccgcaactcacagctcagtgtcaaccaccacaaccacaagcaagcaagccatacacatcaagaaggcgtctgcgtgcgaggaaatcatccggtttttcaagctaaaagcgtgaagatgagctcgtcgtcgttgagcaagaaggcgtcgtcgttcgtggtgacggcgagcatgagcgcggtggaggcgctcaaggaccaggcggggctgtgccggtgggactacgcgctccggtcgctgtaccagcgcgccgccgccgccaagcaggtcaccggccgcgccgtcccggtgtcgctgtcgtcgcagaccggcggcgcggcggcgtcctcctctcccgccgccgcgtgcggcagggccgccaggtcgaagaggtcggaggaggagaagatgcagaaggcgtatcacctcgtctgctggggacctaattaaaatctgttcttcaaattcgtgatttcgtgtagtagttttttcgtttgcaatttgtccacccctcattttctggtgtgtaaatcgagccaatacctgcagggatttttgtattttgatccgttttcatgtactactacttccccatctgattctgatggagaattgctatgtgcaaactacggagtaaaaatcaacaagatgatgcgattgttgcacgg

SEQ ID NO: 28158 - DNA, 1286 bp, Oryza sativa
  ref <308>: DATABASE ACCESSION NUMBER: AK103600
  ref <309>: DATABASE ENTRY DATE: 2002-08-28
gagtacgcccggagctcgcatcgcatcaccggctgagagagatcctaattccgagatggccacgacgcgggggcagctgcccgtcgaggacgtgctgcgcgtgaacgggagccggcgattcgccgccgcgctggccgccgcctcccccttcgcctccctcgccgacgccctcctcgccgcccgccgcatctggctcaacgaggtggacgtcaacgggtggctggaggccttcgccgcgcacccggccatcggcaccacctcctcctccgcccccaagtggtgcaaggaggagcaatcagcagcgcttgcaactgccactgattcgaccgcgcaggagttggcagattggaatgccaggtatagggagaagtttgggtttgtgttcatgatatgcgcgtctgggaggactgcccctgaggtcttagcggagcttaagaggcgctatgaaaataggccaattgttgaacttgagatcgcagcacaggaagaactgaagataactgaactgcgtcttgcaaagctttttgcatcagagcctgttgcccccccttcttcaacggttggaggtcctactagccaatcggataaagcagcagaccgcatgcggattattggagcacatcttggatctcacacccagcattctgccaataaagctcctgaaattacaggtagctccaaccgaactcgccctccgatcacaacccatgttttggatgtcgctcgtggatcgccagcatcaggaattgaagttcacctagagatgtggaaggatgcatcaacacccccatcattcaacaacaaagatttcaatggatgggcaaccctgggctcatcggttacgaacaacgatggccgcagcggtcaactgatggacattgtcaataacgtcgctcctggtttctaccgcataagtttcaacaccagcaagtatgcaccttcagggttcttcccttatgtgagcatcatatttgagataaaaaagaaccagacgaccgagcatttccatgtccctctgttgcattctcctttttcattcaccacttaccgtggcagttaagttagcctgtccccaagtctgcgagatgctgcatattccatctgaaaagttcgtgtgtaatattcctcttggtagcaaaatgtcgggaaaacaagtttgctttggtagcaagggttgcctgtttatgtgcactgacattatgatgcaagaataaatttgatatactaaaatgtatacagaagcttgatgtctatagtactaaagtttcagtgcatggtttggtacg

SEQ ID NO: 28159 - DNA, 2987 bp, Oryza sativa
  ref <308>: DATABASE ACCESSION NUMBER: AK103601
  ref <309>: DATABASE ENTRY DATE: 2002-08-28
gatctccttcctcctccttcccccttcttcttcttcctcctcctcctctctctctctagccatactctctctctctcttctccactcctctgatcgactccgcttcgatccccgccgacgacccccccccccccggggtttatttttttttctatctctctctcttccctgattcggtgcacgcacgcgcaggaaggaaccagagcagctatctatcgtgatgtccactctcgcggcgcatccaccgttggggccagcggcggcggcgcaggagaaggcggcgagccggaacaagcgcaagtaccgcgccgagccgccgtccgccgagctggggtcattcgggctggagtacccactgacggccgactgcgtgggcttcgagttcatgtcgccggagaaggcagccatcgcggcggcggcggccgccgccgcggtggccgccgagggcgtcaacctggacctcatcccgggctcgtgcgattgcaaggatattcaccccacggcggaggagctactggagtgccagagatatgtgaattggaatgaccccaacgaggcgctgctcgaggagatccttctcaagggcctggacgcgacgttcgacaatgccgtaggtgtgatcatcgcgatgggttactccgagcccaccgcgcgtgccgccgtcctgcgggctgccacgcagtacaattggagggagagccttgctgggttcggcgaggcggcggtcgaggtgctcaagaccgagggggacatgttgagtgagggcgcctccgaggaagacatgaggaagattgagcaggcagtgctcggtggcatgattgcgttggtcaatcaggctcagccgttctacactacaggtgatgtgatgttctgcttgcttatgtcggatatgaatgtggccaatgcctgtgccatggactacaatccggcttccctcccagcagtggatacgcaagtgattgcccagccagttgttggaaactatgaacctaataatccaagttcggatttatcagtatctattaccaacccacagactggcgtcacttttcgtggaaaacttaccccagtgccacccaattcttacaatactgccaaggctgattcatccgcaacaccagcaaacctgaatgtaccgagcagtaaaccctctgtctcaggtaaggcgcagagtgaaatcccgaatcttaagccaaaagaaaactcaaatcctgtgcctgatcattcagaggagcaaccattcgttgctgctgcgacacaacctgtgaaagatgataagccaatccctagtaagagggggagttctaagcgggattccttgcatcggcagaagttgatgagttttgataagagttcccgagcactgggttctaaaggatctcttaggtcaagcaagcatagctctttgggtagcgcagtgctggacaggaagtgcaggtcgttttcagattctactactagcagtttgaaggcctcatccaaagtaggcaaagggttttctgcaagcatgaagggaccggaagtaccacctgacctttcttttactggtgctgcccttccctccaatccatcatttgatgccaagctgagtagtaacttgaacccattaccagctgctagcacagatctctcattgtcgttgccattgccgtcctcaaatgacagtcctgctccatcttcgaatcatgatgccaatacagagggtatggactctagcagcaaaatcaatttatcatatgatgaggatcagaaggtttggatcccacaagataagaaggatgaaatggtcttgattcttgtccagcggcagaaagagttgcaagcacatatgagggattggacagactgggctcagcagaaggtgatgcaagtcactcgtcgacttgccaaggagaaggaagagcttcattcacttaggaaagagaaggaagaagcggaccgcctccaagaagagaggcacaatctggaagagagcactcggaagaagcttttagagatggaatctgcgatttctagggcgaacacccagctggaaaaggcagaatcttctgctcgtagacgtgaagccgagaatgaacagctcaggatacagatggaagctgcaaagcggcatgcactagtgtctgcaacaaatattttggagctttcaaagaaggatgagaacagtcataaaaggtctcagcattgggaatctgaaagagccctgttgcaagaggatcttgctgctcaaaggaacaagctatctcaggtccaccagcaacttcatcatgctaaagagcagaaggatcaaatccaggcaaggtggaggcaagaagaggctggaaagattgaggcaattgcccgtgtaagcttagagaagaaagagagggatcagattgagacatcactgaggtcggaagagaacttcctgcatctcaaagcggagaacgatacgcaaagatacaagagccagatacgtgctctcgagcagcagatttcgcagctgaaggtatccttggactcgttgagggttggtgcccctcccaagtggggagcagacaacagaaccaacgcgttgcgcctttctgaagggagaaagaatggcagcgctcaaattttggccaatatagcagcggtaccccaggatttcgattttgacgacatacagcgtgaccgggagtgcgtcatgtgcctgagcgaggagatgtcggtcgtcttcctcccttgcgcgcaccaggtggtctgcgcgaaatgcaatgacctccatgacaagcaagggatgaaggagtgcccatcgtgccggacccccatccagcgcagggtgtgcgcccgcctcgccggttgctagacttcttcatatacaccattttgttttctctttttatttgttttttttgattgatttgctgagcttgccttggatggatggatggaagattggatggaataatgagtggtggtgagagtggttaaactttgagaataatatacatggttggtcgcacatc

SEQ ID NO: 28160 - DNA, 1932 bp, Oryza sativa
  ref <308>: DATABASE ACCESSION NUMBER: AK103602
  ref <309>: DATABASE ENTRY DATE: 2002-08-28
gggataagccccccgcgcccgcacacaaccgcaccgccatttcgcggttccgccatggccaccgccgcggcgctcgcgctccacacgcagttccggccgccgcgctcgcctcgccgtctccggcagcatctagccttaccctcaggagtcctcatccgatcccccgtccgcgcctcggctgcgtcggcgtcggcgtcggcgccggcgcagcgggaggccgccgccgcgggagtcccgtggggctgcgagatcgagtccctggagagcgccgtgtcgctggagaggtggctcaccgattcggggctccccgagcagaggttggggatacagcgggtggacgtcggtgagcgcggcctcgtcgcgctgaagaacatccgcaagggggagaagctgctcttcgtgcctccctccctcgtcattacagctgactcagaatggggctgccctgaggtggggaatgtgttgaagagaaattctgtgccggattggccgcttattgctacctaccttataagcgaagctagtttagagagttcgtcgaggtggagcagctacatagcggcgttgccaaggcagccttactctctgttgtactggactaggcctgagcttgatgcatacttggtggcttcgccgatcagggaacgcgcaattcagaggatcactgatgtggtcggaacatacaatgatctccgtgacagaatattttctaagcattcagatttgttccctgaggaggtttacaacttagagacgtttagatggtccttcggcatcctcttctcacgcctggttcgattgccatcaatggatggaagggttgcactagttccttgggcagatatgcttaaccatagtcctgaggtggaaacattcttggattatgataaatcctcagggggaatagttttcactaccgatcgttcatatcaaccaggtgagcaggtgtttatatcctatggcaagaaatccagtggcgagctattgctttcatatggttttgttccaaaagagggaacaaacccaaatgattcagttgaattgctggtgtctcttaataagtctgataagtgctacaaagagaagctacaagcactaaaaagaaatggattgtcagagtttgaaagtttccctttacgcgtcacaggatggccagttgagttgatggcttatgcctttcttgtggtcagccctcccgagatgagccaacgttttgaagagatggctgtcgctgcatcaaataaaagtccatccaagcctggacttaattatcctgaactggaggaacaagctcttcagtttatcttggactgttgtgagtctaacatagcaaaatacacaaagttcctagagggtagcagtgggtctctgcaactttcaaccaattcaaagcaagccaaccggacgttactgctaaaacaactagcaagagatctttgcattagtgaacggagaatcctgtatcgtacacaatatatattgcgtaggagactgagggacatgagaggtggtgaacttaaagctctgtcattgttcaatgggctcagaaagctcttcaaataaaaggatggatttgtttttcaatgttagctgaagatttcgaggacaatgtttaatctctagtatcttgcttcttcctttcaggttgtctttgttgctgatgaagctcagactgttgaagaaaaggaaattgacaaatcagattacaatctcagccgacaagcaactgatgctagaagactagaagtggtcacagctcaatagaagacactagttgtaacttgcgattgaacagtccatatcttggtttaaatctactatagcaccatgcaacaatgtaccagtggagtcatctcgtgtatattttgtttcaggggtttcccctcgatatctatagcataatatcccttctatttctgctgttttcacccc

SEQ ID NO: 28161 - DNA, 891 bp, Oryza sativa
  ref <308>: DATABASE ACCESSION NUMBER: AK103603
  ref <309>: DATABASE ENTRY DATE: 2002-08-28
gatctcaagacatacttctctggatccatctctgttcaatagtgattcattctccacgagaaggaagctagtctctgtactacaccatggagaacaacagcaacaaccagccgcctccaggtctctctctctctctctagagatgcctaattatctacagcataaaaggcctctgtacttagatgttgaagttagttgcatgtatcttcagatatattaggatttagctaggataattaatttcttactgttgcctggttcgttttctgactgtgtgcaaatgaaatgaacaaaaaaaaaaaaacagggtacccgacggcagcgggagcagctgagcaaggcgggaagaaatcgcggcgaggaagcaccaagtctaggggagacaaaggcttcattgaaggatggtgagtataatcgatcggttaattgtggcttcttaaattaatttgctggaaatcatagtataatcccccccccccctgagagtctgaaacctaaccaaaatttctgctcatcttcttcttcttcagtattgctgcgctgtgctgctgctggatctgcgagatgtgctgcgactaagccagcacacatacgattatacgtacatacagagttaatacacagccagtggtatgtacgtgatgcgtgagacgacgctcgatcgctgtgctatatatgtactgtgtgtatgtatcagtgtatgatcattaaaaccagttgtttctcaccgagtttgttttttatccgagggactcgaccatcagaataactgaagaaattactatagctacgtgtgccgtgtgatagaaatttttcatgtatactgcgtcttgtgtttggtacggcttcgtgtgattcattcacttaaattatcaccttttgtgttttact

SEQ ID NO: 28162 - DNA, 2499 bp, Oryza sativa
  ref <308>: DATABASE ACCESSION NUMBER: AK103604
  ref <309>: DATABASE ENTRY DATE: 2002-08-28
ggtggaaccttatctccttctctctcgtcgctttctgcgtctccccgtctctccttcgccaacagccgagaagaggcagagagagcgccgccccccgtccctctctctccctctcgtcctcgcccccatccctctcgtctttcccttgccggcagcagaggaggcggcagcgacggcttcagctgctcccacgggccggatcgggcagtggcggtggcgtcggcggcttccgctggcgaatccggcgggtggatacaaatcagtgttccgataggtaaaaccctgctctcagcatctgcccttttgaattcgccaagagccagcatctgcccttttgaattcgccaagggccgcatctgcccatttgattttgaattcgccaagagccagcaacagcgcccccgcgccccctccctcctccgcaataaacagccacacgcgccgcccccatgtccaccctcatcgccacagcgcaccaccaccaccaccaccaccaccaccaccaccgtctccagccatggcctcctccgcctccctgcagcgcttcctccccccgtacccccacgcggcagcatcccgctgccgccctcccggcgtccgcgcccgccccgtgcagtcgtcgacggtgtccgcaccgtcctcctcgactccggcggcggacgaggccgtgtcggcggggcggctggagccgcgggtggagcagcgggagggccggtactgggtgctcaaggagaagtaccggacggggctgaacccgcaggagaaggtgaagctggggaaggagcccatgtcattgttcatggagggcggcatcaaggagctcgccaagatgcccatggaggagatcgaggccgacaagctctccaaggaggacatcgacgtgcggctcaagtggctcggcctcttccaccgccgcaagcatcagtatgggcggttcatgatgcggctgaagctgccaaacggtgtgacgacgagcgagcagacgaggtacctggcgagcgtgatcgaggcgtacggcaaggagggctgcgccgacgtgacaacccgccggcagatccgcggcgtcacgctccccgacgtgccggccatcctcgacgggctcaacgccgtcggcctcaccagcctccagagcggcatggacaacgtccgcaaccccgtcggcaacccgctcgccggcatcgaccccgacgagatcgtcgacacgcgatcctacaccaacctcctctcctcctacatcaccagcaacttccagggcaaccccaccatcaccaacctgccgaggaagtggaacgtgtgcgtgatcgggtcgcacgatctgtacgagcacccacacatcaacgacctcgcgtacatgccggcggtgaagggcggcaagttcgggttcaacctcctcgtcggcgggttcataagccccaagaggtgggaggaggcgctgccgctcgacgcctgggtccccggcgacgacatcatcccggtgtgcaaggccgttctcgaggcgtaccgcgacctcggcaccaggggcaaccgccagaagacccgcatgatgtggctcatcgacgaacttggaatggaggcttttcggtcggaggtggagaagaggatgccgaacggcgtgctggagcgcgcggcgccggaggacctcatcgacaagaaatggcagaggagggactacctcggcgtgcacccgcagaagcaggaagggatgtcctacgtcggcctgcacgtgcccgtcggccgggtgcaggcggcggacatgttcgagctcgcacgcctcgccgacgagtacggctccggcgagctccgcctcaccgtggagcagaacatcgtgatcccgaacgtcaagaacgagaaggtggaggcgctgctctccgagccgctgcttcagaagttctccccgcagccgtcgctgctgctcaagggcctcgtcgcgtgcaccggcaaccagttctgcggccaggccatcatcgagacgaagcagcgggcgctgctggtgacgtcgcaggtggagaagctcgtgtcggtgccccgggcggtgcggatgcactggaccggctgccccaacagctgcggccaggtgcaggtcgccgacatcggcttcatgggctgcctcaccaaggacagcgccggcaagatcgttgaggcggccgacatcttcgtcggcggccgcgtcggcagcgactcgcacctcgccggcgcgtacaagaagtccgtgccgtgcgacgagctggcgccgatcgtcgccgacatcctggtcgagcggttcggggccgtgcggagggagagggaggaggacgaggagtaggaacacagactggggtgttttgcttgctccggtgatctctcgccgtccttgtaaagtagacgacaatatgccttcgcccatggcacgcttgtactgtcacgttttggtttgatcttgtagcccaaaagttgtgttcattctcgttacagtcttacagaggatgattgattgataaataaagaagaaacagattctgc

SEQ ID NO: 28163 - DNA, 1600 bp, Oryza sativa
  ref <308>: DATABASE ACCESSION NUMBER: AK103605
  ref <309>: DATABASE ENTRY DATE: 2002-08-28
gcccatttcatgcaccgccgcgagttcgcgctctttctgctgtatctgaagatggacacacacgctcttcctctgctctgcatcctctgcctcatcacccttcttcagctcgacggcggcgctgccatctccggcggcaccaacgacggctccgagcgctggggatacgtccaagtccggccaaaggcgcacctgttctggtggtactacaggagcccgcagcgggtgtcgtcgccgggggggaagccatggccgaccatcctctggctgcaaggcggcccgggagcgtcgggcgtcgggctcggcaacttcctggaggtcggcccgctggacggcgacctgaagccgcgcggctcgacgtggctgcagaaggccgacctcatcttcgtggacaacccggtggggacaggatacagctacgtggaggacgacgcgctgctcgtcacgacggacggcgaggcggcggcggacctggcggcgctgctcagggcgctcgccgccaaggagatacccaccctgcagagcagcccgctgttcctcgtcgccgagtcctacggcggcaagtacgccgccacgctcggcgtctccctcgcccgggccatccgcgccggcggcctcaagctcacgctcgccggcgtggcgctcggcgacagctggatctcgccggaggatttcgcgctgtcgtacgggccgcttctgcggcaggtgtcgaggctggacagcaatggcgccgacagcgcgagcaagaaagcacaggtggtgaagcagcgcatcgcatcggggcagtggaagctggcgcagtacgcgctgagcagcatgctcacctcgatcgtcgccagcagcggccacgtggacgtgtacaacttcctgctcgacaccgggatggacccggtcgccgccggcgctgctccggcgaggagcttcccgccggcgtactcggcgtacctggacagcaagctgtccgtcggagactccattcgaagcgtcatgaatggagccatcaaggagaagctcaagatcatccctaaagacgttgtatgggaggagcagtcctacacggtctacaatgcgctgatcaatgacttcatgaagccgagaattcaggaggtcgatgagctcctgtcgtatggcgtcaatgtgacggtgtacaatggacagctcgatgtgatctgctcaacggttggtgcagaagcatgggttcagaagctcaaatgggatgggctgaagaacttcttgagattgccaaggcagcctctacattgtggctctagtgaagtcacaaagggctttgtcagatcctacaaaaacctgcatttctactggatccttggagctggccattttgtacctgttgatcagccctgcattgctcttgacatgattggtagcataacgcaatcttcagttcagtctcatccatagaagtgggtcaatacaaaggatggaaaggaaagaaactaaacctagtttgcttttcataagcatatacgaaggtctgttacgtagaagccaattgcattgacagtattagctgggcatttttctttgttattataacattctgagtttacatcataaatcaaagaatatgattatgtcc

SEQ ID NO: 28164 - DNA, 3030 bp, Oryza sativa
  ref <308>: DATABASE ACCESSION NUMBER: AK103606
  ref <309>: DATABASE ENTRY DATE: 2002-08-28
gaccttcaccaccatgtcgtcgttctccaagagagtccctcaccatgtggcatcactcctagcaatgatgctcatcctccagctagtccagaccaccacgctcgacgaccttacgacgacctcctccgaaacgacgccggcaatgtgccttccagaccaggcttccgcgctgctccggctgaagcactccttcaacgcgacggccggcgactactccaccacctttcgatcatgggtccctggtgcagactgctgtcgctgggagggcgtccactgcgacggcgccgatggccgtgtcacctcactcgacttgggaggccacaacctgcaagccggcggcctcgaccatgcactgttcaggttaacctcactcaagcacctcaacctctctggtaacatcttcaccatgtcccagctcccggccactggattcgagcagctcaccgagctcacacaccttgacctctcggacaccaacatcgccggcaaggtgccggctggcattgggcgcctcgtgagcctggtctacctcgacctctccacgagcttcgtcatcgtgtcttacgatgacgaaaacagcatcacacagtacgctgtagactccattgggcagctctcagcaccaaacatggagaccttgctcacaaacctcactaacctggaggagctccatatgggaatggtggatatgtccaataatggcgaattgtggtgtgaccacatagccaagtacacacctaagcttcaagttcttagtttaccttactgctcactgtcaggtcccgtatgcgcatcatttgctgccatgcgatcgctcaccacgatcgagcttcattacaatttattgtcaggttcagtgccagagttcttggctggcttttccaacctcactgttcttcagctatccacaaacaagtttcaaggatggtttcctcccatcatcttccagcacaagaagttgagaacaattgatctttctaagaatcctggcatatctggtaatctgccaaatttctcacaggacagtagcttggagaatttgtccgtcagtagaacaaacttcacaggtatgattccgagctccatcagcaatctcagatctctgaagaagttgggcattggtgcaagtggtttctctggaacactgccctcttcgttaggtagcttcctatacttggatttgctagaagtgtctgggttccagatagtaggatccatgccgtcatggatatccaacctaacttctcttactgttctccagttctccaactgcggattgtctggacatgtaccttcttcaataggaaacttaagggaattgattaagttagcactgtacaactgcaagttttcagggaaggtgcctccgcagatcttaaatttgactcatttggaaactctcgtgctccattcgaacaattttgacggcacaatagaactcacctcattctcaaaactgaaaaacctatccgtcctgaatctctcaaacaataaactagtagtggtagatggagaaaatatttcatcactggtgtcattccccaatttggagttcttaagtttagcatcttgcagcatgtctacttttcccaatatcttgaagcatctcgataagatgtttagtcttgacatttcacataaccagatccaaggagctataccacagtgggcatggaagacatggaaaggcttgcaatttctcctcttgaacatgtcgcacaataactttacaagtcttggatctgatcctttgcttcctcttcatatagaattccttgacctcagtttcaacagtattgaagggcccataccgataccacaagaaggtagcagcacattagattactcgagcaaccaattctcatctattcctcttcattacttaacttaccttggggaaactctcactttcaaggcctccagaaacaaactctctggagatattccaccatcaatatgtaccgctgctacgaatttgcaactctttgatctctcttacaataacttgagtggttcgatcccatcctgcttaatggaggatgccattgaattacaagtattaagtctaaaagaaaataaacttgttggaaatttacctgatagcatcaaggaaggctgttcacttgaggcaatagatttaagtggcaatttgattgacggaaagatacccagatctctagtttcttgcaggaacttggagatccttgacgttggaaacaatcagattagtgactcctttccatgttggatgagtaaacttcgtaaacttcaagtccttgtcctcaagtctaacaagttcactggacaagtaatggatccttcatatacagttgacaggaacagctgtgcatttacgcagctcagaattgctgacatggcctcaaacaacttcaatggaacattgccagaagcatggtttaagatgctcaagtccatgattgccatgactcaaaatgatacactagtcatggaaaataaatattaccatgggcaaacataccagtttactgcctcagttacatacaaagggagtgacacgacaatttccaagatattgaggacccttatgctgattgatttctcaaataatgcattccatggtaccattcctgagactgtcggggggcttgtactgcttcacgggctcaacatgtctcacaatgcccttacaggatcaattccaactcagtttggcaggttgaatcaacttgagtcattggacctctcctcgaatgagctcactggggggatccccaaggagctagcatcactcaacttcctttcaacactgaatttgtcctacaacatgttggttggaagaataccaaactcatatcagttttccaccttttccaacaattcttttcttggaaacattggtttgtgtggaccaccgttatccaaacaatgtgacaacccaaaagagcccattgttatgacatacacttcggagaaatccacagatgttgtactagtcctcttcactgcattgggatttggtgtttcctatgcaatgacaatcctaatttt

SEQ ID NO: 28165 - DNA, 1475 bp, Oryza sativa
  ref <308>: DATABASE ACCESSION NUMBER: AK103607
  ref <309>: DATABASE ENTRY DATE: 2002-08-28
gattgagtttcagcatcagcgcccccaaaccaaataattttgaactctccggactccggccgccgccttccagaggaacctcgcggctgccggtgccggtgccggagaagacatggccgggaagaagaaggccctaacaaatcccgcctctccctccgcctccgcctccgcttccacccctaagaaatccaccgccacctccaaggaccgctccacgccgaaaccccgcaaaaaccccaaccccaaggaggaggcaccaccgccgccgcccgccaacaacaagcgcctcaacccccaagggggatccaaccgtaagaagaaggccgatgcggggacgccctccaagaagccgaagcgccagccgccggagcccaaacctcggaagcacaagggggccaagagcgagaagccgcaccgggtttccggcgaaggggagaagcccacgcccacgaagaagaagaagaagaaggagagcagcaaggagcccaagcgcgagaagcagcaagcgtccgcgcctatgtcgactccctcgaagaagaacaaggaagccaaacgcgacacaggaggagcggggaagcccacgcccaccaagaggaagctcggcgacgtggatcccccacaggagcgaccgtccggtgaaggccaggcaagctctcccacgcccgccaagaagcggaaggacaaggcggcggcggcggaggcggttgccgaccacggcgccggcagcttcccgatggctcgggtgcggcagataatgcgggccgaggacgccaccatccgcccctccaatgaggctgtcttcctcatcaacaaggccaccgagatattcttgaagaggtttgcagacgatgcttatcgaaatgctttgaaggatcggaagaagtcaattgtgtatgataacctttcaacagcagtgtgcaaccagaaaagatacaagtttctctcagattttgttccacagaaagttacagctgaagatgctttgaaggctccagttagcagccaagtgaaccaaccacaataagttgctagtgctccgcgagggaggtcatcctttcacgagttatctcctgggagggttctgcaattgtaaacgccagctgtgcagctcatgttgccctcaggactggcatcttgcgacatgttcaatatgattctgatcagaatcggaggcttaaaagaagattataaggggaaacctgagtaatctacatatgaaagaagcatgatgaaactttttgtcatgagaatcacttgaaatatgcttgcttagagcctcaaatcaggatcacctttttggctgtgtaagctgtgggttgtgtgaggtggatgtagcttaggctaaatgttactgtgtatttttttttagataatacgttactagtagtatacatttgtgagttctgacttgttcatgtactagttcattacatatattttcgcaggtgcatgctttaccaattacttgctggtgc

SEQ ID NO: 28166 - DNA, 2859 bp, Oryza sativa
  ref <308>: DATABASE ACCESSION NUMBER: AK103608
  ref <309>: DATABASE ENTRY DATE: 2002-08-28
ggcccgtttccccttctcggcttcgtcgccttcttctcctcctcgaacagaagagtcggacccttccaaaagcgacgggtagattgccagccagcccaactccttcctactcctggtactactcctacataagaagaagtcctcccgactcccatcgcgatccctcgccctgctctgctgcagtgggagtaggacaagcggccgcgtcgctctccggttccatccatccacggagtagtagagtgtgccagtattagtacgagtggcagtttattctgcgtcctgcttcgttcgtcggtgaggaggaggaggaggagagagggaggggggcagagtgggcgcggcggcatttcggagggggatgtgtagcggcggcggcggctagggtggtggtttgctgttcttcgaggacaaatatggctactattcaagatataggtgtctctgcagctatcaacatactgagtgccatcactttcctgctagcgtttgctttcctgcgactacagcccatcaacgatagggtttacttcccaaagtggtatctcaaaggtgcaagagagagtccaagtcatgggggtgcatttgtgcggaagtttgtcaatttggacatgcgatcatacttgaaggtcttaagttggatgcctgctgctctcaaaatgccagaggatgagttaattagccatgcaggccttgattcagctgtctatctgcggatctacttaatagggcttaaaatatttgctccaatcacagttctagcatttattattcttgtgcctgttaattggaccaatattacccttcaaagctcgaaggtgcagcacagtgatattgacaaactttcaatatccaacatacctgtagggtcaaagaggttcgcagctcacctgaccatggcttatgttttcacattttggacatgctatgtgctgttacgggagtatgaaatagtggcaacaatgcgtctgcgctttcttgcatcagagaagcgccgcccagatcagttcacggtccttgtgcggaatataccgcctgatcctgatgaatcaattggtgagcttgtggaacatttcttccttgtaaaccatcctgaccattatcttacgcaccaggttgtctataatgcaaataagcttgataagatggtcaaagagaagaagaaaatgcagaattggcttgattactatcagctgaaatatgaaagaaatacatctcaaaggcctactacaaagactggttttcttggatgttttggttcaaaggtggatgctattgaatactacacatctgaaattgagaggatagaaaaggaagaaactgatgaacgtggaaagattatgaaggatccaaaatcagttgtgccagcagcctttgtttccttccgatcgcggtggggagcagcagtgtgtgctcagacacagcaaaccagtaatccaactgtctggttgaccgagtgggccccagaacctcgtgatgtctattgggataacctctctattccttttgtttacctgacaattaggaggctgataattgcggttgcattcttcttcctgaacttcttttatgtgctcccgattgcatttgttcagtcccttgcaaatattgaagggattgagaaggcagctccatttctgaagcctttgattgaaatgcgtactattaaatcattcatccaaggatttctgccaggaattgctctgaagattttccttatattgctccctagcatattaatgtttatgtctaaagttgaaggattgacatcggtgtcctcactggagaggagatctgcttttaagtactatatcttcttgttctttaatgtattcttgggaagcattattgcaggatctgctttagagcagctcaaaacatttcttcaccaatcagcaaatgaaataccaaggacaattggtgaagcaattccaatgaaagcaaccttttttataacatatgtaatggttgatggttgggctggggtagctggtgaaattttaagattgaaaccattgataatcttccacttgaaaaactttttcttggtcaagactgagaaagacagagaagaagcaatggaccctggaagcattggttttgactcaaatgagcctcaaatacagctctatttcttgctcggacttgtctatgctgtggtgacaccatttttgcttcctttcatattaatattctttgggttagcatatgtggtataccgtcaccagataataaatgtgtacaaccaagaatatgaaagtgcagcagcattttggccaagtgttcatggacgcataattgtagcattaatcgtatcacagctgcttctccttggattactaagcacaaaaggtgctggccagtcaacaccggtgctccttgttctccctgttgtaaccttttatttctataaatactgcaagaatcgctatgagcctgcttttgtggaatatccattacaggatgcaatgcggaaggataccctagaacgcgcaagagagccagggttcgacctcaaaggatacctgatgaatgcctacatccacccggtgttcaaaggcgacgaggacgacgagaagttctccatctccgacgaaccagaggcggagcaggttctcgtggcgacaaagcgccagtccagacggaacaccccagttccgagtaaatacaatggctctgaatcaccttcccttgctgaaattgtaaatgatcaacggctataaatataatagaggtgatggctagtaggtttgtagtttcgacatgtacattaaagagcaccaataatggttttgaggatcggttttgtttacagcaaggaggaatggcaaaatatatatatatataccaatgggctcc

SEQ ID NO: 28167 - DNA, 1663 bp, Oryza sativa
  ref <308>: DATABASE ACCESSION NUMBER: AK103609
  ref <309>: DATABASE ENTRY DATE: 2002-08-28
gagcttctcgcgctgaagcttcaaacctacccaaattaccaaactatactactgctcgacacggttcgttttttttcaccgacccaagaagcagagaaagaaaggaggtgagaaatctggtgggtgtggtgatggccgcggcgagtttgatcaaggcgcccgtggggcagaatcctgcgaggatgggcgcggggaggagcagcggaggaggaggggtggtcaggtgctcgctgcagggcgccgtggtgggcggccgggcggagtggcagagcagctgcgccgtgctgtccagcaaggtggccgcgctcggggcggcgtccccgcacgccgcggcgccaagcttcgttaatgggcatgtcgcgccgctggtcccggagcagcaggcggcggcggaggacggcggggcggtgctggatttggtgcccgtgagcagcgttaatggcgggggcgtcgccaagaacctgccgcagccgctgcggatctcggatctgtcgccggcgccgatgcacgggtcgcagctgcgcgtggcgtaccagggcgtccccggtgcgtacagcgagaaggcggccgggaaggcgtacccgggctgcgatgccatcccctgcgaccagttcgaggtggcgttctcggccgtggagctgtggatcgccgaccgcgccgtgctccccgtggagaactcgctgggcggcagcatccaccgcaactacgacctcctgctcaggcaccggctccacatcgtcggcgaggtgcagctccccgtgcaccactgcctcatggcgctcccgggggtccgcaaggagtgcctcacccgcgtgatgagccacccgcaggcgctggcgcagtgcgagcacacgctcaccgccatggggctcaacgtcgtccgcgaggccttcgacgacaccgcgggcgccgccgagtacgtcgccgccaacggcctccgcgacacggccgccatcgcctcctcccgcgccgccgagctgtacggcatggaggtgctcgccgacggcatccaggacgactgcggcaacgtcacccgcttcgtcatgctcgcccgcgagcccatcgtgccccgcaccgaccgccccttcaagaccagcatcgtgttcgcccacgacaaggagggcacctccgtcctcttcaaggtcctctccgccttcgccttccgcgacatcaccctcaccaagatcgagagccgcccgcaccgccaccgccccatccgcctcgtcgacgacgccaacgtcggcaccgccaagcacttcgagtacatgttctacgtcgacttccaggcctccctcgccgagccccgcgcgcagaacgcgctcgccgaggtgcaggagtacacctccttcctccgggtgctcggcagctaccccatggacatgacccccatgaccgccggctcctcctccaccgtcacctccgacgattcctcctccacttgaccgccgccgccgacgaggagacgcgcatcgatcgagtagggacgttggtttcttgtggtcatgtcgtcctactcatcctccccccattgccgggagtaattaattttgcctttcattttttcttattcttcttctcgtcattatacgtgtaattgttccactccagataattaatctgcagtaaatattactagtacaaacgaattcctgttcttgtgttg

SEQ ID NO: 28168 - DNA, 1420 bp, Oryza sativa
  ref <308>: DATABASE ACCESSION NUMBER: AK103610
  ref <309>: DATABASE ENTRY DATE: 2002-08-28
ggtatcgacgaaaggcgttttctccgagtccttaacaaaacttgattacctttcaatcaatcatagcttcttttggagcttaccactcaccaccatcgatcaccagctccaccatcataatccacccctttgagacatacaccatgcttacaaagctaaaattaagttaagcagcaggcgaccgtgcaaagtctagtaagccacccaaaagtgagcagcagcaaccaacaactgaacctaccctgctctgctcacactgtcagccgatgctgatcacctccttccaatcaatcaacctgccattgctgtacatgagccacaccaccatctgagctcatatataaaccccctccccacccgctgccgcgacctcctcccagccatttcgatcgatcaaggagagcaaagaggggatgtcggtgatcaaggattgtggggggcacaaggggtgcgagtgcgagaaggagaaggtgcaccggcggctgtgctgggcgctggtggcgctggtgctcctgacgctcttcatcgtgctggtggtgtggctggcgctgcggccgcacaagccgcggttctacctgcaggacctgtccgtgctgtgcctcaacgtgacgccgccggcgtccgcctacctcttcaccaccatgcaggcgacggtggcggcgcgcaacgacaacggccgcgtgggcgtctactacgacaaggtggacgtgtacgcgcagtacaaggacgtggccatcacggtgccgacgaggctccccgtggagtaccagggccactacgaccagtccgtctggtcccccttcctccaatcgctcgaccacgtcgtcctcccccccaacctcgccgtcgccctcgcccaggacgagaccgccggctacgtcctcgtcgacatccgcctcgacggctgggtccgatggaaggtcggcacctggatctccggccactaccacctccgcgtcaactgccccgccctcctcaccgtcaacgacggcaagggcagctacggcgtcaactacggcggcggcgatggctacttccgcttccagcaagcagctgcatgcgccgtcgatgtctagctgtgtcttctttcttcatttcctcctcctccttctcttcttctttttaattagtttcacggcttctcttcttcttcttgcttaatttttctcaccggaatcaatcatctcatatcaatgaagaaaaaccgatcgatgatagtactagcttcttaatttagaccgtagttggtttggagctagtgtagcttggagtgaaagggaaaattggggtattctgaaaagatgcataatagacgtacagctgggagtagacgtgaagtgtctgcataattcgatttgcatttggcaataattatattccaatgtgagtacatcaataattaaaaaaaatgttcatatgt

SEQ ID NO: 28169 - DNA, 1605 bp, Oryza sativa
  ref <308>: DATABASE ACCESSION NUMBER: AK103611
  ref <309>: DATABASE ENTRY DATE: 2002-08-28
gagtagctgctaattaagcagcaagcaaaggtacccagcaaccttccctttggcttcccccacaaaacgcggccgccgcgcgcgtatccgaggctgaggctcctcttcctcttcctcttcctcctcctctcggcggcggcggcggcggcgggtctccatttgctcaagcttgcctgccatgcccatggggacgaggtagcgcttcccttcctgcctgcggtacatactaactaagcagagggcatccctcatatataggctttgcgaaatcaatcaacaagcttggggaggagaagaggaagaggaagaggagatggagcaggggggtgaggccggcaccggcggtgggctgggcaacctgcgcgcgctgctggccatcctccagtggtggggcttcaacgtcaccgtcatcatcatcaacaagtggatcttccagaagctggatttcaaatttcctctgacggtgtcttgtgtccacttcatatgctcttcaattggggcttatattgcaatccatgtgctcaaagcaaaaccactcattcaagtcgaaccagaagaccgttggagaaggatttttccaatgtcatttgtcttctgcataaacatcgtgctcggaaatgtcagcctgcgctacatcccagtctcctttatgcagactatcaaatctttcacccctgcaaccacggttattctgcagtggttagtttggagcaagcattttgagtggcgcatatgggcttcgctggtcccaatagttgggggaatactcctaacttcaataacagagcttagtttcaacatgtttggtttctgtgctgccatggttggctgccttgctacatctaccaagaccattttggcagagtctctactccacggatacaaatttgacagcattaacacagtgtactacatggcaccctttgccaccatgatactggctctaccagcagtgttacttgaaggaggcggtgtggttacctggttctacacacatgactccattgcttctgcactagttatcatcataggctctggagtgcttgcattttgcctaaacttctccattttctacgtgatccattcaaccactgcagtgaccttcaatgttgctggcaacctgaaagttgctgttgctgtattggtgtcatggttgatcttccggaaccctatctctcctatgaatgcaatcggatgcgcgatcacgctcgttggctgtactttttatgggtatgtgaggcatttgatccctcaacagcaggctgtagctccaggaacaggaagcccaacaacatcgcaaacaaattcgccgagaagtcggatggagatgctcccccttgtaggcgacaagcaagaaaaggtttaacaaaagaatacactttgtactatgcaatagtcattatggtctggattcccttgtagttcgaactattgtgttccttcaagttactgttttcaaattggccagaaactgccgcacgctaaacttcctttctgtgtagtgcatacggaattttttctactactaggatgtcacgcaagtccagcgtcattttctgttgctagacgtgtaacgcactgaatgaacagttggatatctcatct

SEQ ID NO: 28170 - DNA, 875 bp, Oryza sativa
  ref <308>: DATABASE ACCESSION NUMBER: AK103612
  ref <309>: DATABASE ENTRY DATE: 2002-08-28
gggattcccaccccgcgtgcagcttaggcgaaccctcctccctccgttccacacgccccagttccccgctctctccccctcacctcctcatcctcctcctccgctgccgccgccgcctccgccatgggcagggggaagttcaagggcaagcccaccggccgccgcaacttctccacccccgaggagatcgctgctggtacttcaggtggtccacgcacatttaagaagaatttagctgaggaggaaaaggaggaggaagaagacgacatagaagaatctgaagaggaagaatctgaagatgagtctgaagggaaggctaaacataaaggaactgaaggtcttattcagattgaaaacccgaacttagtgaaagcaaagaatataaaagccaaggaagttgatctcggaaagacaactgagctctcgaggcgtgaaagagaggagatcgagaaacagaaagctcatgagcgctatatgaagcttcaggagcaaggaaaaacagaacaagctaggaaagatttggaacgtcttgctttaataagacaacaaagagctgatgctgcaaagaaacgtgaagaggagaaagctgccaaagaacagaggaaggctgaagcacgcaaataactgcggcaaccatgtggacaatgaaggcgtgagctgcgtcggctggatatttatttcttatatatatgcccctagtatcttttaaactcggtctcgatttcgatatttccataaaattatgcattgactaactgtagtattgtcgacgtggcttgatgtaaacttgagcttggcagggtgcatatgtagtatgatcagtttatgcaaaatttgcgtttacttacgttgatatataaatcaagaacgttgtg

SEQ ID NO: 28171 - DNA, 1544 bp, Oryza sativa
  ref <308>: DATABASE ACCESSION NUMBER: AK103613
  ref <309>: DATABASE ENTRY DATE: 2002-08-28
gagattcctgaaatgcccttgtactactcgccttctcttgctgcagactattggggcactcgcggcgagcttgtccgttgagaggcggcgaggttgcgcccgaccaccgcgcgatgtcaaccctgatcatagccaagatgagggccggtactaggggctcggccactcgagcttgactcccggggcgaggttgtgcctgaccgccggtgagctgcgacgctgtgacgagcttgatcccgactgcatgaggcgtagtgagtgcctcaaccagtctctcatggcgcgcatcggcgcatcaacgtcggggaggagtgagtgagaggagtgaagatggggaggtgtgtggtcataggagtgcgaaggtcaacgccgatgggggaaggacctgcggtcgccagatccggcgaccccacctctcgcaggcgatagatcggccggctcccgttcctcccaatgtgggatctgcgcgcctacgacgagcagctgctcatctcggtccgtgcctcatcgaagtgaggaggcacttgctctgattatgtgttgacgaggacggcgcaggcgcgcagcccggcgtccggcggtggctgcttccgtggcctcaagtgacgctgctgaagctgacgatctgggcatccggcatatcaagctgcagcggaaccggcggtgagcacaaatctgggagtcgcaatcgcatcccccagccagccgacatgcacgatttctgcagcttcaattcctcatccttcaccgcacatcttcctccaaatccctctctctctctcctctcctctctgccgagtaaaccgtcatcgagagaacattagttagctcttgagaaaaatcccagtttcatgtgcgtatttgtttttggtgtgctgttttttttttaatttctagttctcgaagacttttgctggatactatcttcttcccatgcttctcgcaggctatcgtcttcaatgtgttgatgtgttccgatatgtaatcctaacaatcttcttgctggtgtttttttttttccttgtggtgtgcactccgctgactcaggcatgctgatcgatagccatcgactccaggaagttctgatcagccgcaccagaggcttgcgttgtgaagaggtgcaaatcgctttgattcagtgatattcatgaaagaacctctgtttgcgctcaatgggatatcattttctgatttatttatttttatggtttgccagttcgcctcaagtgatttcttctggtgattttgattcacatgagttcttgaaatcttttggggtggaaaaattcgttgttttactgaaatgctaaacatctattccgccccctttgtagaattgtgccatctgcccatatgtttttttttttgactgaatccgcccatatgtttttatcatccctgaaaaaaaaatgtctcatataatatatcgataccttatggtagatatattattcaataaaaaaatgtcaggatgtatattatagtagatagatacctcgatttgtaaatgccagttttttggtgaatggaaataccatttttgc

SEQ ID NO: 28172 - DNA, 1416 bp, Oryza sativa
  ref <308>: DATABASE ACCESSION NUMBER: AK103614
  ref <309>: DATABASE ENTRY DATE: 2002-08-28
ggctgtgtgcaaccgagcctattcacacctccaaggagcaaggcacaaggttacagacgtgtcacgtgcgcgcgcgcatctctctgtcacgcacgcaacgtactcacttacgtgctcagccatggcggccaacaaggccgtcgtcgttcgtcgccgccgtcctcctcctcctcgccgtcgtcgcccggcgagcgtcgtcgcagagctacaacgcgatatacaacttcggcgactccatcaccgacaccggcaacctctgcaccggcggctgcccgtcgtggctcaccaccggccagcctccctacggcaacaccttcttcggcagccccaccggccgctgcaccaacggccgcgtcatcatcgacttcctagctgatcgcttcggattgccgctgctcccgccgtcgaaggcgagcggcggcgacttcaagaagggcgcgaacatggccatcatcggcgccaccaccatgaacttcgacttcttccagtcgctcgggttgggcaacagcatctggaacaacggccctctggacacccaaatccagtggttccagcagctcttgccctccatctgcggcaacgattgcaagagctacctgagcaagtcgctgttcatcgtgggcgagttcgggggcaacgactacaacgcccctctcttcggcggcaagagcatggacgagacgctgatcgggctgggagcggtggacatcgtggtgccgggggtgatgccgatcgggtgcttcccgctgtacctgacgctgtaccagagctccaactccgacgactacgacggcaatggctgcctcaagagctacaactccctctccgtctaccacaacggcctgctcaagcaggggctcgccggcgtccaggccaagtaccaggccgtccgcctcatgtacggcaacttctacgaccaggtcacccagatggttcagtctcccgggagtttcgggctacaatatggcctgaaagtgtgctgcggcgccggtgggcaaggctcctacaactacaataacaaggcgaggtgtggcatgtcaggggcaagtgcctgtggagacccggagaattacttggtctgggatggcattcacctcaccgaggctgcctaccgttcgatcgcggatggatggctcagcgggccatactgtagcccagctattctgcactgagctgcagcctgcagctgggctattttcatgttcgtaataaattaatactactgtatcacagtatatgttgttatatatggcaggggatactctggaaaataatgctagggtctagggaaatggaatggaaatatgggagccactggtggtttgaatctcattacatgattactcatgtatgcattttcgagcactgccaatgtatttttactccaaaattcaatacatttccactaatgttgtc

SEQ ID NO: 28173 - DNA, 1559 bp, Oryza sativa
  ref <308>: DATABASE ACCESSION NUMBER: AK103615
  ref <309>: DATABASE ENTRY DATE: 2002-08-28
tcaaggtaggcaaggcacgcgagccctagccgccagccgactcgaccagcgcccggaggcggagcacccgccgccgccgccctcgccatcgtcggcttcacccctcatcggcaacctagtgcaggttgttttctgaagatggctgacgatttgggccctcccactgtgctccagaagatacatgggcagtccatgatgttcagcaagatctcaccttattctttgatgaagaatcccgcactctacaatgccaacacttcttacagtgtgcctctgaagtcatacaatgggatggatgggaacaatgggttctcatctgtcacatctgtatccccagtctttgcttctgccccaaaggagaaaggtctttctgggtttatgattgacttcatgatgggtggagtttcagctgctgtctccaagactgctgctgctcccattgagcgaatcaagcttctcattcaaaaccaggatgaaatgatcaagagtggtaggctctctcacccatacaaaggtattgcggactgctttggccgcacaattaaggatgaaggtgtgattgcactgtggagagggaacactgctaatgtcatccgttactttcctacccaggccttgaactttgccttcaaagaccatttcaagcgcatgttcaactttaagaaggacaaggatggttactggaagtggtttgctggaaacctggcttctggaggagctgctggtgcttgctctctcttgtttgtgtattctctggattatgctcgtactcgtctggctaatgatgccaaggctgcaaagaagggtggtgggaggcaattcaatggacttgttgatgtttaccgcaagacccttgcgtctgatggtattgctggtctgtaccgtggattcaacatctcctgtgttggtatcattgtctatcgtgggctgtactttggaatgtatgattctctcaagccagtcgttcttgttggcaaccttcaggataacttccttgccagcttcttacttggttggggcattaccattggtgctggccttgcttcatacccaatcgacactgttcgtcgtcggatgatgatgacatctggtgaggctgtcaagtacaacagctccttggatgcgttcaagcagattgttgcgaaggagggtgcgaagtcactcttcaagggcgctggtgctaacattctgcgtgctgttgctggtgctggtgtgcttgctggatatgacaagctgcaggtggtcgtctttggtaagaagtacggttctggtggtggctaagactagatgatgatgataagcagtggggaactatggacatattaggtgctttcggatgctgttgcgtttaaataaatttaacgtatggacaccgtttacatgttattaggcgtcaggtgaggtttctgagtgtgtaaatcggtggcagatgcttatgccttttttgttgggggatcgagcaagacgagttttcctagttgaaaacatgccaaattattgtctgtgaaagcgtttcttgagattgttattgatgtggttcctagtcgattatatagatt

SEQ ID NO: 28174 - DNA, 2886 bp, Oryza sativa
  ref <308>: DATABASE ACCESSION NUMBER: AK103616
  ref <309>: DATABASE ENTRY DATE: 2002-08-28
ggatttctcccaaaccaaaaccaaccaaacctcgcgggcggccgcctagggcttatggctgccgcgatggccaccggcgggctcgaccccgccgcccgcgaggccgagctcgcccacctcccgggccccaagctcgtcgaccacctctgcaccacccaccgccgggccgactacgaggcagtcgcgcgggtgctcgacgcccgggaccgcaggctcgaggccgcgctcgccgagaacgaggacctgcggaggaagtgcgacgcgctgctggtcggtcagcgccggccgcgggaggaggaggaggaggaggcggccggggagaagccgccccccggaatcatcgccgccccggaaccggcacggcgggacgaggaggaagtcgaggggtcgtcagaggaaggggaggttagaggcgtcgactttattgacctctcctcctcctcctccgacgacgaggaggagaaggaggtggaggcgggccgcggcgctggttcgagggttccgatcatcaaggaggcgcccgatgacgcggagggggacgaggacgacaccttgccgctgagccagctctggaagaggcgtcggctaggtgagcccggggctgtgaaatcggagaaaggagatgggcacaatccggtcgattctggggggaatgatccaccgaaatgtacttctgcgaggacggatgttccggaagcatcaaccggggagatggtgagtaggcctggggattcgatggtagcagctttcgtgcagggtaagggaacagtgcaaccggagaatgtgggtggggaaatgcccagggtaatgctgcattccccggcacaagttatccggagcaccttgcagaaaagaaaatttggcaagaaagatggttcatctgctatttcaggggacactacttcttcccaagcaagaagtacaagccttgcacccaagagagaaggttcagctgctgttccagggtacactacgtcttcccaagcaagaaatacaggcctttcacccaagaaatgcagggattcaacgagcccagatgatgaaatgtgcaatgcacttgctgattctgtacaggttggagctggtagcacgatgccgaggggtcccggtgagcaagacaaaggaattggtgcagtgcaaagggcaacggtgctgcatgggactagtggaattggggagcaaggcggtaagcttgattctactccgactaaagttagggaatcgaacaggagagagggaggactgcagaacaaatcaatcgattcgaagtcaaatgatgcgctgaaacaccaggataaaaaagatggtagaatggtacagaaaggggatctctcagtgcagtcatgtgtgcctgctaggccaatagttgctagtgttccttcggtaactaaaaattctgaaaagggaaacagtgaaaagggagttagtcaaccaccaaagggaaatgaccaaatgaacaagatgtcaatggtggaatcatcatccaaatgtgggtatgagaaagtcggggctgatgtgcagaagtgctcacctctaccaagacaaagtgaagaaggaagtgtagcaaggggagtagtttcatttgaagagactggaatagcaacagttcatcctctgagcattcgcaatctgtcaggaccagaacttcgaaacttaaacaaaggaggtggtgaattgtcaaagaaattggtggttgaagggtcaccaaaatatggagaaaagaataatgatgctcgttcagagaaaaactcatctccattaggacagagtgaagatgtcaagatcattcgtgaaggggcttcaaatgaagagccaagggtgggaagattgtctccttcgatcctaagcaactactcaacaggtgaacaaattcattcagtgagtaagaatgctgaattatgcagtccgacagccaaaaaagctttgtttgaacctggatcttcatgtacgcctttaaagcacacggtttgtccaccttccagtggtaaaagcatctctatccaggcaaaaggggaaataaatttgttaccttcagctatgtcaaggcactgggaaaccgctgcacacatgattgcctcacttaggggaaacatggagctctctatgcaagctctctgtgctctttaccgccaaaggaagttagtaatcatgtcaactgaaggacaacaaactgggactactggactcaccaaaattgatgccgtcagggcaattaggttgttagaatttcttttggacggtaagcttaaagggcctctgaaaagaactgccaaggaactactaagccatgatgctacagggcccactttcctggagaaagtagcactaagtttctccaaagaactgttcgatatttacaagaacaagaaggatccgtacttctgttgacagcaaggaagcgatacgtggtttaacattcagatatccataacttgtcatatagtagggtcactatagtttgttgtcatgaacagctgctgctgaaattagcagtttactcaccttccctgactacaacaattagcagtctaggtcctccgtccgtgaaccatggtttcagctaatagtcatgaagcttggtcgtggtgggcaactattctatgcatttaaacccgccagcccggcgaaaaaaaattctatacatttaaatacgaaatattgaagagacatcggaagcactacaagagtttgaagctccagtgccttccactgttttaagatgttgatgctgcaaagtatagcacctcttgtgttgcatagttttgtgactgcacagagcctccatccagtagatcccattttgtgagttcgagttcttgagacatcatgtaatgcaggggtcaattgatggatgcagatatctcttgcaaagtttttgaattgatc

SEQ ID NO: 28175 - DNA, 3864 bp, Oryza sativa
  ref <308>: DATABASE ACCESSION NUMBER: AK103617
  ref <309>: DATABASE ENTRY DATE: 2002-08-28
ggtttcctttccccacacttcatcccccccacttccaccacgccgccgtcgtcgccgccgccgccgccgccggcggtcgcccgacctcgccggcgatatgcctgaaaaggcggcggaggccaacctccgcaagcagctggagcaaaccctcgccggcgagccatccagcccgctccaccactacaacctcggcgtcttcctatgggaccgcgcggaggcggcggcgagggaggagggcgaggaggaggaggaggtgaggcggctccgtgcggcggcggccgagcgcttcctcgcggcggccaagctggaccccaacgacggcgtccccttccgcttcctcggccaccattatgcgcttgccggcgacgcgcagcgagcggccaagtgctatcagcgggcggcgacgctcaaccctgatgatgccgaggctggggaggcggtctgtgatttgctagatttggagggcaaggaaagcttggagatcgctttgtgcaaggaggcagctggcaagtcaccccgggcattttgggcgttccggaggttggggtacttacaggttcatcagaagaaatggtcagaggctatacagagccttcagtatgcaatacgaggttacccaacatgtgcagatttatgggaagcactcggtctggcataccaccgtttgggcatgtttactgcagcagtaaagtcgtatgggcgagctgttgaactggatggttccaaggtctttgcgttgatagaaagtggaaacatccagctaatgcttggttattttagaaagggtgttgaacagttccgctctgccttggagatggctcctcaaaatcattccgcgtactttggtcttgcttctgcattgcttgcttgggcaaggcagtgtgtaatgactggggcctttggctgggcagctagtctgttgaaggaagcatgcaaagctgccaaagtttgtacttctttgactggaaacctttcctgtgtttggaaactgcatggagatgctcagctcgcacttgcaagatgctttccatggggtgatggtaatatcaaggggggtatggatgatggtactttcaggactactgtacttgagtggagaaatacatgtttgttggctgcaaatggtgcaaaattctcataccaacgagctttgcatctcactccctgggaagctaatattcacaatgacactgctatatgtcttgatctcatttataccattgaggagaataatagtctagatcccataacttgggaactgccagagaaaatgtcgttgggtgggttgatactggaaccagtcaataaggatttttgggttacattgggctcggtgtcaagtaatcaagctttaaaacagcattcttttatcagagcactgcatcttgatatgtctctctctgaagcttgggcataccttggaaagatttacaggcattcaggtgataagcagttggcaagacaagcatttgatcgagctcgaagcattgatccttcactggccttgccatgggcaggaatgtcagctgaaaattaccaccagcctggggatgggccagtaaatgaatgttttgaaagctgcttgcgggctgtgcagatacttcctcttccagagttccagattggtcttggaacaattgctgctcgttctggtgaacttctatcacctcaggtattgatggctgtaaggcaagctgttcaacgggcacctcattaccctgagtcgcacaacataaatggcttggtttctgaagtgcgatcagacttccaatctgcaattgcatcgtaccgacaagcaaaatttgctttagatatgatgcgcaactccaaaacagactgcagatgtcatattgctgatatttccgtgaatcttgcccggtcactatgtaagactggtcttgcaactgaggcagtgcgggagtgcgaagaattgaaaagacaaggatttctgaatgatgacggattgcagatatatgctctttcattatggaaacttggtcggcatgatgaagctctttcagtatcaagaaacttggctgaaaacttatcgagtatgaagcaggagagtgcaactgcagctttaggattcatatgcacgttgacatacaacatctctgggaaggactctgcagctgcggtcattcataaactgcctggtcaactcaattacagcacacagctgaaatttattatctctgcattagatgctttacagccaaacaagcgttttcagttaccccagctgagtatgcctcctaggcttacatcgtatgaagtcatgagtgaagtccactcaaatattgctcttggaaatgctattggtggggaatcagacaagtttttaagggttgatggtggcctgtcttacctgaaaaaggttctacacatgtatcccgactgcagtttagtaagaaaccaacttggatctctgctactgtcaagtgaagattggatggcttctcataaagcagtaagggttacttcattgtcccggggatatacatccaataggggcttaagatctccacaccaaattcaagcatgtgcagcagtttcttgctatgctacctgcacttcttacccaaagttctcttttccaacatgtgaagatcaatacctaagcggatacaatgcaatatgccgcctgcaaaggtgggttcatctagaaccgtggaaccaagatgcacgtcgcctccttgtacttacccttttccaaaaagcacgtgaagaaaagtatccgaaacatatctgcaccattttgaagaggctgattttgcaagttctctccagtggtagcaattcacaagacaataaggtggttcagtatgggaactacttgttacttcttgtggcttcagaggttagtttgcaatctggtgaccatggcaactgtattgctcaagctactgaagctcttggagtaacttcttcgagcgtggattctttctttgcacacttgcaactgtgtcgggcctatgtgatgcaaggcaatcttttgaactctaggagtgagtacatgaaatgcctgcaaaaccgtacagatactgaaattggctgggtaatacttaagcaacttgcatctatatgttcactggagggtacccctgatgaaatagagatacatctcggaggatgcgttgaaaggaaaggtagcaatgcatccaaatggatgtctcttttttatctagcatgcgctcagtgttcagtatggaatgaggactttgcaagtgctgaaaaagctattgctcaggcatgtgctgaaggggatcctgacagctgtgtcttatttctcaacggcgcaatttgtatggacattgcttggaggttcgcggcccctcaatttatagcccgtgcagcttccagcctcagaaaggcacagcagaaatcacttgcttctttacctattgtgtccctcttactggcccaagcagaaggcagccttggctccaaagccaagtgggagaaaaaccttcgtctagagtggttctcatggcccccagaattgaggcctgctgagctctatttccagatgcatcttctggcaacgcagtcaagtgcagcaacttcccagcagaaccagctagtggaaaccatgcaaaccccagagaagtggcttctcagggcgatacacctgaacccgtcgtgctctaggtactggacggctctgatgcaactcgtgtacgtgtaacccttcgaaattggaagcactgatctttggtgaaaccaaccacaatgtagcgcatttcttgactcagctgtaagcatatggattggctggatgaactgccgacctgtctgtgataagtgaaaaacctgcatatgcttgcttaccgtgttgagggctgagacgtgagatgtttccgg

SEQ ID NO: 28176 - DNA, 780 bp, Oryza sativa
  ref <308>: DATABASE ACCESSION NUMBER: AK103618
  ref <309>: DATABASE ENTRY DATE: 2002-08-28
gatcccggccgatcgagctagcaaatatcaaaaagcagctccagcttcttctgatcgatcgatcgagctgagctataggcagtagctgctaattaagctaattaattgctaagcagtagtagagctagctaattaattaagatggccggcaagaaggtgcaggtttgtgcgctgttccttgccctcaatgtgctcttcaccatgcagatgggtgcagtagtgcaggcatgcgagccctactgccccacaccgacgccgccggtgacgccgcctccgtcgccgccgtcgggtggagggaataagtgcccgatcgacgcgctgaagctgagcgtgtgcgccaacgtgctcaacctgctgaagctgaagatcggcgtgccggagagcgagcagtgctgcccgttgctgggtggcctcgtcgacctcgacgccgccgtctgcctctgcaccgccatcaaggccaacatcctcggcatcaatctcaacatccccgtcgatctctctctccttctcaactactgccacaagacctgcccctccgacttcacctgccctctctaaattaatcgatcctccgatcccttaattaccataccattacaccatgcatcaatatccatatatatataaaccctttcgcacgtacttatactatgttttgtcatacatatatatgtgtcgaacgatcgatctatcactgatatgatatgattgatccatcagcctgatctctgtatcttgttatttgtataccgtcaaataaaagtttcttccacttgtgtt

SEQ ID NO: 28177 - DNA, 793 bp, Oryza sativa
  ref <308>: DATABASE ACCESSION NUMBER: AK103619
  ref <309>: DATABASE ENTRY DATE: 2002-08-28
gctctgctgctgccaattgcgaaggcttttcccccgaaatccagcagcggcggcggcggcggcggcggagatcgacgaatccagcggcggcgcaccccgaagggaaccggagatgcagcagggggacgtcacggaggcgcaggtgacgtgggaggaccagcagaacatcaaccgctttggccgcctcaacaaccgcctccacgagctccacgacgaaatcaagctcgccaaggaagcaaatgagaaccttgatgatgctgggaatgaactcatcctgtcagacgaagacgtggtgcggttccaaattggagaagtgtttgcccacatgccaagggatgatgtggagacaaggctggagcagatgaaagaggatgcagctaagaagttggagaggctggagcaggagaaggaatccatcgtctcccagatggctgaactgaagaagatactgtacggaaagttcaaggacgccatcaacctggaagaagattaatatcgagtaagctgccggatattgaatgatatgatgctctcttagttgagactagaggagctgtgtttgctagactaaactgtttctagtgatttaagaagacacgtttctcgtgatgcatcaacatggttaattcttatgctggattagattagcatggttttgcccagcagatacgtgaatcatgagttgcatggtttcaatttataaaaatgcagtatgggggaatttggacgaattggttatgttattactacatataagccaagttttcagttgcatcaaattgtgttattcttc

SEQ ID NO: 28178 - DNA, 4430 bp, Oryza sativa
  ref <308>: DATABASE ACCESSION NUMBER: AK103620
  ref <309>: DATABASE ENTRY DATE: 2002-08-28
gaaccaccctcccgactccgagagattacttcctccaccttccatccatctcctcttctccccctctccctctctctctcgagatcgaacgaacgaagaaccctaggtcatccatggcgggggcgatccgcgtcaccatggaggtgggcgccgacggcgtcgcggtcgtcaccatctgcaacccgcccgtcaatgcgctgcatcccatcatcatccagggattgaaggagaagtacgcggaggcgatggatcgcgacgacgtcaaggccatcgtgctcaccggtgctggaggcaaattttgtggaggctttgatatcaatgtgttcacagaagttcacaagactggaaatgtatctcttatgcctgatgtatctgttgagcttgtgtcgaatttgatggaagcgggcaaaaagccttcagttgctgccattcaaggccttgctcttggtggcggtttggagttgaccatgggttgccatgctcggatatctacccctgaagctcaacttggactaccagagttgactctgggcataattcctggatttggaggaacccagcgtctgccaaggcttgtaggtctgcccaaagcaatagaaatgatgctgcaatcaaagttcatcacagcaaaggaagggaaagaaggtggtcttgttgatgccctgtgctcccctgatgagttgataaagatgtcacgcctttgggctctggagatagctaattaccgtaaaccttggataagatctcttgccagaacagataggcttggttcactgtctgaagctcgttctgtattaaatagtgcaagacagcaagcgaagaaggttgcagcaaacttgccacagcaccaggcctgcctagatgttatggaagaaggtgtactatgtggaggccatgctggtgttctgaaggaggccaaggttttcaaggagttggtgctatcaccaacatcaaaggcacttgtacatgctttctttgcccagcgtttaaccacaaaggtgccaggtgttactgatgttcaattgaaacctaggaaaataagaaaagttgctgttattggtggtggtttgatgggctctggaattgcaacagctcttcttgttagcaatacatccgttgtgcttaaggaagtaaatcctcaattcctgcaaaggggacagaagatgatagcagctaatcttgagggtctagtcaagaggggctcattgacaaaggacaagatgaacaaggccatgtcacttctcaagggtgcattggattattctgatttcaaggatgttgatatggtcatcgaggctgtcatagagaagattcctttgaaacaatcaatattttctgaccttgagaaagtatgcccaccccactgcatacttgcaacaaacacatctaccatcgatttgaatgttgtgggcgagaagacaaattctcaagatagaattataggggcacatttctttagccctgcccatattatgcctttgcttgaaattgtccggacggagaagacatcaccgcaagctattcttgatctcatcacagttgggaaaatgataaagaaagtccctgttgtggttgggaactgcacaggcttcgcagtcaatcgtacatttttcccttacacacagggttctcatcttctagttagtattgggatcgacgttttcagaattgatcgagtaataagcagctttggcatgccaatgggaccttttcaactgcaagatctggctggatatggagtggcattggcagtaaaggatatctatgcggctgcctttggaacaaggaatctggactctaatctggtggatttgatggtacagaatggacggcagggaaagagcaatggtaaaggttattacctttatgagaagggtgggaagccgaagcctgacccaagtgttcaggttgtgattgacgagtacagaagatgtgcaaagacaatgcctggtggaaagcctgttactttatctgatcaagatatattggagatgattttcttcccagttgttaatgaggcatgcagggtcatggatgaaaatgttgtgatccgagcttctgatcttgatattgcttctatccttgggatgggttttcccaagttcaggggtggtcttgtcttttgggctgacactattggagcaccttatatacgttcaaagcttagcaagtggactgaaatttatggcgatttcttcaaaccatcatcctatttggaagatagagctaaaagaagcctaccattgagcgcaccaaacgcaacccagcaggcttcgtcgaggtcacgcatgtgagatgctatttcagctgatggcagaataattgcttgatgtgcatcggcaccctagttgaccctcatatctgggacctgaaaaaggaggtcagagcagtgttcaccatgtaatctcttttggatattttggcctttccggttttccgaactgggttgctatggcaatcggagtaataaatgttggcttcggatgccacaaaactgtaactttatggtactccagttgccgctccagttttctttgctgatccacaagatccagaattaaggaaaatcgagacttcctttctgttgggaccacttttagtctgtgcaagcactgtacctgataaaggagctcatgaatgttcacataagttgccaaagggcaattggttgccttttgatttcggagattcacaccctgatctgccggtcctgtttttacaaggtggagcaatacttcctataggccgtcctattaagcatgttggtgaagcaagtttggaggatgatttatcactaattatatcgttggatgaaaatggtaaagctgaaggtgttctcttcgaagatgctgaggatggatatgggttcacacaggggaactatctgttgacatattatgttgctgagctccactcgtcagtggtttctgtgaaggtcttgaaaactgaaggatcttggaggagacctaaacggaacttaaacataagtatattacttggtggaggtgctatgataagttcgcgtggtattgatggtgaagaagtacatctgacaatgccttctgattctgaagtatccagcttggttgcgacaagtgaacttgagcaaaagaaacgtttggagatgattaagcctatacctgatatggatgagccagctggacaagaaggggctgagctttcaaaaacacctgttgatttgaagagtggggactggatgcttaaggttgtaccatggattggtggtcgtattatctcgatgacacatctcccttctgattcccagtggcttcatagcaggattgaaatcgatggttatgaagaatacagtgggactgaatataggtccgctggatgcactgaagaatacaatgtcatgaggtaagtatggtagactgacttttgtcatgtttggtatgatgatcaatagttttttgcttagctccaatgttggccattattaactaccacgagaaaagttgctgatatagttagcttgagctggtccattgcctatatattctcgttcaggaggtatcttgagcaatcaggggaggaggaatctgtttgtttggaaggagatattggtggtggcctagttctccagcgtcacatatccatcttgaaagataacccgaagattttccagattgactcaagcattcaagcaagaaatgttggagctggttctggtgggttttcaaggttggtatgtttgcgagttcatccaactttcacacttctacacccaacagaagtggttgtggcttttacggctatcaatggttcaaagcaagagatctccccagaatctggagtagtattagagggagacatgaggcccgacggggagtggatgctagtggacaactgcgtaggactgagtttggtaaatcgttttgatcccagtcaggttagcaaatgtttggtgcactggggaaccggtgatgtgaacatggagctttggtcggaggaaagaccagtttccaaggagactccgttgagaatatgccaccagtacgaggtgagacaaacaaactagactgaatcccgcctggatcagcaaataaatgtgctacctcggagcgggtcatctaaatcaaaatttggaggtgttcgccacgtccttcgctctaaagagtgtggtgctgctaaaacttgtgggcattgctattgaggttgcattggtaggaactcgctctcgttgcttggttgcatgctatgcgataataatgaactagtaactgctatagttcgagctagtcttggcaaaaaggaataaagacgaatgttgcacttccctgtgattgtacactgccaattcctgaaaagggcgtcttgactgaccggcgaacagccacaccgagtaatagaaacaatgtaataaacgcatcgagtaattgaaggctgaagctctctatgtggttgtc

SEQ ID NO: 28179 - DNA, 2269 bp, Oryza sativa
  ref <308>: DATABASE ACCESSION NUMBER: AK103621
  ref <309>: DATABASE ENTRY DATE: 2002-08-28
gaggctcgtgagtcgtcagccctctcctccaagctaaccacatcccgatgccgcccaaatcgaaggcggcggcggcggcggccgccgccgcggcggcgcagccggtcgccgtggaggacctcttcaccacgctgcaccgccacatcgaggccggcgagttcccgcaggccgtcaaggtcgccgaccaagttctcgcggcggcgccgggcgacgaggatgcggtgcggtgcaaggtggtggcgcacatcaagtccgatgcgattgagaaggcgctcgccgcgatccgcgccgccgagcgcctcccgatcgacctcagctactgcaaggcctattgctactacaggcaaaataaactgcaagaagctctagacctattgaaaggtcaagaagaaacctctgctattcttcagttggaatctcagatttattataggctaggtagaatgaatgattgcatgaatagctatgagaagcttcagaaatttaaggttgagtcaatggatctgaagataaatatcattgctgctctggttgctgctggaagggcctctgaagttcaggcaaccatgaaggcacaaaaagttgatctctcctcgagggcactcagagatactcgaagctttgagcttgcatataattctgcctgctcgttgatagaaaataaaaagtattcagaagctaaagagcagctggacttggcaaaaagaattgggaaagaagagcttatggtggacgaatatggagatgatgatattgaatatgaactagctcctgtgtctgctcagcttgcttatgtgcatcagctacaaggacaaacccaggaagctatggaaacctataataatataacaagcaggaatttggcagatccctcatcacttgctgtggcaacaacgaaccttatctcgttgaaaggaaccagggacgctgctgatagcttgaggaagcttagccggcttattgaaaaatctactgctcccaaccagttgcaacttatcgaaagccttgaatccaagctatcaccaaggcaaaaagaagctctgtattctgcatatgttcttttactcctccacgcgaacaaaattgatcaggcacatgagtttgtcagtggactacttggtatgtttcaggacagcacattccctgttttgcttcaagctgcagttcatgtgagagaaaagaaggtgcagaaagctgaagaagttcttagccagtatgctgagaagcatcctgagaattctaaaggagtcctcctttcgcttgctcagatcgctgccagtgccaatcattttcagattgctgctgattcattgtctaaaatagttgacatccagcacatgcctgctacagtcgctacactagtagctcttaaagagcgccttggtgactctaatggtgcttcttctgtgcttgattctgctatccagtggtggaagaattccatgactgaggataacaaattagaggtgttcatgcgggaggctgctacatttaagctcaaccatgggcgtgacgaagaggcctgccaattgtatgaggatcttgttaagagctttggaagcgcagaagcgttggcggggctagtagcaacttcagcgcgcaccaaccttgagaaagctgaacagtatgagaagaaactgaaaccattgcaaggtctcaagggaattaatgttgagagcctggagaaaacttctggtgcaaggccttttgaggcgcccaaacccatggaacaggacgttactgacgaagtgaagaagcagaaggctaagaagaggaagaggaaacctagatacccgaaaggctttgatccagcaaacccagggccaccaccagatccggagagatggctacccaagagagagcggtcaagttaccgcccaaagaggaaggataagaggactcaggtcagaggtgctcaaggagctgtgtcaagagatggaacttcatctgcgagcgccagttcatcttcgaaagcaaaccaagccaccaaagctccagctgcagccccagaaccaccaaagggttccaacaagtcccggaagaaaaaatcgagatgacgacgaatccaaactatcacagttcacaaaatcaaagataccctagactctgttcgtttagcgttttgactcgcaattttggtgttgattgcattgtgttgccggatttgtcatgcttttacaatcatattttgctggccacatccgagtctgtactgttgccaattctgttaaactgatgcagatctgattgaagttccgccctttacatg

SEQ ID NO: 28180 - DNA, 2602 bp, Oryza sativa
  ref <308>: DATABASE ACCESSION NUMBER: AK103622
  ref <309>: DATABASE ENTRY DATE: 2002-08-28
ggcccgtcctccgatccgatccgatcccgacaccaccgcctccggtggtagatctggatcggagccaccccgccgccggcgatccccggcatcctcgccacccatcggtagcccctccgccgccgcagccgacgacgacatggacgctgcccccgccgccgccgaggcgcacgacgggcagagggagcggttcgacctcggggtgttggtcggcgacctcgccctcgacgaggatgtcgccagtgatgaggacgagtcgctggaggggttgaggcaggagctcgacgactgcaaggacgacgaggaagtggcaaatatcctggctaacggcatcaaactgcgtgattacacaaaaggcgtcgagaacaacattcgccaaattgagctggattctatacaggattacattggagaaagtgaaaacttggtatcgctgcatgatcagattcgtgactgtgataacattttgtcacaaatggaaactgttctgactggattccagacagaaattggttctataagttcggagataaaggtccttcaggagaaatctatggacatgggattaaagttgaaaaatcgtaaggctgcagagtctaaattgtcaaaatttgttgaggatataatagtgcctccaagaatgattgacataattgtcgatggagaggttaatgacgaatacatgaaaacacttgagactctaagcagaaaaatcaagttcattgaagttgatgcaatggttaaatcgtccaaggctctaaaggatgttcaacctgaggttgagagacttaggcagaaagcagtctcaaagatttttgaatttgtcatccaaaagttctatgccttgagaaaaccgaaaacaaatattcagattctacagcagagtgttcttcttaaatacaagtacacgatagtttttcttaaggaacatgctaaggagatatatgcggaagttcgtgcagcttatattgataccatgaacaaggtgctgagtgcacatttccgtgcgtatattcaagcattagagaaactacaactggacatagcaacctctaccgacttacttggagttgaaactagaagtacaggattccttttctccatgggaaaagaatctctgaagacccgttcttctgtctttgctttgggtgaaaggataaacatattaaaggaaattgatcagcctgccttgatacctcacatagctgaagccaagtctcaaaaatatccatatgaagttcttttcagaagcttgcaaaaacttttgattgatacagctacttcagagtaccttttctctgatgatttctttggtgaagaatcactgtttaatgacatatttgcaggacctatccaagttgttgatgaacatttcaatgctgtgctcctgaactgttatgacgcaatcggcataatgcttatgatccgaataattcatcagcatcagctaatcatgtttaagcggcgaatcccatgtttggactcttacttagacaaggttaacttatcactctggcctcgcttcaagatggtgtttgatttgcatttgaacagcttacgaaatgcaaatgttaagactctttgggaggatgatgttcatcctcactatgtcatgaggagatatgctgaatttacagcatccctcgtgcatctcaatgttgaatatggagatggtcagcttgatcttaatctcgagcggttgcggatggctgttgaggaattgcttgttaagttggctaagatgttccctaaacaaaagttgcaaactgttttcctgataaacaactatgatttaacgatttccatactgaaggaagctggcactgagggtggaaaagcacaagttcactttgaggaggttcttaagagcaatatttcagtatatgtggaggaacttctactggagcatttcagtgatttgatcaaatttgtgaaatctcgcccgtctgaagacacagcatcaagctcggacaaggccagtgttagtgatgtcgagccattagtcaaggattttgccggtcggtggaaagctgcaattgagcttatgcacaaggatgtcattacatcttttagcaacttcctctgcggaatggagatcctgaaagcggcactcacgcagctgctgctgtactatacaaggatcaccgagtgtgtcaagaagatcaatggtggctctgctctcaacaaggacctggtttccatatcctctatcttatatgagatcaagaaatactccaggaccttttagtcagtactggtcctgccatgtacactggtgtattattctcatgtaacgaaaatcctgatatatgctatgcaggttggttgggtttgacacggaactctgtttctcttgctatttggcagatgttaagaaattacacgggggtgtatctaaaatagtttttcgattgagagtaatggctgtttgtggtagatcgttgagctgattagcgattagctgcctatcagtcagccattcagatgttctttaattgtagtcatagccattcagatgttctttaattgtctggcggtgtttgggaccgtagaaacttatccccgcctgtggataagtgaatagaaacacataaattttgcc

SEQ ID NO: 28181 - DNA, 654 bp, Oryza sativa
  ref <308>: DATABASE ACCESSION NUMBER: AK103623
  ref <309>: DATABASE ENTRY DATE: 2002-08-28
gctcgcgaccacttcactggactacactaccacctctctctcgctctctctcgcggccatggcgtcgtacaggttgctcgtcatcctcgtcttctccgcgctcgtcgccttggccgccggcgacacctacccagcggactgcccctacccatgcctgctgccgccgcccacgccggtcaccaccgactgtccgccaccgccctccacgccgtcttccggctactcgtacccgccgccgtcgtcctcgtcttccaacacgccgccgtcgtcgtcgtcgtactggaactacccaccgccgcagggcggaggaggcggctacattccctactaccagcctcccgccggcggtggcggcggcggcggcggtttcaactacccggcgccgcctccgcccaaccccatcgtgccgtggtacccttggtactacaggtcgccgccgtcgtcgccggcgacggcggtgacggcgcgggggcgttcgctgcttgcctcggtggccgtggtaacagctgctgctgctgctttaattaccgtgttttaatgtagctctctttttcttcttttctctagttttaatttctttattttggagaaatatatgatgaggcagcattgttattctatactatatacaaatatgatctattatattgctcc

SEQ ID NO: 28182 - DNA, 2177 bp, Oryza sativa
  ref <308>: DATABASE ACCESSION NUMBER: AK103624
  ref <309>: DATABASE ENTRY DATE: 2002-08-28
gactactcccctcttcccctctcttccacctctcgagctctcgccccaacgagatttcctctttttcgggaggattttcctctacccggatccggttgctggtgccatagatcgacgcgccgtcttctcctgatcgcggtggtgttttttttttttttgttttggatttccggtgctgggagtggagagattcgctcggattggatctgtgtgtgctgatccgtgtgggtggtggatctgacggagaatcggaggagaggaagaggagagtctggttggttggtggagacgacgatttctgtggaggattcgacttgcgcatcggctgtagatctggaagggctttgggtgacctactgctccaagctgcctaagttatatcgcgaagtgtcgagctttcacgcccaccgcaatcatcatcaccatcgccgacgatggagggtcttgtggttatctcacagcagcgcaaccaccataaccaacactctggtggccgaggcaagatgacggggcctcacttctcatcgccgccgtcctcccatggcttccgtggcatgaactgccggtctttccattccggtgtatgtgctggcctcctgccctccccaccacctccgcctgctcgcacgtactcatcaccagagcctaagacaccaaagcagcagcaacagctgcagcgccgtggtggcaagcgtagccggcccatctcaataagcccttcaacttctcctccatcccgccctgagctgtgggcgggcccagcattctccaattcaccacctcctagttcgctcccaatccccaagttctctctgcgacagaaccgcagcatctcacttgaattgccactatttgagcggtctgatgaagtggaggtgaagccgcatgctaaatcggctccttcctcgccggtgggtggatcagggtttgacttcttcaatgataatgaaactgctgttgcgacggagaatcttaggaggattctccatctggatatttccgatcattgaatgatgggaggatggaagggtagtgtctgtgtacataggttatcatccactgactttagttgttcacatgcatagtagtgtatagagtaatgagaataataagttaggtagtactgtatggtcaaggttatggtggaggtggagttttgtaggtgaagcatcttctgaaagttgggtagtgaaaactgtcatatgtaggtgttgttaaggtggacagtggggtaaggatagggtggatggcagttgacataccttcatagcttgggctcacctatgatgttttaggtgtagtataaaatcttatttgcatccatggcacctgtgatgaactgacagtggcactctgccagtgcagaaacatctgcggttagttcatttcaggtagaatagcatagtctggcagcttgttaacgatagcatacattctagtatcttagaccccaatcagatgttaaatagttctagggaaactacttttcttgcatttctttgcatatatataacctcctggctaactgattctcacccttcaaccatcctgacctccctggtgctctgcaaagaacaccaatatatctcctcactggctcttctgctttttggaaggaagaagctgggtggaagatggaagctgtcccctctcttgctcccttctatgtcaatactaactttttcccagtttgctgcatatctatcatgacatgttctctccaccttcattcattctagattcatctcatgtctcttcacaagttgcatttagtaccaacctatattcaaatcatcatacaccctccgaatccctttccgctttcatgagctctagttttctacttctcttcaagcctcgatggtcttgaggaacaaagttagacaatgatgtctgcggaacatgcaagtcccaatatggttggctttgctgttcatatttaccctatgtgaagacttggaagttacctgtcttagttcctgctacattactatgtttgccacctagcagtcaagaagcactttgctggagtattagttctgtcaattgtaattccaatcttagatggctgtccatgttgatgttctggtgtaaatcagcaggcatagtgttaacaaataatgttactatcccattaatcagaactatataatattattatgttttatattacaact

SEQ ID NO: 28183 - DNA, 1195 bp, Oryza sativa
  ref <308>: DATABASE ACCESSION NUMBER: AK103625
  ref <309>: DATABASE ENTRY DATE: 2002-08-28
ggctcgactcaacgcagcacacgcaagaggagtcgtgggagtccaggagaggaggcggaggcgcggaggagagaggaggaggaggaggaggtggttggtctccgccatggcgagctcgtcgtccgaccccgacaagctcatgtccaaggccgacaagctaacaaaattgagcttcacgagatggaatgccgattggaagagtgctacctccttgtatgagcaagctgctattgcttataggttcaaaaaggagaatgagaaagcaaaggatgcctttgagaaggcttcaaaaggacaggaaatgatttcttcaccctgggatgctgctaaacacatggaatctgctggtgctttagcgaaagagcttggacgctggaatgaagtttcagatttttatcgcagagcatcagaattctatcgtgaatgtggaagagcacaacctgcctctgatgctcttgcaaagggtgccagtttcttggaggataacactccagacgaagcaataaaaatgtatgatgaggcctgttcaattctagaagaggatggaaaggaacagatggctttcgatttgtatcgtgctgctgcaagtttatatgtcaagctcgagaagtattcagatgctgcagcaacttttctaagacttggttcagctgctgataagtgtaatgccatcaacagccagtgcaagggctatttgagtgcaatcatcatctacctttatgcccatgattttcaacaagctcagaaatgttacaatgactgctcagaggttcaagccttccttaacagtgaccagaatcgatgtgcaatgaaactgctgtctgcttatgaggaaggtgatgctgaaggaatcaaacaggctgcacaatcaagtgccatcaaacaccttgaccatgtggtaattcgacttgcaaagaaactacctacgggtgatctgcagaccatcaagaaattggcagacgatgacggcgaggattctttggacgagaatgacctaacttaataccaaactacccgtaccgggagacgctgagaaagcaaatatttgaggttgactcatgttaccgttgatgaacatgagcgatttgtaaaaagaagatatcgatgtacacggtacaaagtacaaacttgtgtgaggcagtctgtatcttgatatttatcatgctcagctcaactgtcatatctgatttctgct

SEQ ID NO: 28184 - DNA, 2356 bp, Oryza sativa
  ref <308>: DATABASE ACCESSION NUMBER: AK103626
  ref <309>: DATABASE ENTRY DATE: 2002-08-28
ggttccgctcctccgctgcttggtcaccgacccctcggaacgccgttcatctgagaaaggatggcggtcctggcggagatcgccggcgacgagtccccgccgccgcttcctccttccgaaggcggcgaagcttccggagccccgtccacgtcttctccctccgatgccgacggcggcggcaagccttcgccgcgcacgtcgaagcccggcaggaagcgcctcgtcctcaccgcctccgtcctcctctcgttcctcatcgggctgcccttgctgctcaagtccaccgagatccaccgctcgccgctgccgtccgacgcaatcgccgccctatcccgccgcctccactccaacccgccctcgttcccctgcggcctccatgcggtcttcctccgctccggccgcgacccctccgaggcctccgtcgcaaatcgcatcgagcgggaaatctccacccaactcgtcgatctccctgacgcttccaccgccggtaaaatctccgtgtcagtcaccgttgagtccgctggtggctgctctagtagcagcaaagtcgcctcgccttggcgatgtggtgctgtgactaccgcggacttggggcgcggcgatgaggtgtttgatgaattgcttgactcggcattgggtgatggaggcggggatgggatgagggtttacactgttgtcttcgtggacagtgacgatttgaagagaattgtcattggggaacaccggcatgcttgggtggtcgggaaggttgatgaggctgaggttgtgtccatcattgggaaggtattcgtcaagtatttcatgaatggtggtgtcgaggagggcgaagcaagcactgtgaaaagagagttcatgccagttggatcagatggcaatatagttctttcatttagcctgctgaatgctgatccaagtgattgggtgtatgattgggagtttgaaaatattggtcaaaggatgttgactcctgttattgaggcgttacgaccgattgcgaacattaatatagagagtcaggttttgtaccacacaccaaaatcatcctattcttattctgatgataaacttggtggcaatgtccttagcgtgggagacattcctttctttgttaattcaaatgagtggcacttggatacatccatttcagctacaggacgatcaaaagttcttcaatttgtggtatatattccatcagcaagggaatgccctttgtacctgcaacttccagatggggagctttccaaaactaatgcatttatatccccaatgtggggaggtgttgttatttggaacccacctggctgttcatttggttctaagccacatggggccctggacaaaatgtcatctgaggaactcatggagactattgaaatcttcataggacagctaaggcagttatttggtctaaaatcaagttatcacacacagagtatggatggtgtaactaagttcataactagtccaaaagggtttgcccaatgggaattggatttattataccggcaccatgcatgttccaatcttttgtcctgtctcaccaccttggaatccctttccagtttggtccaatcactccccagaatgattgttatggatgaaattgggaggcaggttgagctttctcttgaagctgcaagtttagctcaaagaaacgcaagcctcggaataagtgactcttcagcagtatctgcaacaagagcgagggctttggctgaggatgcattttttcatccatctgttatgtctatcagttatgcttcaatagagcactattttgcgatttacatgccattctttgcgccagtttccttgcatgtgctgttggcggtaatgaaagagctgaaacgatacatggtagagagaaggaaatattcagcatttcttgcttcccaggcgacatcttcctgatcttttggtgattatcagcagccctgtttcatgcctagtactatcatccacaccaagtctgatatagatggtagataatctgcaacggttcagccacagctgggggacgcgtcttcttaccatcaagcaactgctgggcagacaggtagaccaaatggtgtgtgcctgtgaactcgcagaccaggtgaagatgtgagggaacccagtttttgtcacaaatacggcgttcttccatgaaaccagcttggtgaggccttaactgatcgtcgggtatcattcacattttttggtgaggccttaactgatctctgaaactacagaccgctatctaaagccaatgcatctgtaaattgttgtataatttgagagcgcttgacaaactccccgcagaccaatgttggattagcagttaacacgaacttttacgggtttgatgtgtgtgttc

SEQ ID NO: 28185 - DNA, 3884 bp, Oryza sativa
  ref <308>: DATABASE ACCESSION NUMBER: AK103627
  ref <309>: DATABASE ENTRY DATE: 2002-08-28
gacccttgttcattcctcctcgcctcgcctcgcatctcggctcgccgcgccgtcagatccctcgcctccgatggcgcaccgccgcctctgaccaaccaccgcccccaccgccgcccacatgccgccgcccatgctcgcggatgcggcggcggcggcgccctactcctcctcatcatgctcatccaactccagctcttcctcctcctcctccgcgatctggtcgcgccgccgcgacgagatcaccttcgaccgcctcgacaagttctggagtgccttgtcgcctcaagcacggcatgagctcctcaggatcgataagcagactctcattgagcatgcacgcaggaatttgtactgttcaaggtgcgatgggctgcttttagaaagtttcacacaaatggtcatgcatgggaagttactgcaacaaaaaggtccaggtgttgtacaagatgattcttggggaggcctttcgacaacaaaggatggcctcctgactcttcttgactgcttcataaatacaaattcccttcatgtactccagaatatatttgacaatgcacgggcgagggagcgtgaacgggaaatgctttatcctgatgcatgtggtggaggagaaagagggtggattagcccagtaatagctaattatggcagggggcatggaacacgagacacatgtgctttgcacactgcacgcctttcttgtgatgctctggtgggttactggtttgacctgtgtgaagaaactagatcatctcttctgcggatgagggaagaagatttcattgaaagacttatgcataggttcgacagcaaaagattttgcagagattgccgaaggaatgtcattcgtgaatttaaggaactgaaagaattaaagcgtctgcgacgggaacatcactgcactagctggttctgcattactgatacagctttccggtgtgaggtgtttgaggatgctgtcttagttgattgccgccaatctttcttggatcaagataagtcctataatcgttttgagtttgctgttggaacagaaaaagggaaatctgatatactaggatttgaagctgtggggatgaatgggcaagtgcacaggaagggccttgatcttgaccagtttgaagattattttgttactctgagagcgcattatgcggataacaagaacacagatttctatgtgaaggcccatgccttgaagggccaatcatgtgttcaccgcaggctgatcgtgggggatgggtttgtgacaattactaagggagaaagcattcaaagtttctttgagcatgctgaagaagctgaggaagaggatgaagatgatgctatggacagggatggaaatgatactgatgtcgatggtgttcatccacagaagcatgctaagagtcctgaacttgccagagagtttcttttggatgctgctgcagtgatattcaaagaacaggttgaaaaatctttgagggaagccacggcacaacaaaatgcacatagcgtatttgtgtcccttgcattaaaattgttggaagagcgggttcatgttgcctgcaaagaaataattacattggaaaaacagaccaagcttcttgaggaagaagagaaagaaaagcgtgaagaagaagagcgcagggagaggaggagaacaaaggagagagaaaagaagcttagaagaaaagaacgtttgaaagaaaaggaaaaggagaaagaaaagataccagttcaattgaaaccttacattggtacctcgtcatcacccctgagcaactcagcaacaccaattaatgatcagtcaccagatattgcccactccaaatactcagctagcgatgatgaagataaagatagtattgtggtcacggaatcgttctctcctgatacctgtgttgatcaatctctaacaagggaaagtgatggacaaagcaatgagtttcattgcagtacaacactggaatttattccatcagattgcaatggttctttcatgtgtgaacaatctacatcctcaaggaggaaactcagatttagaagggattcccttcaagaacagaccactggtttttggtatgaagattgccaagatgacactgggggtgttggaaatattcactggcaatctagggagagggcaaggaatgcaggtagaggctgcaactctttgttcagtgcgaataaccggacaagagaaaggtatgagtacaatgcctgcagttgtggccagcaggaagattatgggtatttttctccaacagctagatcaagtagagagatgaagatgtccaggaaaacaatggttgagaagccctggttacagtaccgcaggtgctatccattggatagcttcatagtgtcaaaaggaagccgagttggtagtacgccaaacaagaatgcagctccaaaacaagtatgggagccaatggatgctagaaagaaagctagcttagggagttcgaatggttcttctgaaacagttagcggtgttgatcgatccaatcaagtggggtgttcaaaggatattgtcaattgtagccaaatacttggctcggagcatgaagaactagctgaagcttcctctgatagatctgaagaagcttgcaaatcgataacagatcagccatgtgaaagcagtgaaaataatcaagctgcttgcaatagtgaacctcctgtggtgaacaagccagacagctgctttaccaaagatggtggtcagacagcaaacatgaccagttcagatagctcttcatgtctaagcgagggagacagagatagtagcatgagcagcatgacctcattgagtgctcagaatccggaatcctcgtctacttctgattcagaaggatcttcagaaaggaacaatagcaacccaggcaatccaccaaccaagaacggttcgcgttcattacttgaaatgtgcgcaggaaatggtttcagagaataccagccacagaatattcacccttctgatggcaatcaatttgggtttggtgtgacccctttccaggagcagctgttacatcagcaaaagattcatgcagctccatacccgtcaaccttgatgggtttccataatcatcacatgtcagttccaacaaatggatacctagcataccctcaacctggtcatttctacccaaatgctgttggatatggtgtggctggaaaccaatgtgttgacttcccaatgcagtacagtaatgtgcatccttatgcaggtcctgaatttggttatgtgcctgcacagccagtccataagactccggtgaactttaatgccatggtgccaactgctgcgctctttagaaatggagcgccagaagtcataaaccctgtcattgtaaaaccagacaggcagcatcgccatacccttcctcctgagccgaagcgggtggatcctgatcctcagaacggctgttcagaagataacaagaagccgcaagatggctctgtgcctttctcgttgttccatttcaaccttcccatatcctcgcctgcccaggcatcatctgaagacgaggtgagtggaggatgtttggcgtcgagatcgccaactccaagtgctcaaaaagctcagccttgctcaagggaggagaccaacataaaggagtacaacctgttctcggcaaggactggagtggaatttcccttcttctagacaacagacgcgcctattatttggcacagaacaatacatagcgagtgatttgtattctccaaaaaaacaaaaacaaaataagttacctcgaggtttttaccgtgttccctcgaatatttatttatttcttcttccatttgttttggttgcccttgtgtgtaaggaaattgcaaagatagtgagtggtatagtttctaaattttgagatatgttaaatgtttgttgtcccgtttcc

SEQ ID NO: 28186 - DNA, 4200 bp, Oryza sativa
  ref <308>: DATABASE ACCESSION NUMBER: AK103628
  ref <309>: DATABASE ENTRY DATE: 2002-08-28
gacgccctcctcactctcgtctctccctctccctctctcgccgccgccgcctcgcgccatcgccaacgccgtccccgtcacctcgcgcctgcgccctcgtccccgcctccgcctcgcgtagccgtcgcggtcgccactccctgccaccacgcccttcatcgcccaatcgccgtccctgagcacgggcttcgaggcggacgcggagaaatcgaggaggcgaacgctccttcctcttcccctcttgtctctcctctgcctgcgaggagcgctgctttgccgccgtcatcgccgtcgtcaccttgccggtctagccgctcgctgccatcagagtggtcggatctgatggtggcgagcacgtggctgtcgattgtttggcggttgatggagccaccgttgtcctcccacaagccggtatcaccattttcgcgttgtagtggacaaggggctccacggtggcgacgagctcaaccttggcggattgagcgatggcgtcaacctcgccggcggcgccgataaatagaggcttgctggatctgatggcggcgaggtcgtggccgccagatccggtagcctggcggctaatggaggggctgttggtctggcggatggaggtgctcactctcctctccgtcgtgcattcacgtttaactggtgctgccgccaccaccatcgccggcacggcaaggcatccacctcctctgcaccatccccttcctcctcacacttctctgccagcctgaagcaccatcgccggcacggcaaggcatccacctcctctgcaccatccccttcctcctcacacttctctgccagcctgaagcaccccatgagtatggatccctcgatttggcgctagaccatgacgctgcctcaagccctcgccgatgagttcactgccaccgccaccactgcgcggccagacgacatgatgctcgtgaatcggatgcaacggcttgctcactaggataactgacatcggcagttcatgctagagcaggaacggatatacaggtactgaaaatactgattatcctgtgtgagctgttcaagaattcaaagatgggttcattcacaaggaggagttccagctagcactctttaggaacagcaacaagaagaaccttttcgctgatcggatatttgatctctttgatcttaagcgcaatggcattactgatttcggggagtttgttcaatccattgacatttttcacccggaaatgcctttggcagagaagattgcctaggctgcaggatttgtacctgttgagcccatttaaatactctagaggaaatactggagaagaaggtggaggaggccaccgaaaggaagtttgatagttgtgcaagagctcttttttggcttagtaggtaaactcacacatagcatataatgggctttagttcttctcttatggagttttgctacctacaaatttcaaccttgcatacctcttcatattaatagttatcttctctaacatcactagatgcatggattcactattgcaccgcaaagctttgcacaccttgtagaaactgcatgcatgatcattctgaagtcattgcagcattggatctctttagcaacctatgattggtcagggtccattgaatctaagtgtaccatttttttttgtcgaaaatgactgtttttccatcgcacttgtcctgcacaactatgattgtattgatactgaattcaccttacaaagatcaaaatatttgcttttagtgaagttgcatattatctgctcatttttcaggccaagtttagattagacaggctgaaatcaacttgatggcaagtctaaaatggttgttccaatgtgttattatgtgatactgccttggtgagctggtttgtctatgcataaagattttcctttttgtgtcacagtagtattaccacgtgtctatggatcactctgtaaatgtcagaataaaaccccacgtatactagcttggatataggcgtggtttcaatgcagttccaagaatccacataagttttatcatccatttccaaattattcatccacatttgcatttcaaattaatttacagtaacacaaatcaagatctgtgcttaaaaagttataattgtctttagtacctcatagctgttatattactctcatttctcctccattgcattacggagaaatatcttcattgtcatgattttggacatgtctttatgtttaaaatagcatctgttgtatgtgcttgtttaatttatactagcagtgctgttgtacatgaatgaccatatgtacattagaaaatatgaagttctttgtacttagtccttaccattgggttcgacaatatgttgtctgtacagtacctggcttgtattaacggcaaggctatgatatcctttatgtattgaaattaccatcctacatgttcatggctcctttttatttgcttattcctgtttataaaaaaagatgcaattctctctttacatttgttgacttttgatcaatcaaattatataggacgagttgtatacaggaggcgcaaaagggtgcgacccagagcaacaacattgtttatggaacagtttctatttgcattgtaataaacaatcttacatcttcacgacttgaaattctttagttgatggcctccaatctaaatagttcttaacatgttaccagttactgctttctacaaagttatatttctgaatggtgtttttcccagaattcagaatcttaaaatctgtgctactggaagagttattatttcagtttgtttaattaaaatcaacttcactgcaccacataggcacatgctatgaatctactagagtatgaccatgtagcatttgtccatggccttgaatttgttgatgattttttttgtaagcattgaagttcttctgatggtctgatttgactactgccttaatttgctgagaggaaaaattctgaacggagattcaacaattcaatcagaggaaaaaaaatatcagcagacagttcttgaaatttcatcatctgcaccagttgtgagagaactctttagtcctattcttttgtgccttgaaagttcgcgtttctaaaatacaagtacttccttttgtgctattgatttgtaatatttggtgtcagtcgtacaatatctgactaggtcattatcatttacacaataatttttatggtcattaactgcagaatcgaaagaaagcagaaaccaacaattttgttctccaaggtttgatctatgatcacaaggggacaagttattattctcaagaggattgggtaagtgtctcgaaagtgattctcttgtagccaagcttgttaaacaaaaatcaaggcccaccttggcactaatggatcttacaagcttgataaacaaaaatcaaggcccaccttggcactaatggatctccatccccatcaaggcccacctcggcactaatggatctccatcccctgttatgtgtagtactgtatttctgatttcctaaagtggtcttggtgaaggttgatgattgctttcactagtctcgttgtttctctgtttactgaatcatactaagatatgactgacatttaatagttgaaataagcttaggcttttagacctttcttccattatgtgtattgtatgcattattaatgtattaatattaaattctttttatgataacatccatgtttagtgacacttaaaaaagaatcacggagaaatttaaccctactggatttcctcctatgtatcatgaccaaataacgaaccatatcctgtgccataaatatttctaatgaaaattaatatagtaaggataaaatttgtcatataatattaatagccctctttagaggacaattacatgcctacaattttcttttatgtacatgtttatggatttcttttgctgaggttgaggagaagaggattgagaagattgggaagatacataaaacgaggccccacggttccgactgcggaatattatacccatagatggtgctgaaatttggtggagcttttggtgaagaaaaagcaattggtggaggataagaagcagggagtgattccattgaatgtttgaaatgtttgctttcattttctgttttcagatttcctgaagcaagtttaaccatacatcacaaatgcctagcccttcgatggaaacatttttttaacagtttaaagtgcagctataccttttcatcg

SEQ ID NO: 28187 - DNA, 972 bp, Oryza sativa
  ref <308>: DATABASE ACCESSION NUMBER: AK103629
  ref <309>: DATABASE ENTRY DATE: 2002-08-28
gggccaagggagcggcatcggcgtcctccagcggcaggcagcgggagaacggcgaaatcggccagcgacgggtggaaaggagtcgccgccgcagccgccggaggtcggagccgaggggaggtgggcggacaacaacgagcgacgcctcgaggatcctgtctggaaaggagggcggcgacgagcagctgtagcccctcacccagttgtcggctcgtcacagccccacacggtggccggggagaaagaggattgtggaggctgatgtccaagagagagggctgcctgccttctggatccgaaggcccatcttctccccagccgatgacgccatgccggcctcctcatttgattgaggcatcctcatcatcagccaaagcagcttgcacaaggcagcgaagttcagatgtgcttcgatcgggtcatggtgtgctccacttcgcagtaacatatatgtgttcctgagtttgtatattttcaataggtgcagtgtgggatactgtagttgaggcacgggttgatggcatgttgatgagccaatcctgctgctccaattgacagcttcaaggggtacatcaagaagaggatttttattaaaatgtgctaattttttgatgtcctgaaagtgactaacagtgatctctacatgctaggcactttctattttattggcttctaatctgtgtcatttagagtcatactgaatgtaaatcgagacttctcgttgaaaccacctattggagacactggtaaggacacacgagcagggccataaagattattatgcggcatggcacaggactagcagcagcgtcggcaaggaggtgactgagtctggtgccggccatatccatcattgttggtggtgttgtaattttttatttgtttttgtgcattctacaaatgtatcacattgcgtgtgtgatcagacagccgttgtaattctaaatccgttcaaacatttgtcggatgtgc

SEQ ID NO: 28188 - DNA, 2407 bp, Oryza sativa
  ref <308>: DATABASE ACCESSION NUMBER: AK103630
  ref <309>: DATABASE ENTRY DATE: 2002-08-28
gaaccagaaccctagctcccgccgccgccgccgccgcgctgttccgggatggccggcgccgccgcgctccggcgatccgcgcgccgtgtcgtcctgccaggcgcctacgccttgtcccgggcgctacagcaccctgagcgcctcctctcctcccaggcttcgccggaccgcggcggggtgctgggttcggagcttgggctgtatcccccggagagggtcaggaacttctccatcatcgcgcacgtcgaccacggcaagtccacgctcgccgaccggttgctggagctcaccggcaccatcaagaagggccatggccaacctcagtacctcgacaagttacaggtagagagagagaggggaatcacagtcaaagcacaaacagcaactatgttctacagacatgctaacaaccaacttcctgcatctgatcagccagatgctccaagctatttgcttaacttgattgatactcctgagcatgtggatttcagctacgaagtatccaggtcgcttgcagcttgtcagggtgctcttttagtagttaatgcagcccaaggtgtccaagcacaaacaattgcaaacttctaccttgcatttgagtcgaatctaagcatcattcctgttattaataagattgatcagcctaccgctgatccagataatgtaaaggctcaactgaagaggttatttgacattgatccaagtgaagctctgctaacttcagctaaaactggtcagggccttagccaggtcttgcctgctgttattgagcggattccttccccacctggaaaatgtgattcacctgtacgcatgcttctcttagattcatactatgatgagtataaaggggtgatatgccatgttgctgttgtggatggtgctctccacaaaggagataagattgcatctgccgcaactggtcgcacatatgaagtccttgatgtgggcattatgcatccagagcttactcctaccggtgtgctttacactggacaagttggatatgtcataagcggaatgcgttcaactaaagaagcacgaattggtgatactcttcatcaagcaaagagtattgtcgaaccacttcctggtttcaagcctgctagacacatggtcttctctggtctatacccagctgatggctctgactctgacgctcttagccatgcaattgaaaaactaacatgtaacgatgcgagtgtgtctgttacaaaagagacaagcactgcacttggcatgggcttcagatgtggctttctaggattactacacatggatgtatttcatcagcggctagaacaagaacatggagctcaagtcatatcgacaataccgacagtgccatatatctttgagtatggtgatggaagcaaagtgcaagtcgagaaccctgcagctttggcttcaaatcctggaaagcgtatagcagcttgttgggaaccaacagtcattgcaactgttattattcctagtgagtatgttgggccagtaattatgctttgttcagagaggaggggcgagcagcaagaatatacattcattgatgcccaaagggctttgttgaagtaccgattaccattgagggaaatcattgtggatttctacaatgaactgaaaagcataacatctggatatgctacttttgattatgaagattctgagtaccaacagtctgatcttgttaagatggatattttacttaatggtcagcctgttgatgctatggcaacaatagtccacaaccagaaagctcagagagttggacgagaattagtggataaactcaagaaattcatagaacggcaaatgtttgagatcactatacaagccgcagttggttcaaaggttatcgcaagggaaactctgtcagcaatgagaaagaacgttctggccaagtgctatggtggtgatattactcgcaaaaagaagttgctagagaagcaaaaagaagggaagaagcgcatgaagcgtgtagggtccgttgatattcctcaagaagcatttcatgagctattaaaggtctccaattcaaaatagatgctgtgcttagtgctgtagctgtctaacagcatgagggtgtgttgtggtgaaacacaaacagcatgttctggacttctagtcatcttctgaaaggtgccttttggtctaatgagtacataatgatgtttcttaatgataagaggagacaaagcaccattttgccatcttttgctgtggcaacatattttcatgttgagaagctagcattaccttttgtttttcattgattttcactgtacagaattcggtgatgcctgctgaatcagcagtagcgtcggcttacccttctgattccttaattggcacagccatttagctgaatctcatttctttgttcaaattatgttaagaactttttgggagg

SEQ ID NO: 28189 - DNA, 3560 bp, Oryza sativa
  ref <308>: DATABASE ACCESSION NUMBER: AK103631
  ref <309>: DATABASE ENTRY DATE: 2002-08-28
gggtggtctctctctctctctcttctctcgcctcacttcgcatcgcctccaccaccacggttcggctcggctcggctactcctctctctctctttctctcccctcctctcacctagggcacgcgcgccgccgccgccgccgcctccctcctcctccccgcgcgatcccgccgccccccgatcgaccccgccccccgatcgcccgagtaaaatatagggcttcacgattgctgggaatctacctgcatagcttagttcaaacatggaaaatctaccaaatggctcagcaaatatagctgagaagaaccaggataatgagatgtctacagatgctggtgagcctgaagaagtagcagatatatttatttatagagaagatgttgtcagcttgaagtcaaaagaggacacccgtgggttggttttggaggtagcaggagaatatgattctgaaggtagcatcactgatgatgatactgatactgaggagcatgaacacaaaagttctcataggactgaaaatggtggtgctgatggtgataatgtcagtaatggagttgatgttgatagtcagagttcattgcctgataacaaggttagggttctatggattgatggtgtcgagaagacggaagattgacagcgtggttgtcatggacagaagtttccttcatggagatatagtggcttctgccacagatccaactggtcagatgggacttgttgctgatgtcagccttgtggttgatttgcaaggacctcacggagaaataataaagggagtatcctctaaagatttgagacgcatcagggaatttaacgtaggtgattatgttgtctctgggccatggcttggtcgagtcgacgaggtgttggataatgttaatgtgttatttgatgacggctccgtctgtaaagtagccagggcagatcctatgcggctaaggccagcattggggccactgaatccaaatgcaagctgtcccttttatcctggacagcgtgtcaaggcagtgaattcatctgtttacaaaacatccaggtggctcaatggactatggaaagcaagtcgtcttgaaggcactgtcacaaaggtggaaacagttgcagttatagtctattggattgcatctgcacactttgccacgaatcaagaatctgttcctcctgaagagcagaacccaaaggatctgactcttttatcttgtttttcatatgcaaattggcaattaactgattggtgtcttcctaaccaatacacatcatcgtgtactgatgattctttgattgaaagttcagaaataaaagactctgatgacattcctgaatccagtgatgttaagacagaactaacgcagaagactgatatggatgaaaaccctgggaggatggatggagattcttctgctgatggatcaaatatggtttatgaagataacacatgcttagccaaacaatcagaatcaggcactattgcatcaaccgttccaaaggagggatcacaggacaatgcaacttacaggaaaaaacttaggaaagtttttgtcaaaaaggataaaagaacaagaagaagagacgagagctttgaaagggctctgcttattgcaaatacatacacgaaggttgatgtgatctggcaagatgggacaaaagaatgtggagcaagctcaacattgctcatcccgatccacagtccaaatgaccatgaattctttccggagcagtatgtcgtggacaaggttggtaatgatgttgatgattcttctgaaacaaaacgtgtgggtcttgttagaagtgttaatgcaaaggaccgaactgcatctgtatcatggtttaagccttcattacacccagaggagcccagagaaatcgagtgcaatgaaattgtgagtgcatatgaattggatggccatccagattatgattattgctatggagatgttgttgttcgcttgccatctgtttcactgcctgttgaatcaaccaatagggagaacaccatggaactggataatgtaaattctacagaagtatcggcaacccctgtagctgatgcagaggaacagtttccacagaaggaatccagtttggaatttactagcctttcatgggctggtaatatagttggttttgaagacggtgatattatagtcatttggggcgatggttcagtgtcaaaggttggtccacatgaaatatatgttgttggtcgtgaagatgatggtgcctcactagatgatggaactgccagtgatggtgctagctgggagactgttgatgacaatcaaacggatttgcctgatgattctgcacaggatgattcgcaaaatgtagcagatagtaacatcgaaagggaaaacggttcatttaattcgcaggatggaagctctgttgcaactggtccactttctgttgcttttggctttgtgactcggctcgcgagtgaactctttgctcgagaatctggtgatgatattgataaagctgagggggagaacaatgtggcaacatctgagagtaccgttgtaacaacaaatgacgcttccggtgggaagtctgtagatgttgatatggctgacaagcctggagattcagatggcttcaaacactttgatgttcagcagtgccctccagaccatcattacctggaaaacatggcgcagggcactggtggaagaaagtgggtaaaaaaggtacagcaggaatggaacatacttgagaaaaatctaccagattatatttatgttagggtatttgaggatcgaatggacctcataagagccgtgattattggagcaagtggaacaccataccaagatggtcttttcttcttcgacttccaccttccacctgagtttccacaagttcctccgtcggcgtactatcattctggaggtttgcgcgtaaatccaaacctgtatgtggatgggaaggtctgcttaagtctcttgaatacctggacgggcagagggaatgaagtatgggatccatcatcatccagtattctccaagtcctggtttcacttcagggcttggttctaaatgaaaagccttattttaatgaagctggctatgagaagcaagttggtactgttgaaggggagaagaatgcattgccatataatgagaacacatatctgctgagcttgaaatccatgttgtatatcctgaggcgacctccaatgcatttcgaggactttgcaaagagccacttctccaagcgtggcaaatacattctcaaagcttgtgaggcctatttgcaaggtaatggggttgggacgctcacagatgatgcctgcaccaccgagagaagcaaagaacagccatgctcggtgggtttcaaactcgcattagcaaaaattatgccacggttgattactgccctgaaggacgctggagcaaattgtgaccaatatgagcaccttgggaaaacggaaactgctcaagaacactgaatgacttgtatggatatcattttttggtttcagaaagatgatcacctcacctgctgtttttcgtataaatgtacattacatttgtttcttgtttctatttaaacatttg

SEQ ID NO: 28190 - DNA, 2538 bp, Oryza sativa
  ref <308>: DATABASE ACCESSION NUMBER: AK103632
  ref <309>: DATABASE ENTRY DATE: 2002-08-28
gatcctcatttcatttcccaccccacccagtccaccggcggccacgcacggacggcggcggcggcggcggccagggacagcgcaccggcgggggcggcggtggtagcaacgcccattcctcaaccacccgtcatccctcgtcgctcgtcacccagcggcctagtcgggtggtacgggatccctgctcatccgccggtcctctgcgggggcgggggcgacaagttggggagcgcggcggggcgtcggaggagttgacaggagtagttgcgcgagtagtcagtattccagcagtgagcgagactgacttgtaggacccacatgacaggagaggacactactcgatccccgccaccatctccgccggcggtcttctccatgccatcatcttcctccgaaagcacacagtccagtgacagtgaggtaagcgcatgggatccccaagtgttacgcgcgcatgccgaatgtctcgagtcggaggagttggcagccctgtcagtcaatcgcactcttcttcctattctcgataatttgcttcttcaggtgtatactatgctgcgccaaaaaccacttgattacgagcaacggactaccttggttcatgtcttcaacaacatagcaaaccagatcttcgggaatggaattttctgtggggttctgcctgttgtaactgctagggtgcctattgtgaatgttattgatcggggaactgggattgagtgtgatattacggttgaaaataaagatggcatgacaagatcaatgatctttaagttcatttcttcacttgatccaaggtttcagatactaagttacctggtgaagttctgggctaagatacatgatgtgaatagcccgagagagcgaacgctgagctccatgtcaatagtttcattagttgctttccatttgcagacccgggatcctccaatattacccccgttatctgccttattaaaagatggttcagattttgaaagtgttgagaggaatacgttggcatttaaggggtttgggagaacaaataaagaaactgtagctgaactgtttgtatcgttgatcagtaaactattatcagcggagagcttatgggagcatgggctatgcgctagcaactttgaagcatcatggatctctaagacctggaagaaaggaattggcaatttaaatgtcagttgggaaaaaggagatgcagaagatttgcagatgtcttcgagattgtgctttgaacttgttagatttcatgaggggtaaactagatacatcaaagctaaagacccttctgtttggatgccttaaaccagatgagctagtcagtaaacctcgtttgaagcgtggcaagagaaaacgcaagccacaaacgagcccagatagcagatatgggctcggaaagggaaagcatgctgtgcacctagtaggatcagaccagcatgctaattctacaactgctgaagctcctcaggttgtacatcgacatcccacccaggctaaggctagtactcagtgtgcgcacaagccaacgccaccttttgttattatcccttctggttttggctacagtttatcgcttcagttgccagtggctcctcagcttagtcgaggattgctgggccgacccccaccagttaatttagttcacttgaataatggagctcagctaccacagcaaggtctgcttctttccctgccgtcccaacaagcagctggcagtaacagtggagttacttatgctggagctcagcagcttcagcgcaacgaaaactaggatgattagatcttgctactattttgccaagttatatgggtaagaaagagtatgtaccctttgcattggcaaacggaaacttagctgttcatgttggtgtgctgcagaagggattacatcagatatttttgctactgattgaagttgcaaaactttcttttggaaggcaaaggcatgtgcttcggttgtaaaagtacgtactgtatcacatagtaggtggtttctgggtgctgaaccagaagaactacatttgtatatatgggctcctgggttgtgtcagctcagccttccttcaaaccatatgacacccaacccaaatgcagcctgcactgcaggtaggtaaaatgtctacctgtagtttgttctgtatttcttttttgtactatatcactgttaggacaaatgtttggataaggtgactgttgattttgctgtgttttcgagtacggggagatgattttgatgccccaacaagcaaggtcttcgagattgcaggacagggcaggacaatgcttggatcgatgacgaaggtgcatgcatgaatgcatgattggtgaaattaagtaagcaaatctttgggacacttgacatagccaaaacgggctgctttccatatctatcaaacatgcatcactttggttgaaatgggtccgaccgacagcataaacacaacttgctcaacttgttgcccatcaataataatattaaagcctgtctctctgtctgcctgataacatagcagtgataattgatattaaggccttgtttatttgggg

SEQ ID NO: 28191 - DNA, 1326 bp, Oryza sativa
  ref <308>: DATABASE ACCESSION NUMBER: AK103633
  ref <309>: DATABASE ENTRY DATE: 2002-08-28
ggccccttgctgcgccgcctccctcgtctcgtctcgttcctccctctccggcggccggatcggcgaaccccctcccgccgccgcacgcgcgcgcgctccccggcttcgccgccgagcagaggggtagcggaggctagggctcccttccgggaacttaacttccaacttcaagatgttccccccaggcaacaattctttggctctttcagccccaaggccaggaatggagctggctaacattcaacagcatcctaatcaagctcttgggcctggtgggaagcaacgtacatccagtctggaggccccaataatgctactcacaggccatcagagcgctgtgtactgtatgaagttcaaccctgcaggaactgtgatagcatcaggctcccatgacaaggatatcttcttgtggtatgtccatggtgactgtaagaactacatggtactgagagggcacaagaatgctgttcttgaccttcaatggactactgatgggactcagatcatctctgcaagccctgacaagactgtgagagtgtgggacgttgagactggcaagcaagtcaagaagatggccgagcactcatcttttgtcaactcatgttgcccggctcgaaagtggccacctctggttgtaagtggatcggatgatggaacagcaaagctgtgggatttgcgtcaaagaggtgctatacaaacacttcccgacaagtaccagattacagccgtcagcttctcagaggcggcagataaggttttcactggtggcctagacaatgatgtcaaatggtgggatctccgtaagaatgaagtgacagagtatctcaaaggacaccaggacatgataaccggaatgcagcttagtccagatgggtcttatctcctaaccaatgcaatggacaatgagctcaaaatctgggacttgcgcccttacgccccagagaaccggaacatcaagaccctcacaggacaccagcataactttgagaagaacctgttgaagtgcagctggtcccctgataatcgcaaggtcactgccgggagtgctgatcgcatggtctacatctgggacacaacatcaaggcggatcttgtacaagcttcctggccacaacggttctgtcaacgagaccgcattccatcccaccgagcctgtcattggatcttgcggcagtgacaagcagatttatcttggggagctttaagggtactaccatcacattttcatctagaagctattgtactatcttgttatgaaggcaaacagaaactaccatccttgcaatgtttcttcatctgaaaaattctaatgcacgattgactgacc

SEQ ID NO: 28192 - DNA, 2562 bp, Oryza sativa
  ref <308>: DATABASE ACCESSION NUMBER: AK103634
  ref <309>: DATABASE ENTRY DATE: 2002-08-28
ggttttgtgtagtgtagatgtgtgaaagttaaaaccagccgggtcacttcgcttcctgtggcagcacagctagcgcgtggccatggacgaccaccagagcaaggtgcagcggctgtacgacgcgtgcgacgccgtcttctcgtcggggagtaaagcagggttgccgacgctcaagcagatcaggtggctgcaagacctgctcgatggcatggaggcggcggacgtcgggatcgaaggcggcggcagcggcggcgagaggtcgtcgtcctcggaggacgacgacgagaggagcccgccggggcggcggtttctctcggcgcgggcgttcacccggatcacctacgtgcacatccacgagtgcgacgatttctcgatcggcgtgttctgcttcccggccggcgcgacgctgccgctgcacgaccacccgcaaatggtggtgctgagcaagcttctctacggctcgatgcgggtcaagtcgtacgactgggcgaacgcgcccccgtgctcgggcccaaggaagagtaagcatttgtctcagctgcatgcgaatgcatgcgcctgtttgccgtcgattcgctcgctgatgatcaatcgacaaaaaaactcgatcgttttctgatgtcaagttgtcaactgcatctaacatttgttccttgtctcacctacatatactagtttgaggttacctggctatgatcaaggacagaaaaaggtctctgataatttacaagcaggatgagattaatacctccctacaaaatccttgtaaaagacggtttcagatagccaaatcccaccgatgtctcaccaaaccagcattttttttcagcaatataaacaggagaacctatctctccctgtccactgctctactcttgatacagtttttaatggtttggaatttgcaaaagatagctctcgcctgaaactggaataactttttggatacttgcagcctctgtcgattaatttttgaattactactagcttacttcggttggaagcccaagccacgtgctgttggaaaaacaacagtgtacatagaatgaaacaactgcactactagtagtatcagaaattgccgtttttatactaagaaaaaaaaaagaaaagtaagtgacgccatcccactgctttccaatatggcaagatatccaaaagtccaccaatcctctcaagaagagacagtaacgaaattctcacaggaatatagtatttttcatgcaggtggtttagcccgagtggtcgccgtcgacgagatgcgggaggcgccgtgcaaggcgtcggtcctgttcccgcggagcggcggcaacatccactccctcaccgccgtcacgccgtgcgcgctcctcgacgtgctagcgccgccctacgccgaggacctcggccggccgtccacctacttctccgacattcccatcccctctctccctggtacgcacacaacatgcatgcataggaatcgctaaccttcattcgatataaaataccttcaaatattacatattttggatcattgggtgtgcttcacgtttcatgctcctgtctttttttttaagccccgatgatctcctcatcttttccaacactggcaacattccaaactttgatagagaacttacggattagagtcctaggttagagaagttcgttagttttagaggataacctaggaggcaacagttcgggtgggcagcaaggcgaccgcggtattgccaaaactacagggtcggaagtggatagtgggccggtgggctggtggggaaatgtagaacaaagttaggaggtggtggcggatccagttatggggagccacgggaagatggcggcacaggggtagccggcttgaggacaaggtgaggagaggaagcggggaagaggctagcttagggatcttaccgatgttgttgaccacttctagtcagttgacaagcttgggtggcagcggcgatggtggtggtagtggcgataaggggaagtcggaagaaagagagagtaagggaggggtttgaaggtttggttgtcttgtactccctctgtcccatagaaaacctaataggctagtacatatatctagattcattgtattagaatatgtcaaatctagttttagattttttttttgacgaagggagtagtacacaacataaagtaatcgggcggtctaaaatattaaaggattttttgtcaaatgatgatagaaggtccctaatttgcatagcagcacaggtgaccgtggaatgatgatctgttgagatttctgacagtgtgatggctttctctcaggttttgcagtactggaagaggcagacttgcctgacggtttccgtgttgcaggggccccatatgtaggccccgagctcacaatagacatggacagcatgtataattagatagctgatctctgcttttccagagtatcagatcagatagctctcactgcttttcttaaagtagcatttgcatggacaatacattgcacctcgccatcttgtatatacgattatgcatgtgtgttgtcggtttgtctttctaccatgcttatctaccagttggtgttgg

SEQ ID NO: 28193 - DNA, 2369 bp, Oryza sativa
  ref <308>: DATABASE ACCESSION NUMBER: AK103635
  ref <309>: DATABASE ENTRY DATE: 2002-08-28
ggaaaaatctaccccacccgccttctctgacttcctgacgagcagcgtcctcttctcctcccagtcccagcttcccctctgaacacgaaaaaaagaagactccttttggtcaataaatcgaaataacctcggaaaaccagggaatttaaccgtgcccacacccatctgttcccttccagcatccacaacctcttcaaccgcttgcctgctcttgtgaggtagctaggcaaagatcaagaggcagtagaggtgtggaggccttggacagttggattcttggagggaaaagaaggaagaacttgcataccagtggaattcttcaggctggtcatggagatgcagctttggaggagatgggtcggcgtggagctcagttgcaggcgctagttcttagcgcgcgcaaaccacatgctgttctgaagtctccaagcgcgcgctgctgtctggaacaagagccgggagcagatatggtcccggacggcggcgaggggcatgagatcgtcgaggtcgccggcgagcccggcgcgccgtcgtcgacaatgcggctgatggacttcatacccatctacatcccgacggtggagacgggcgcgctgagccggagcgtgcgcaagcggcggttcttggacttcctccgcgcccacccgtccagggactggttcctccggtcaaccttcgtcggccgcctccgccaccggggccagggccaggcggcgtcgggggatgacgaggaggtggactccggcggcggtcgccggcggccgcggaggcggttccgcgtgccgttcgtgaggaagatcaagtgggggaagctgtggagctacgcggtgagctggtgcaggaagcccgagaacttcgccatgatcatctggctggcgttcgtcgccgccgggctgctgatgctgttcatgctcatgaccggcatgctcgactccgccatccccgacgacgagcagcggaagaagtggacggaggtgatcaaccagatcctcaacgcgctcttcaccatcatgtgcctgtaccagcaccccaagatcttccaccacgtcgtgctgctcctccggtggcgccccggcgccggcgccgaccgcgaggagatccgcaaggtgtactgcaaggacggcgcgccgcggccgcacgaccgcgcgcacatgctcgtcgtggtggtgctgcttcacgccacctgcttggcgcagtacttctgctgcgctctcttctggagctacgcgcgcaaggaacggccggactgggctctcaacatcggctacggccttggcaccggctgccccgtcatcgccggcctctacgcggcgtacggcccgctgggacggaagcagcacgaggattccgacgaggagtcagcggcggcgcaggccggcggcggaaaccggccggcggagaacgaccgtgaggtggagatcaagatatacaaccggcgcgtggtggtgagcagcccggagtggagcggcgggctgttcgactgctgcgacgacgggacggtgtgcgcgctgtcggcgacgtgcacgttctgcgtgttcgggtggaacatggagcggctcgggttcggaaacatgtacgtgcacgccttcaccttcatcctgctctgcgtcgcgccgttcctcatcttcagcgtgacggcgctcaacgtccacgacgacgacatccgcgacaccgtcgtctccgtgggcgtgctcctgggcctctgcggcttcctctacggcggcttctggcggacgcagatgcggaagcggtacaagctcccggcctccggctgcgggtgcgggtgcgagtgcggcgccggcggacaggggcacgcgtgccgcgcggcggtgagcgactgcgccaagtggctcttctgctggagctgcgcgctggcgcaggaggtgcggacggccaacttctacgacgtggaggacgaccggttcgtgttccacggcgcccgcaacgaggacgggcgcgccgtgctggtgccgcttccgcgggaggcctccaccgccacggcgcactcgcggagcatgtcgtgcccgcccaagatcgacgccgtggcggcgctgagcggcgcgagcccgctgggcgtgcagatggcagccatcaacatggagaggtcggccacgtacagcggcgagcaccaccccgccgccatgcgtccgcctgtgcccccgctgatgcaaatggaccaggaatagtggcagcggcagcagcacgcgcgccctagctacaccgtggccatgtatacggtagtattaattctatgatacgtacggtagtattaattctatgatacgtataaggtcgtcgtctacacgtactgcaggttgtattagactattagctggtttttatacatacggattcgtttgtttgatagt

SEQ ID NO: 28194 - DNA, 1057 bp, Oryza sativa
  ref <308>: DATABASE ACCESSION NUMBER: AK103636
  ref <309>: DATABASE ENTRY DATE: 2002-08-28
gatagttgcaaattacatctcctacaccaattttttttcctgtatgttcttccgcatgtgctagctagcttagtagcttgagctccatcggttttggttgagctcctgcttcagcttgcctcatgccagcatgcgcatggtgcggtctgctgctcatgtgttctcttctttccaacatttatcctactcgttgctccttaaggtacgtactggggcagcgtgatgcccgtgactcagcacttaggcagtgaaggggatggagcgcaggtgcagtacgaggcgacgctggcgtactcgggtgcagtcgcgggggtgacgatcgaggaactagctggccggacatcgtcatggtcttcggtctcctacgtgctcgacctggggttcgtccacccacaccacgctgcccatgcttgccttctatgggagcggcgagcgccatgcctaccttgccccctgcagaacatcatcgccacagccgcacggccacacctaccaccgcacactcgtggcctctatatatcgctcacagcttcgctgacaacatcgatctgcatctcatgtatgagtggatgtgtgccatgctgccatagcaccaaggaggtttctgcgaccgcatttgaggatttaaatgaagcacattctagaaggccagaacaaggtaaggtgggtgagttgggtcacgtcccaggatcggaggaccagggacgcgaagcgcgagtggcagggcgccgacgtcgaggtctccaacagtacggtattgctccaatgagcagttgggaccttgggagctggggttattgccgcgaggatggtgcttctctttgtgttgactgttgacaacgactagccatcggatttggattctggaggtagtctttagcattttcaaattttccgattgtacctaagtatctctatgtaattgggagtgtgccaacgtcatatacagttgagcactaaacctaactttacacttatatactttttgttcaattgttatatggcattgtatacaaatgtttaattaggatatatatatatatggcatttagtagtg

SEQ ID NO: 28195 - DNA, 1013 bp, Oryza sativa
  ref <308>: DATABASE ACCESSION NUMBER: AK103637
  ref <309>: DATABASE ENTRY DATE: 2002-08-28
gaccgtgcaacgtcgagccgcgccaccagcatctatggctgcggcgctcgccaccgtcgtgtctttcctgctcgtcgtcctcgtctccgtcgcccacggctggaacaaagactgcccgcctcccggtagcggcagcagcggcggcggccaccacggcaagccgcccggtagcggcagcggcggcggcggtcaccacggcaagccgcccgagcaccaccaccaccacaaacctcccccgtctccccggtgcccgtcgtgccacccgccctacacgccgccgacgccacggccgccgccaactccgccgtacgttccatctccaccaccatacgtgccaccctacatcccgccgccgacgccgccatacgttccaccctacatcccgccgccgacgccgccgtacgtcccgccgccgacgccgccgtctcctccgccatacgtgccgccgccgacgccgccgtcgccgccgccgtacgtgccgccgccgagcccgccggcgacgaagacgtgcccgatcgacgcgctgaagctgaacgcgtgcgtggacgtgctgggggggctgatccacctggtgatcgggcagaaggcgagggcgaagtgctgcccgctggtgcagggcgtggcggacctggacgccgcgctctgcctctgcaccaccatccgcgcgcgcctcctcaacatcaacatctacctccccgtcgcgctcgagctgctcatcacctgcggcaagcacccgcctcccggcttcaagtgccccccgctctacggcgcctgaactgaacaaacgaagcagcagctagcaaagcttcgtcgtcgtcgtcaatggcggaggctactatactacaccctcgctagctagctatactgtgctacctttactctctcgatcgtactcgtgtctgcgatttgtgttgtattaatgtactacctccggttttaatccaagtgtagtttaattaattaatccacgagaaaagatccgacttatgatcaagtctctgtgcgaattgagg

SEQ ID NO: 28196 - DNA, 951 bp, Oryza sativa
  ref <308>: DATABASE ACCESSION NUMBER: AK103638
  ref <309>: DATABASE ENTRY DATE: 2002-08-28
gaaaggaaaaaaacctccactacgcaaatcgtcgtcgtcttcctccgcggaattccccaccccaccggcggcgcgaccgggcggagatgtaccacccgacgagaggcggcgtccgcggcggacgggatcaattcaaatgggatgatgttaaggttgacaagcaccgagagaattacctcggtcatagcattaaggctcctgttggaagatggcagaaagggaaggacctgttctggtatacaaaagataagaaatctgactcagaagatgctctcaaggaagaaatcaggagagtgaaggaagaggaggagcagtccatgcgggaggcacttggcttagttcctaagcgtagtagtcgacctaagggcaaccgattagataagcatgagtacgcagagcttattaagcgaggatcaactgcagaagacttgggtgctggacatgctgaagcagcacaagtgcagggtctaggtttatacaagggtcctcgcagagaggaagaatcgagctcctttaaccttgatcctccagaaatggtgcccgctgagcaggctgacaaccctccaccggaaaccaaaccggaacgtgaagattccgatgatgatcgtaggagcaaaagggggcgtgaggagaggggaggggagaaagagcggaagcgagaaaggcactcggaaggaaaggagaggaggcgtgacaagcaagagaagaggagtcggcatgagtcggacgacaggtcgaagcgccaccgcaaagacaagcacaagaggaggcatgactctgattccgactagttactgcggctctttcaacctgtctcactgtatcctgccatcatatttcatgccttgctacgtttgcttgatgatgatgtagttgtaaaaacagcttgtatactcttcttgaatacattgtctgtttttaacttgcacatgagaaatatgttgaacctgt

SEQ ID NO: 28197 - DNA, 535 bp, Oryza sativa
  ref <308>: DATABASE ACCESSION NUMBER: AK103639
  ref <309>: DATABASE ENTRY DATE: 2002-08-28
gcttttcgaaacgcgcaaaaaccctctccgactctccccttctcccactcttctccggcggcggcggcggcggcggcgggagcgcatcggagatgatcatcccggtgcggtgcttcacctgcgggaaggtgattgggaacaagtgggatctgtacctggatctcctccaggctgactacacagagggggatgctctggatgcattgggtttggtccgttactgctgccggcgaatgctcatgacccatgttgacctcatcgagaagttactcaactacaacacgctggagaagaccgagacagcaggttaagttgacccagcatgctccagaactcttgttccttattgcctttgttcacgaatgttccaaggaatttgtgtgatgatccatgctgcatttcaactatgtaactgttaccgtgatgtcagatgatggaagtgatataactagtgggcagagtacctctggttgtgtgtgaacttgttttcaagacttttatatcaaggggggtatgttcctgcagtaattttctt

SEQ ID NO: 28198 - DNA, 1691 bp, Oryza sativa
  ref <308>: DATABASE ACCESSION NUMBER: AK103640
  ref <309>: DATABASE ENTRY DATE: 2002-08-28
gacctcacttcccaccacctctcgccgcttcgggcatcgtctctcccagcgccggccggaccgatggcggcggagccagcagcggccgaagccatggatgtcgaggcgccggcgcgaccaaccaccaccaccagcactgtatccacctcgaagggcaagtccccccacgacctcctcgcggagacccgcgcctccgtggaggaggtcgccgcccggatcctcgccatcaagaaggacgacgcccccagaaccgagctccgggagctcgtcgcccagatgtccctcctcctcatcacgcttcgccaggcgaacagggagatactgatggaggaggacagggtgaaggcggagacggaggcggcgaaggcgcccgtggactccacgacgctgcagctgcacaaccttctgtacgagaagaaccactacgtgaaggccattagggcgtgcctcgacttccagaccaagtacccgggcatagagctcgtgccgacggaggagttccaccgcgccgcgccggcggacatccgcgataagacgctcgctgctgacgcgtcccacgacctcatgctcaagcgcctcaatttcgagctagtccagcggaaagagctatgcaagctacatgagaaattggagcagcggaagagcagtttgttggacacaattgcaaatcagaaaaagttcctttcgagcctcccaacccatttgaaatcactgaagaaagcatcattgccagtgcagcagcagctggggatgcaacataccaagaaactaaagcagcatcatgcagctgaactgcttccaactcctctatatatagtttacacgcagtttttaggacagaaagaagcattcggagagaatattgaagtggagatcactggaagcacaaaggatgctcagatgtttgctcaacagcaagctaagcaggaaaatgctggcactttgtcaaatggtgataatagagtggatgacgatgcaattgatgatgaagaagatgctcaaagaagaaggtcaaggtcaagaaaaagtgttgtgaaggaagctagtaattcagtagtggcatatcaacttcatccccttaaagttattctccatgtatacgacactgaagagtctggagcaaagcgtcgtaagctcatggtcctgagattcgactacttggcaaagttgaacgttgtttgtgttggaattgaagattcaaaggggctggaccatgatatcctatgcaacttatttccagatgacactggtttagagttgcctcatcagatggctaaactttatgctggggaggttccgaacttcagtgaaaaggattcaaggccatacaagtgggcacaacatctagctggtatagatttcttgccagaagagcctctatctgttggtgatgattctaacagagcatcgagaagtgcggacttgtcatctgggcttgctttataccgtcagcagaatcgtgcacagactattttgcagagaatccgctcacggaaggttgcacagatggctcttacgtgagtcactgcttcacaatcttgtagtttgggatgtaacaaaatttggatggtagatccttatagatggaggaaatgtactttggctgatgagtttttgcttcattgcacatgtcattctgtgacgtgctacattattagttgatgaaaaatatttgatgagcaaagtttgtg

SEQ ID NO: 28199 - DNA, 1224 bp, Oryza sativa
  ref <308>: DATABASE ACCESSION NUMBER: AK103641
  ref <309>: DATABASE ENTRY DATE: 2002-08-28
gttattcatcgagagatcgaattcggttctcgtctcgatcatcagtttggcctgtcgatctctgtccatctctgacgacgccgacggccatgcagcagctgctcgcgatgaagctgatcctgacgacgctcgtcgtcgccgtgctggcgctgtccgccggcacggccacggccacctgcgacacgctcacggtcgggcactaccggcagtcgtgccgcgccgccgagaccatcgtgcgcgacaccgtcaagctctacttctcaaaggaccagaccgtcaccgcgccgctgctccgcctccacttccacgactgcttcgtcaggggatgtgacggatcggtgttgctgaacgcgacggcggcgagcgggccggcggagaaggacgcgatgccgaaccagagcctggacgggttctacgtcatcgacgccgccaaggcggcgctggagaaggagtgccccggcgtcgtctcctgcgccgacatcctggcgctggcggccagagacgctgtctccatggctgccgggaacatcaatggcgcgagcctttggcaagtcccgacggggcggctcgacggccgcgtgtcgtcggcggcggaggccgtggccaacctaccgtcttctttcgcggatttcgctaagctcaaggagcagttcggttccaagggcctaaatgtgcaagacctcgcgatcctatcaggtgctcacgccataggcaattcacactgcgtctccttcgccaagcggctctacaacttcaccggcaagggcgacgccgacccgacgctcgaccgggcgtacgccgcggcggtcctccgcgccgcctgcccgccgcggttcgacaacgcgaccaccgtcgagatggtgccggggagctcgacgacgttcgacaccgactactacaggctggtggcgagccggaggggcctcttccactccgaccaggcgttgctccaggacagggaggcggcggcgacggtgcgcgtcatggcgaggtcgagcaggcaggcgttcttccggcgattcggggtgtccatggtgaggatgggcaatgtcggggtcctgacgggagccgcaggagagatcaggaagaactgtgctctgattaattgatgggcagagatttgatctttgatataagttattactaagtcatgtactaatgatgttctattgtttggtgtctaattaagttattactactactacaaggtaaatttcatgaggg

SEQ ID NO: 28200 - DNA, 2137 bp, Oryza sativa
  ref <308>: DATABASE ACCESSION NUMBER: AK103642
  ref <309>: DATABASE ENTRY DATE: 2002-08-28
gtggattggggctcgtcgcctcgaggaggccgacggcgatgtggctctacggcgagggtcgacccaccgcctgttcttcaactgcttccgatgtccctccatatatctcagtgagttgattcgccgaggaagatgctgactcgccggatcccttcatcctgccaatcttcattttttttccagtgtaggtacatctcctctgtatatagaatgtaaaaactgcttgaaacatttttttttggaaagaatgcctgaaacatttagtgtctttacatgtgaagtaatctcctgactgctgctgcttcctctgtatttatacgattgattgcatttgtgatgttggtgcattgcatactgtgtgggtgttgacgcctctgatatataatgcatatatgccactaagggaataaatatgtacatgaatgctcctcaaccatgataatataagctaaacaaatgagcaaatcacacagcttgagcatccaggagtattattatttcgtcaaatgtaatttacaactaactttcaccaagactgattgcctttcaattacagaaggataattttggatcctctagagttaatatgcttatttttagttccaattcatcataagtgccacttgtctgcagttctgcacaagatatacgctttattgcatatctcatgtgaaatttgggctactttactcttgcagttctcaaaattttgtttaaaagatatctcttgccagtagacctgacaatacaaagcatattttgtacaattatttgtattgataatacaatttgatttctaatttgccagcagaattgaactctttaacaataactagcctagctacttttgctacttttgcctgcacttagtggaactgagcctggctatttctattcagatacagtgcttcctacatgatcaatatctctcaaatctcaatgaagataggcagattgttattccaggttggttctctggatgtgtggaagtttgcaatttgcagatcaatagctgtatatggttgatataaatttgaagatcactggctctatatggttgataacttgatatgagggtaattgggaaatctgtgataaggtatgaaagttcccttttgatgcatttctgtagcactattgaagcaccatggagtttttgtgtccatatttatttatctccatgcaatgaataataactcttcctaattagcgctaaattttaagcatggttggccctcaaatcattttttctcctctgctgaatctgtaattcctatatggtgacaaccataatcagtcgaaatatatttgtaacgtcgtctcattttcacatcatttatttatgccttgctgaaagagaagtgaagaggtgaataggtagtatgtagcctagcgggcgatggatagctagattgcatttgatgtttctgatgttattgctggtttgagcttgagactgcatttttctttttcgagtttgagatgaaatatttgtagtcatttgtataaataacttctgtttgtggatcttagtttatggagggcattgtactgcatgatttaatcttaggtgatgtcctgcctgtttttggttggtacctgtccttttatttcttatggacagatatattgaggtgcttattactttattcataccattattctatagtttaatgccttctgttgtccttctaattctgagtagaggatgccctaaacatatgccacaaaaataactccattaacctatatttattcacatttagaaaaagaaaattaggagggaggactaatattgttgagtagtttagtgacttaatattgttgactcctagtattgacactaaaattgtatttttgcagcacatctcaagaagctatgtataagttgtagcaaaaaattccatttgcacatcaacaagaaggccttgatgtaattcaatcctctatttgctatgagtggaggacgagaagcaaggagtgattccattcaatgtttgaaagatttgctttgttttctgttttcagatttcctgttattaggttgaatctgagatgaaatattgtttgaattctgttgtattctgattgtatctgttattagttgaatctgagatggtacctgcaattagatttg

SEQ ID NO: 28201 - DNA, 1245 bp, Oryza sativa
  ref <308>: DATABASE ACCESSION NUMBER: AK103643
  ref <309>: DATABASE ENTRY DATE: 2002-08-28
ggccgttcttttcggagattccgctcgcgcgcgccgccgccgccgcagccgcccgccggggagcccgggacgaggatggaggtcgtcgtggcgaggcagccgaaggcgaagaagcagataaacctcttctactgctccgagtgcgaggagctcgcgctcaaggtcgccgctagctccgacaccatccatctccagtccatcaactggaggagcttcgacgacgggttccccaacctgttcatcaacaacgcgcacgacatccgggggcagcacgtggcgttcctggcgtcgttcagctcgccgtcggtcatcttcgagcagatctccgtcatcttcgcgctgcccaagctgttcatcgcctccttcacgctcgtgctgcctttcttccccacgggctccttcgagcgcgtcgaggaggagggcgacgtcgccaccgcgttcaccctcgcgcgcatcctctccatgattcccaagtcccggggcggcccgaccagcgtcgtcatctacgacatccacgcgctccaggagaggttctacttcggggacgacgtcctcccctgcttcgagaccgggattccgctcctgctgcagcgcctccggcagctccccgatgctgacaatatcaccattgccttcccggatgatggggcgtggaagcgtttccacaagctattgctcaacttcccaatggttgtctgcgcaaaggttcgggaaggtgacaagaggatagttcgaattaaggaggggaatcctgaaggccggcatgtggttattgttgatgatttagtgcaatctgggggaactcttagagaatgtcagaaagttttggctgctcatggtgctgcaaaagttagtgcttacgtgactcatgctgtttttcccaagcagtcgtatgagcgcttcactcacactaattccgctgggtcagctgacaagtttgcgtatttctggatcactgactcctgccctcaaacagtgaaagccatcaaccaacaacctccatttgaggtgttgagccttgctggttcgattgcggatgcccttcaaatatgaactttgtttttggtaatgggctactcccatttttcctaaatgttagagttcactttcagctccagtaaaaacaaataatgtggagtgagttatcttaattatggctttggcctgacgtcttcataaacatctcaatatgtgatggtaaaataaggcatttgatgctcatctgttccttcttgagcaaagcgc

SEQ ID NO: 28202 - DNA, 1615 bp, Oryza sativa
  ref <308>: DATABASE ACCESSION NUMBER: AK103644
  ref <309>: DATABASE ENTRY DATE: 2002-08-28
gcctaatcacccaacacaatcttgccataccatgggtcgatcgaaacgggaagttgccccgccacctcaagctttgccggcatccttcccatctggcatgtggctggctactccgccgatgcaggcctcctttgctcccggtggctggcaaggtacagcggctgcacctggtggctggcaaggtatggcgccaccgcagccgccgcaggctccattatttgcatacggcgccaatacttctgctccccatctggcccagatgaagcaagggtcagatcgtagttccatggacgattccttgtcagatctgcaagaaagtggtatggactcacgtccacctggtggattcttaagttactttcaggatccatcaagtttacagaatcatcaaccttctataccactaaattattatgctactcagcaagcagcaccatgggcaccttcacctgcagaataccgaagtccagttacaaaatcaggtccaggagaacaacaccctatcaacattgatagtggtggtgaagaaacccccactgttaggactgagaagcggttgacatggacacatgaagaggacataaggctagtgagtgcttggttgaacaacttgaatgattcgatcaatggtaatttcaagaaaaatgattgttattggggagatgttacaactgcctacaatagcaccactccgagaaataggatgaggcaagaaaaacaaatcaaggaccgctttcataaaattaagaaaaatgttggccgtttttgctgtgcttataaggaggtgaaatctatctatgttagtggacaaaatgaactacaattgatggagaaggtccatgcaacatatgaagcagattacaaggaaggccaatttacatttctgcattgttggaaagctctccgtgaccaaccaaagtggcatgcttacttggaggaacttgagaagccaaacaaaacaaagtcagataatgaagtggaagtaagggaacttacatccactcctaatagccctgaagatattatacgtcctgaaggaaccaaagctgctaaggcgcggcgtaatggtaaagacaaacgcaaaaggaaggcaaaggtttatctatcggatatggatgatgagattgacaagcctaaagaagttcagaacatggcagataaaggtcgcgatgagctactggagactcagaggcgtgtttctagtgagaatcttgaatcaaaaaggttagctcacctggcagccatggagcacaaggaggcggttatgttggaaacatatcgggctctcatgttgcaagatacaaaagatatgcctgatgatgtcagatttgagcatgtgatggcattgaagagtatgagggaaaagttgtttcctaaaactaaggtatcgaagatgctcattttggctgcttgttttggcagtgcttcagcaagagaagctacttattacataattttcagtaatccaccgattttatcaaaacagaacttgtgttctaactatctactcagtatgtcgttgtatgggtcactgttatggcctatgaatgatgtatggatcattgtaatagactaagttcttttgtcagtctatgaactaattagtagttttgcc

SEQ ID NO: 28203 - DNA, 1948 bp, Oryza sativa
  ref <308>: DATABASE ACCESSION NUMBER: AK103645
  ref <309>: DATABASE ENTRY DATE: 2002-08-28
gaatcaaatccaaaaaaaacaaaccaaccaaccacgtcgatcgctcgcagtcgccgccgcgctacggcggcggcgcgacggcgacggcgccgaaccaccgcgagcaggtgtagaccgagcagaaggcctgcagcgtggtgagcagcagcatgaggacggcggcgaggaaggtgagcagctgccacgagccgaacacgtagcgccgcatgaaccgcctcgccttcacccgccaccgcgcgccgtggtaccggttcaccccctccaccgccgcgtccatggccgccaccttcgtcagcctcaccgacctgctcatcccgttccacagcctcgccgcctcgccgtcgctcttcatccggttcagcaccacccctcgccgccgcagcgccgccacgtcctcgccggtgtcgatgatgccgttcatcagctccgtgtaccgggcgagcaccagcggccccgtcgccgccgacgcctcgtaggcgaccaggttgcggagcaccacctccgtcgtgctgccgtcaagcgtcaccacggggaggtgcagcgtcgccgtcttggcgtcgaacgagaccgtggtggcgtcgccgttcgtcggcgcgaactggacgccggcggcggcgagctcggtgactgacgggatcatgatctcctcgatcagcggtggccggctgatcgcgtggtggtggtcctgccccgccgccgtcgacgacgacgacgggtcgccgccgccgccggacatgaagaaggactccactgggtgcttcatcgccgagaagcccgggaccacggtgagcatcttccatggcgccttgacggcgaacgagatcggcttcgccacgtactgcatcggcccgctcttgaggctcgacacgatgccccacaccgcggcgagcagctgcttcacgtactcgcacccggcggattgctgcttctcctcgccgccgccgccgccgccgtccaccggctgctcctcgatgtcgtagccctcgtcgtggccgtcggcggcggcggcggcgtcgctgatggcttcgggacgagcaggtggtagaggagctcgaggaggtgggcgtgcttggcgacgtcgatggccgggaagttgtccatcatcttgaaggggcagagctccttcatgaggccggtgaccatccgcccgagcagctcgctggcctcctccgccgacgagcactgcggctcgaggagcttgcggaggaggaagagcgggatctggttctcgagcatgagcatgtcgcggaggatgaggttgtgcgccgacttcctcccggcgaagtccaccaggtgcgccatcctcgacgacaccctcctcagctccggcttccctccgccgccgctggcggcggcctccgcggcggcgaagatctgcaagaactcgagcaggaacgcgccgtcgacgaccatcatccacgccagcgtctcgccgctgaagtcgaggtagcggtggtagtgcgccctgaccttgcgctccgcgcgcgcgaactgttcgacgaggtgctcgagcttgacgccctcgcggaggtgcctctgggcgcgccgcgcggcggcgagcttgtatcgctccatctcgtacagctccggccgccaatggtggtacggccccagcgcgatgaactgcggcacgtacgcctccggcttgtgcgcctgcagctgcttgggcacgttgaacacggacaccgggatgccgttgtcgtcgtcgtcgtcgccgccgtcctcctggagggagcgccggatctggatcacccaccggagctcgtcgaacaccagcggcgcgccgtcccggccgccggggtggtggtcggagcccgccattgccgatcagctcgagctctagctagctccctaattccacacgtgcgagttaagctgcagctgcttgttgcttgtcagtctgatccactttggcagtaatatatagtgaaacctatcatgattcatg

SEQ ID NO: 28204 - DNA, 1079 bp, Oryza sativa
  ref <308>: DATABASE ACCESSION NUMBER: AK103646
  ref <309>: DATABASE ENTRY DATE: 2002-08-28
ggcccaaaccctacacaatcttcgaatccccaccgaatcgcgcgagagagaaatccaaggcgaggacgaggaggaggagaaggaagcttcgagaatgttccggaaccagtacgacaccgacgtgacgacgtggagcccggcggggcggctgttccaggtggagtacgccatggaggccgtgaagcagggctccgcctgcgtcggcctccgctcccgcacccacgccgtcctcgccgccgcgaacaaggccgcctccgagctctcctcccaccagcggaaggtcttccgcgtcgcagaccacgccggggtcgcgctcgccggcctcaccgccgacggccgcgtcctctcccgattcctccgctccgagtgcatcaaccacgccttcgtctacgacgcgcccctccccgtctccaggctcgcgctccgccttgccgacaaggcgcaggtttgcacacagcgatcatggaagaggccatatggtgttggcctccttgttgctggattagatgagtctggagcccatctatactataactgccccagcggcaactattttgagtaccaggcatttgctattggctctcgctctcaagccgccaagactttccttgagcgcagattcgagggctacaacgactacaccccagagcaacttatcaaagatgccctctccgccataaaggagacgctgcaaggtgagaagctaaccagctccaactgcaccgttgctattgttggcagaaaggacgatggcaccgttgagccatttgagatgatcgacgtgaagaggatccaagaaataatcgattccatggaggctgccgaggaggcaccagcggcagaggctgagtcgagctcgatgcaggaggaggacaagggcacggacgccgcgcccatggacatctaggcccaagatacatcttatctcctcccttacaccgtgtctgagtttccaaaagactactgttttagaaagctgtgactgttgtgtaccctttcttcagtactacaactttgcgacggtctctttgatcaacatcgattgtgttttggaccgattatttacatgtgatgcggac

SEQ ID NO: 28205 - DNA, 1413 bp, Oryza sativa
  ref <308>: DATABASE ACCESSION NUMBER: AK103647
  ref <309>: DATABASE ENTRY DATE: 2002-08-28
tataaacaaaacagggatgtactacctctattttatgttctgtgatccacagctcaagggattgaagattacaggcaggactgtttggcgaaacccacaaggttatctccctggtaaaatggccccaatgatgacattttatggtttcatgtcgcttgcatatcttgtacttggacttctgtggtttcttcagtttgtgcgatgctggaaggatattttgcagctgcactaccatataacagctgttattgctcttggcatgtgcgagatggctttctggtactttgagtatgctaacttcaattcgactggaaacagacctatggctaaccttgtgggcagttacatttactgctgtgaagaagaccatatctcgccttcttttattagtggtttctatgggatatggtgttgttagacccacattaggtggggttacatctaaagtaggtgctcttggtgtcgtctattttattgcttcggaaggtcttgaacttgttgaaaatcttggaaacatcaatgacttctctgggaaaacaaggttatttctggtgttacctgttgccatacttgatgctaccttcattatctggatattttcatcgctctcgagaactttggagaagctccagctgcggagaagtatggcaaaacttgaattgtatcggaagtttacaaattctctagctttgtcagttcttatctctattgcttggattggctatgagctatacttcaatgcaactgatccattgagtgagctatggcgaagggcttggatcatccctgcgttttggaatgttctctcctatgtcctccttgccatcatatgcatcctttggtctccgtctcgcaatccaacagggtttgcgtattcggaggatacagctgacgaggctgatgaggaaggtctctctcttgtaggcagtgctgtgaaaggaactggagacatagtgaacatgcatgtgtttccagaggataaacgtgcatgacaagttgtcatctttagtgcagctgtactcctggctgagtgctatgtgaagtaccgtttccctctgcattcatggcaagcttacgacttctgaagcttgcgtgcagtcccagtgtacaggtcgtgactttgtatggaaggatttgacttctatagaattttactcaatccgttgatgactatccaatacaaaaatgtgcgggaaataaacaatgacttggagagcgtgctggggttacttgctgtaattcctgcgcatggtgtggcgtgtgtagtagactcgtaggtcttgtttggtagaagcgcacattgttaaacacattgactgcatccccacgtaacgttggtatgatgacctcgtgccagttgcttatgcattgctcgcacgtatgagatatggaatgatttaattctgggtgttt

SEQ ID NO: 28206 - DNA, 1647 bp, Oryza sativa
  ref <308>: DATABASE ACCESSION NUMBER: AK103648
  ref <309>: DATABASE ENTRY DATE: 2002-08-28
gagcagctcggggtgagcgtccgcggccgcgtcgcggtggcgatccgaggaggaggctaccgcggcggggtggtgcgccgcgccgcggaaaggagcgccgctgccgttctcattgccggccacgcggacggcggggtcgagaggggcacggtaatcctcggaggccccggcgacccgctcacccccgggtgggccgccacggccggggcggagcgcctggatttcgaccacgaggatgttaagcggcggtttccggccatcccatctatgccggtgtcgggcaagacggcttcggctatcatacggacactaggtggcccggctttgccggcggattggcagaccggagttggactcccggtggatgtcggcggcgttggacctggtcccactctggtcaacttcacatatcaggaggacaggaagatgggcatgatacaggatatttttgctattattaaagggtacgaagaacctgatcgttacgttatccttggtaaccaccgagatgcatggacctatggagcagttgaccctaacagcgggacatctgcgcttcttgatattgctcggcgtcttggaataatgctgcagtcaggctggacaccacggaggaccatcattctttgtagttgggatgccgaagagtttggaatgatcggatcaactgaatgggtcgaagagaacctcgaagatctgcaatcgaaagctgtagcttacttaaatgttgattgtgcggtgcaaggaattgggctttttgctggttctaccccccagttggacaacctcttggtcgatgttacaagacaggtaaaagatccagatgttgaaggaaaaacagtccatgatacatggaataaaatgaccggaggcatcaatatagaaagacttgccagaactgattctgactttgctccatttctacatcatgctgggatcccctgtatggatttatactatggaaaagaatttcctggatatcatacggctcttgactcgtatcattggatggaaaagcatggtgatccactgtttcttcgtcacgtggctattgtggagatttggggactactggcctttcgattagcagatgaccctgtgctgccttttgattatcaaacatacgcttcccagttgcaggagcatgcaaatgcattctctagtatgatggaaaatagcaaatgggttcatttgctgaatagatccattgaagatctttctgatgcaggcttagaatttctgaaagaggcaaagaaattacaggaccaaaatatatccgatgggtactctctgatgaggcggcgattgttgaacgaccgtcttctacttgctgaaagaagctttctgcaagctgatggacttcagggaagaggatggttcaagcatctgatgtactcgcctccggaggactacgaaagcaagctctcgtttttccctggggtggcggacgccatctcccggtcgagcaatcgaagcgcgaaagaacagcaggcggcggtgcggcatgaggtgcggaaaatctctagggcaatccaaagagcagctgatgttcttagaggcgaattcagtaataggaacgaatctttatactctagcctttctgtggctccataaaaactgtgtataaataaaatcgattggggtttg

SEQ ID NO: 28207 - DNA, 1907 bp, Oryza sativa
  ref <308>: DATABASE ACCESSION NUMBER: AK103649
  ref <309>: DATABASE ENTRY DATE: 2002-08-28
gccaaggagaggggccacgcgctcgccctcgcccgccgcgcgcgccagccgctcgagtccgtcatcgaggtcagcgacatcgacgccgtgctccagcgcgccgcagaggaatacctcctcctcggtggtggtggcggcgacggtgccggcgacgtcgccctctccgcctcgctcggctccgggcttatcgatctggatgggacggtggagacggaggaggagaggcggtggctgcgggaggagcaggaggcccttcacgcgggcagcctcaaggtgccccgccgaccgccatggactccccagatgacggtggaggagctcgacgccaacgagaagcgggccttcctggagtggcggaggaacctcgcaagattggaagagaacgaaaaacttgtccttaccccttttgagaagaacattgatatctggagacagctctggagagtacttgaacgcagtgatctgctggtcatggtagttgatgctcgagatcccttgttctaccgctgccctgatcttgaggtatacgcacaggaaattgatgagcacaagagaacactgcttcttgtaaacaaggctgatcttttaccactgaatgtcagacagagatgggcagaatactttaagcaacacgatatcctttatctgttctggtctgccaaagctgctactgctgatttagagggaaagaagttgagcagctattccatggaaaactggaatacagcagatcttgacaccaagatatatggccgggatgaactcttggtgagattgcagggtgaagctgagtatattgtgaaccaaaagggagcattaagagctgaagagggtcatgaatctagtcgttcagattctgtctcaacacgacccaagcatgtggttgttggatttgtaggctatccaaatgttgggaagagttcaaccatcaatgctttggtaggccagaagagaactggtgtaacctctacacctggcaagaccaagcattttcagacattggtaatctcagaagaactcattctctgtgattgtccaggtctggtcttcccttccttttcaagctcaaggcatgagatggtagcctgtggtgtcttgccaattgataggatgacaaagcataggggcgctattcaagtggtggcaaatcgtgtgccaagaaatgttctagaacagatttataaaatcaccctgccaaagcccaaggcatatgaacaactgtcccgaccaccaactgccgctgagttgctgcgggcgtactgcacatctcgagggcatgtcagtcatgctgggctgcctgatgagactagggctgctagacagattctgaaggattacttagatggaaagatcccacactttgagcttccccctggtgatacagattctgaaactgacccagaggaaaccactgaccttgaaggctcagatactgcagtaggtgccacagcagatcattgtgcttctgatgaacaagatggggaaatcagtcaagctgatccaaacattagtcatgtactaagtgaccttgaatctttcgacctggccagtgaagtgtccaagaactctacaaagaagaagaaagaggcatcctataagcatcacaagaaaccccagaggaagaaggatcgttcatggagggttggaaatgatggcgctgatggatctgctgttgttcgggtgttccagaaacctgccgtcaattttgctaccgttacaggttaatgtttttttgcggcactctgtgcgacttcattctcttttttagcttacggtaattgaagatgtcgttgaaagtcaaactacattttatccattttgtttcatcttctgctgtttgttatggccatctgtaattctgtattggaaatttggaatggtacgcaatgtggctatttttcgatgct

SEQ ID NO: 28208 - DNA, 1800 bp, Oryza sativa
  ref <308>: DATABASE ACCESSION NUMBER: AK103650
  ref <309>: DATABASE ENTRY DATE: 2002-08-28
gaaaggtgcacccggccccgcccctcccgcgagagcacttcggttttaatcgccgggagaaaaaaaataaatgggaggggcggtttggggaagaagaagttgaagaaggagaggaggacgctgaaaagaccaagcaacaagaagggagtccctctttctctttgggagtggagagagagagagagagagaggcatcggccatggcgaggtttctcctgggtgcggccgccattgcgctgctcgccggcgtgtcgtctctgctgctgatggtgccatttgcagaagcatatgatcctctcgatccaaatgggaatatcacaatcaagtgggacatcacacagtggaccccagatggctatgttgctgttgttaccatatacaacttccagaagtaccgtcatatccaagcgcctggttggagtcttgggtgggcttgggcaaagaaagagatcatttggtccatggctggtgggcaggccacagaacaaggtgattgctcggcattcaaagcaaatataccgcactgctgcaagagggatccgagagttgtcgacttagttcctggggcgccttacaacatgcagtttggaaattgttgcaaaggaggagtgcttacctcatgggtgcaggacccactaaacgcagtagcatcatttcagatcactgttggacattctgggactagcaataagacagtaaaagcgccgaagaacttcactctaaaggccccaggtccaggatatagttgcggattagcgcaagaagtgaaacctcctactaggttcatttcactggatggcagaaggacaactcaagctcatgtgacttggaatgtgacatgcacatattcgcagtttgttgctcaaagagctccaacttgttgtgtttcactttcatcgttttacaatgagacaatagttaactgcccgaaatgtgcgtgtggctgccagaataagaagccaggaagctgtgtggagggtaattcgccttatttggcgtctgtggtgaatggacctggcaagggcagcttgactcctctagttcaatgcacaccacacatgtgcccaataagagtgcattggcatgttaagctcaattacagggactattggagggttaaggtcacaatcacaaattggaattaccggatgaactactcgcagtggaacttagtagttcaacacccaaattttgaaaacgtctctactgttttcagcttcaactacaaatctttgaacccctatggagtaataaatgacactgcaatgatgtggggtgtcaagtactacaacgacctgcttatggtggctgggccagatggaaatgtccaatccgagcttctattccggaaggaccggtcaaccttcacctttgacaagggttgggcttttccaaggcgcatatacttcaatggcgaaagttgtgtcatgccttcaccagatctgtacccatggttacccccctcttctactcctagatttaggactgtattccttctcatgtcattcctggtttgtggaacattagcattcttgcacaaccacctagttttagacaaaaactgtggaaagtgctgaccacattgggcattggctgttgacatactgagtcttttggaagtttagggtgtgctcttgcatgaaaagctaattcgcgtttgatttaggttgtaagtttaggttcctcgaaatcattaaagtttgggttgtacattctgatggtgtgtattcttggtctgaagtgtgaagactaattgagaaccccaagtcccaacattaattgtctagagaaatgtttgcc

SEQ ID NO: 28209 - DNA, 1193 bp, Oryza sativa
  ref <308>: DATABASE ACCESSION NUMBER: AK103651
  ref <309>: DATABASE ENTRY DATE: 2002-08-28
tggcagctctcctcttcttcttcctcccaaacggccagcggcgcgcagcgtcacagattttacaggggaaagagaggaggagatggggagggaggagaggttcccggtgtgggaggcggcactgctcgccggcgtcgcggccgcctttgccacgggtctcgtcggcgtctacctctccatgcctcattcggactacagcttcctcaagctgcccaagaacctccaggagctccaaatcctcacggatcatctcgaggactacacgagcgactacaccgtgcaggtgctggtgggctattgtgccgtgtacatcttcatgcagacgttcatgatcccaggaaccatattcatgtccctccttgccggagcactctttggccagcttggtggtgttgcccttgtggtctttgccgccacggctggagcttcttcatgctacttcctgtctaagctgattgggaaaccgttggtcttctcattgtggccggacaaacttgggttctttcagaagcaggttgcaaaaaggagagagaagctgttgaattacatgcttttccttagagtaactccaacattgcccaatactttcatcaatttagcgtcgccgatagtggatgtgccctaccatattttcttcctggcaacctttattggactaatcccagctgcctatgtgactgtcagggctggaatagctttgggagacttgagctcattgagtgacctatatgataaacaatcaatagcactgttgttcttgattggggttgtttcggtgacaccgacattgttgggcaagaacgagaagcaacaaggcaaagggccagaaatggtagctagcagtagctgatcacttgcacgcgaactccttctcacctccccttctgtgtacatatgaagatcctgcatttggttgcttccatggcctttgtttggatcggtgcaacttatggccggccaaagggcaacagaacatggcaagggcccctctttctttctccacttgtggaaccctttgtgcatggtgctgcgaaagggacacctcactgtcacaacattatgattctggggaacaagatgggccaccagagctaaaatgacccatttgttctgtttaacatcttgtttagatcgaaggaacagctgatcttatcatcattgtatatgcactgctaaccagattcagtttttcg

SEQ ID NO: 28210 - DNA, 1952 bp, Oryza sativa
  ref <308>: DATABASE ACCESSION NUMBER: AK103652
  ref <309>: DATABASE ENTRY DATE: 2002-08-28
gacatgggtttgcacatggcacatgaacacaaagctccggtcaaaaaggagctgaaagaaattgtctaaaactgcgctttcaattcaaggctggcaaaatcctcaaaccacgcgcttatctctggaatctgggaggatttagagctaatttttccgcatccatgaattcgagacacactttgacttttggcttttggctttgactttggcttcttctcctccatttcatcgctcgttctctccatccaccgctttgattagtcgggatctggacagcatcggcgaatcatccgcctccgcctccgcctccgcctccgccgatcccccatccatcccgcgagcgccgccgtcgttgcttccgccgcatcctgatggaggaggatcaatcagccacgtatagcgtcgatgacgcgcttctgtcatcaggttttgggaggtaccaaatattgattctttcatatgccggggtcggcttgattgcagaagcaatggagatgatgctactatcatttgttggtccatcagtacagttagaatggaagcttacttcacatcaggaaagcatgattacaagcattgtttttgttggaatgctaataggagcttacacttggggtgtagtttcagacaactacggaaggaggcaggagaggatttctctttaccgccatcgtgactagtggagctggattcctcagtgcttttgcacctaactatgtgtcactaatttctctaagatttctagttggtattggattgggagggggacctgtccttgcatcttggttcttggaatttgttcctgctccaactagaggaacttggatggtagtattttctgccttttggactgttgggaccatcttcgaggcttctcttgcttggacagtaatgcccaaatttggctggaggtggttgctagcattatctgctgtcccatctttcgtcctgcttttattttatgttattacaccagagtcaccaaggttcctatgcatgaaaggcagagtaacagaagccatggatgtactggagaaaatggctagattgaacaatgtacagctcccctctggaaggcttgtatctgacaaaaacattgagctagatgaactttcagcatctgagtctacaacacttcttgctgatgctgaagaagatgacaccatcattgaagacaaagtttccagttttggaggtttgtccgtcgcgaagctgctgtcgccaaaattgatacgtgcaactctgctcctgtggatgactttctttggaaatgcattttcctattatggaattgttctgctcacatcggagttaagtaacggtaataggatatgtgcaaaagaggaggttgaatccatacactcaaatgatgcaagcttatacaaaaacgtttttatatctagctttgcagagattccaggatcatttttgtcagccatgattgtggataggattggtagaaagctgtcaatggcatcaatgctcttcacaagctgtgttttcttattcccactaattttctcccgaacggatatactaacaagagtctccctatttggagcccggctttgcatatctgctagctttacaattgtatacatatatgctccagagatttacccaacctctgtcagaacaaccggaattggcgtggcgagctctgtaggtaggattggaggcatcctctgtcctctcgtcgctgttgctctagtacacagctgccagcagacgacagcgatccttctctttgagcttgtaatcttcctctccgggttggctgtctcatttttcccttttgagacaaaaggctgtagacttaacgacaccgaagtcgttatgaattgatgaggtgattgtattgtcataccattttttctgtgctgagtacgaagttcccctgttaattgaacatttccagcaatgtgctaagggtgatattgttcagtcttcgg

SEQ ID NO: 28211 - DNA, 1036 bp, Oryza sativa
  ref <308>: DATABASE ACCESSION NUMBER: AK103653
  ref <309>: DATABASE ENTRY DATE: 2002-08-28
gggtggtggtggtcgtcgtcgactcgcccgcacgcacacgcccgcggccgagccactcttctccgcacgcggtgcccgtctgctactctgccgtgttggccgccgcgcccacctttcctcccccgcccctttccgctaaagccgccgtgttcatcgcgtcggcgacctacctacctaccctccttactccgaactcaggcaggctctcgtctcttcttcctccctcctccctctctcgccccaagccctaaatggcggcgcaggggatcgcggaggcggtgcaggcctacacgggcctctccccggcggcggccgtcaccatcctggccctcatgctcgccacctacctcctcgtgtcctccctgttcgtcgccccggacgccgcgccccccaagccgcctccgcagcggaaggaggaagagcagcagcagcagcaggaggaggaggaggcgggggcgtttgtgccttatccggaccctgtacaggtgggcgagatcacgctcgagcagctcgcggcctacgacggcaaggaccccgcgaagccgatcctcatcgccatccgcggccaggtctacgacgtcacgcgcgggaggctcttttatggtcctcaaggaccatattccttgtttgctgggagggatgcaactcgggcccttgcattgatgtcgtttgaccctattgacctcactggagatttggatggccttggtccagacgagctagaggtcttgcaagattgggaagataagtttaaagagcggtatcctacggtgggccaccttgcttcagaaaatgcagcggatggtaaccacggtggcgcagcttgatcacgaggaaggaatgctttactccatcggtttgtcagtttctctgttcttttttactggattgcaagtgggtagatctgatcatatgatgctctggtaggctctgttgcttgtgtgctgttgtcgtgcgtgactaatgtaccagctttccccatctgcttttattttggtttgcagtggatgaggaggaaattttgagcgacttgact

SEQ ID NO: 28212 - DNA, 1256 bp, Oryza sativa
  ref <308>: DATABASE ACCESSION NUMBER: AK103654
  ref <309>: DATABASE ENTRY DATE: 2002-08-28
ggggtgctccccaccaccttctcttcgctctcgcgacagggactcggaaaaaagcattcgccgctttgcttcgacccagccaagcctgggcgttgcgtagcgcgcttcaagccagcagctagctagcgcgagagccgtcagttcagtcatgcatcagctcgaccggctttgctacgccgtcgtcgtgctcgtcgtgatcggcgcgacggtcgccgaggcggccaccggcacgttcatctacgccgggtgctcgccgtccaagtaccagccgggcacgccgttcgagggcaacctcaactcgctcctcgcctccatcgccaacgcggcgcccaacggcgggtacaacagcttcacggccgggagcaacggcaccggggacggcgcggcggcgtacgggctgtaccagtgccgcggcgacctgggcaacgccgactgcgcggcgtgcgtgcgggacgccgtggggcagctcaacgaggtgtgcgccgccgcgtacgcggcgtcgctgcagctggaggggtgctacgtgcgctacgacagcagcaacttcgtcggccagcccgacaacgccatggtgtaccgcaagtgcagcaccagcaccagcggcgacggcgacttcctcaagaaccgggacgccgtcctcgccgcgctccagggcggcctcgccaacgggtacaaggtgagcagctccggcaacgtgcagggtgtgtcgcagtgcctcggcgacctcgccgccggcgactgcacgacgtgccttgcgcaggcggtcggccagctcaagggcacctgcggcacgtcgctggccgccgacgtgtacctcgcgcagtgctacgtcaggtactgggccaacggcttctacttccgcccgtcacaagattattcgcaagatgacgtcgggcggactgtggcaataatcgtaggcatcttggcagggctggcgatcctcgtggtgttcatctctttccttagaaaatcatgctagcttcgtttgatgtctggaaggagtttcagtttcagtcctcgcattctgtgtgagaaactgagaatgacttgtaaagagagcttcgcttgcatgacgttggcaagagcttcatatcgcttgtaatatcatttttccagcaatagatatgtaagcgagatcttggtagggctatcggagcagcactaccttactttgggtcatcgttttttcgtccactaataattggcctacttgtttattatcaagtctgaagacaacatcatgcacatatttggcc

SEQ ID NO: 28213 - DNA, 1110 bp, Oryza sativa
  ref <308>: DATABASE ACCESSION NUMBER: AK103655
  ref <309>: DATABASE ENTRY DATE: 2002-08-28
gaaggtcatcaccaccttcttcctcctcttcatttgccatctttagtaccacctcgccttcccaatccaatctcgcctcccattaaggcccgagagcccccattccgccagatccatgacggtctcgtcgccgtcggcggaggagccgttccgggtgttcgtcggctacgacccgcgggaggacgaggcgtacgaggtgtgccgccgcagcctgctccgccacgcctccatccccgtcgacgtccgccccatccggcagccggatctccgcgcggcggggctctactggcgggagcgggggcccaccgagagcaccgagttctccttcacccgcttcctcacaccctacctcgccggctaccgcggctgggcgctcttcgtcgactgcgacttcctctacctcgccgacatcgccggcctcctcgcctgcctcccctcctccgaccccgaccaccgcctcgccgtcgcctgcgtcaagcacgagtacgcccccgccgaggcgaccaagatggacggcgccatccagaccgtgtacccgcgcaagaactggtcgtccatggtgctctacaactgcggccaccccaagaacgtcgccgcgctcaccccggacgccgtcagcacccagaccggcgccttcctccaccgattcgcctggctcgatgacgacgagatcggcgagatccccttcgcctggaacttcctcgtcggccacaacaaggtcgaccccgccgacccgtccacgcagcccaaggccatccactacacctccggcgggccgtggttcgagaggtacaggaactgcgacttcgccgagctctggatcaaggaggccgacgagctcaaggccgacaaggagaagcagaagcagcagcagatcgtcatggccaacggcgagaaggagaaagacgaggaggggaattgaatcgaatccaattgaattcattgtgccgcattgcgttgcaattttgcatcgaattggttcaaatctgttgtttattgggttggggttgggtggtaggctatgagtggatagctctagtattggtagtagtacgcttttgtgtagcggcaaatcaatctatctatgagtcctcaatgttcaggaatttt

SEQ ID NO: 28214 - DNA, 2455 bp, Oryza sativa
  ref <308>: DATABASE ACCESSION NUMBER: AK103656
  ref <309>: DATABASE ENTRY DATE: 2002-08-28
gacaggaacttgtttgttttgcagccaccaccaccaccaccctccaactgtccaaccccacacaggtcagcacaaggcatgggggagcttagctagctttgccttttgccttctccatggctccatcctgtgagcacatatactactaatccacccctaatccgttgcagaaagcctttgctctcttcttgctttcctcaaatcgttgtgtcaagccagcagctggagcagagcagccatggcttcctaggcctacctagacgaagatgcggagttaggcacggactcttttgaccagcctggatgttaaatcagtgaacttccttggatgcttaaagaaagtggagtgagcttttctctagatttgcagttgtacaagcaatattgaccatcatgtctgttgaggcggtgaagcagattgtgcctgcacacctggttaaacctgctgttgatcctgttcatgcaaaggcgagcaaggccggaaaagatggcaggtcagaccttattgctaaggagattttagaggagcaaaagccggctcatcggcggcaagagtcttctgaatctatattggacaagggtccttctaacgttggttcagactctggtgtcttggatgtgccactaaccccaaaaggagactctggggagctgaaagaaatccaaggcttggattgcaacgggaatcaggagaagaagacggcgcaaaagagcagcactagcgagagctttgcttctgctaaagttagcgacgggacgaatggtctgaggaagacatgtggaagtggcaaggtcagtgatacagctgattctactgagagtgggaagagcagcatgtgccgtccgagcacgagcagcaacgtcagtgatgagagctcgtgcagcagcctgagcagcagcacaacgaagccgcacaaagggagtgattcaaggtgggaagcaatccggatgatcaggtccaaggatggtattctaggtttgagccattttagattgctcaagaaattgggctgtggtgatattggtagcgtctacctctctgaattgagtggtacaaggagttactttgcaatgaaggtcatggacaaggggtctctagcaagtcggaagaagctgcttcgagcgcaaacagagcgggagatcctgcaatctctggatcatccatttctgccaacactgtatacccacttcgagacagataagttctcatgcttggttatggagttctgcccaggaggggacctgcacactcttcgacaaaggcagcctggaaagcatttctcagagcaagcagcaaagttctatgtggcagaggttcttcttgcattagaatacctgcatatgcttgggattatataccgtgatctgaaaccagaaaatgtccttgtccgggaggatgggcacataatgctgtctgattttgatctctcccttcgttgtgctgtaagccctactgttgtcaagtccgcgaatcctggaccagatgcgttgcagaggaacaatcaagcttattgtgtccagcctgcctgtattcagccatcctgcatccagccatcatgtgtagctccaacaacctgctttggtccccgttttttctcctccaagtctaagtccaagtccaagaaggagaagaaatcaaagcctgaggttgtcaaccaaattagcccactgccggagctcatcgctgagccgactgatgctcggtccatgtcctttgttggcactcatgagtacttggcaccagaaatcatcaagggagagggtcacggcagtgctgtggattggtggacctttggcatattcctgtatgaactcttgttcggtaagacccctttcaagggatcaggaaaccgggctacactcttcaatgttgttggccagcccctgcggttcccggaatccccaatggtgagcttctcagccagggacctgataagaggattgctggtcaaggacccgcagcaccgtcttgcctacaagcgtggggcgacggagataaagcagcatccattctttgagggcgtgaattgggcgctcatacgatgtgcaagccctcctgagatacccaagccagttgagctcgagcgcccaccaaagccagcaccagctactgagaaggttgccccggctgccaaccagaagggctcagacaattatctagagttcgagttcttctaggtttgctttcctttgtgtttctgaacagggttggtgcatgcaagctgatgtatgaaaggatggcttagaaatattttgtttaggttattagatgtattccgagcaacctttatttttcattgaagtgcttatgatctaatccgtccttcgcatgttgtaatttttaattaaatctagtgatgatgcttgaaaggatgtggtaccctgtttcacctggcactattaattccagttttgcttcagaataattgcatgtttgcaactgaagcttctttgc

SEQ ID NO: 28215 - DNA, 1023 bp, Oryza sativa
  ref <308>: DATABASE ACCESSION NUMBER: AK103657
  ref <309>: DATABASE ENTRY DATE: 2002-08-28
ggcccttgagccgtaacagtgacctgtttctgattcaattcaacaacgagcccgtttcctgctcacacaaccaccttttaaacgcctcatcacctccatcctcgcaactcgaagcgaattgagctcacagtggagaagggagagcacgagagggagcagaagcgcgcgaggagaggccacgaccaccaccagagcgtcaaaatggcatgcatcaacatgtacaacccggacggcggcgcggcgttcgggggcggccagccgccggcgctgggcccgcgcatctccttctccagcgactttgtcgtcgagccaccgccgccggtgcagaaccgggcgatgaacctgcggtgccaggaggaggatatcaacttcgagttctcggtgggtagccaccccatgatggccgccgaccagctcttctccaagggcaggatccttcccctcaaggacggcggcttctcctccggccggcctcccaccacgctccgcgacgagcttcgctgcgacgacagggcgtcggccaagggatccagccggtggaaggagatgctcggcctgcggaagcctctctgcgtcggcggcgtcaatggcaccgccaagaagagcaccaccgtcgacaccgagatggtcaccgacgtggccgattccaagcaggagcaatgagatgacatatatgggactcagccaaaacacacatggaactctcgtctctgtctcatattgtgaccatcctcttgcattgtacttgtctcaaaggctagtttttgtagatgattgtgctcggttgcttgtgtgctagatggccagtgtgtgctgaagagcaaacaattgtgttttttttttcttgcataagtgctgtctctctagctagctgtccactagatccatatcagtctttgcttcctctttcttctttttttttttgtttcttttttccccctccaccctgtacaaaatgcagcgcttgtgtagatcgaaaattttatggtgcaatcattagtctgccagatggccagatctgcg

SEQ ID NO: 28216 - DNA, 2794 bp, Oryza sativa
  ref <308>: DATABASE ACCESSION NUMBER: AK103658
  ref <309>: DATABASE ENTRY DATE: 2002-08-28
gataccatcactgcggccgccggggcgcaccctctccggcttccgccgccgagcagggctgcgccgccgtcgtgctgcttccgccgcaatcccggtgtccggtgagcatccatccccgtttatgcgcatcctcttcctcatctctctctacccacgcatgcgcttttttccccctcgaattcgcgttaaaccctagcctctcttctagatctggaccccaatgtcgcaagtcagatccgcccctgagctggacagccgtcgccggaggcgggactctgacgacgagagcggcgagcgcgacctcgacacccggcgccaccgccgccggagccccagctcagagtcgtgttcgtcctccggcgatgatgaccgtagccgtcggcaccgccatgacgagagctccaggaggcggcagagagaccagagccaccgccgggacaggggtggtcatgatgagcggcgccggaggagccctcagaggaggaaggagccgactccgccgccgccgcttctaccggagatgataccagggcgcacaggagggatctacatcccgcctttccgcatggcgcagatgatgagggaggtggaggacaagtcgagcgccgagtaccagcgcctcagctgggacgcgctcaagaagagcatcaatggcctggtgaacaaggtgaatgctaccaacgtaaagaatattgtgcgggagctgttcgccgagaacctggttcgtgggcgggggcttttctgccaatcgtgcatcaagtcgcagatggcttcacctggcttcaccgacgtgtttgctgcgctcgtcgccattgtgaataccaagttccctgagattggtcgcctgcttcttgttcgcgtcgtgcttcagctcaagagagcatataagcgaaacgacaagccacaactgcttgcagcaaccaagttcatagcacacttggttaaccaggcaggtcattgctcatgagctcgtggcactggagcttcttactgtactgcttgagaacccaactgatgatagtgttgaggtagcggtgggttttgttaaagaatgtggggcaatgcttcaggacttgtctccacaagggcttcatgatttcgaggcattcttcaggaaggtgaaatagacaagcgtgtgcagtttctgatcgaaggcctttttgcaattcgaaaggctaaatttcagggattccctgctatacgtccagagttggatcttgtggagcaggaagatcaatttactcatgagatatcccttgaggatgagctagaccctgagactaatctaaatgttttcaggggaaatccaaattttgctgaagatgagaaggcatatgagaacctaaaaagaagcatccttggagcagaatcttctgatgatgaagaagggtctgatgattcttctgatgaggatgctgaagaagaatccgatgatgaagaggacgaagagcagatggagattagggatcaaactgagaccaatctcattaaccttcgaagaaccatttactcgacaatcatgtcaagtgttgattttgaagaagctggtcacaagcttctaaaaattaaacttgagcctggtcaagagatggaattgtgcatcatgctgcttgagtgctgcagccaagagagaacatacctgcgatattatggattgctagggcagcgattttgcatgattaacaaagtttaccaagataactttgagaaatgtttcgtgcaacaatattccatgatacatcgtctggaaacaaacaaactgagaaatgttgctaaattttttgcgcatttgttgggcaccgacgcgcttccttggcatgttttagcttacatccgtttgacagaggaggacaccacgtcatcttctagaattttcataaaaatactcttccaggaattatcagagcatcttggtattcgtctactcaatgaaagactaaatgatcctaacatgcaagattctttcgattcgatcttcccaaaggatcatccgaagaataccaggttttccataaatttcttcacttccattggactgggtggtatcacagagactctgagagagtatttgaagaacatgccacggctaataatgcaaaaacagaagcctgcctcgtctgaatcagactcaagtgattcagggtctggttcagacagctacagctcagaatcggaatcaagttctgatgagagtgacaggaagcgaaacaagaggcggaagaagtaagaggtggaagaagattttcatgtaaattctaccatggttctgggattctcctgtatttttatctacgtgcagtatctgatctagctgttggtgcttactaaattgagaacccaatcatattaaccgagatattggttcctacttcctaccttcagatcatgtgagagaccgaagagttatcagagcatattggtattggtccaactctaagagattggatgagcctaacatgcaagattacttcttttctatcttcccaagggatcatccaaagaacacaagtttttctacaaatttcttcacttcaattggtcttggttgtatcactatgaccatgagcgagattacctgaagagcattcctcgccatctaatgcaacagaaacctgcctcatgtattggtatccatgtgttctgatcctaactgttttgtttttgttggatctccatgtgcaatataatcagatcttagatgctgttcagagggcttgttgaattcaggacccaatcataattagaatccccaaatagggttttataagatatcagcagagtaccagctggtagg

SEQ ID NO: 28217 - DNA, 2323 bp, Oryza sativa
  ref <308>: DATABASE ACCESSION NUMBER: AK103659
  ref <309>: DATABASE ENTRY DATE: 2002-08-28
gagttggatgactagctagataagaaggcttagtggggattcctttacatggcgcgttattagatgtgccaagagctatattgatccagagaccagaatttgagccctgaattcaactacaaaaaacattttggctgttggaaaagaagatcgtgttgattggaattgtaagtagtcctagctagtgctgcgtccagttttgtttcttgatactctctctctacaaaatcataatcccattttatgtgtgtgcgctgtgcaagccgcaggagatcttgagtagatcagggatcagtgtgtacgtgagaagagtcgggcaagcagcaatggagcatgtggtgggtgcttcggaggccaccatgaggtctctgctgaccaagctcgggggcttactctcccaagagtacgctctcatccgtggcgtccggggagacatccagtacatccgcgacgagctgacgagcatgcaggcgttcatccgcgacctgagcggcacgccggagggcaaaggcgacgagcacgaccaccggatgaaggactggatgaagcagatccgcgacgtcacctacgacatcgaggactgcatcgacgacttcgcgcaccgcctctcccacgaccccggcggcgactacctgtgcggcttcgtcgtgtccagggtgtacgagatcctcacatggtggcctcgccgcgacatcgcctccaacatcgcggagctcaagatgctggcgcagcagatcggcgagcggcgcacgaggtacggcgtcgagaacccccaaaaagatcgggagatgagaacaaatccggtccagccaccattggatttgatgccgccgagaaccagcacacaaaccttgagagctggtgggagtggaggcctacatgaaggagctgacgaaatgggtgacgaacgagacataccaagacggcgtgctgtccgtcctcggtttcggaggggtggggaagacaaccatcgccacggcactgtaccggcaactcggcgatcaatttgaccggggcgatggtcacggtgtcccagagctccgacgttgaggccatcttgagaagcatacttgaacaagtcatgccgcagtccaaggatggtcaggagctgcagggtggccacgcctcccagaagaagcttctacatcaggcagtcatcagctacttgcatcctctcatgcccaaggccctccgacgccgaagcagctccaactccaactccgacaactccaagattagagaggggaagctaacgcgtctcccgagagctctcaccctggatcgccagtatgaccacgatccgcaggacggcaacgatgctgccgccggctcatctgagacagtagtaacaacccctgcaacgaaaggcacggccacctccgatgaaaagcctactagtgtcattgctaccatacggggtgccttcaggccctgggatcgccgtcgccacccaccgcaggatgacaaaggtggtagcacctcaggctcagggaaggaggctattaacattcaaacaatgaacaagcccggcgaaaaaaacattcaaaccatgaagcgtgacggtctctcaaaattgctgcaggagcacctaaatcaaaaaaggtatttcctattaattgacgatgtgtggtctgccacaacttgggagcagatcagaaagcacttgcctacagataacctaagctacagaataatagttaccacaaggtttcaagctgttgctaccgcatgtaaaaggaaagaaagtgaccgcattcacaaagtggatgttcttcgcggaaaaaaacccgaaaaactcttcaatgaagtcgagtccgaatccagaatcagcaaagatggtgaacggaaagagatagatgatggtgaacagaaagagagagaaggtcaacagaaagagatagatggtgaacagaaagatatagtgcgtccccgcaggatctgggaaatgtgcagcgggcttccattggccattgtcaccatggctggtcacgtggcctgcaactcagacaaagatgagacacattggcttaatgtctgtaaatctctagttccagagtcgggaagagatatgacacaggagggtgtaaccagaatacttggtcattgctacaatgatatgcctgccgagctgaggacttgctctctgtacctgagtatattcccgaaaggcaacaagattagcaggaagcggctgacaaggcgatggatagctgaaggctttgtcagtgagaagcaggggcagagtgtggaggatgttgcggaggcatgcttctgttggaaatatagtcattaatcggcatattttaatccaaaaggttaaagc

SEQ ID NO: 28218 - DNA, 1506 bp, Oryza sativa
  ref <308>: DATABASE ACCESSION NUMBER: AK103660
  ref <309>: DATABASE ENTRY DATE: 2002-08-28
gaccatccttaaccgagaagcatagctcgcttccacgcaagattaaaagctgcccctcttgctgctgcagactgcagtcctgcaagatcagcgcctgaagcaagaagcgaagaatcaaacgagagcctagcagcgtagcagatcgatcgatcgatcgatattatggaggcgcgaggaagcagaggaatgcggctgtggctcctgtccgtggcggtgatggccatggcgatggcgacgaggtcgcaggcgcagctgcaggtcgggtactacgacacgctgtgcccggcggcggagatcatcgtgcaggaggaggtcagcaaggcggtgtccgggaaccccggcatggccgccggcctcgtccgtctccacttccacgactgcttcgtcagggggtgcgacgcgtcggtgctgctggactcgacgcaggggaacagggcggagaaggacgcgcccccgaacacgagcctccgcggcttcgaggtcatcgacagcgccaagtcccgcctcgagacggcctgcttcggcgtcgtctcctgcgccgacgtcctcgccttcgccgcccgggacgccctcgcgctggtgggagggaacgcgtaccaggtgccgggggggaggagagacggcaacgtgtcggtggcgcaggagacgaacgggaacctgccgccgccgtcggcgaacgtggcgcagctgaaccagatgttcggcgccaaggggctcacccaggcggaaatggtggcactgtcgggcgcgcacaccatcggcgtgtcgcactgcagctccttcagcaaccgcctctactcgtcgggccccaacgccgggcaggaccccagcatggaccccagctacgtcgccgcgctgacgacgcagtgcccgcagcagcaggggcagcccgcggcggggatggtgcccatggacgccgtcacgcccaacgcctttgacaccaactactacgccgccattgtcgctaaccggggattgctcagctccgaccaggcgctcctcgccgaccagaccaccgccgcgcaggtcgtcggctacaccaacaacccggactcgttccagaccgacttcgccgccgccatggtcaagatgggctccatcggcgtgctcaccggcaacgccggcaccatcaggacaaactgcagggtggccagctgatcgatcgacctaagcatgatgtatagctcgtggcaggcttgtgtgagttgggattgtgatgagattaaattgaaaattgtacgtacgacgacgtagctagctagatagagtgttgtaaacttatttgtttgatcattcatttggtctctctgtattacgtgctagctagctcaattagcttgctcgtgcgtcccttctcccctcttcccgtagattattttactctgcactctgtacttctctgtgacattatagtgacaatatagttttattgttccatcttttaacctctgcatgtacatgctgcgaatagaaagccagaataagaaacctatttaagctccaacc

SEQ ID NO: 28219 - DNA, 1738 bp, Oryza sativa
  ref <308>: DATABASE ACCESSION NUMBER: AK103661
  ref <309>: DATABASE ENTRY DATE: 2002-08-28
ggaggtacgcgcgcgagccgccgttcgcaacactgcagcttccatctcctctccgcctgaggatccgaggggccggtgagtaggcagcggcggccgcggcaatgctcacgtgcatcgcgtgctccaagcagctcgccggcggcgcgccgccgctgcgtgagcagtccgacgacgccgacgacgccgccgttgccagaggcgccggcgagtgcgccacgcccagcacgaggcaggccatcaaggcgctcaccgcccagatcaaggacatggcgctgaaggcgtcgggcgcgtaccggcactgcaagccgtgcgccggctcgtcgtcgtcgtcaccggcggcgggggcgcggcggcaccacccgtaccacgcgtacgcggactccgggtccgaccgcttccactacgcgtacaggcgagccggcagcggtggcgacgccaccccgtcggtgagcgcgcgcaccgacttcctcgccggggacgaggaggaggaggaggaggaggaggaggaggaggggacgacggcggacggcagcgaggacgacgaggcgaaggagtgggtcgcccaggtggagcccggcgtgctcatcaccttcctctcgctgccggagggcggcaacgacctcaaacggatccgattcagccgtgagatattcaacaaatggcaagcgcaaagatggtgggccgaaaattatgagaaagtcatggagctttacaatgttcagaggttcaaccagcaaactccccttcctactactccaaagtctgaagatgagagcttgaaggaggatatcccagcaacaccaccactcaacagtgaacgtctaccccacactttgcacagatcactaactggtggcagaacaactgggtatggacaaccagattctcttgggcatcagcacaaccttggtaatggtcatcgccaacagcaccatcactgctacactggacaccagtgctatggttcagttgggctggcatcaacacctaagttatcaagcattagtggagcaaagacagaaacttcgtcaatggatgcatcgatgaggtcaagctcatctcctgaagaggtggatcgatctcgtgaactttcagtgtctgttagcaatgcaagtgaccaagagagggaatgggtagaagaggatgaacctggtgtatacatcaccattcgggccttgcctggtggtattagagagctccgacgggtccgattcagccgggagaaattcagcgagatgcacgccaggctatggtgggaagagaaccgggcaaggatacatgatcagtatctctgagaagacatgctaatcatgtatcagcaaattctttaccacttcatctcattgcaattgaccaccagagtccattgaacttacagttcggtgcaattgaccgccgtctcctggagatatttgatttcgaagcgcttcttctttcaccctcctccagcgtgtacatcaaacactaacatcatatcgtcaggaattactcccagcctgtgcaaaaattggccgaggaacactgcttgcatgtgtgaatgtgtgagcttttagtgtttattcttgatgtctaacatttaatttgctcatgtttatgcggtaatccgcctgtttctctccaatacattgtcacaaaatttatacagtttggtataactgctagattatttacttcgcagcgaaagaaaaaaaaatgaaaggaaaaaaggaagcctttggaaagcaaaggcgtttgtacc

SEQ ID NO: 28220 - DNA, 4226 bp, Oryza sativa
  ref <308>: DATABASE ACCESSION NUMBER: AK103662
  ref <309>: DATABASE ENTRY DATE: 2002-08-28
ggagaggggcggtccatccacgtgaggaggacacagttgcaaatttccaaatccaaaccctcgtcggcgtcgtcaccgtggcggcgacggcggcggcggcggcgatggtgcccgccgggggcgggggaggggagctggagaggagggtgatggcggcgctgaaggcgtcggaggcgcgtggggaccagccgctggtgtgggcggtggaggtggcccgcgtcgtcgccggggagggggcggggctccccagcgcggacctcgccgggatcctcgtctccaacctctgcttcgcgcacaactccccctcgctgtggaagctcgtcggccacgccgtggcctcccgcctcctctgcccgctccacgtcctcgcgctcctcaccccgagggtgctgcagcagcggcgggcgcagcctgaggcgtaccggctctacctggagttgctgagaagtaacgtcacatcctcctttctctccatggaggccgggcctaatcgagacaagataacaaagtccatcgatgatgctttgcaactgtcaaagatttatggattttctggaatcgacaatggacatgtcatcattttctttatgatgtttgtaatcaccaaactgatcgattgcacacttgaagactgtggctttccatccgggctgacagaggagcaggggagcatttacgctattgaagggccacaggatatggacttagatgtcaaaggggtttcaactgagaagcaaaacgagcaacgtgcacaactacgccggaagaacactgttatggctttagatgtgttgattatgatggttgctgataggaagatccaatcatttctgcgcttgatattcctgaacatgcctgaaaagttcagtgtgttaagccagaggttgagcttggttgaagctcacaaaatggaattggagacactattgactgctaatcataaaattgatgatctgttgatgaatatgtggagggttagcaatacagcctatcaaccaaacaacaaaaggcttttgggtgttcttggtaacatgaaatatggtggctccatgctgggccagtttactggagctgggagagctgcatgctgggttatatttgacatatatgttgagaatgcaattgatggaaaacatctaagcgccatatctgctatcgaggttctgaaagaaatgaccaagacactccaagcaattaatgaggcgagttggcaggaaacctttaaagctctttggatttctgcccttcgccttgtacagcgggctagagaacctctcgaaggaccaattcctcatctagattcaagactatgcatgctattagctcttattccattatcaattggtgcaattcttaaagaagaaactgatgtccatggagctcaaggaagcaaaagtcttccaaaaacatcaggacttgtatcatcactccaggatttgatccagtattcaggacttctagtacctccttcatcagtggtaaatgcagccaatgctgcagcctcaaaagcagcagcatttaaggccaactataagtctggaggtggcaaccctggcatgatgggccaaaatgactcttcgacaaaaactgttgggaatatgctacatcttatagttgaagcctgtatttcaaggaatttgattgatacatcttcttacttatggcccggctatgttgtatcatctgggcatttgaaagatgcgacattaccccaagaatccccctggttaaactttatgcaaggagcaccactttcaggtccacttattgatgctctgattgctactcctgcttcaagcaccacagaattggataggttatatcacatagcattaaatggttcagaggaggaaaaatcagctgctgcaaaaattctttgtggtgcatcatttgtttgtggttggaatatccaggaatatgtggtccgcatggtggtcaagctattatcacctccattgccctcaaattcctcaacacagggcagcatgagccactaccttgctcagatgtctacattaaatgcactcttgcttggtatttcttatggtgatgctatccacattatttctttgtatggaatggttccagatgttgctgcagctttaatgccaatctgtgaagtttttgggtccataccacctccatctaaccacaagcctgccattgttggtgaaatatcagtttattcggtcttctcttgtgcatttctttgtcttcttcgactgtggaaattttataaacccccacaagaatactgtctagctggacgtggaggctcagttagattggagcttactctggactacctgctgttaatgcgcaataaccatattgactttgcaaattcatctgccagtagtagaaactctagcaacaacataagtccattaaatgaggttcctgctcaaccactttatattgattctttccccaagttaagggcttggtattttcagaatcaagcttgcatagcttcaaccctttctggtctttgcaacaaaaatcctgttcatcaagttgcaaacaagattttgagtatgatttgcagaaaaatgaacaaacctgttgtatcatctggcaatccttcatccacttctagcagtagtgtcagtggttcctctgtaagtacaccagatgattaccaaaggccaacagttcctgcatgggaatttttagaagctgttccttttgttcttgaagctgttcttacagcatgtgctcatggacggttttccagccgagacttgactacaagtttgagagatcttgtggacttcttgccagcttctattgcagcaattgttagctacttcttagcagaaattacacgaggaatctggaaaatggtcccgatgaatggaactgaatggcctagtcctggtgcttctcttcattccatcgaagcagaaataaaggaaattctcgcatctgctggcattcagattcccagctgctatccacgtggtgtaccaccaatgcttcctttaccaatggctgcgctggtcagcttaacaattacatttaagcttgataagagttcagagtatatccatgcgatcagtggccaggcactagagaactgcgcagggggcagttcctggccaagtatgcccatcatagcagccttatggacacagaaggtcagaagatggcatgactttatcatcctctcttgtctgcgttctccattcggcagagataaagatgcagttgcacagctcatccaaagttgcttctcatcctttctacggtcctcgtgcagtgggtctgactttactgcaaaccgtggagttggtgccttaatgggagatgcaatcaccggccaaggtcttcagcttcccatggctcctggtttcatttacctgagaacttgtcgaacattccatgacacctactttgtgagtgaggtaatcctgaagcaagtcattgagtgggctgacaaacttgcaaatggattctcttccagtggccctccacagttaaaatcaggacgcacgccactatccagcgctgcatgtatggcgcatcaagttgcgatgcttggtgggggactcctgtgtgttgcaggtggacctcttctggtccaggtattgtatgaggagaccttgcctacgctgctgctatcagctcgagaagagagtatgaaagaccctggaccagtttcaagcacactccaaggttacgccatggccaacatgctcttcttctgtggtagtctgctctggggagcggaaagaacttctcctgtcatgaaattgtctttcctgtcaagaaggccacgagtggtgggaaaccatatggatttcatggcgggtgtattggatgggcacattcttctgggttgtgaccatggcacctggaaggcatatgtatcgcgctttgtgttcctggtggtgaagtttgtcccgtcatggttgcgggacattaaactggacacgctaaagaagatagcgtctgggcttcggagttggaatgagcacgatcttgcattggctttacttgagcgaggaggacctcaggcaatctccactgtagtcgacaccttgttgtgatctttgcctcttgacatttcccacccattatctgacataggagtttttgtaatcacatttgaggccaggacttgtgtagagatgtcttctggttcaggatttctcagtcgagctatctaaaatttctgaattctgtcagcggagagatgctagctaatcttgtttgctgggtgc

SEQ ID NO: 28221 - DNA, 903 bp, Oryza sativa
  ref <308>: DATABASE ACCESSION NUMBER: AK103663
  ref <309>: DATABASE ENTRY DATE: 2002-08-28
gcgagggttagaaacccttagatttcatgccatcaagcgtaacagtgtaaccccaccatgtcatttctttgctacttatagcatcccaagttgatgatccatttcatgttttctctcctttttcagatgcatactatgatgtccaatgtgggtgtctgaactgaaatctgaactctgaactctgaaggctgttgtttccatcagggtgcattggttcagcagagatcggtgatctatgttttcatatttggtcacgttctaccggtctttttcgatggaaatgaaggtaattggaggagttctatctgtttgatggaattcagaaccaaaatccgaattccacaaaatggctagaggaaaatttttagggctatttgcaattccacaaccataagcatggccaactggtagttctccaagtaaaagaagttaggagctggttatgatggtactaattattcagtttcttctattgatcctgaaagttctatgccaggataagaaaagcttgtgcaaaccctccaagccatgaaaacaattatcatcaagagaattgaagattctattttttttttcttaggatctgcagggaaaattattcagatagtggaacaggttcaagtagccatttgaaactcaacacaactttatatcaagaacaaatgaacaatgaatggtagatccaatcttcaatggagaatcatggaccaccgaattgggctatcttcccgagctatctacgactacatgcatagtataatagatgcaatcatgcaagtgtgcaactagtagttttttttttctgaaggagatgagattaggtatagcatgtaatggtcctggtgtataatgccatggcacactcaacttgcatttaaacaatgctagtccctgcagaccttg

SEQ ID NO: 28222 - DNA, 2751 bp, Oryza sativa
  ref <308>: DATABASE ACCESSION NUMBER: AK103664
  ref <309>: DATABASE ENTRY DATE: 2002-08-28
gtttctgggtgatgtcgtgtgggcgaggtccgggaagaagtgcccagcatggcctgcggtggtgattgacccactgctccacgcgccagcggtcgtgttgaactcctgcatcccgggtgcactctgcgtcatgttctttggattctcttctggcgggcatggcagggactatggatggattaagcaagggatgatctttccatttgtggactacttagaccggtttcagggtcaggctttgtataaactcaaggcaaacagattccgtcaagcaattgaggaggctttccttgctgagcgtgggttttgtgagctcgaaatggatgaggggtgctcactagagaagtctgtcaatgaccagtctgtccctgacgggttacaggaagggagtggttctaacaatgaccaggaatgtcaatcggaggctcaggttgttggcaaatcaactggatgttgtgatagttgtggtaatcgtgttccacccaagatcgcgaagaaaaagaagcaagcgggagagcagttactctgtagacactgtgataagctattgcagtcaaagcagtactgtggcatatgcaagaaaatctggcaccacacagatggtggaaattgggtttgttgtgatgagtgtcaaatttgggttcacgtagaatgtgacctaacatgcatcaacatggaggacttagaaaatgccgattacttctgtccagattgcaaatcaaaacgccagacagtacctcctgttgaacaaatgaacactccgaacagttcagaatgtgctagcacttctaaggaaaaactgccggaaatgatacctgtgttctgctttgggatggacggaatgtatttacctaagaagcacatgatactatgccaatgtaattcttgcaaagaaaggctgatgagtctgagtgagtgggagagacatactggttcaaggaagaagaactggaagatgagcgttaaacttaagagcaatggggatccattggtaaccttgttggatgatattccctgcgcaaatgtgaagtcttctacaccaagtattaataaagaagagttgctgaaattgctagcaaattcttttagacctgtcaatgctagatggacaactgaacgttgtgctgtttgtcgatgggttgaggattgggactacaataaaattattatttgcaacagatgccaaatagctgtccaccaagagtgctatggagcacgtgatgtacaagattttacaaattgggtctgtcgagcatgtgaattgccgaaacaaaaaagagaatgttgtctttgtcctgtcaaaggcggtgctctcaagccaacagatattgaccaactatgggttcatgttacatgtgcctggtttcaacctaaagtctcttttcctgttgatgagacaatggagccagccatgggcatattgagcatcccttcagagtactttaagaaggcatgtgttatatgcaagcagatgcatggtgcctgcactcagtgctacaagtgctctacttattatcatgcaatgtgtgcatcaagagcaggatatcgcatggagttgcaatactctgaaaaaaatggaaggaacataacaagaatggtttcctactgtgcatttcacagtactcctgacccagataatgtcttgatagttaagacgcctgaaggagttttctcaaccaaatttttgccccaaaataatgagaaacagagtggtacaagacttgtcaggaaagagaatctacaggagaaagtccttcctgctaaaatttctgactgtccagctgcaaggtgcctaccttatgaaatgctgaaaaataagaaagaaccaggagaggcaattgcccacagaataatgggaccccgacatcattcccaagagtcaattgagggtttgaacgcttgcatggatcaaaaggatgaaaaatccttcgcaacttttagagaacgacttcggtatttacagaaaatagaaaacaaaagggtctcttgtggtcgatctggaatacatggatggggactctttgctgctaagaaaatccaggaggggcaaatggttatcgaatatcgcggtgaccaagttagacgtagtgttgcagatttgagggaagcacgatatcacagggagaagaaagattgttatctgttcaagatcagcgaagacgttgtcgttgatgcaacagagaaagggaacatagcccgcctaattaatcactcgtgtatgcctaattgctacgcaaggatcatgagtgttggcgatgaaaagagccagataattcttatcgccaaaagagacgtctccgctggcgaagaactaacctatgactacttgtttgaccctgacgagtccgaggactgcagggtcccttgtctgtgtaaagctcttaactgccgtggatacatgaactgaagtgaacattctcacaagtcacaaggctaaccccgcttaaccatgccaaagggctatattctcagattcatcatgattctttcgtttattcaaaggctggttgtcaaacaagcatcaaagtttgtgatttttttacacaaattttgctagatagcgaggctggattggatttaccggtttcagactttcggtgagagcatagcaggcacctggcaatttagcaacacgctgccagagccccttgtaaattcttcttactttgatgtaataataagatgattaagttgttaatgccttttctccatgatgaaaagaaagagaaatgaatatccaaaatgcatacc

SEQ ID NO: 28223 - DNA, 3007 bp, Oryza sativa
  ref <308>: DATABASE ACCESSION NUMBER: AK103665
  ref <309>: DATABASE ENTRY DATE: 2002-08-28
gatcggccttcctcagttggcaactcgctccacatcccccgtcgagtctcgctctcgccgcgccgtcggttccaaaccctagctctccctcccggccccccaaatcctgccctccggagctccgattcaccgcctcgccgcgcgattccggccctaccctggcgccctgcgcccccgattagcccccatcctgctagatccacccgcacaatggagcccaaggaggcgcccccgccgccgccgccccagtctccgtcctccaccgaggaggaagggatgctctccgtcacggccgctatggccagagacgccgccgtgctgttccagagccgccgctacgccgactgcgccgaggtgctcgcgcagctcctgctcaagaaggagggcgaccccaaggtccttcacaatatggctattgcagaatctttcttggatggttgtcctgacccaaagaaattgcttgaaattctaggcaatgttaagagaagaagtgaagagcttgcctgtgcatctagacaacaaactgattctgccaatgggacaggaaacagtgtttcttctggatcaagagggagtggcattatacctctgatttctgctgcaaataatgcgacaacctatggggatgagtttgacacaaccataataacattcaacactgctgttatcctttaccatcttcacgattatgaatctgcactatctattttggatccactctaccgaaatattgaaccaattgatgagacaactgctcttcatgtatgctttctgttgttggatattacattagctttgcaagatgcatcgaatgccgcggatataattcagtacttggaaaggtcatttggagtagttagcgcaacaaaccagaatgaaaatgctaatacagctcagcagcagtcagctcaaccaaagccttctgcaaagattagcacacctccagattctgattcaaatacttgtgctggtggatctgaaaacctttcagcaggaaatttttctgatgatacacttgagtttgaatctttttactctaccttggatggtggtaatcagaacttgggcagaccaattttaaatgatttctcaagggcttcagctgatcttgctgccactgctgctgatttgaaagttagactgcaaatatacaaggtccggcttctgcttcttactaggaaccttaaggttgcaaagcgagaactgaaagttctgatgaacatggcacgtggtagggattcatcaacagagcttctcctgaaatctcagttggaatatgccagaggaaactatcgcaaggctgtgaagctgctgagcacacccaataatcggagtgaacaagcaatgctggccatgttctacaataatcttggttgcatactccaccaacagagatctattcaaacctcagtatggtgcttcagcaaagcattgaaatatagcttatcacttcgttcagagaaaccatgcaagctgaccgcaatatcgcaagacaaatcttgtcttatttcatacaactgcggcatccaacatttgatgtgcgggaaacctttgttagcagctcgctgttttcgtgaagccatgccgctcttgtgcaacaggtccctcttttggctccgttttgctgagtgtagcctgctagctctggaaaagggtatcctgacttcaagtggtgctacttcgtgcaatgatgagattgaagttgatgttatggggtcaggaaaatggcggcacttagttataaacccagtgaagccaagtcattcttcagaatctggggaggaggtaagtttggacaaatatggaaatctgatatcccttagatttgctagacagtgtctactcaatgcccaaattttattggatccctctacgaaggaaaatctggtgattgcatcaggcacagaggaatcgaatcaaacatcactgcaaggccagaaaggctcaggtcagaagaacaccactaatacagattccaaaccgcctggtccagcactaactaatgcaaatggagaacagaagggaatttcaaacttgaatgtcaccttgcagagctctcttgctttgtatgatgacatatgtagaaaagagaacctcaaaattaaacaagccatcttgggggaccttgcatttattgagttgtgtcttcagaatcacttgaaagctttgtctattgccaagttgctacagcagctgccagaatgttccaggatgtatgttttcctcagccatgtatacgcagctgaagcactttgtgcactgaatagaccaaaggaggctgctgagcaattaactgtttatttgagagatggcgatgatattgagttgccttacagcattgagaactgcgagaaagcccttgttgagaaagacagcgatggtgaagattcagttgctccggtagtcacaaaattgtcctcaggagaatctcagtattcagaaagcctcaagcctgaggaagctcagggtgttctttatattgacctaggcatgacagctgcagtgcagggagagcttgagcaggctaactatatggtaagccgtggcgttgccttgttgcccaacaaccccagggcagtgctagcatcagtttatgtggaccttcttcaagggaaggcacaagaagcaatcgccaagttgagacgatgtagaactgtgagatttaggaggcatagtgtagcagtcagcagttaagataggaccggtcgcccttttgatgatttctgtagttgataattgccatttcatcttttggaccctgacccccaggtggatgatcgaagatcgtaatgttcttgtgtgtaccatacataagaagaagaaaaactgtagatctccccccctttccccactttaaaagctttccctgattcaggggtgtaatgtgtcggagttaatatcgttttagttttgccgctctttggacagaagagggatgaaatagtttacgatatatgtgcttattgttcgggaaagcaacgtgcaaaatcttttgaacccgatgacc

SEQ ID NO: 28224 - DNA, 4488 bp, Oryza sativa
  ref <308>: DATABASE ACCESSION NUMBER: AK103666
  ref <309>: DATABASE ENTRY DATE: 2002-08-28
gattggacagatcgctcacgcgcgcgcttccgccggggtctcgtgctcacctccgggcaccgcctcgccgccgccgccggaatgcgccgtcactggaagccgtgctcagctccgacgcgtacgatgcccaatcctgtatactttttcttcttcgagactcccgtcgctgtagccacaacaattctccagagactcggagttctcagtctgcgcccgttacctgttcgacagaactcctccgaggagcttactgtccctggccctttgactaaggaggctcggtgttgttcgtttttgtgctcgtcaactgtagttgtccatgctttcacggaagctctacacaagctgaatctaatcctggatcaccacaagacttttacctttcctcgtgtgtctggaactccgcatacaagcgtggaaaagggtggccgtacaactgtacaaggtaacactctggactgccaacctaatggattctctgttggaatcagtcaggaagaaattatcaggaatttggtcgaacagagaaggggtgaggacataattggagcgagctaagtcatgtgtgggggccgagggcgacagcgacgagagcttggatgcgtccaagctttccatatccttccagtactatgttacagtaagtatctagttgggaaatgatgtggaaaggaatggcgggaacagtcaaaaaggtaacatgcactgctccaagtcgacatggtatcttaccactcctgtctctctccctgtgagcgcggagaccgctaaacaagtcaagattttgactcggtgtcctcgccgtctcgccaatggcactctgggatcatggcgtcgtggggttaaaatacggtgctctggggcactgcttgtcactccacttgtgtaccttgcaagtttgcaaccaccatggcgatggctcttgctagcttcctgctgctgctgctgtccgtcttcatgtccatcttcttgcacttcatggcagtgcgaggagcagacggagaagacgccgcagcgttgctcgctttcaaggccgtggcggtgggcaacgggtggtggcaacggcgtgcttgcgtcgtggaacggcagcgccgggccgtgcagctgggagggcgtggcgtgtggccggcacgggcgggtggtggcgcttagcctgcccggccatgatctctcggggaccctgtcgccggccgtcggcaacctgacgtcgttgcggaaacttgacctgagttacaactggctgcacggtggcatccccgcgagcctcggtcagctgcaccgcctcagggaactcgacctaagcttcaacaccttctccggcgaggtccccagcaatctgacatcctgcaccagcttggaatacctggccctcggcagcaacaagctcgccgggcacataccttcggagctcggcaacacgctgacacagctccaggtgctaggcctcgacaacaacagcttcgtcggccattggccagcttcactggccaatctgacgtccctgggatacctcagcctcaggatgaacagtctcgagggcacaatacctcctgaattcggcagcaacatgccgcgcctttacttcctcgacatctgctccaacaacctgagtggtgcactcccgtcttccctgtacaatctgtcgtcgctaatggggtttgatgcaggaaacaacaagctggatggaagcattgctactgatatcgatgaaaagtttcctcatttacagtctttcgcagtgttcaacaaccagttcagcggggaaattccctcctcgttctccaatctcactaacctcacgagtctgcagctatcaatgaacggatttagtgggtttgtgccacataatctagggaggttgaatgctctgcagaatctgcaactaggtgttaatatgcttgaagcaggggacataaaggggtgggaatttgttgagtcattgacaaactgcagtaagctagagattttagttctcagtaacaacaatttcactgggcagttccctatttcgatcgcaaacctctcgaagactctccaaaaactttacttgggtggcagtaggatttctggaagcatcccctctgatttcggtaatttggttggtctaagatcattatacctgtttagtactgacatatcaggtgtaattccagagagcattgggaagctggaaaacttgactacgctatacctgaataacaatagcttgtctggccatgtaccgtcttctgtaggaaaccttaccaatctgatgaagctattcatgcaaggcaacaacttggaaggaccaatcccagcgaatcttggtaagctgaaaagcctgaatgttcttgatttatcaagaaatcacttcaatggttcgattccaaaggaaatattggagctgccttccatttcacagtacttgaatttatcatacaactccctctctggaccccttccttctgaagttgggagtttgactagcctcaacgagttgattctgtcaggaaaccaattgtctggccagataccaagtagtataaaaaattgcatagtgctcactgtacttttattggacagtaactcgttccaaggaactatacctgtgtttctgggggacattaaggggctccgtgtacttaacctaaccatgaacaagttttctggtgtgattcctgatgcccttggtagcatccacaacctgcaagagttgtatctagcgtataacaacttgtctgggcctatcccagcagtgctgcagaatttgacatcgttatcaatgctggatctatccttcaatgatctgcaaggtgaagtgccaaaagaaggtatttttaagaacttatcttacttgtctttagctggaaacagtgagctttgtgggggaatatctcatcttaacttacctccatgctccatgcatgctgttagaaagagaagcaaagggtggttaaggtctcttaaaatagctctggcatcaatagctgtggtcttgttcttagctctagttatggtgattattatgttaattcgtcgtagaaagcctgtacataggaagaagggccagtccctaaccccagttgtggaggaacaatttgaaagagtttcttaccaggaattgtcaaatggaaccaagggattttcacagaacagtttgcttggaaaaggaagctatggtgtagtctataaatgcactttgtttgatgaggaaattgttgtcgctgtaaaggtgtttaaccttgaacggtctggatctactagaagttttctggcagaatgcgacgcactgagaagtgtgcgccaccgttgtctcctaaagatcatcacttgctgttcaagcataaataaccaaggtcaagatttcaaggcactagtttttgagtttatgcccaatggcagcttaaatggttggcttcatccaaaatctgatatgcccattgctgacaatactttgagcctaactcaaaggctggacattgctgttgatattgtggatgctctggaatatcttcatatccactgccagccgccgatcgttcattgtgatctcaagccaagcaacatccttcttgcagaagacatgagtgcccgagttggagatttcggcatatcaagaatcctaactgaaagcgcgagcaaaacacagcaaaattcaagcaacacaatcggaataagaggttccattggctatgttgctccagagtatggggaaggctctgcggtctcaactcttggcgatgtttatagtctgggcatattgctgcttgagatgtttacaggaatgagcccaacagacgatatgttcagagattccttggacctgcacagtttctcagaggctgctcatcctgacagaatcctggagatagccgatccgacgctctgggtgcatgtagacgccgaggatagcatcacaagaagcagaatgcaagagtgtttgatttcagtcattggcctcggcttgtcctgctcaaagcatcaacccaaagagcgaatgccaatacaagatgcagccctgaagatgcatgcgatcagagacgacgcttacctgatgttttctggctctctttcagtggacatggaagaggagacgaaacaaattagcagcgatttgaagcaacagtgagtaactaggcctgaagagtgtacaagaataagatatgcttgctggggaaaatgttttaacagctcagctgccgatggcgacttgccagaattccgagaaacaaaagctgagacgctgaagatgtagcattttccttcgtggttcatatcagtcagtctttatttgcgtcagttcatatggctatatgtaatgtaagctaatagaacgttcagtaactgccgatgtgtacattacaaccaatacggcaatactactatgtggagaactgtcagaaagatttttgactgttcatccttttcgtacaaaatgaaaattcaaatcatacctgtaatcacacatgaaaatcagattatgagattgcgccacgtttttgtgggacg

SEQ ID NO: 28225 - DNA, 867 bp, Oryza sativa
  ref <308>: DATABASE ACCESSION NUMBER: AK103667
  ref <309>: DATABASE ENTRY DATE: 2002-08-28
gatccatccgccgcgcctctctctccttcatcatcaattccggtgaggatatcgccggatcgacgcgccgccggcgggagccagccgcagagtggagcttggaataggcagctttctactgtgaatcaaaagcgtgatgaacaaagataaagttcatgacaaggagactcacagaacgagcaacgatataagtcataaaacatctgtggacaaggttaaggcccccaatctgtttgaacgagccaaggaagaggttgaggctctcgttggagctgttcatgataagatggagcacaattccagtccccatggaaataatgctgacctgcataaggactcaaaggatgaaagcaaggtgtcaatgaacaaaatagagacccacaagaatgaaactcatggtacaagcgatgatataaatgagaatacaccagttgagagagttaaaggtccaaatgtgtttgagcgtgccaaggaagagattgaagctattgttgaagccttccacccaaagaagggatctgacaagtgaagattgagatgttctgttgcctctgtctgcacttgatgtgaaaacattgacatgagttattaatagatccatggatgagttgtgagatatccatcggctggtcttattattgccaaactatggagttgtaactgttgaatggttcattgtaccactgatatatatatgagcagagtgtgtatcatgtgtgacatgaaagtattactgttcttcagtgtttgattttagtgtatgttgaacttagtcctttgcatgatatggtattttacttgctaccatacatgcaaaaatcttttgaggtgcataaataaagagagagtcaattgctgtacaatttt

SEQ ID NO: 28226 - DNA, 1787 bp, Oryza sativa
  ref <308>: DATABASE ACCESSION NUMBER: AK103668
  ref <309>: DATABASE ENTRY DATE: 2002-08-28
gcaacacaaaagttcagtgaaaatgtgctggatgcaactaagaaatttgagaaattaattactgataagaatgaaattgatgggttacctgccacagcacttggcttagcagcacagactgccgcgtcaaagggtcatgaaaatgcttcggctgaaaacggaccatggatcatcacattggatgcgccaagctatattgctgttatgcagcatgcacggaacagagcacttcgtgaagaagtttatcgtgcttacctaacccgtgcctctagtggcgaccttgataacaccaatatcatcagtcaaattctaaagttgaggctggagaaggctaagctactcggctacaagaactatgctgaggtaagcatggctcagaaaatggcaactgttgaccgtgtagaagagcttcttgagaaactccgtgctgcctcctgggatcatgctgttaaagatatggaagatctaaaagcctttgctaaagagtctgcttctccagaagccaatgacctggctcactgggacctaagcttctggagtgaacgactccgggaatctaaatatgatatcaacgaggaagatttgcgtccttactttgcactacccaaggttatggatggcctcttcagtctcgcaaataggctctttggtgttagcgtagagcctgcagatggactggctcctgtttggaatagtgatgtcaaattttactgtgtcaaagattcttcgaatagccctgttgcttatttctacttcgatccatattcaagaccatctgagaagcgtggaggggcttggatgaatgtggttttttctcgcagtcgtgtgcttgctcgcaatggttcacctgtcaggcttcctgttgcccatatggtgtgtaatcagacaccaccagttggtgataaacccagtcttatgaccttccgtgaggttgaaactgtgttccatgaatttggtcatgcgctgcagcacatgcttaccaaacaagatgaaggatttgtttctggtattcgtggagtagaatgggatgctgtagagctgccctctcagttcatggagaactggtgctaccacaagaatactcttttgagcattgcaaagcattatgaaacaggcgaacttcttccagaggaaatttatgcaaagcttgtcgctgcaaagaatttccgtgctggcaccttcagtttacgtcagatacgttttgctagtgtggacatggagctgcatacgacttacgatccaaatggttcattgtccatatatgatgtcgaccgaagagttgctgagcgaacacaggttcttgctcctcttccggaggataaattcctgtgcagctttagccatatatttgcaggaggctatgcagctggatactacagttacaagtgggctgaagtattgtcagctgatgcattctcagcatttgaagacgttggtttggacaatgagaaggcaattgaggaaactggcagacgattcagagaaacagtccttgcgcttggaggtggaaaatctccactcgaggtgtttgtgtctttccgcggacgggagccatcaccggaagctctgctcaggcacaacggcttgctacctgttgctgcattgtgataactcatgctcgattgtccccttcttttttcttttaacttgcgaaaacggcttgtaagatgttattgattgatggcatatcagcaacacgctaaaagtgccgtgtcctgcttacaacatggaaaacaagttgctgtgcacaaccattatataatgatcatcgctgcttcttgccgttc

SEQ ID NO: 28227 - DNA, 3234 bp, Oryza sativa
  ref <308>: DATABASE ACCESSION NUMBER: AK103669
  ref <309>: DATABASE ENTRY DATE: 2002-08-28
gaggaagacagaagggagtgaactgaggagaggaagagcaagagaagagaggaggcagtgcatgcagtggagagaaggaaaaaaagacacgttgttacgaacgaacaaataaatgcagtagtacgaagaactttgaaattgggacttttatatgagcaaattggttgaaaagaagaaggcaagacaagtgaactaaactttgaggcagcaattgttatacgagcaagctggttaaaaaggagtaggcggtatctaataaacgcaggaatgtcggcatttagagtgtatttcagtgaaggtgaaattatggaaaatgaaagtggtgtcaatctgagcaactttaggcaatgcacactataccatccaaatcctgacacccttaccatgcccgaagtttggtactggctaacatgcacattttctttagatccgggtatatatagtgttaacgtgagggttatgtggagccgatcggccaacaacataagatgggagttaaaaaatgtgacacggagtaaggcctggcaggattggctcgctggctgcaggagacggggatatgaatatgtcatgctggtgcaagcatgtcaaggaagagtccccacggagagcgcagcggggcaatccagcaaccgtgaggagttggggtctagttcacacgaagaagatgaagttgtagctccccatcatggtggcgatgttggtcctgacattcaaaatctatccatacaaggagatgaagtggtcaaccgccatcctactggtgaagccgatgaaggggaggacatacctgctatagttgaagaaattgaaagggtggaccgacatgcaatcgaagatgaggaaaacctcgctgctgaagagaatgatgacgaggatgaacaagaagttgaggaagttcctatgcctgcttcgtggaaccttgaagaccctggttatattgcagaaaactcttgtcatgattcaatatggttctacggggatggccaaatcaatctgggtgcaatgttccgtgacaaaacggggttgcaagacgcagtgaagtcatggtcattcaagacgcaaaggcagttcagggttgtgaagtctaacaagactgagtacacggtcgtcttccgtcttcatggtcacgtgccaaagtacgagtcttactggattctgtccaaactgcaggaacactcctgtctgattcggaacactagggagtcgcaccgcaacctgaccgcggcatacgttgcgaacaagtactacaaggaaattattgaaggtgatgacctgcctgtgcggcacataataaaactggtggagaaaggtgaacaatacacaattagttaccacaaggcttggagggcgaaacaaaaggccatggagaaaagatatgggacatttgaggaagcatacgacactctgtcacagatgcttaacattctgaagatcaggaaccctaggacctatgttgctgtgcaggatcgggagtcaattcgtcctccaaattatcttgtgatgcaacgggcattctttgcattcggagcatgcatccttgcgttccagtgctcgaggccggtgccgtgtgtcgacggtactttcctaactgggaagtaccgaggccaaatattaacagctgttggtgcggatgcgaacaaccagataattccagtagcttttgcttttgttgaaagcgagaattacgaaagctggttgtggttcttgcaacatctaaagtggggagtggtgcaaaaacgcacatcgatatgcatcatccatgaccggaatgccggtctgttgaaggcaatcaaagagctccaggaggatggtgatggtgcatactactggcctgacatgcacagccgttggtgcatgcggcacatgggagccaattttttcaaacaattcaacaaccggcgtctgatgaacatgttcaagcggttgtgcaaggcaaatcagtccacaaagttcgatgagctttggaaacaacttgacgaggtgacaaggacacatatccggtcaaagcagaccaacatcaacctgctggatgtacatgtcccccaggccctggaaccaatggatgatcttattccatcaaatggaaagaagcgtaggtcatcaaagaatatcaaatgttttacccattggattgagtgcgagccgaatgataagtgggcactcctgcatgacactaatggggctaggcatggcataatgaccactaatcttgcagaggcgtacaatgtggttcttagcaaattaaggcctttacctctgactgctattgttgaaggcattatgcacaggacaacgatgtggatgaggacgaggcgggccgcggcgttgcaacaaatgtctaatgcacaaacacctttctgcaaaaagatggcagagtacctccaagagaaggctaacaaggccagatttcacacggtcattaccactgggaacgtaagacgaaggtgggaagtcacatgtcgcactaagggggattttggatcttctactggggtcatcactcatgaagttactctagggcacgaatctgataacacatgttcgtgctcttgcaataagccgaagcttcttcataagccatgtagccatgtcctggccgcatgcgctaaaattaagcttgattcaacatcatacgtgtcgacgttctacctaaaggatagagttctaaatgcatggagtgctgagatcctcgggtggaggtccctccaacacctagtcgaaactgggggtgataacaggatctatgtgccagacttggatttgttgaaggccggtaagggtagaagacaaacacgtcgcttaagaaatgatatggatgcatccgaagcgggagggcctgtaaggcgatgtgagaactgtcttcagtacgggcaccgcactagagattgcaagaataacaaggagggtacatcttcaaccatggaacctatgcaacaacgtgcgaggagaaatagaaggggctctcagggtgctcacgatagggaggaaggaaacctgcagtagttataacctacactgtccggttatttatgttcggtcatgatatgttcgctgcatgacgttgtatttcaataagtttgtaatatgttagtcaataagtatgtgtaatatttattttattatggtaatgttgtaagattttattgtaaggtgttaccaagtttgtaacgtttgtaatcctattgttgtactatttatttcaatgatattgctcgagtttgtacttgtact

SEQ ID NO: 28228 - DNA, 1295 bp, Oryza sativa
  ref <308>: DATABASE ACCESSION NUMBER: AK103670
  ref <309>: DATABASE ENTRY DATE: 2002-08-28
gaattcaattcacagcaatctctggatcacaaggagagcttcttgaatcgcagcagcaacgacgacgaagacgacgacgactgtgtcgagctcgagctcttgcctgccatgccgccggcgaagagctctaagcatggcttccccaagctgtcggcgtcaagcaaggcgctggtgctgctgccgctgctgctcctcgggttcatctacctcttcgtctaccccaaggagttcgagctgcaggcgctcatgatgagctcgtgcgggccgacgacggcggcgggggcgtacacggcggcgccgcgccgcctcgccggggagccaccggcgtcgcggaagcccgacttccgcctcctcatcggcgtgctcacccgcgccgacaactacgagcgccggcacctccttcgcatggtgtacggcctccagctcgccgccggcgacctgaccgcgcacgtcgacgtccgcttcgtcttctgccgcctctacaaggacgaccagcgcgtcctcgtcccgctcgagatcctccgccacggcgacatcatcgtcctcgacgagtgcgaggagaacctcaacggcggcaagacgtacgccttcttctccgcggcggcgcggctgtacgccgacgacccctacgactacgtgatgaaggccgacgacgacatcttcctccggctgccgcggctgctggcctccctgggcgcgatgccgcgggaggacgcgtactacggcgccaccatcccgtgcggcagcatggacccgttcagggagtacatgtccggcatggcgtacgcgctgtcgtgggacgtcgtcgagtgggtggcgacctccgacgtgccgcgcaaccgcaccgtggggccggaggacaggatgacggggcagtggctgcggctcggggggagagggaagaacaggttcaacgccaagccggccatgtacgactacccgctgccggcgccggtggacaagtgctcgcacgagtttatcccggacaccatcgccgtccaccgcctcaaggacaacccgcgctgggccgagacgctcaagtacttcaacttcaccaagggcctcgagccctcaaagttctacaagataaactagaaacagaggatccatcgattggaattggacatgcgttatacattgttggttaattttggggaatgaaatggtttctactatatatatttttttgggtattattcgacattttgcagaaattattttcctttttcctcctttaatccccatcagtttgtaatgaacacttgattcaaatacacagatgataactcaaaagg

SEQ ID NO: 28229 - DNA, 852 bp, Oryza sativa
  ref <308>: DATABASE ACCESSION NUMBER: AK103671
  ref <309>: DATABASE ENTRY DATE: 2002-08-28
ggggatggtcgcaggtcagtgtagacatccacctcgccaatcgccatccacccccaaccttcagctggctcggcaatcggcatctcttatcctcacgtgcgcaccacctgctcgatgaaattccccacacggccaccaaccgtgccgatggcacccgccaccgccaccgccgtggcgtccccctccacctcctcccggctcctacaccgcagcctcctctcgccaacacccacggccgctcgctgcctccggccgccgctgtgccgcgggcgcctccgcaccgttcgccaggttgtcgccaacggcgacgtctcctcgccgtcctcggacgtggccgccgaggagtccgcggcggcccccaagatcggcaagcgcgtgcgcgtcacggcgccggtacgcgtccaccacgtctccaaggcgccggacctggacatctgtggcatggagggtgtggtcaagcagtacgtcggcatctggaagggcaaacgcatcacggccaatctccccttcaaggtggagttcgagctcagggtggatgggcaggacaaaccggtccggttcttcgcccaccttcgagaggacgaattcgagctcgtcgaagacgaatagctgaataggtctcttttacagaataatgtgctctcgtcgtctgcagtctgcagatgcagtatctgtatattagaagagaagattgaagagggtgcgaggagatcgcaagtaagttgttgtttgtttacttgtcgcgtgctcttcctcactcttttgtagttctgttaaacaccaacattttgagatttgagaaactgagaacggttcggattatgacaattatgaatgaaagtggttatactg

SEQ ID NO: 28230 - DNA, 910 bp, Oryza sativa
  ref <308>: DATABASE ACCESSION NUMBER: AK103672
  ref <309>: DATABASE ENTRY DATE: 2002-08-28
gggtcttccccaccgtttgtcgcctttcatgtcgccggagaaatcgccggagtcctcagtagttcgggaacaaagagttacaatttcaaacaagcatggggaaaatcttgttggtctactgcatcaagcatgttcaaagaatcttgtgatcctttgccatggattccgagctacaaaggatgatagcatcttggttgaccttgcttatgcactaacaagggaaggtgttagtgcttttcggtttgattttgctggaaatggggaaagtgagggtcagttccagtatggaaactaccgaagagaggcagatgacttgcactctgttgtatcatacttcacagaacaggaatataatataattggtcttgttgggcacagcaaaggaggaaatgccgtgcttttgtatgcttccatgaaccatgatattcctgtcattgtcaacatttctggacgctttgcgttagagcgtggtattgatgggcgcctggggaaaaatttcatgcagagaataaagaaagatggatacatagatgtcaggaacagaaaaggggagtttgagtaccaggtgacagaggaaagtctgaaagatcggctgagcacagatacccttctttcaagccgttccataagcaaatgctgcagggtcctcacaatccatggctccaaggatgaaattgttccggtggaagacgccctgatgttcgcggcaaatatccccaaccatgagctgcacataatcgcagaagccaatcatcgctacacaggccatgagaaagagctgaaagcatttgtactggacttcatcaagtcccaacccaatttctcgtcgtccttgcgcccgaagttgtaactgtttgacctttgcaatccttgatgcttgaagtttaaatgtcatactttgcaatccttg

SEQ ID NO: 28231 - DNA, 2171 bp, Oryza sativa
  ref <308>: DATABASE ACCESSION NUMBER: AK103673
  ref <309>: DATABASE ENTRY DATE: 2002-08-28
ctcggccactccagccccccgcagcatccgcccgatccgccgcgcggctgcttggctgttggctcccaccacaccttggcgtggccgtggcgcgggtgttggatccgtccggtcagcgctggcgtcaccctccactccctctccttccgcccttgcctcctcctccgcctaatgcgatccgacgcgcgccaccaccacctcctcctccgatcccgcatgcgcccggtccaccgcgcctcgcctcgctgacccacgggggccacctgctgctggtggtggtggacggacggagttgtccgcgacggtctcccactttccgcctcttccccaccaccatcgttctccttctcttctccctctcccacctttctccccccgcgcgcccgatccttcccttcccccaactccctctcgcatttcccagctcggatcctcttctgacttctctctctctctccgtctgtctctctcctctttcgaggtcttcagtcttcagtgttcttgacgaccttgctgcttcttgcctctgtttcgcctcctacttgccgtcttcttcttcttcttgctgctgctgctgctgctgctgaatttttcttcggtcagttagtcggtcaggccggtgccggtctgggagcgattccgccggacgcacgcatcaacagtggagggaggggaggggaggagcttcccctttttgatctagcaagtcgtcgtctccaaaaatacacttttttttgttgggtctttggaacaaaagggtctcctccttttgatctttctgtctcatcactaaattagcaaagctttgtgcttcgcggcgatctcttttcagctaattcagtctctgttgatagcttcgttgcccaagagagatcccccatgtcagaggcgagcggatgacaccgcaattcgggtccggttcttccgcctgagctgcagaattttaagcttcctccgtggtgccgccatggatgcccttcctgacgccgccgacgcggcgcagttggcggcggcggcggcgccgccgcagaagcgcgacgagtggagcgagagcggcattgtgcggctgctggaggcgtacgaggccaagtggctgctgcggaaccgcgccaagctcaagtggagcgactgggtcgacattgcccacgaggtgtccgcccactgcgccatggagaacgccgccgccacggggaagcccgggagcagcacggccaagacgcccaaccagtgcaagaacaagatcgagtccatgaagaagcggtacagggcggagtccgccgcggcggcgcgcgccggccccgccgccgccggtgctggcccgtcgtggcggttcttcgcccgcatggacggcttgctcaaaggccccgccggctccggccagccgcaggcggagttgagcaacagcatagacctgcgagctcctcctcctgcaaaggttgaggtcgatgtcgatgcagatttcgtcagtcagttagctgatgcagggccgggtgcactttctgaattggtgagtgcatatgcaaacggctcgattcaagagaaattggacaaggttgagaacagtgggcatgttgaggggagagctgcagagagtgatgtcaatgtgagctctccgaggatcaaggaggcgaacgaggatgccgaggaggtggacaaggtatgggacatgtccaagaagaggaagaacacggagtttgatatcgcgaagagcatcgagttgctggcaagctcattcttgaagattgagcgcgcaagaatggacctgtacagggaaacagagaggatgagggttgaggctgagattaagaagggtgagatggagctcaagaggacagagattatggcaaagacgcacttgcagatcgctaagcttttcgcaaagagattgaaggagtgcagcagcaagactggtggtagctcatctgtaacagctgaagtggacaaccatgccaagaaaggagaaaatggttcagggtgattgaaacaccaaccgatcgtccagaatccagaaagcaggcttgtagtttttggtgttcttgtgcaccaaatgtatgtctttgattgatccgacttcaccatgtacgaagagatagttagctgtaaaagtaaaatgcaataaatgatatgattgtccccattcagtgggggattatagaagcagttttagaatc

SEQ ID NO: 28232 - DNA, 2521 bp, Oryza sativa
  ref <308>: DATABASE ACCESSION NUMBER: AK103674
  ref <309>: DATABASE ENTRY DATE: 2002-08-28
ggcttgtgctcctcaccattcttgcctcattgcctacgatagcagcagcatcagcccgcataagtaggttcaacttggagtgtgcttgaagcagcagtttgagtgctgtgctgctgttgctgttactggcttgctgctagccgcatcagggcctgctactatctcgtagtctgttcttgttttccgttgtacgaacgatctcccgggcacgttgcaatattcggtcgccgtctcagccgcagccaccagcagggtgcagcaagttgttctgctccttgtacttgtttgctcctgggtactagttgcttttcatcttgtgtagataaatatgggctagtagtggagttgttgcattggttgcagcgttgttgttgtgttagtggtggtggtggtggtttgtgtgtttgggcgtcgatcaggagagataagatttaagatcagcgcgtgtgcgtctgttctttgcctgtttcaagatgaaattcatgaagcttggatcgaacccggatacttttcaggatgatggcaatgaagtcagcattgtggcaactgaattagtgagcgatgtcactgttcgcatagggactacaaagttttaccttcacaagttcccacttctgtccaagtgcgctcgctttcagaagatgatcccaactactggtgatgaaaacattgagattcacatccatgatattcctggtggcgccaaggcttttgagatctgtgccaagttttgttatggtatgattgtcacgctcaatgcctacaatgtcattgcagcccgctgcgccgcagagtacttggagatgcatgaaactgtcgacaagggtaatctcatctacaagattgaggtcttcctcagctcaagcattttccggagttggaaggactctatcattgttcttggtactacaaaggctcacttgccttggtcagaggattttaagctggttagccactgcatcgactccattgcttcgaaagcctccactgacacctccaaggttgagtggtcatattcatacaatcgcaagaagctcccaactgagaatggccttgatttggaatggaatggagtcaagaagcagcagtttgtgccgcatgattggtgggtcgaggatctcgcagatctcgacattgattcatacaagcaagtcataacagcaatcaagaccaagggtatggtgcccaaggatgtgattggggaggcaatcaaggcttacacatacaagaagctcccttccttaagtaaggtttcaatggtccatggcgacgcaaaagttcgggccatgctagttaccatcacatgcttgttgccatcagagaaaggatcagtttcatgcagcttcctcttaaagctactgaaagcaacaaatttgctaaaatgtggagagctctgcaggaaagagcttatgaagcgtattggacggcaactagatgaagcgtccgtgtcggatcttctgattcctacagtggatggggagaccacagtttatgacattgacatgatactcagtatagtggaagaatttgtcaggcaagacagtaagaatgctcagaaacataatggtggtgaagtggacagtcatgtccaagcacctagtgcatccatgatcaaagtggctaaagtggttgatgggtatcttgctgaggttgcaaaagatccaaatacacccattttgaagttcattcatctagccgagacaatgtcgataaattcaaggccagttcatgatgggctataccgcgccatcgacatgtatctgaaggagcacccaagcttgggaaagaatgagaagaagaagctgtgcagcctcatggactgcaagaaactctcaccggacgcgtgtgctcacgcggtgcagaacgagcggctgccactgaggaccgtggtgcaggtgctgtaccacgagcagacgagggcttctgcggcggtcaccatccgagccgacagcatctgcgtcggctcgtacgagagctcgaggtcaggcgccaccaccaacacggaggacgagtgggacggcgtcatggtcgtggaagacctcagcctgtccaccaagaccaccaccaagctagacggcgcagccaatagccattgcagcaacggcaaggcgaagaaaggcggcgcgtcgacgccgaagaaggcggctcaccggaggacgacgacggtgccaaccggcaaagggcagtccggtgagcgcagcagctcggactcgtcggacagtgcgatcttgcagaagctggagcttcccaagaggaccccctccaggagcacgaagccggctgctgtgtagcgttagcttcctgcatgaattctcagtggattcgtaaggatcgttaggttcttagctgctgcttcttttctttctttcttcatgaatgttgcatagaagcaagaactaatggtttacacgtctgttggtagggatgttataatgtgaggtctgcttttaggtgatcttgttagtagcattgtaggcttgccatgaaacctatgaaaatgttggttgctactttgaggttt

SEQ ID NO: 28233 - DNA, 2568 bp, Oryza sativa
  ref <308>: DATABASE ACCESSION NUMBER: AK103675
  ref <309>: DATABASE ENTRY DATE: 2002-08-28
gacaaggatactactccgcgaggcacctctctctctctctctgtgagtttcgtgcgatctcgcgagcgaatccggcgcgcgacccaggctctccaagatccccgcgctctcctcttcggtttactgatctgaaatctctgcgtcgaatcacctgtttgttggcttgaattgcttgtccgcgtcgttgatttcgttgtggtttcttgatcttcggtggaatttctttgcgttggattgtctccacccctgttggttcttgtcgattcccgatttgagttgttcgttggcgtgaaaaggattctttttttcccctgagatttcttgatttttggtgaaatttctttggtgttgaaatatcatcgccttttggtttcttatcgattccgtcgttccgattggagttgttcgtcggcgtgaatttttttttcctgattcatcgttgcttgttgattggggatcgaatttttcgtctacgatccatcttattcgtggtagcagtatctcttcttgttgctgcgctgtgccctgtttatttgtttctgcttgttgcttctgacccatggatgcaggttcgcactcgatctcatcggagaagagcagccggtacgtggcgccgcgacagccactccaggaggccggatccagaccgtacatgccatcgctgagcacggcgtcccgcaacccgtcagccaagtgctacggtgacaggtttattccggacaggtcggcgatggacatggacatggcgcactacctgctgacggagccgaggaaggacaaggagaacgcggcggcgtccccggccaaggaggcgtaccggaagctgctggccgagaagatcctcaacaaccgcaccaggattctctccttccgcaacaagccgccagagcccgagagcatcctcacggagctccgtgctgatgcggcttccatccaagccaagccggcgaagcagcgccgatacattcctcagtctgccgagaggactctggatgctccagagcttgttgatgattactacctcaacctactggactggggaagcagcaatgtgctatccattgcgctgggcaactcggtgtacctctgggatgccacgaacagttcaacttctgagcttgttaccgtcgatgaggacaatggccctgtcaccagcgtaagctgggctcctgatggccggcacatcgccgttggtctcaactcctccgatgtccagctctgggacaccagctcaaaccgactgctgaggacgatgcgaggcgtgcacgattcgagggtcggttcgctggcatggaacaacaacatcctcacaactggtggaatggatggcaagattgtgaacaatgatgtgaggatcaggaaccatgttgtgcagacataccaggggcatcagcaggaggtgtgtggcctcaagtggtcaggatcagggcagcagcttgccagtggtggcaatgacaacctcctgcacatatgggatgtgtccatggcatcctctatgccgtctgctggccgcacccagtggttacacaggcttgaggatcacttggctgctgtgaaggctctcgcgtggtgcccattccagagcaacctgctggcatctggtggtggtgggagtgaccggtgcatcaagttctggaacacacataccggcgcatgcctcaactcgatcgacactgggtcacaagtgtgctcgctggtctggaacaagaatgagagagagctgctaagctcacatggattcgctcagaatcagctcactttgtggaagtacccgtcaatggttaagatggctgaactcactggccatacctctcgtgtccttttcacggctcaggttatcttttgctccttgtacctgccgtttaaattgacaaatattgctctgaacagattgctgattacttgtcttgtggtaatcttgcagagccctgatggtctcacagtagcatctgctgcagcagatgagaccctgagattctggaacgtatttggggctcctgaagcacccaagactgcaaccaagggttcccacactgggatgttcaacaattccaaccacattcacatccgttgaggaacacagtaagtactaccttcatctgtatttccctagcgcttctacacattacacagtatcaatgtgatgtccaaaagctgcatgcatatctattaactacaagtagctcattgtgctgttttgctctatgcatctttgcagatacccttggttctgtgatccagtcataacttacaaagaagcagacttggtgtgaagggtcatttgcaggagagatcatcttacattattagcagaagagttagattttgacatgttgtatataaggttttgtgctatgttgataacaattttatgtacatcaagaccggtttgatgtattgattggcgtagaaaaaatgtaaaaaaattgcttttctgccagtaatatacatttttatatacttgccaggcttttcttgtagtaagttcctctcgttgtgtagtaacttgtaatttgattgattttactctcgagccaattgagatgtctggtaaccaggaaattgctg

SEQ ID NO: 28234 - DNA, 1300 bp, Oryza sativa
  ref <308>: DATABASE ACCESSION NUMBER: AK103676
  ref <309>: DATABASE ENTRY DATE: 2002-08-28
gtctccactgcacacactcgctgtcgccctcgccccgactcgactccgccgctcgcgcggcgccggagccctaaaccctaggtctcccacgcggcggcggcggcgggcgggggtttctcgccatgtcgcacttcgggaggtcggggccgccggacatccgcgacaccttctcgctcctcgtcctcaacatcagcttccgtaccacagccgacgacctcttcccgctcttcgaccgctacggcaaggtcgtcgacgtcttcatcccgagggatcggaggactggggactcgaggggattcgcgttcgtgcgctacaagtacgctgaagaggcgcagaaggctatagatcggcttgatgggcgtaatgtggatgggaggaacatcatggtgcagtttgccaagtatgggcccaatgcggagccaatacgaaaaggaaggatcatagaagaggttgagaaatcacgggacaggtcaagaagccgtagcccaaggcgaaggcacagagatgaccacagagatagagaacgcaggggccgaagtcgcagcagaagcagagaaaggcatggccgtgacagggatagggatcatcgtcgtcacagcagaagcagaagcagaagcagaagccgaagccgaagccgaagcttaagcccagactacaagaaccgtcgtagaggaagagatgatgataagcgtaggagcaagagcaagagcaagagcaagagcaggagcaaaagcaggagcaggagtaagagcaggagcaaaagcagaagcaggagcagaagcaggagtcggagccgctcatttcatagtgcatcgcctactcggcacagcgctagccctcctctcaagggatcaacaccacgcaggagccctgctcgcaatggaagtcctgaaaaagagacaaatggaaaaggttcacctccttcacgcagtgtttcaccatcaccacagcgtgctggctcccgtagcccaggtagtgatgacaaggaataaagtttgttgatccagtgatgcttaagaagagtcttcaaattggactagaaaagtttggctgagcatgggagtagcaccgaagcagattcaaggttgctagttcttcgtggtttctagattgtatttcctggtactgtcagaattatgttgtcggtttgtattttcacctctattgtgccttattttgatactgtcgtattaacttgtgttaaaacatttgtcattttctagttatctgttcgtgagacgggttgctgttttctagtagaatgatattgcacgggatcgcccatgatggatgatgttcc

SEQ ID NO: 28235 - DNA, 1866 bp, Oryza sativa
  ref <308>: DATABASE ACCESSION NUMBER: AK103677
  ref <309>: DATABASE ENTRY DATE: 2002-08-28
ggttctgcgccgtctcgccggtctccatctccatcaccggagaacagcgatgtcggcgacctactgcttccgccgcatacttttgcctttcactcctcgcgcccagtcaatctccccatctcctcggcctcggcaatagtatcctcgcgagttcgcccgccggcgccaatctccatcccgcgagcagccgtgccggcgtcctgctgcttccgcccccggtttcccccaaaaagaaatatatttggtgcccctggcatccggtagatcggcatgccagcggccttggtggcgtgcagcggcaagcgccggcggcggacggccaccactcatgctgctcgggactcatcgtcgtgggcttttctggcggaggatctggtgagcctgataggctggcgggtgctggctggagatgtgcgagactacatctgcttccgcgccgcgtgccaccactggcgctcctgcaccgccagcccgtgcggccgcggcgttgtggacccacgcttccacccgcggcggtggatgatgctccctgaggggaacggtctctacccgggccacggcatgctgcgtggcttcgttcgcttcttcaacctctccaccggcgctttcgtccgtctcaagctgcccatcgtccgcgaccaccgcatccttgactccgtcgacggaatcctcctcctgcagcggaaccgtgacaccgcggtccgtcttctccaccccttcaccggcgacatcgtcgacttcccgccgctggacaccttgctgccgtacatgggccgccggtcggaggaatatctcagagatgtcgctgctgcctccataacatcatcagctgatgatcaagccgtcttgcttatgatatggttattccgcacggtgcgcgtagccttcgccgcctctggggataagcagtggagggtgtcgagctggtccatgtaccaagcctatactccattgccattccaaggcaagctatacatattggatcaagccacggcttatggtggacctgaggtcttgcagatagacccacccctgcaactgcaactggaagggacgacggagctctcgctaccaccaccaaaatcaattgctaaatgtccagcaaggacacctgactcattctttctctaccatttggtagaatgtgactctgacattctgttggtcacctttggtgttagtgtgtatgcacaaatttcagtttacagactagctgatcttatttcgggaacaactgtcccggtgacttgcatcggcagcaattcccttttccttggtaataggaatctctgtgtcagctccaaggcgtttcctaccattgtgggtgatgccattgtgttttaccatcagaaggagaattatcttgcacaataccacctcagaagcggcacattgtcacccacatcagatggatgtatctttgcgactaatatgccaagtcctagtagcatcattcaccatatctacacctgttgctttcgtacacaatggaccaagggacatttattgtttcaaagggagaacagggcatggcagatgaaacggaagtagggatagacggggcgtaaacaactcttgttttgtgttggtggtggtgcctgcctgcctggttttccttcagggatatatttgttgatctacaggggaagtagttcccgggggctgtgaaagttttgctttggtacttataatcatgttactatttatgtgacaaagatgcttccctctgttgttgaatcaggcaactgtttcatgttgaaacaactaaattaattattgtaattggcatggtattttccaatggagttatgtaaccctggcttgtaaagttcttgtgacaattgatcaaacttccatcatcatagt

SEQ ID NO: 28236 - DNA, 1225 bp, Oryza sativa
  ref <308>: DATABASE ACCESSION NUMBER: AK103678
  ref <309>: DATABASE ENTRY DATE: 2002-08-28
ccctttcctcctcccccacccaaagctcgagctcccgctagggtttcgccgccgccatgccgcagggagatcacatagagcttcacaagaagcgccatggccggcgcctggactacgaggagcgcaagcgcaagcgggcggcgcgcgaggtgcacaagcgatccagggatgcccggcagttgcttggtgctaagggtaagaggttcgccaagaagcggtatgccgagaaggcacagatgaagaagaccctgaaaatgcacgacgagtcaacttctcggcagaaggttgatgatgttcaagagggtgctcttcctccatatctgctggaccgtgatcagacacaacgtgccaaggttctcagcaacacaattaagcaaaagaggatggaaaaggctggcaaatgggaggttccttgccaaaggtcagacctgtggctgaagaagaaatgttcaaagttttacgaactggcaagagaaaaaccaaacagtggaagagaatggtcactaaggccacctttgttggacctgggtttacaaggaaaccaccaaagtatgaacggtttattaggccaactggccttcgtttcacaaaggcccatgttactcaccctgagctgaaatgtactttcaaccttgacataatttctgtgaagaaaaacccaaatggtcaaatgtactctactcttggtgttttgacaaggggaactatcattgaggtgaacgttagtgaacttggtctggtaacccctgctggaaaagttgtttggggtaaatatgcacaagttacaaacaacccagagaatgatggctgtatcaatgctgtcttactcgtgtaaggacgcaatgctatacacttcattcttctcgttgcgactctcaccccagatgtacccgttcagtgggtctttttggccgatcattcagagtagcgtgttttaaactgtgggcacaaggctcatctgttatatgcctttaacatatctggaatacattttacattgtatgtcgtggtgcagaaaagatctttactagttacattttacaacctgttatgagagctacaagtctggtctcatttgcttctagacttctgcatgtatgtactaacagtgtatctgctagtacttcccccgttccaaaattatctagcatttgaaatataaacacttctagagtgtttatattacatctaacgattatcccatattatctatcaaccattaccc

SEQ ID NO: 28237 - DNA, 2130 bp, Oryza sativa
  ref <308>: DATABASE ACCESSION NUMBER: AK103679
  ref <309>: DATABASE ENTRY DATE: 2002-08-28
tcccccccccaaatctgcaccaccgccgcgccgcaatggcgtctcctccccacctccccctcctcctcctcctcctcgtcgtcgtctgcaatgccgccggcggcgacggtgccagggtgaacccgttcacggcgaaggcggcgttcatccggtactggaaccggcgggtgcccaacaaccgcccccacccggccttcttcgtcgccaagctctccccgctccaggccgccgacgccgcctccttcgcagccgcgctcccgcggcttctcccgccgctctgcgccagggccgccctgctctgcccctccgcctccgacaccgagacggccgcctccctcgccgtcggcggcggcggaggtggtgggccgtttaaggggtatagtaatgccaacttcaccaactacggcagcggcggcgtgggcggcgccgacgggttcagcgcctactcccccgacctcaacgtcgtcggcgactcgttccggcggtacggccgcgactcgacgcggagggtggacacgttcgccagctacgaggcggaggggaacgtggtcaccgccaacttcacctcctacgccggcgccgccacgggcgggtcgggctcattctccgcctacgccgccgacaccaacgtgccggactccaccttcaccaactacgacgccgaggccaacggccgccgccgcgagttcacctcctactcccaggaggccaaccacgggtcgaacaccttcgccggctacggcaagaacggcaacggcctcagggagaccttcaccacctacggcaacgactccaacgtcatcgcctccggcttcaccaactacggcgagtccggcaacggcgccaccgacaccttcaccgcctacggcaaagaggggaacgtccccgacaacaccttccggagctacggcgccggcggcaatgccggcgtcgacacattcaagggctaccgctccgagtccaatgtcggcgacgacagcttcgcctcctacgccaagggcgccaacggcaacgccgccgagttccagaactatggcggctcattcaaccccggcaccgtcaccttcaaaggctacggcgaagggagcaaccccaatcaccacattggcttcaaggagtatgccgggagcaacaattcattcaaggggtatgccaagtccggcgtcgatttcaaggagtaccacaacacgtcgtcggcagacgcggcgacgacgatgtcattggaggcggtgtcgtccggccaccagcatttgaagtggtcgccggagccagggaagttctttagggagacggagctggtgtccgggaacacaatgccgatgcctgacatcaaggacaagatgccacccagggcattcctaccaagggacattgccaagaagataccattcaagccgaatgcggtgtcggaggtgttcggggtgccgttggacactgcaatggggaaggcggtcacgtccacggtggctgagtgcgagcgagcgccgagccggggtgagaccaagcggtgtgcaacctcagctgaggacattgtggactttgccgtggagatgctaggcaatgacattgttgtgcgcagcacggcctccacggctggaagtggcgggcaaatcaggctcggcaatgttaccggtgttgatggtggcaaggtgacccggtccgtatcgtgtcaccagagcttgttcccgtatctggtgtactactgccactcggtgccgaaggtgcgggtgtatgaggccgatatcatggctgccgactccgatcagaagatcaatcatggggtggcaatttgtcacctcgatacttctgattggagcccaacccatggagcgttcatcgcgcttggtggaaaacccggtgaggttgaggtttgtcactggatcttcgagggtgacatgacatggacagtcgcggattaatgcgatcaaaaccatcttattaaccggtcaatcttcctcttgccaaactaagaagagttctttttcctatgcttgatttttcttcttttgcaaccataagggtttaagaattgtgcaatgtgtgtaggagaaaagtgctggttcatcaccaaatgtaaacagtatatcccggaaatttgggggagttgtgcgtaatttgattgtcttgatc

SEQ ID NO: 28238 - DNA, 2240 bp, Oryza sativa
  ref <308>: DATABASE ACCESSION NUMBER: AK103680
  ref <309>: DATABASE ENTRY DATE: 2002-08-28
gtgacccggagtacaactacaacaacggcaatcgcttatcttgggatgacaatgccaaagatgaaacatatgcatatgtgcagcacaattacagttcgtatgatcgctcttatgatcagtcttacagtcttgatgccgtttccgatgaaactacttggtttcctaatcagaactaccagcacgtgtacaaagaggaggaatctcagtatcaggaaatcttgtccagctcttgtgcagaaagtaagatttcagctcagcctatttattgttacaaccagcagtttagtgaacaaccgctacatgttcttgttgagcccccagaaacagtttattctcagaagttggagtactatgagagcttctcaacatacaaccaccataacagcaacgatgattcagatatgttgggacattcatatgacatacagctgcccgatgaacatgtgccagatgaaccatttgaaccaattaagccttcttgggctatgcattcgggatactatcagtcctgcacagatggggcatctgctgaattcgaaaatcatactttaagctccagtgaattcagtggtattgcaagcttatttgcaacttccttctaccctcaacaaacacaaatttatgggtgtcatggagatgagaatgtttccttgcagcaaaattggcagtgcaactggaatgtggtttctgaaaatgatttccaatcggtaagcgtaacggtgtctatgtctgtgaacgtgcttttttaataccctatactcttatttttatcgctccattttactcctatttgtgtactgttgaatgtgtgtcatggtcggtacacatgtagttgaagtgctaaggatggcgcacagggggcagaaccaagcggcagcagatagaccatcaatgcatttgccgcacctatcgtacctccttagttgtttgattcaatttgtttaggttgagatttgttaaactttttaggtttgttaggggctggctttatttaagggagcttggcattatctttgaaattaagagcaaattacaagtctactctctcatcccctgttctctctgcctctccccttttttggtgctgcctggtgccatctcattcaaccatgggtagtaagactgttaacctatctagctacttcccactcctatcttattagatcactccctaacgcccgaatatattatattgttcttggcctcatgggtggctgatgacgatcaatgaaaacttcagacatgtctgtgagtgatgctttttttccccttgcaaacgatagaattatgaattagtatctgttttcgttttggatgctgtaaatttaaaatgtctggacctttatagtatgtcccgtgtatcctttcacattcttctgaaatatttatttttgctatttaatatgcaatccatgacacaatttgttttgttgctcaagaatggccatcacatgatctcatttgctgaagttcaaaatggcactgcttggctgcgattttttgcggctgcagctgtgcttaatgtctgtggctgtggtgcacagccgtggctactagcagcagacgcagccacaaaaatgacagccaaacaagcccaatatatctctttcagatttagttaatacttggttgctctttgttccatatattctgatgttagtgtaacttttatccacattcatgatctaccacacttgccagtgttagtagtaattgggatttacttgccaaaagaataattctcagactccagcagataagtgaggttaactctgtctttatggtatagttttcttaacaaatcagcaatctcagtacccttgctagacgattttaatgagtgttaatagtttggttgtttgtgctttgctggtattgttgctagatttcaactgaaacaatcttgtatggtgcccgcatcacatttttatggttgaaacatgagtgtgcaactgtgcatgcgatgtctccatgttgtcttttgaactgaaatatttctccatttttatttgcagggttacgattccaaccatatgaatggctacttctggccgtttggagatcattcagcataataccacatagtctatattgttgtaatttcactcttatcttttttatgtacatttcatttaaatttacccggccaaatgtaaatgaaaaaaatatatataagaggttatgcaccaatgtatctaggttcagcatataatgtaagatcattgacgctgttgttgacc

SEQ ID NO: 28239 - DNA, 2823 bp, Oryza sativa
  ref <308>: DATABASE ACCESSION NUMBER: AK103681
  ref <309>: DATABASE ENTRY DATE: 2002-08-28
gaatctcatacctcgagtaaacagcggttacagcaaaatagcgattggattagcgctcttccccgtcctatccccaaaccgccgggcgcactcctccccgcctccacccctgaccgtgcctccccaccgccgttgggcgttccccaccccgtgtctacgcatcccaccggcgcccttccccccgcatccgtgcctcactaccgccgcgctttccccctctgcgggttcccctcgcgcgcgttcgcgcttcaccaccgtcgcgccttccccgctgcctcctcaattcctcgccgccaccggttccctactccgcctgcaaccgccaccatcggagccgtggatccatcgctgccatgaactccacctgcgatctggcgtgacgacaggagcagagctgcgactaccgggcttccatggtgctgctcaaggaggaaattccaagctgaaaagagcagagtaggatattcattctaaaggtgaacgctagcaatgtgaatcatctgagattgagaaggtcattacttttagaaatatttttataaaagtttgtatgcatggattgttctagacgttttgtttcgtagatttgtacaatttttaccaatagacattgttagttacctcacgtgcttcttgttgatgcaaattttgtttttctcctcccaccgcttggcccagcccacatatgtgactgactgtgtgacagtccctgtatatctttgtcattgttactactaaagacatgtggagaccgttatggactaaaaatactgcatactttagtttcaggatgaggccattctaatatttctgctgctacaagcccctatagtcctatacttctatgcaccatcacttgatactttggacatcattataagcaatggtattgcatgtagagtattctattgatattactggatatcatgctttcatacacatcacaaattcagatttatgcagtgataatattttccttgaacatgtcaagtttagttctatacacataattcatgataactgaatatgtaaacgtttttcctgcagtacaaacatgcaattgtttatgtacaaaggatttgtttttcagttttcattgataggaacccctgaattgaagaaatggctctggagtgcttatgttcttcccctgttggagctggttcttccttaggcctgtagcaatggtccacttcattgtcacatattcaaacaccatgtactcatgagatgctatggaactgtgacttcccctctggtcctgaggcctgattgttgcaggtgaaggtgagctctgttagaggaaaacacgtaaatgttttggcagaccacaaagctagaccatggatgccatcctgtggttggggcttatcctataggcaattagttcttgggctccactgtacttttgttcttaggctaattttcaatatcatattcccatgtggcagtagattattattacatggtagctcaaactaatgtgatgcagtttctgggtattccaatttgtgcatttcttaatttaatcatatatttgactggaatgggcatatatgtgactttgatagctagatatgtaaaaaagttttgagatttctggacatctttcatttgtcaatgcagttctatttcttttctactattgaaggcaagaaatataatttaccgtaccttttttatcagctatagtgtttttgttgttagcctttgaagctattgcttttaaagtgctgtaatcatctcgaaaaattattatttcagccagttgacattgcaagttaattaagtaaatttacatgtggcataaatcctttgtagcttgtttatcctgttatgataattacccatattttagataccatatttgaattgcactgccacaaggatcactgcatatctacaatattgttggtaagaaatatatacattgttaatactcttatttcatatactcgtagtaggagttatggcttcaatccatttcacctgtttggactggagagcattgtaatggactgagtatagacaacatgtctcaagattattgaaatgtacagagtatatatagaccacatgtccaaagataattgaagcaaggaacgatttgtttagacaggagagcactgtaaatgttgctgctctccaaatttcttctgtaatgtatctcttacactacctcatatgtatgtatattgcctaaagggacaatttaggcccatgtgttggatactgcctaacccaactttggcgatgaacatcaaggttcagagaaaaaaatgtttttgttttacagtgattcagcaggtggtatgcgaagttcagataatttcagcagggttttgttttaatgtgtatctgacaaatcacaacattcaattagataattttgataaaattgagaaaaacaatatgttctaagtctgtatatagaaaatggttttattagacgtgtattaaacgtgcttgaccattgcaagattttcttatagtaattttggcaaatttggaagctgattgattgacagctggaggtgtggttttgtttgcaggtgctcaaaccaggctgctttagggcttcaactagctcatccaagacgtcgcctctcacatctacctcaactgaaaaatgacaaaaaaatgctacaatttgtaaacagatttgcgtacttcagtaccatcagcgtgacagatgtcactgtgcctttattctgccttttggctcacaacttcatcactataactgcaaccttttcttgcagaaagatcatattgtcacagcaacctgatgatgttattagcaaccatccaatttatcaaccg

SEQ ID NO: 28240 - DNA, 2366 bp, Oryza sativa
  ref <308>: DATABASE ACCESSION NUMBER: AK103682
  ref <309>: DATABASE ENTRY DATE: 2002-08-28
ggtttgcaatttccatggcgccgccgccgtcgccgccgcacgccgcggcgcttccggcgtgggcggcggagaacgcgctcttccgccgccaccgccgcctccgcccgctcctcctccccgccgcttccctccgcgccttcgctcctcttctctcccactgcatcgtctccggcctcgcgcgcaaccccttcgtcgcctcgcgcctcctcgtcgcctcctcgcgcctctccctccggttctccctcctgctcctctcccacctccccgcctcctccctctcgcccttctccttcaactccctcatccgcgcctcgcctccccgtctcgccctccagctgttcgaccaaatgcgccaccgaggcgttaccacggatcgttacacgctcccgttcttgatccatgcctgttcttccggtgatcgtcctctctgcgaatccctgcacgggcaaagcctccgccttggttacagttccgtgctcttcacgcagacggcgctgatgaacgcctactttgcttgccggtttgaggttgccgctcgcagggtgtttgatgaaatgcaggcgaaggatgtggttgcatggacgggcatggtgtcgggatacgtggactctgggatgttccttcgaggtgtcgaggtatttcaggagatgagaagctgcgaggaggctgttaggcctaatgtggcaacggttgtgtcggttgcttctgcgtgtgctggactgggctccctggagtatgccaaagggttgcatgcatatgtggagaaggtggggttggaaggagagttgattgtgaagaattcgttgatcgatatgtatggaaagtgtggcagcattgagttagctcgtggcttgtttggtttgatgcctcagaaggacctgcattcatggacggccatgatttcagggttggcttctcatggccatggcaaagaggcagttgctttattctttagcatgaaagaggcgggagtattgccagattcgactacctttgttgtggttctttctgcctgtagccatgctggattggtggatgagggaatatctatcttcaattccatggagaatgagtacaaggtcacccctgatatcaagcattacggttgcatggtagatcttttcagcagggcagggcttattgcacgtggttatcagtttattgaaagcatgccttttgagccaaacttggcaattctcggggcattattgagtgcttgcagtatcaacaatgaattggatattggggaactagtgatcaagaggattgagtctgttcgctcagataaaggaggtgctggtgtgcttctgtccaacatttatgctaaccaaaacctgtggcatgaagttgattctcttagaaggaagataagagatgacactatttgcagaaagccacctggccagagtgtgattacatcagatgtttctttcatggcttcttgagcagggtttcaacacatccactctcaatgtagcttctctcattattgggcagatccgataacaaaacctacctcactgatccgccattgccgtcgctcttgattggcaaacgacacatttctgaagcagcatggaagcacatcaacttccccttctgtgttggaagaacaagaaatatgccagcttattcagtctccgtccaaaagctagtgcatactagagcgcctctactcccaggtgataatgctttcttgcagaaatactaccatgcataaattgttgacaaattgcaatgctggtgtttatgcattcagcaaagcgtgtgggggccggatgatgtcagtgaaagcttatttgctcctgcaagacccacccacatgccactcacgaaagaaatcaagggaggaatgtcagcggcagagaggcgcagaatcttacttttcaccggcaagtagttttgttggttattttggtcgtcaacactaatggctggtttttgcttactagtatatgatttggactcttgttggttgatgccggatggatggtgattggggtaaaggagcagctaccctggccctgcaacttccaccataacaaacatgagtagaggcagagcttccatgggttcttgggagaagcttctcttgtgcatgcactgaaccaacaagcatatcatatcggcttatatattattctcctgtaactttccagaatcttatctaacctggatatcacaacactgggcatatatctctttctccatgttgtggcaaaggaatctggggcaaggaaaagaagggagcaagttggggcctgtttagttcccaaacaaaatttttcacgtcgtcacatcgaatgtttggattttttacgttgtcacattgaatgtttgtacatatgcatgaagtattaaatgct

SEQ ID NO: 28241 - DNA, 1269 bp, Oryza sativa
  ref <308>: DATABASE ACCESSION NUMBER: AK103683
  ref <309>: DATABASE ENTRY DATE: 2002-08-28
tggcgatctcgtcggcgacgacgacgtcgaggtcgaggcggtggcggaggagcatggccgacggtcaggaggacgccgcgggtctggacgatgaccttgttctcgaggatgagctgcgaggtcgagaagagggcgaagacggcggcggcggcggcggcgaggaagaggaggaggacgacgtcgacggcctcgccagcttcctcgaatcggagatcctctctggatctagcggcgacgaccctaccggtcgggaggaaggggatgagaaggagaagcagttaggagatgatgcgaagaacaataagaggaagcaggagtctgaatctgatggggatagcggcagcggggaggagcagaacaagagggtgaggagagcaaaggggaaagagaaggacgtggcgtcggtggcgcctcagatcgatagcggcatgttctgcaatatcccgccggagttgttcttgcagatattcaagttcctctcatcggaggatctcatctcctgcgccctcgtctgccgcttcatgaacgtggttgcgtccgacgagaccctctggcgccgcctgtattgtatgcggtggggcctgtcatgcaataccaaactcagggagtgcgcttggaagaaactctacatccagcaagatagagaggatatggttgagtttgtgagaaatacacctacagaattcaaggagtattatatccagatgcaggcttcaaaaaggagtcaagctccccttccctctgaagtcaacgatgacaaggttattcttgataaaacaatagccgatcaggtgtctagctggaaaagcagcagaggcctcactggtgatgcggtcaaggggcattcttgttctgggaatacatgctcttacacccagattggtgatgcttatatttgtgagaagacaggccgtgttcatgtttgcgatgacgcttgtcgtgaatttgtcttggaccagtctagtgggctgctgctttgtacaatatctgggcactgctttgaaaggtggttgtgtcctgatgatgagtgggatgctgatgatgatactgatctacaacaagctggtatgaccgatgaagcagagccatttatgggttctggacgatttgcacgcgcatatcagttgggttacagctgtgctgatgagaaggaacttgaatatgccttgaggttttgctgataattgggattgcctaatcatactggcaacatgaaaccaagtttttggtttgcaagggaaattatggtcagaaggcttactgcccttc

SEQ ID NO: 28242 - DNA, 1789 bp, Oryza sativa
  ref <308>: DATABASE ACCESSION NUMBER: AK103684
  ref <309>: DATABASE ENTRY DATE: 2002-08-28
gagaagcgcaaaaggcaaaaccagagcccgctcacctgctgagaaacaccgcgcagaggcagagacaaacaacgtacggccgtgtagaactgtagatcgtatcgtccgagtcccccaagagtttcgggccatcaacccgtagtttggcgctcccttggttttacctgcaagacaaaagagctagcgaccgaatcgttcgacggcagaggcgtcatgggggcgccgagcagggaggatgaggaggcgaagaagatggaggccggcggcgacaccgtcggccagaagctcgacgccggggctctcttcgtccttcagtccaaagggtcatggctgcactgcgggtaccacctgacgacgtccatcgtggcgccaccgctgctgagcctgccgttcgcgttcgcgtcgctggggtgggcggcggggctcatctgcctcgtcatcggcgccgccgtgaccttctacccgtacaacctcatctccctcgtcctcgagcaccacgcgcagcaaggacgccgccagctccgcttcagggacatggccaccgatattttagggcctggatggggacgcttctacatcgggccgatccagttcctggtctgcttcggggcagtcgtcgcgtgcactctcctagccggtcagagcatggaggctatctacctgattgccaacccgggcggcacgatcaagctgtacgtgttcgtggcaatcttcggcgtcttcatgatgatcctggcgcagatgccgtcgttccactctctccgccacgttaacctcatctccctcgtgctgtgcctcgcctacagcttctgcgccgtcgccgcctgcatctaccttggaagctcaaagggagcgcccgagaaggactactcgatcgccggcgccaacacccgtgaccgcgtgttcggcgtgttcaacgccattgccgtcatcgccacgacgtacggcaatgggatcatccccgagatacaggcgacggtggcggcgccggtgacggggaagatgttcaaggggctgtgcctgtgctacgccgtggtggtgacgacgttcttcagcgtggccatctcggggtactgggcgttcggcaaccagtcgcagggcacgctcctgagcaacttcatggtgggcggcagggccgtcatcccggagtggctgctgctcatcatcgagctcttcacgctgctgcagctgtcggcggtggccgtggtgtacctgcagccgaccaacgaggtcctggagggcctcctgtccgaccccaaggccgggcagtacgccgcgaggaacgtcgcgccgcgggtgctctcccgcaccgccgccgtcgcgctgggcaccaccatcgcggccatggtgcccttcttcggcgacatgaacgcgctcatcggcgcattcggcttcctcccgctcgacttcgctgtgccggcggtgttctacaacgtgacgttcaagccgtccaagaagggcgccgtgttctggctcaacaccaccatcgccgtcgtgttctccgcgctcgctgtcgtcgcgtcagtcgccgcggtccggcagatcattctggacgccaatagctataaactgttcgcgaacgtgtgatgttattatgctttaactcttgacaaaggaacatcaatgcaggaagaagattttttttccttttatttttcttttttttaaaagaagtcatcttcccacttatgtttatattatatttattaatcatttattagcaactaaaaataatttatagcatgtctttagtgatttaaaaaaaaatactgtaaaataaactacaacg

SEQ ID NO: 28243 - DNA, 1051 bp, Oryza sativa
  ref <308>: DATABASE ACCESSION NUMBER: AK103685
  ref <309>: DATABASE ENTRY DATE: 2002-08-28
gaattagcagctatcagttgtttgatcgcaaatgaagcaaaccaaccaaattactccaaacggcaggaaaccctagccatctccgtctataaattagctcatatctggaagggctctcacactcgatcagtactgctcattttttcagttccactcgagctaagtgcggtacactgatcaacgatggtgtcctccaagatccactgcgccatggccgcgctgctccttgcaattctcctcccggtttctcatgcgtcggggaggtatgtagctccggctccggctcctgttcctgttcctccgccgccgcgcacctcgccgccgagccgtatccagccggtcgtcgtcgtccagggcacaatctactgcaagtcctgcaacctcagcggctacaaccgctacatggacgcgtctcccctaccaaatgcgacggcgcagctggtgtgctacggggacaaggtgctgaacatgacgagcacggcgacggacaagaacggctacttcctggtgatggtgtacaggctggacgtgttccggcggagcaggtgccgggtctacctgggctcgtcgccgtcgccgctgtgcgcggcgccgttcatcccgtcgaacaagtggctggggctcacgctggagagggagagggtggcgtcgctgcccaagggcgtccgcggcgtgtaccgccccaagagcacgctcatgttcggccccggcaccggcggcaagtgcccggccgccgccgccgccgacgccgccggcgtgccgatgatgtgatgagacgatcgatattgacatggagaattcgagatgtgcgttcacgcatatcgccaatttagttagtggtttggttggatgatgcatggtttaattaagttcgtgcacgttatttggaattaataatgggtagaaattagctagctcgtcttttggtcgatggagcatttgttgtaaccttgtagtagctcgtcgcttaggtttgcagtggttttagttcgctcgtcagtgtaatgtcatgagaaaaaaaattatctgagtacgtctatcctttcggtcg

SEQ ID NO: 28244 - DNA, 3527 bp, Oryza sativa
  ref <308>: DATABASE ACCESSION NUMBER: AK103686
  ref <309>: DATABASE ENTRY DATE: 2002-08-28
tagggagagctggaggacgagcttgatgccctcctcggaaccggtggcgctggcgcgcgtcggcgaggtgaggacgcgggagagagggaacgggagctcaacatgttcaggagcgggtcggcgccgccgactatagagggttcgctgaacgccatcagcgggctgctccgcggcggtggagaggcagccgttaccgttgcagcgattcccgacgctgagacgttgaacgggcatggtggtctcctctcggaggatgagctccgggctgacccggcctatctatcctactactactcgcatggcaatctgaacccaaggttgccaccgccggtgctatccaaggaggactggcggtccacacagagactgaaggcgggggtggttggaggaattggtgacggaaggaaggtatcgccggaggagactggacatgagccgacggtggggaggcctgtgttctcgcagaatgttggttttgatcaggaggaggctgcaaggaatgatgtaggtggtgctgcagagtgggtggatggtggaggtgatgggctgattggtttgtcgcttgggcggcagcgcagctttgctgatatccttcaggacaatattggccgcagaactcctgcttcagagcatccctctcgtgcagttagtcgcaattcttttcttgacaatcaggaactactaaattctgctgatagccagtactccatgcataatgatattctggaagcacaacgtgctgtcggaaatgtgcaaaatgtcagtggccttcccagtattaatgcatccgcatctcaaacttttgcatctgttctgggttcatctatttcaaggaatgccacaccagattctcattatgtccctagggtccctagtcctggccttccacctgtcggtgttaggattaattctaatgagaagaagctgaattgctcatcatcattcaacactgcatcttcaaaagcagttgagcctgatgatattttagctgcaatatcaaacatgaacatgtcaaaagatggtactttgggtgacagtaacagcattagtcaatcaaagttccaaagtgagataagtgaccaccagaatatttctcttgatccaaaagctctccaagttaataagaatcagcattcgctgatgttggaagctgatactgattatttgggtataccaccaatttcacaaccttcaaatccttccttttctgatattaacaagaatgtctcaggtttagcgaacataagaaattctactaacacacgtatagatggacacgcggagatgcaaaggtcttctactttgtctactcggtcatatcagaagtccccaacatcttccaatgcgagcccaggtggttctcctgctcaacaccagaatattgacaatataaattcagcctttttgaactatggactcggtgggtatccactcagcccgggtttgccttctatgatgatgaactgtatgggctctggcaatatgcctcctttgttcgaaagtgcagctgctgcatctgctatagcttcattcggggcagattcgagaaaccttggtaacaatattttgtcgtcacctaccttaagtctatctgatgtgcataaccttggcagaactggtaaccaaacagccacaggtcttttgtcgcctctttctgatccattttatgtccagtacttgaaggcaactcaatatgcagcacaaggaactgccaactgcagtgatccttccttggaaagaggtttcatgggtagtcaatatggtgatttaactgctgttcagaaagcttatattgaagctttgcttcagcagcagaaacaatatggaatgccacttggtaagtcaaccacgtcaaaccatggctattatggcaatttggcttttggcatgggcatggcataccctggaagccctttgggaagtcctgttgcttctccatctggtcctggcagtccacttagactcagtgagcggaatatgagatttccttctaacttgagaaacttgggtggctggaattctgatccaagtggctatatgaatgataacttcccatcttcactattggatgaattcaaaagtaataaggccagaagttttgaacttgctgagattgccagtcatgtggttgagttcagcgctgaccaatacggaagccgtttcatacagcaaaaacttgaaaccgcaacagttgaggaaaaagacatggtttttaaggagatcatgcctcaggctctctcgttgatgaccgatgtatttgggaactacgtggtgcagaagttctttgagcacgggagtgcagcacagcgtagggagctggctgatcaactatttggacatgtgttagctctcagccttcagatgtatggatgccgagttatccaaaaggcaatagaagtggttgacctggaccagaagacaaaaatggttactgagcttgatggccatatcatgagatgcgtgcgtgatcaaaatggaaaccatgttatccaaaaatgtattgaatgtgtaccggaagattcgattcagtttatcatctcaacattctatggtcaagttgttccattatccactcatccctatggctgcagagtcatacagagagtactggagcattgcactgatccaaaaacacaggaaatagtcatggatgaaatattgcaatctgtgtgcatgttggcacaagatcaatatggaaattatgttgttcagcatgttttggagcacgggaagcctcatgagcgatctgtcattattgaaaaactagctgggcagatcattcagatgagccaacagaaatttgcctcaaatgttgttgagaagtgtttaacatttggcggacctgcagagcgggaagttcttataaatgaaatgctcggaactactgacgagaatgagcctcttcaggccatgatgaaggatcagtttggtaactatgttgtacagaaagtactggagacttgtgatgatcagcagcgtgagttgatcctgtcacgagtaaaggttcatttaagtgcactgaagaaatatacatatgggaagcacatagttgcccgggtagaaaaacttgttgctgccggtgagaggaggattgggcttcaggcacaatatccttcataatggcatgaaaatgacaatgtacagctaaccatggctagccagatctaccctgtgtctcctgctttgggctgctacaagccaactttaaaaataaacgtgttgtactaagaagattgtacattttgtagtttttgcttatagtcatgtcaggggtgaggctcagagtttatttacctgatgacgctgcagagaagataggcgttttgtataagtcggttaggtgtaaaaagaggaagaaagtctatattttgcgatgagactgtacaaatctgcgatcctgagagagctaccagctgttcctgtttaggataagattttaatgatctcccatgtttatcactgatgaatgtactcaatactaatgtaattgttccagcttctgaaggcatgtgccttttacaaccttg

SEQ ID NO: 28245 - DNA, 1150 bp, Oryza sativa
  ref <308>: DATABASE ACCESSION NUMBER: AK103687
  ref <309>: DATABASE ENTRY DATE: 2002-08-28
ggcagtccgcagcccacggtttcgtgaccgtggacgggggcccaattggaaacccttcgatggagtcgtcgtcgtcggcggcggcggccgtcgacggagaggacggagggggcagcaagcgcagctggtacgcggtgggggagcgggcggtgctggtgccgtacctgcgggagcacgtgccgcggtaccacgggtggatgaaggatccggcgcttctggaggccaccgcgtcggagcccctctccctcgaccaggagttcgacgtccaccgctcctggaccctcgacccgctcaagcatacgttcatggtgctggacaaggacctgatcgagggagggttcgcggttggcgatccacacactgaagcgatggttggtgatgtaaacatctatatgaatgatcctgatgatttgcaacttgcagagatagagattatgattgctgaacacaagagtaccttttgttacagccgcggaaagggacttggtcaagaagcaatattaatcatgatggcatttgcagtagagaaatatggaattcacactttcagagcaaaagttaacgaatcaaatacagcatccttaaagctgttcagaaaattgggcttcaaggatgcttcgtatagttcagtgtttaaggaggtgacactggaggcacccgcaactgcactaccattggtttctcctctgaccataggaaactggtgacatctgagtatctgactaaatttccgaagcagttattggtgttcctcaactgggaaacaggaaactaactgcgttccatgctaaactgactactgtattatctgcccaacaatttgcttgggattagaataaacttgtgtaggcttctcgactgcaacgtgatgctgaacggtttgaacttttgatggtgtgatgttgtatatgtagggagctacccgtgatgtttttcaagagagattttcaaccacaaggtgtggaacaggttgcagtaatctctagaaagtttatgaaggcgatgcattgctcacactgtatacatatacatcgttatcatgcatggcacgagaacacttttcagttagccagaaatttgtgtgcattcgattcgagatctgtaacttgtactggtagtaacttgtaagccagaaatgcctacagatagc

SEQ ID NO: 28246 - DNA, 2703 bp, Oryza sativa
  ref <308>: DATABASE ACCESSION NUMBER: AK103688
  ref <309>: DATABASE ENTRY DATE: 2002-08-28
ggcttttcatccatccatccatcagagatcaggtagaacagtgagagtgaggtgcagaaaaatttgagctgaagctgaggatggcaacatccatgatcacctcgccgctggtggcgccggcccgggccaagggccttccgtccatctcccgccggggatcctccttcgccatcgtctgcagcggtgggaagaagatcaagacagcacaagtcattccatgcccatcatcaattacggacaagacagggatttttttgtctgctttcttcgaaaacaatgatttgactgaaatattcaaccttgatgcatctgcatctctagagttgtcaatgagctctgctattgctccaaagacccagccagcatgtgtctgactgagtgttcgcagataactaggatccgtgctgacaaaattttttgcaagagtggtggttctctttttcactattggatctaaaattctagggccatcttcaacagactcacatggtgatgattctggaactgatttgtgcagctctgtgacacgcgaggcattcatctccttaggatttgggccactatcacaaatctcctctctcaaatatgactttggattcatcgagccagattggaaatcacttctgtatgacctttttaaagcatcagatactccagccatcggtttgcagtctccaggatctttttgctcatacatgaccaccgcatgtgagaagttagggcgttcatgagattcatgagattgaggagggaaaatatgtaaggcaaaggagctgaatctaactacagcaaccctctgattgtcccagaggaaacgcatgaactttccccattcaatattctgacgatcgtcttcaggttcaggaagcagtgaaaatttcaggaaatcacactgctggtacaccttagttggcacaaacctaacaattgaccaaaccgagggcactttaactggaatatcacagactttggtgcggcatatgttcttagaatctttttgtaataatacatagttcaagccaccaccttgattttcatgtggcggctcattcaaatcaagtgtttcatccgccatctccttctcttcacccccgggagggatcggaggcgaggcggagacggaggcggcggccacggcggcgagcgcgcagcgggtgaggaggcggcggcggtgggattttgggcgcggcgaagcggggcgtgttttgtgctggcgatacgaaggagcattgaaggcggacgcccagcggggagagcgagcggctcgacgccgacggccatggcgctgctgatggatcccggggcgggaggccccctgacggagagcgagaaggccgacctggacgccatcgccgccatcaaggagtcggcggcggcagagtacaaggagaagggcaaccggctcgtcaagatgggccggagccactacgccgacgccgtcgactgctacaccaaggccattgcccagatggagccgctgccgccgccgccggtgccatcccccgacgcctccgtcctcttcgccaaccgcgcccacgtcaacctcctcctcggcaaccaccgccgcgccctcgacgacgccgcccgtgccgtccagctctctccctccaacgtcaaggcgtactaccgggcggcgaaagcggcgattgctctcggcttgctgccggaggcggcggccttctgccggcggggaatcgagcaggaccctgctaatgaggagctcaagaaattgctcgcacaagtggacgcccaacagagtgagcaagatcgtcatagggccaaggttgcgcaggccgtgtccgctgcgaaggatattgttgccgctgtagagaagagggggttgaagcttgggaaggcagcatatcaagagcttaccggtgtaaagaagccgaagttggatgagcggggtgtgcttcactggccagttcttctgctctacccggaggtcatgtcgagtgacttcatcgaggattttccggagacagatactttcgtgccccaccttgatgtcatgttctcagaaagttctccaccattaccatgggatgataaacacgcttacacacgggatgctgttgagttatattatcaggctggcgttggcacagttctgtccaaaagtgaaatattgaaaattcttttggaaggcactatggactcaaagtcacttcctgaaagcctgcttgatgaggaagatggagaaaatgatgatggcaagagcagcacaattacatcatcagataagggttctgtgaagtggatcaatgtaaaagagggaaaaactcttcaagaagtgctgcagcataaagacttcatcatccctgcaattcctgtgttctttgttgtttcaagaaaatccaccttttacagaaagttcaaggcaggaaactggtctttgccgtaatgcttagcgtgattcagtttggcacatttggaagatgattagtgcggtacgcgtatgatcagagaagaaaagctggccacctagtcattcttgtatggttttatatgttgctttatagaatgatgaggtgtgttctttcctgtatttggtacaattctcaagtattttcctatcctttgcttgagatgctcagtatgccgtttctggagaaacacactgagaatgtacttatgtatggacagctttgggcctgatttagcgcttggcacagtgatggtatcttgtacgccatatctacc

SEQ ID NO: 28247 - DNA, 911 bp, Oryza sativa
  ref <308>: DATABASE ACCESSION NUMBER: AK103689
  ref <309>: DATABASE ENTRY DATE: 2002-08-28
ggaagtcgccccctcgcctccatctctctcatctgccctcctcgactcgactcgactcccctccgccgccgccgccgccatcttcctcctccaccagaccaccaccaccaccaacaacaactcgtcgtcgcgtctgcctagctagggtttcccttctctacccaaccctaggaggaagatgagccgcagccttggtatcccagtgaagctgctgcacgaggcggcggggcacgtggtgaccgtggagctcaagaccggcgaggtgtaccgcggctccatggtcgagtgcgaggacaactggaactgccagctcgacaacatcaccttcaccgccaaggacggcaaggtctcccagctggagcacgtcttcatcagaggaagcagggtcaggttcatgatcatacccgacatgctcaagaacgcccccatgttcaagcgcctcgaggctaggattaggggtaaaggctcagctattggtgttggccgtggccgtgccgttgctatgcgtgctcgggctgctgctggtcgtggtggtggtccagttggacggggtggtgcacctcctgtgaggcggtagatttacgggcagctcattgtatgctgttatgatatggaggaagtccagggagtctttgtgttcatgatccaaaacgttggttcagcagccagagtgcatgtgagctaagcttatgtacctccatccagtttagtttgcctgtgtgcagaatggatggatgcatgccggtggtgttaactcgtaagcatgatgtattgcagcgaactttagtagctcggctcaagttttcataggtggggcagcgttttcatgtatgtagactagtgactcttgacttgtttcgttattaatccactgtaccctgctgcccgttgatatgaatgaatattgctgc

SEQ ID NO: 28248 - DNA, 1304 bp, Oryza sativa
  ref <308>: DATABASE ACCESSION NUMBER: AK103690
  ref <309>: DATABASE ENTRY DATE: 2002-08-28
tgggatttggtctggtttggttggaggttagctcgcctctgattgggttggttgggtggtcggcttcggtctcgaaccgcggcgacttctcctctttgggtttgggtttcgagggggccaatggaggagaggtacgaggcgttgaaggagctcggggccggcaacttcggggtggccaggctggtcagggacaagaggagcaaggagctcgtcgccgtcaagtacatcgagaggggcaagaagattgatgaaaatgtgcagagggagatcatcaatcataggtcgctccggcatcccaatatcattcggtttaaggaggtttgtttgacacccacacacctagccattgtcatggagtatgctgctggtggagaactctttgaacaaatctgcaccgcagggcgattcagcgaagacgaggcaaggtacttcttccagcagctaatatcaggtgtcagctactgtcattctctggaaatttgccaccgtgatcttaaacttgagaacaccctcctggatggaagcccaacacctcgtgtgaagatttgtgactttggttactcaaagtctgctttgctgcattcgaagccgaagtctacagttggtactccagcatacatagcgccagaagttctttcaagagaagaatatgatggcaaggtagcagacgtttggtcctgtggtgtgacactgtacgtgatgcttgtcggttcatacccgtttgaagatccaggtgatccgaggaatttccgcaaaacgatcagcagaattcttggcgtgcaatactccatcccggactacgtgagggtgtcttccgactgcaggcgccttctatctcaaatatttgttgccgatccttcaaagaggatcacgatccctgagataaagaagcacacgtggtttctgaagaatctgccaaaggagatatcggagagggagaaggccgactacaaggacacggacgccgcccctccgacgcaggccgtcgaggagatcatgcggatcatccaggaggccaaggtccccggcgacatggccgccgccgacccggcgctgctcgcggagctcgccgagctgaagagcgacgacgaagaggaggccgccgatgagtatgacacctactgaccatccatgatccatatgcatccatggtcgttgtgctgcagctgtaaatatgatccggaatatacgtgatcgccagaccaaatgatatgcgtattctgatgcattttctgccgtgtatactctgcaccggattttcgtgcagcgtaaataataaagaaaaaaaataattatttgtttgc

SEQ ID NO: 28249 - DNA, 3637 bp, Oryza sativa
  ref <308>: DATABASE ACCESSION NUMBER: AK103691
  ref <309>: DATABASE ENTRY DATE: 2002-08-28
gtctttcccttttcgtctctctgccttccttcttcttcctcttcttcttccttgtgatcgaaacttccaacccaaaccccccaccaaatcgcaaatctcccaccacacattgctttctcgaaatctctccgatcccccccggcgaatcccgatcgcgcgtcggcggcggcggtggtcgactggcgaagtggaggggttttgaggaggcgcggccggggggcattggtgggattttttcggcgcgcgtcgcgacggaattaaaggagatacgaagtttgttgcatttagatgacataagacagagatgaaagtcggcgctcttttgacctcagctggaatcaacattagcctctgtatactttttttgtcactgtattccgttctgaggaagcaaccgcaaaatgttaaggtctattttggaagaaggattgctgaggagaatagtaggctcagggaggcttttattttggagagatttgttccatccgctagctggattttgagaagtcttcgatgcacggaggatgaactcttagctactgctgggttggatgcagttgtcttcaataggattcttgtatttaggtatgtacacaattacttgattctctgttccactttaatattttttatcttatttgaagtttatatagatgtttctttttatgctgtttctttgtgtgccttgagagtttagaccatcaggaatcaacttatactttcacttaaaaggttcgccgtggcgctttgaaaatgaaaatcaagctaaatacgattatttaaactagtggtttttaatctctaattgttgactggtatgatgagtcatttcctctgtcaaataggataggtaaaaaaaaacaaaataatatgggaatcaaataacttcaaaaaagttaatgataataaaaaatcttatgccaaagttgataatgtgcataccaacattcatcggggtctcacatggtatgccacataaagttattactttatatgtattcatttgcctactgcattctcactatattacttaagtcttcaattttggttttatatccaagatatgcttatgtgtttttcttttcaatagcatacgcatattctccttagccgctttcctttgtgtacttggagttcttccactgaattattttggacaagatatgctccatgtacggattccttcagcatcattggagacatttacaattggaaatatgcaagagagatcaagatggtgagctatggagcctctcttacatgattatgttcgaactttaagagttcaaatgttaaatacaacatcttatgtatttatcttcagtccgtaactgattttatactgtctgctggtgtggtgttatgtgcaatctgaagtaactagttcacgtttattgcatgcactgataactgaattgtttaggcatacattatagaaagtcatagatacctcttggattctttttacacattggctataactgcaggctctgggtccattgtgttgcactgtacatcatatctggtgtggcttgccttcttctataccttgagtacaagcatattgctaggctgaggttacttcatgtttctcgagcatcgaccaatcctagccattttactgtgcttgttcgtggagtaccaaaatcaactaaagaatcaattagttgcactgttgagagtttcttcaccaagtatcatgtgtcgagttacctttctcatcagattatttataaagtcgggaaacttcggaagattgtgactggtgcaaagaaggcttataagaaatttaaacatttcaagggcaccacagttgatcagagatgcggaccaattacatatagatgtggtctttgtggagcttcatcaaagtcgttcgagttgctgcctgttgaacctgagcaagagatgaaaaaacatgatgtgaaagattcagagttgagcttacctgataaggattgtggtgctgcttttgtatttttcaaaactcggtatgcagccctggtcgtatcagaaattgttcagacatccaatcctatggaatgggttactagtcttgctccagatcgagatgacgtatattggtcaaatctttggttaccctacaagcagctttggattcgccgtatagttacactttcgggttctattgtttttatgttcctgtttctcatacctgtgacatttatacaaggtctaactcagttggagcagctgcagcaaaggctccctttcctaaatggcatattaaaaaagaagtacataacccagctagtgaccggataccttcccagtgtcatcttgcaaatatttttatacactgttcccccaaccatgatgtttttttctacattagaaggacccgtgtcccacagtgaaaggaagagaagtgcctgctgtaaagtattatacttcactatttggaatgtattctttgtgaatgtcctatcaggttctgcaattagccaagtgaatgcgttatcaagcccaaaggacattcctatggtgcttgctagagcggtacctgtacaggctacattctttaccacctatgtactgacttctggttgggctagtttatcatcagaacttatgcaactctttggtctcacatggaactttataatgaagtatgttttgagaatgaaagaggatagctactttgtcccgtcatttccctatcatactgaagtgccaaaagttctgttgtttggactactgggattcacatgctctgtattagcacctctcatcttgccctttttactggtgtacttttttcttggttatgttgtgtaccgcaaccagttcctcaatgtttattgcacgaaatacgacacaggtggtctgtattggccgattgctcactatacaacaatcttctctattgtgctcacccagatcatctgtcttggtgtctttgggcttaaagaatccccagtagctgcaggcttcactgtacctctcatcatcctcactcttttattcaaccagtattgcagcaatcgtcttcggccattattcaagactctccctgcacaggatttaattgacatggacagggaggacgagcaatcgggaagaatggatgacattcaccaccgtcttcattctgcttactgccagtttgctgacactgacgacatacctctgaaaggagttcacgttgacagagatgcagatgcaagcggaagttccggtgaatctagctgcaaagaagacaccaaccaacccacaaccagtgacatttctcaccctacactggaaggactccctgtaaaccggctacggcatgcagtgaggtcgctcagttccatcatcaggttacagaagagaggcctgtcaccacagcccgctggaccctccgccgatgtaaatccgcaaactgcataagttttgcagataggacatacatacagtgaccaaagaagcatacaaatgaatatacaaaaaaaaaaggcatagagatgcatataaaagaaaagaagcatagaaatgaaagagagcgccatctgtcctagttgctagggtaaaattttgtttgttttaagttttaactagtgcctgagcaacttgtgtcagatccttttggccatacaaaagttctgattcttcaattgattggtgatacttttgg

SEQ ID NO: 28250 - DNA, 788 bp, Oryza sativa
  ref <308>: DATABASE ACCESSION NUMBER: AK103692
  ref <309>: DATABASE ENTRY DATE: 2002-08-28
gaggaacccaagaggagatcggaagaaagagagagagattgaggaggaggaggaggaggagccatggctgcggtggtgcgtggcgtgttgaacggcatccgggagaagggcctctccaacttcctccgccatgcccgcgacgaaggctacttcaaatgccttctggatggaaacctcttgcaaactaaaatccacaatatcggcgccacacttgtaggagtagacaagttcggcaacaaatattatgaaaaactacatgacactcagtatggaaggcacaggtgggtagaatatgcagagaaagggcgctacaatgcatcccaagtgccccctgaatggcatggatggctgcaccacatcaccgacagcactggggacgagctactggagcagaatgctaaagcgtacatcgtggatcacaaggagaacttctccggcgagggtgaggaactgatctaccactccaaggggcatgctctaaacccaggacaaagggactggacgaggtaccagccgtgggaaccaaagaaagaagaggcaacctaattaaggcactgatccagtgtgtcatttgatttggtgtctaaaacaacagtcagccggctcggtgggctgaatctgaataatgttgtcttgaggattgtttacctgagaatggaagaacatgatggagttttaattcccatatgatatgtttgtttatttttgatggagcggagcgtcgtccccattgaatggacgagggttgaatgctggtttgctgaaatgaaatattgtcgattgtctgg

SEQ ID NO: 28251 - DNA, 1673 bp, Oryza sativa
  ref <308>: DATABASE ACCESSION NUMBER: AK103693
  ref <309>: DATABASE ENTRY DATE: 2002-08-28
gaaagcgagagacagctcatcgcccattcgccctcgcgccgcgccgcgccgcccgccgccgcctcgccttgcctcctccgccgccaccggcgctagagccgacgctgctgcagcggagagtgcggtgccctcctcctcctcctcccccgcgcgcgcggcggcggcggcgggggtttccggagttaatgcgcccgtgaagaggcggccgcgtcggcgtcggcggagagagggagagggagagcgagtcttttgtgcgggtggttggggcgtgggcggtggcgtgttcaaggcggggagctacgtttcctgccggaggagatggggggttccaaggcggaggagaagcccgccggcggcggcggcggcggcgaggattggtggtgctaccagttcggcaacaaggacgcattgattgtgaagtcctctaagaaatcacccctcgcattgagaatggttgttttcgctatgactatgatctgcgggatatttatctgcacgatgtgtatgaagcaactaggaagtgatagcttgtctagaatagtgaagatcgaggttgcagaacagctatgcaataagtctgcaatcctgcattcagaggttcactttgtgcattacccacaaccgataacttatagcaggagtgaatgcaagtgtacacctgtccggttcttcgcgattatctcgtcacaacgttctggaagtggctggtttgaaactcttcttaacagccatatgaatgttagctccaatggtgaaattttctcttcaaaagaaaggagaagtaacatttcatctataacaaagacactggataaggtgtacaatttggattggaatagtagtgcttctaagaatgaatgcactgctgctgttggcttaaaatggatgcttaatcagggtcttgtggcaaatcatgctgatatagctgactacttcaatcgaagaggagtctctgcaatatttctcttcaggtggaacctcctccgtcagttggtatctcaacttgcgaataatcatgacagatacctcaagcagttgaatggaacgcacaaggcccatgttcacacggcatatgaggccagtatacttgcaagatataagcccagactcaacacaacatcattaatacggagtctgaaacaagtagatgattacacccgtgatgctcttgaaaatctaaagagtatcaaccacattactatctactatgaggatctcatccgaaatagaacaaaacttcttgatgtcctggatttcctcaaagtgccaaggagcaaactagtcagccgacacgtgaagatacacaccaaaccactttcggagcaaattgaaaattgggatgaagtctacaatgctctaaatggcactcagtatgagagcttcttgaatgctgactacagaatatgacagtgtgccttcacactccctgtatagatatcctttttctggttacatttctttttaaaatagctggccttgatgtgcctggcgaaaattttgatggtgcattgccacggttgcccacgagtgttctttgataggttcactaattgtcatagcagggttttgttttttgttttatgttttctgtaactgatatgctcaggattctaatcttgtgtattgcagtgcttattcttctcccatgttaatgatatgcatgtttccagctc

SEQ ID NO: 28252 - DNA, 1238 bp, Oryza sativa
  ref <308>: DATABASE ACCESSION NUMBER: AK103694
  ref <309>: DATABASE ENTRY DATE: 2002-08-28
acttgagcctctcttccttccccttcctcttcccatcgcgatacctcctccttcccgtcgaaccctctccagtctccactccactgaatcctcccacctcggctcgaaggaatggcaagcggtagtgaagctgagaagtcacctgaggttgtgctggagtggcctaagaaggacaagaagaggcttctacatgctgtttaccgtgttggagatttggatcgcaccattaaatgttacacagaatgctttggaatgaaattactgaggaaaagagatgtgcctgaagagaaatatacgaatgcatttcttgggtttggacctgaggacaccaactttgcacttgaattgacatacaattatggtgttgataagtacgacattggagcaggatttgggcatttcgctattgcaactgaggacgtgtacaaattggctgagaaaattaaatccagttgttgctgcaagatcactcgtgaacctggtcctgtcaagggaggatccactgtgattgcctttgcacaggatcctgacggttacatgtttgagcttatccagaggggtccaacacctgagcctctttgccaagttatgcttcgtgtgggtgaccttgatcgctccatcaagttctacgagaaggcccttggtatgaagctgctgaggaagaaggatgtacctgactataagtataccattgccatgttgggctatgctgatgaggataagacaactgttattgagttgacatacaactatggtgtcacagaatataccaagggcaacgcatatgctcaggttgctattggcactgaagatgtctacaagagtgctgaggctgttgagttggttacaaaagaactagggggaaagattttgcggcagccaggtccactaccagggctcaacacaaagattgcctctttccttgaccctgatggctggaaagtggttttggttgataacgccgacttcctgaaggaactccagtgaagatgagagatggcccaagttctgtgctaggaggcaaagcacaaaccttatgtagtaatgccagtgcaatgtaataaagaagcggtttccgctctatgaacaagaataaattctggcacatgcgttgtgcttatgctagtactgtctgggtttggctgtaaatccgctatgcattgctacctgtatcagcatgactgttggagtgttgttgataacaaggaccagtttgtgcagttgagctgagtttcctg

SEQ ID NO: 28253 - DNA, 3039 bp, Oryza sativa
  ref <308>: DATABASE ACCESSION NUMBER: AK103695
  ref <309>: DATABASE ENTRY DATE: 2002-08-28
gactccactccccttccctacccgcccccgtcgccgtcctccttttcccgcgaatccgcgatcttccgccgcgcgcgtcactcgtcgacccccctaagccgccgccgggcgatggcggcgctggacccaccgagcgagctgttggtgacgccgaagacggcgaggaaggacgaggccgcctcctgcaatgcggccaccccgcccaagccctcgccggtgtcccccgaggagatgcgcgcggtggcgcgcaagttcgccgagcaacccgtacagaaccccgacgacggtgtctgggctgtcctgacggccatctccaagaatgctcgcctgcgccctgagggaatgaacattcttttaagcgccgatgagcactacataggccgtgccgttcaggaatccagcttcaagatttcctctttgcagatcagtgggaaacattgcaagatatatagggacactgtgttgggggagcttaaccgcaatgaacctgtacctgttttcctcaaggactcgagctcaaatgggacattcatcaactggaccaggcttaagaaaatttcacctccaaccaagcttaatcacggggacattatatcatttgtctccgctcctcatgacaatacttcctttgcatttgtctaccgtgaagttaatgctgtcagtcgtgcagagaatgaagttaccatccttaaaaggaagtcagaggatattcattctgaaagaaagagactaaaaggtcttgggattggttcctctgatggtcctgtttcactagatgatgttcgtcggctagagaaatctaatgctgagctcagggaacaacttgaggaacatgttgtcacaattgagactttgagaactcaaattaaaatatctgaagcacagcatgaaaaggaattgaaggagttgaaagagattacatcgagtacttatgttgatcaagctaaatctcttcagcaaacattagagtacaagcagaaacaaatagattcacttagtacatcaaatacagagttacagaattcaataaaagatctcgatgagaggcttagcgcatataagcaatcacgtgctgaggctgatgaggtaattcagagccagaaatcaaatatatgtgagcttgaggcacagctaagtgaggagagagacttgcgaagagaggagcgtgataaggctgcagaagacttaaagtctgcactgcataaagtgaatgcagaagctcaagaagaaatcaagagacaagctgaggctcaccttagacaacaacgggaacagaaagaagttattagcaagcttcaggaatcagaaaaggaaatccgtttgcttgtggaaacattgagatctaagctggaagatactcgagagaaccttgtcacatctgagaaaaaagcaagagagctggaagctcaacttcaggatgaacagcttgtatccgccaacaatcagaagaaatcagataaactggaaatggatctgagaaaagtgaagaaagaacttgaacacgagaaggctgctcgggaagaagcatgggcaaaggtctcagctcttgagcttgaaatagctgctacaattagagatctatcaatcgagaaacagaggtatcaaggagcaagagagagaattattttacgggagactcagctgcgtgctttctattcaactacagaggaaatatcttctctgtttgcaaaacagcaggaacagcttaaagcaatgcagagaactctggaggatgaagagaattatgagaacagtatcatgggtgatgatctcaataaagtgccactggcaactgtaactgctgacgatgcccgcacgagagtaaactactcaaaaaatacaatggaagcttctggtgcttcaacagagaatacccaggcaagtgaacaaagttcaagtgatgattccaaggagactgaacaacaggatgattttaccagagttgaaggggcaaacactcaagaggtagagtgcaatagtccagaaatggcaacagagagattcaggtctgattctcatggtgatctggctgctacagctcctgagctagagccaacagatactgagcaagttcccgagacagaaagccgagctggtaatgttggctgtggtgatcacaattcagctcttcaaagatttagtgaaatgggaggtgataccatgcagctagatgatgaagtgcaaccacaagagaatgatgagtccatcttgatttgcaaagatagagggcaaccacaaggaaatgaggaagcctcgttaaccctcaaagatggcattggtcactattctgaagaaaaacttgaggttaactgttctgagagaaaacacgaggatacccagaccagaaccattggtacagctgatttgttggcctcagaagttgctggtagctgggcagtggaaacaggtccatctgtcaatggggagaatgagtctcctaggagcttgggggagactacagaccatgccggggagcaggatgaaaatgtcagagggagctcagcagctgatgctttagtgaactctgatggacaggctgctgggagccagagtaatattgatcatgtcatcagtaaaataaccgatcatcatcgtgttcttaatgctatgatcgaaattgttgatccagatttcagaaagcaactcccaggaagtggtgttggaaaagatgatctgatgtctgatgcggagactgaggaaggcagtgaggcgaatgatacagatagcgacagtgaggaggccatggttgaagattctgttggataggctataaggcagctacttttcctcgtaaatatcttaaccattttaccctgcactcgggtatgagcttgtaccatttttttcaatgtgcatttttttttcatttcatttcaaatttctctttatcattttcgtatgacctggcataactagtttttattgtgaatggttggcaatggcaattttatgtaatgttccccacattcctttttgtcgataaatacaagtgtatcttaacgaaccggggtactcaaaatactcgacatagatattagt

SEQ ID NO: 28254 - DNA, 3458 bp, Oryza sativa
  ref <308>: DATABASE ACCESSION NUMBER: AK103696
  ref <309>: DATABASE ENTRY DATE: 2002-08-28
ggggcgccgccgccgccgccgcctcctcctcgcagacagaaatggcgactccgccgccgcctcgtaccggagacagaaatggcgacgcctccccatgttggaagtatctattccttcctttggatcgtgtgcaggtcagcatcttccaagctcctgtacctacctggctagctggctccatctcggactcgatccaaacagggagaaagacaagggttaaagtgcgcagattcgccgtggggggacatggcgcactgtcaccgatagcgccaaatttggccactcacttagtcacttgtatatgaactgggcgacgactgactcaccgcaccttccgccccggcggctcgagcgagcagggcagtgcgctacctccaccctgaccctgacaagactttagttgactccatagagattgctcgccgtgttgttccgatctcttgttggcgatcgctgattgcttcggatttcttgcaaccataaatattatagggttgcctagttggaaagcaaataggatatggagaatcaatcaggacaaccgcagtacgccatggctgaccaaggattccaccctttctcaccattcatgttggcgccttctactaccatgcagcagcatgtgggctcctcatccagcacgccagtaattcaagtggcagctctgccgtctcatgcatattatggtaacatagatgtagctgatgatggattccactggaggatgtgtgggcagagtacaattcagggtggattgtgtccaacggtattctcctatcaatgtgccctaccaaactgcggggtccggaaatcgataacacgctctgcagatggacagaccatcgaaacagtttgcaagggctgtcacaaccacccacgacagtcactaaggtggctcggagatggttcagagcgattggagcctatttctcaagaaattgtgctacttgaggcatcagatgcctcaggagctgctggtggaccttcagtgcctgggacgggaaatgggcacggccagtcgtctggttcaagtgatagctgcagagacgatgatggtgatttaggaattgatgggaatgcttctgttggtgatgccaatgcagtgaaaagcggacaggtcccagctccagccaaagagatcactgtgcactctgcatgtgaggttgatattttgaataacagtgttcgtcatgaaaacccacaaccaaggaaaaaggtgcgatctaagtccacggtgtgggaggaatttgaagttgtgttaattgatggaaaggttcaaaccgctgaatgtaagcattgtaaaaaaaggcctcagtgcaaaaacttcaggaggaaccagccacctaatacgacacttgaagatctgtcctgcacagcatggaaccagtagggttcagaaaaaatgttcttcactggctgatctacctattgtaaagagctggaaagatgatcaagaaagttctcttgacgagattattaggtcaatagtctcaaacctttgccccttctctgccatgtacagtgcaagctttgcacagtttctagctggtagaaatccggttcttaacatggtgcagcaagctaccgttgaggaaaagtttcttagtgtttttcataacgaaaagatgaagctgaaggagaaaataacagctacacctgggggagttttcctgtcactaggcgagtggcagcggttattttacattcaagtaagagttgcttgtttaactgtgcattttatagatgaggactggaagatcaatagaaaaacaataagatgttctctttcagtatttggcaagtctgatattttaagcttgtacccgcattggcaatctgacattgttcttgctgagaaggtgttaaaggaagtagttcaagattggggtcttttggataagcttttaggagtgacactacagcgatcagtggataagaaagctccattacacttggaggatgacattacaggaaggaactaccttctttccaaatgcaggctattaagtatcccttgtatggtagatgcccttcatgaacttatggactccaccgttttggacatggaatcgacatggtctcattacatgacaagctccccagagcgtaagcagaaatatcaggaaattctatcacagctgcatctagaccgtccctctctcggatcaaaaggctggtacttcacattctatttttctgaggctgctttgcagttcatcaaatcatttccacttccagatgctaaaccaaattgccaatcaggtccttgggagccatcttttgatgatctcgaagcaacagagaactattgcaagattgcaaggtcagcctatcgtgtaataaaagtagtttctggtcctcacaatatgacatttaattcatacttccatgtgatctggagcttgagagcagctatacaagaactgcctagtataaaaaatattggaagagtttttgatgtggcatatatgcagaagaaatttgacagaaattggaagaagtggtacttgtggctgtcgatagctgtggttctagatcccagatataaactcggattcactgaactttgcttcaggcaagcttttagccatgttgctggaatgtatttctccgaggtgcgtgcaaagcttcatgagctatacattcaatactcttatgtgaatgagcaaagtaaggagatattggatcacaagaacaattgttcagatatacaaattagtgctccattacataacaagggccagaattctaccacagcccaagctgcagttgaggaattcaaagagctttatgaatatcttggtgggggactctgtactcaagacgattcttttgatattctgaaatggtggaggggtaactcatctgcatacccaactcttgctatgatggcacgcgatattttagcaatacctggatgtgcagtttctactgaatctgcatttgatcagtgtgatcaacgggcggagctatttgatggaaaattgcgacctgagacaacagaagcacttatatgtgcccaaagctggatcaaatcatctggaacagctgatgcggatgatggaaataagaacacttcgttttaacctgcagtgacctacgttgggtacatccagctccgttggtttgttacagttgttcagctggatttcctgtttcccatatatctctgcttctgcatgatcaataacacctgcagcagttctactctctgcttttcaccgggccatgattatgagatcaggttttactgcactcgctggagaaattaaaagtcttttatctatataagcaaaggattgtgttttgtttggaaaatactcgtatattttcctgagctgttattatcgttcaatattaccttacaatggtttgtaatcatgatatgaggaagaatgtaaaacacaatgtcagtataatttcaaatggctgtgcatgttgagccagtaatgtttgtg

SEQ ID NO: 28255 - DNA, 1367 bp, Oryza sativa
  ref <308>: DATABASE ACCESSION NUMBER: AK103697
  ref <309>: DATABASE ENTRY DATE: 2002-08-28
ggtattcgcgcacggaaacccacagtcgattctccggtgagaggattgtttcggcggcgaggtcgggggcatggggaacagcatatacaggttcctgtgcggcctctgctcgccgtcgccggagtaccagccgcacggcgcgcaccccgccgtcgcggcgctcggccgggacatccagcagttcgaggccacctcgcaggttccggatgggctgagccggcatgtagtctcctccaagaaagcgcaggctaattggtacaagaagctgatagtgacatggaagaaagccaggccgacgccgaggacgccggaggaagccgcgcggctcgtcgtcaccacgctgaagaatcatcagaaagcagacgtcgagggattcttggttttctatggccttccaattccaaatgcagcagcaagtacccctgcgcctcacactgcacacgtcccaaaacctcaaggttgcgagtttgagctgcacactctcccggtcgatgcaaaggccgtggccgacggcgacacgatcaccgtgtacattgacacggccgatcctcgggagtccggcaatgttccccgtgaaattcagaaagcggcggcggaacggacaagggcgcgcgcggccagggattatcagaaggccgacgggttgcagaagatgatagctgatgcaggatataggcaagttcctaatgcgagaggcgagggagtgctcgcaaagaagtacaggatcaggctaagggggattgatgcgccggagagcgccatgccgtacggcaaggaggcaaaagaggcgcttctgaaaatggtgcagggaaagagcctgaaggtctatgtgtatgatgaggaccggtatggtagatgcgtcggagatatctactgcgatggggtgtttgtgcaggagcaaatgttgaagaaaggatgtgcatggcactatactgcctatgaccaacgaccagagctggccaagtgggagaaacaggcgcaatctggcaggaagggcttgtgggcggcgtcaaggccacagaagccatgggaatggaggagggacaagcgcaatggtacagcatgaacatgaaccatgaacaacagatgattgatttataatattagctctttcagacttgtagcccggagcaatatatgctttacaccacagtagaagtgtagatcgtgtagtgtgtacactagtacatcggcagaggggttgtcaaggaagaagagggcgttgattggtgtgtgtactataattgattaagtgcatatcgtgatttgtgtgttgtattgtatttgagaattgcattgttgtaaaactgaaactggtagaggatgtccaagtgaattcaatgttgttcaggaacttcataaagctg

SEQ ID NO: 28256 - DNA, 4019 bp, Oryza sativa
  ref <308>: DATABASE ACCESSION NUMBER: AK103698
  ref <309>: DATABASE ENTRY DATE: 2002-08-28
gaccgacggcggcacgcgcggcgcccgctgcccggcggcgcacacgtcgcgcgttgccgcggccgcctcggagcgctctaccgccggtttgcaccctgccaaaccggagacgcgggaggagaggagaggagaggagaggagaggagagagagagagagcgcgcaacgcgtccttcgttttttcatcaggcggacaaccttcttcttatgctcctgttgggtatgaagtaatcatcatctatctctattactgtgattctggaaggccatgttctgacaagcatgttataagagggcatttcaagatggtcataactgttagacaggaaacttcatttaggtcagctggcaagtagctcatatcactgcactggaagatctccaatgtttgcagagtgactggaagctttactggaaaagaataaaagttggcacaattagtgatggtaagatgtatcagtgaggatagttcatttagctcttgaagaagaggattgattagattggagcatgaagtgatgcgcaggtcttcaagcatggggggtagcaagctatgctgctctgatggtgccagcatctcgcaatcataaatgtggagacttttaagagcagtcagggatctgaatccttcagctggcagatgagttagctctgcgcacttagtaatggttaattgctggagagagaataatttctggctaagcaatccattctgtaaggatatgagatttgggcactgatgaatctgtaaacatgctaatgatgatgaaaattgacagtttggtacatggacttctggaagaatagtgaaccctgtttctgaaattatgagctttactaatgtcggtggtaagggcgggaattctgttacttgtgggcagtcaatcacttcaagttctgtgagggatggaagcaactcaccatcttgaaaagaaacccatctttggagattaaccatgtcttcaattacaagttccttcagtgacggaaaccccttaacctcatcgctgcctgaaaactcttggttgatttgaataatggcaggaaaacccccaatgtctaagaacttgagtagaggtagctcccctagtgctggtagaatcgaacaatttgtacagtcagacaggtgaatagtttgcaagtgacaaagtctgcttaaccactttggaaagtagaatcccacaaatcccttgaccgtcagctccctgagttcgcaatgtggttggagctgttcaagtatctctttctcttgatttgcttcttctgaagttaggtgcctcctgtcggaccataccaggtctagaatcctgatgcgtgtcttcttgcttagtaaagcttcacctgcctcttctgcactatctacagcctcaagattcttaatacatatacgacctccgatactcatcattgttttcaattcactgatcttgtatcctttgtcgttatgaacaacaaattcctccaactgttggaggcaagtcaagttccctattcttgcaatgccagtgatcaaatctattcgtgcttctagccatcgaagatttacaagattggttatgctttctgggatgcactctaatacatggcagtttttcaacttaagtgtttgcaagttgaagagcctaccaattgatgaaggcaacacagttataccagtgcctgaaagattcaaataacggagcatttttaggttcccgatggggtctggcaactcagtaatgtctcgccggttcaattcaagcacatggaggtaccttaacatgaggaacagatcactgggaatagggcttgtccttgatttatatccatttaatagtagaagtgtgcgtgctctcttaaatccaagaaagtcttcaaatgaagtccggcttctattgtgacaagagaatgacaggtgcctggaacttcttgaagtgctgctgctgtttggagggtcatccaatcttaagcattcatccattgagaccgactgtgcaaggtcatgcatggcgtcatgcatcacatatcctcctttgtgatgttggaagaaggatctgcttaatagttcatcaaaatagctgctcccaagttcctcaattgttctccttcctggagactgaatgaacccaagggccatccatatttgcaccaaggtttctttttcgaacacataatctttatggaagactgagcaaaacgcaaaacatcgcttcaatatggcaggcaaatgattgtaactcagcctcagtgctggtaatatattgttcttatctaatgcaagtgggaggcctttcaacttcttcacaatttccttgcctataatttctaaatgtgggtgcaaactggagtcaccatcagcaaatgcatagctcctgaacaagttccagcaatcattttcagataactgctttagaaaggtcctcattccaaacatcatcaagtactagaagaaatcttttaccttccagcttttttgagagatcttcttgaagcaagttcatgttggtcgtgaccgatgagaacccactggcaactgattcaatggtttccttggtaagcttcatttcgtcaaaattttcagaaacgcacagccacacccgtaactggaagtactcctttactcttggatcattgtagacaagctgtgttagagttgtcttccctagtccccccatacccactatgggaagaacagaaacgttggcatggttggagttgttcggagtcaacagcatcttcacaatgttctctttatcttcttctctcccaaacacacttgagccatcaattagtgaactggtcttcggcctctctttgatctcttctctgtccatggtactgctcatatcgggcccaataagctgtctttctttcacaagcctgtcgatcttctcctcgatcttccttatttgttgcacaatcttgtggttggaaaaacagttgttcaaccaaaggcaacagaaactgcttctaaccttgctcagatggcgactgcgggacgagccttctagttcagattggagggtctcagctgcatattcatcgagcaagtcatccatctcatatgcgacatccttaagcttggcaagccagcttcgtgccgccctatccttaagttgccgagcctcagcatcttcgacatgcgcttgaatcgttgacagactgctggataacttctgcagctcctcagctatgtcttgggggaatttcagctcacctatagcagcagcaatcactttatcaaaaagtgcttgcatgaaggcagacagaacagcttctccgatcaccatgttcttcggttgggtatgctaattggaacggaagggacctgctgtaacatctctcctggactaccgacgatctgatcggtggcttctatgatttgtatgcttaataggatcatgacatctgaggatagggtttggcccatatgagacatcctggtggcgaaaacaacatccgtccgatataaattaccaaaggagacaagctgtcgattccccagcgttatgtgtaatattcaaatgaactcaagtgctgtcgatgcaagcttggcaatttcctagaaagaccagccaaagcaacatcaaatgctgttcgaaaagaagcacagcttcagcaggcctgctacagtcatgtgcaaatatgtctcgcatcctttctcttgtgttcagtcaaccatggctgcccggcatcgaatggaaaattttgaaaagaaccgttcagaagatctctttccactagatatctttgattaaaattttccaggttcgcacaagtcgcagttaggtgggttagcatatagtatttgatgaaagtgcgagctcttcgtgccagtccttgaaaaaaaagaagaagaagcactgtatgattgatgaagcaaagggaatgttctttgcaaaacaaaaggaaaaaggggtacttcatttgagctcgacgttggtcgttggtaagttactgatacaagttcggttctgtaatctgtatacgcttcttttatgtatgatttctacaaatatataaaatacagtttatgactct

SEQ ID NO: 28257 - DNA, 1040 bp, Oryza sativa
  ref <308>: DATABASE ACCESSION NUMBER: AK103699
  ref <309>: DATABASE ENTRY DATE: 2002-08-28
ggtcataagcaaaccaaacaaaaaaacctcaccatcatcgacccacttgttcctagcgatctagaacgagagacttggcaatggcgggaagcggcgagctgaagctgctgggcgtttggagcagcccgtacgcgatcagggtccgcgtcgtcctcaacctcaagtcgctgccgtacgagtacgtggaggagaacctgggcgacaagagcgacctcctcctcgcctccaacccggtgcacaagagcgtccccgtcctgctccacgccggccggccggtgaacgagtcgcaggtcatcgtgcagtacatcgacgaggtctggccgggcggcgccgggggacgcccgtccgtgatgccctctgacccctacgagcgcgcggtggcgcgcttctgggccgcctacgtcgacgacaaggtccggccggcgtggctggccatcctgttcgggagcaagacggaggaggagagggcggcggcggtggcgcaggccgtggcggcgctggagacgctagagggcgcgttcggggagtgctccaaggggaagccgttcttcggcggcgacggcgtcgggttcgtcgacgtcgtgctcggcggctacctcgggtggttcacggcgatcgacaagctgatcggtcgcaggctgattgacccggcgaggacgccggcgctggccgcgtgggaggagcggttccgcgccaccgacgcggccaagggagtcgtgccggatgacgccgacaagctgctcgagttcaggcagaccctgcttcgctggagcgcatccaaagcaaagtgagatgacatgacacgactgtttttcgccatggtgatgctgaatctaagtatgctgtacgtgtgtttgtataataacaaggagaaatgctgctgcacgattgagtttccttgatcgattcctcagcatagtttcttttttttttatctagctatatatttaatatatagcgccatgttcttcataataaaagggctattttaagctgtaaattgcatacatttgtatttacataataaaaaaatgaatctt

SEQ ID NO: 28258 - DNA, 2565 bp, Oryza sativa
  ref <308>: DATABASE ACCESSION NUMBER: AK103700
  ref <309>: DATABASE ENTRY DATE: 2002-08-28
gagctgcagacagtcagacatcctctgatcctctccatccagagaggcaaaacggggcctcttatcattttggatcctccatgagatgagctcaatgatttagctgcgaaaaacagctcgtcgacatgcagtaagaatgaagaacatcaagctcaaggaagttatctagattctactagacaagtaagcctttttttttttctctgtgcccagttgatctcttcttcatttggttttcatagttcagttgtgttgtgatcttcttctgtgttcctcagctgcaaaccaagttctactggttgttcttctccttttcagtggaatcagaccaagccttttacgtgttcttgaaaaacatcgttctgagtcttgtagacaccataaacaaacacagttgacatgtgttcctgtcatgcaggccacaagtgattcttttgagttctgagatgattttgttcatgcatgaagtcctttctgaagtttattatggtgaactaaatatattttctgtaatccttaaatttaagcacgtggtgtagttccatctgttggcacatttgtaaacttaattcgtatttttttttgtcttcacgccggccgccgggcggctaaatccgtacaaagaataatcgcccacactcacccacacacacacccaaaagaaaaaaaaaaggctccaaaacaaagcagagttgttagttgttcctttcttttctatgaggaaatcaaaagcaaactaactgtgctcagctcagattaattctgaattaatcaaactaatggtggaactggtgaaatgtgaatagtacaaactatcaatgttaccttacaatcaagatatattactgctaattaaaatgtgcaatgatatctctgatttttatgcttgtctgatctatgcaatgacgtactagtacgcaaactccagagtaaagacaagctcaattagagaacgaatgtgagcatgtctactgctgttgccataagtaagtaccaagattaattagtactatcaccatggcaaaataaaagaccaagattttgcttatctaactgttcgtctcacctcactggtttcttcagtatcgtcagtctcggcaaccgcggctgcagtagtgatgctcgctctgatcaagcgatgccgccgctacaggaggaagatgaagaagaagatgctagctaggatcgcccacgaggcgaccgaacagcaccgcgagatggaagcccgcgacgcggcggacagcgtgatgatcgagatcggccccgtggagaagttcctcaacgagatcctcagcgagaagccgatgcgcttcacctccgagcagctggcggcgtgcaccgggaactactcgtcggagctcggctccggcgggttcggcgtggtctacaggggggagctgcccaaaggcctgcaggtcgccgtgaaggtgctcaaggtgtccatgaacaagaaggtccaggaggcgttcatggcggagatcggcaccatcgggaggacgtaccacgtccacctcgtcaggctctacggcttctgcttcgacgccgacaccaaggcgctggtctacgagttcttggagaacggctcgctggagaagtacctctacggcggcggcggcgaggacagggggaagaagctggagtggcggacgctgcacgacatcgccgtcggcacggcgaaggggatcaggtacctccacgaggagtgccagcagcggatcgtgcactacgacatcaagccggcgaatatccccctcaccgccgacttcaccccgaaggttgccgacttcgggctggcgaggctgggcgagcgggagaacacgcacatgtcgctgacgggcgggcgcggcacgcccgggtacgcggcgccggagctgtggatggcgctaccggcgacggagaagtgcgacgtgtacagcttcgggatggtgctgttcgaggtgctggggcggcggcggaactacgacctcgccgcgcaggcggagagccaggagtggttccccaagtgggtgtgggacaggtacgagcagggggacatggagtgcgtcgtgtccgccgccggcatcggggaagaggacagggcgaaggcggagatgatgtgcaaggtggcgctgtggtgcgtgcagttccagccgtcggcgcggccgaagatgagcagcgtggtgcggatgctggagggggagatggccatcgtcccgccggtgaaccccttccactacgtcatgagcggcggcagcggcagctcgacgctgacgagcagcagcacgaacctgagcagcgggggcaccactacaggaagcagcgaggtggcggtcagccttcctgccaaaaagtccacggacgtcatggttgaatagtctaagtccaagtgaaaatgttgacccttctccctttgtacaacggtaccagcgagacaaagatttcgtacatattttatcgtcataatgttgttgcaattatatttgttaataatgtaattattttttacctctgtttatgagtttactagtaccggattttgaatcactttctaaaaaagaataaaagagatgtgtgaattttcgtagg

SEQ ID NO: 28259 - DNA, 2231 bp, Oryza sativa
  ref <308>: DATABASE ACCESSION NUMBER: AK103701
  ref <309>: DATABASE ENTRY DATE: 2002-08-28
ggttggtaaatactctgaattctcaaatgtaaacccctgctgtgacaagctccagccctgaagtcccaaaccatggcctaaatctgcttcaaaagaagcaagaattcccaaccccttcccgagggtctgggcctcgaagcggaagcattcacacccgcaaccctctcgcctctggactccggccatgtcgctctcgtcggcgcgtcagcgtcgggccacggccgcgtcgccgccgaccgacgacggctactccaaggaagccaaggacaggaggcggcgccccagcggcgaggaggaggaggagggcatccggtggttcctcccgttcctcgccctcggcctcctccgccacatgagcgcgtcctccaacctgatccacgactgcgacgaggtgttcaactactgggagcccctccacttcctcctctaccgctccggcttccagacctgggagtacagttccaactttgctcttagatcatatctgtaccttttcattcacgctcttgtagctgggcctgcttcaatgatttttggggagcataaggttcgagtgttctactctgtgagaatctttcttggccttatatcaactataacagaaactgttctggttgttgctctttcaagaaaatatggaaaaagacttgcttgttatgtccttgcaatgctgtgcttaaccagtggctgcttctttgccagtaccagtttcttgccaagttcattctccatgtatgctgtaacactttcctctgcactcttcctacttgagaactatgctgctgcagtctctgttgcagctgcaggagttatccttggttggcctttctcaattttggtgtttctccctattacggtttactcactaattagaggatctttcagaagagtatttttatctggatttctgacttccatgttccttcttgtcctttcggttattgctgattactactgctatggcaaatggacagcatcagtgttcaatcttctgaaatataatgtgtttggtggtggtgaaagtcacttgtatggaacagaggggccttcattctattttaagaatggattcaataacttcaattttgcgttcatcttggctctgctatttttggggtttgtgccatttgcaaggaagaaatatgtcccagatctattgatagttgtatctcctgtctacatttggttggctttcatgtccttgcaggcacacaaagaagaaaggtttctttatccaatttacccattgatatgtgttgcagctgcagctgttattgacacctttccagattttttccatgacaaatattcatctgaacagtctatctttgaaaagatagcaaagggcctgcggcctttgatccttggcttcattttgtgtgcttcccacagccgaacattctccatgttgaatggatatggtgcccctattcagatctaccagcatctggaacatcatgaagatactgggcctggttctgttctctgtgttgggagtgaatggcaccgctatccatcatcgttcttcataccctcctatattagtgaagtttggtggatagatgatggcttccgagggcttcttccatttcccttcaatgaaaccctgggaggcaccactgctgctccatcttatttcaatgacaagaacaaggcctctgatgaacaatatctgaaagacattggggcatgtagcttactggtggaacttgatcttagacggccttacccatcccgaggaagtgatttgtcgacatgggagacactggctgcgctgccctttctggatagagagctttcacctgcattataccggtcattcttcataccgcaccgatggcagcaaaacaatgtttttggcctgtacaaactgctgaggaggctgcctactgaccaagcgtaatctagtactggaacctcattatctataacacagtgaagtagcaaatcgtatgattgattagtcggcatagactgattcacaaattttgattaccagatgtttttcactgaaatgccccttttccctatttgtgaaattctgaacaatgttatgtgtagactaatctatcccaacgaatggagttgtataactgaatcattagcttttctatttttcttgacggaatctgaggattgcgtgattgtgccctggaaagtggaaaatagtgcttaggcacttagccagcactatactcgtttctactgcatgatgaatccttggcaatggc

SEQ ID NO: 28260 - DNA, 1524 bp, Oryza sativa
  ref <308>: DATABASE ACCESSION NUMBER: AK103702
  ref <309>: DATABASE ENTRY DATE: 2002-08-28
tggccaaaaccttgtaaaaagcaaaacccactcgccactaatcgacgccattggcgagagctcgagcgcgcaacaccaccacgcggtagcctcccccaacctccacctcctcctcctccgcccgccccagagccaccggatggcctcgcttctgtaggagtagaggcgtagagcccagcgcgagggaaggcggcgattgatttgatttgaccaagattggtcggccgtgccgtctggtctgaggagcccggctctgggggatggcggcggtggcggggggatcgcgcgcggctccaccggcggattccgctgccgtggcggcggtggcgaaggaggcggaataccagaagggcgtgcagaagctggtggacctgctgtccaagctgaacccggctgccaaggagttcgtcccctcgtcggcggcggtctcgtcgccgtccaggaaggcgctgtcggcggacgcgccggtgttcgactacaactcgatcggaggctggaacgggggcggcaaggaatccggcgccgacgcctaccagcagcgtcggaggaggaatggatacctcagtcaaggaaggaggaggatgaacgagagagcaaggcatgcagacagggaagacagcattcggcgaactgtttatgtttctgatattgaccatactgtgacggaggagagacttgctgatatatttgctaactgtgggcaagtcgttgactgcagaatctgtggtgatccacactcagttctaaggtttgcattcattgagtttgctgatgaagagggcgcaagaactgcacttaaccttggtggcacaatgcttggtttctaccctgttagagtcttaccttcaaagacagctatattgcctgtgaatccaaagttccttcctaggacggaggatgagaaggaaatggtcataagaactgtttattgtacaaacatagataagaaggttactcaattagatgtaaagaatttctttgaagaactttgtggtgaggtctctcgtttgagacttctaggggataatgtacattctacaaggattgcttttgttgagtttgtccatgccgagtgtgccatcatggctctgaattgcagtgggatgattttgggtacactgcctgtcagggtgagcccttctaagacaccggtgaagccacgtttaaatcgagtggcgtcgaactgaccgcttgagccaagctggattgtttacgggaagatcgcttaaccatcacctatagccttccgcgatccagcgaattgtgatgcttttttcattcaccccttttgtcgaaaactgttggaaggaactggttaaatcagatccttgggagtccgagtcagcatctatgtctgagagtttattcatcatgatggagaacaaccaatagactatccgccactagattaatttctttggctcccgattttttttccttctttttctcagtgctacaactgttaaaactgaatcgatatttaacgtctttagtcttcacttgaggacaatctcagtgtcgttt

SEQ ID NO: 28261 - DNA, 1188 bp, Oryza sativa
  ref <308>: DATABASE ACCESSION NUMBER: AK103703
  ref <309>: DATABASE ENTRY DATE: 2002-08-28
gaaagagaagctctccgcttcgccggcgccgctccccccacccccgcgcgcggaagattgtcctcgtggcggagcgcgtgctgcggctgttgtgctgcacagccgccgggcaccacatttgcagcagcgccgcctccgccgcactcgtccatcgccggagcttccgctagggtttcggcgagccggggggaggggggggggggtgaggtgggccgtccgccgccgcctccgcggagttcctgcctgacgactggatcacgcagactctaaccaaacaccacccgactgatttcgctcgcctcttcctcatccccatcagccatgatccaggccgtgatggtgatgagcacgcagggcaagccgcgcctcctcaagttctacagctaccagccccccgagaagcatcaggacctcgtccgcggcgtcttccagttgttgtctgcaaggccggacagtgtcagcaatttcgtcaaggttgatgcaatctttggaccgggagcgaaattggtctacaaacatttggccacattgtactttgtttttgtctttgatagctctgaaaatgaacttgcggtgcttgatcttgtacaagtttttgttgaaacattggacagatgcttcaagaatgtgtgtgagcttgacatcgtatttaacttcaacaagctgcatacaattttagatgaaatgatacttgggggacaagtgattgaaacaagttcagagcaaataatgagatctgtcgaagagattgcaaggctggagaaacagtcaaacacaaccagcctcataccgaagtcgatttcagagcgtttcagccgttgagccgtgagagcttcactcatgttatggacagaaactttgaatgcgtgagcagaagaaatcagattgcatttttctccagtcgcgttgcgattctctcaagtcgcgagcatctaccatttgacatgaatatgagagcttgtagccatcgtgaatatctctgtgtatcccgcatgaaattgaatatgtgacctgaaacgtgaattcttcagtactatctggtttgcttgccgattgccagttgaggcatcgtgtctcctagacaaggaaaatcatactagcctgtttctccttcggctgatgatatctgtgctgtttttgatagaatgttgttcttggaaaattgcgaaggcgttgtgttttcttctg

SEQ ID NO: 28262 - DNA, 2251 bp, Oryza sativa
  ref <308>: DATABASE ACCESSION NUMBER: AK103704
  ref <309>: DATABASE ENTRY DATE: 2002-08-28
ggtttgtgtctataaagttgtggactttctcgccgccattgtcacgtctcacgtgcgcgccaccaccaccccatgcagacccagcagcagtagcggcacggctctcctctctcgtctcgtgcaccacgccgccgcgcgcgctcgctttgcttcgagagtaatcgatggccgtggaggagtcgccgccgccgccgccgtcgtccccgccgccgccgccgtcgtccccgcagccagcggcggaggtcggcgcggggggacggcgcgcggacaagagcgggcgccgcctcgaggtgtacagcgaggtactcgcccgcctccggggcctcggcgccgccgcccccgtcgagatctcgccggcctacgaggacgcgctctgggcccacttccaccgcctccccgcccggtacgcgctggatgtgcacgcggatagggcggaggacgtggtgacgcaccaccggttgctggaggaggcgcgcgatccggaccggcggcccgccttgtcggtgcgcgtcgtccaggtttctaggattcttgatggtgatatggatgattgttctgagcttgggatggagccggttcataccaaccacttggcaagacaaatggttcatccccctcctgcctttggttcttgctccaacttagaggcacttgcgctcgaggcgagtgaggctaatctaaggagcagtaacaatgatgaagatagcagtgttcatctcatttccaggccaatgcatgagataacttttgcaacaactgataagccaaaggtccttagtcagctgacttgcttgcttagtgagcttggtcttgacatccaagaagcgcatgcattttcaacaagtgatggttactcattggatgtatttgttgtcactggttggcaccttgggggtactgagcagctaaaagaaaagttgctggagaagtttcatgacattgagacacaagcttggccaacatcaaactcatcgtcacaatcattggaaggtccgtcaggtggagagagtatgccatctaccagtgtggaaataccaacagatgggacggatgtttgggagatagatctcaagcttctcaagtttggaaccaaggttgcttctggatcaaatggcgatctgttccgtggatcatactgcagtcaggatgtagctattaaagtagtgagacctgaacgcattagtgcagatatgtaccgtgattttgcacaggaagtctacattatgagaaaggtccgccatagaaatgttgtacagtttatcggtgcctgtacaagacagcccaacttatatattgtaacagatttcatgtcaggaggtagtctgcatgattaccttcataaaaagaacaattctttcaagctatccgaaatactgagagtggcgacagatatctctaaaggaatgaactatctgcatcagaacaacataattcaccgtgatctcaagacagcgaatcttcttatggatgaaaacaaggtcgtaaaggttgcagattttggtgttgcacgtgtcaaagatcaatccggagtgatgactgcagagactggaacttatcgttggatggcacctgaggtcattgaacataagccctatgatcataaagcagatgtttttagctttggtattgttctatgggagctgctaactggcaagataccctatgagtacctaacaccactacaagcagccataggtgttgttcagaagggccttagaccaacaattccgaaagatacgcaccccaagctgtctgagctgcttcagaaatgctggcatagagatcctgctgaaaggcctgacttctcccagatactggagattcttcagagactccccaaagaggtgagagctgataccgagggtcgccagaaatcaaaggcaggatttctttcagcattgaagagaaaccactgaaagtagcttatacaatgttggtgcatcattcaattgtagcatcccacaacaagagggaagcgcattgtggtgtacagtgattaaaaaaaaagtatttcttacgttgttgcagctttgttttttttgcttatttagtttttttttcagctttttggtttcttttgctgttgtttttcttgttctagttttgttgcattaatgagaacaagtatagaaaaaggaatgtgctgaaaagagttgtacaaattgatcctgttttcttgttcatgtctgaattccgattttctcctcctatgttgtagatgaaaatcttgtagtgtatgcctatattttcc

SEQ ID NO: 28263 - DNA, 4006 bp, Oryza sativa
  ref <308>: DATABASE ACCESSION NUMBER: AK103705
  ref <309>: DATABASE ENTRY DATE: 2002-08-28
ggaccgaaacttcgagcggcgcgagggctcccggcgtccgcgccgtccgccgtgagccggtgctgtccacgacgtcgtcttcgtcgtcctcctcttcgccgtcgccggcgagccggccttgcgccatcagctcgctgggggcaccagacctaccaccttggcggggtcctgctcgccgccgctctgccttctttccttttacggtgccgccctctgaatctctgattcagttctacttcttcatcttaggccattattacaagcgttgaagtagtaatttgggttgatctgtatgcaagtgtgttttatttgcatattaatattgggactgttcagtgatatactgatatgctatgctagggacttgtccgtttttttttttttttttgaggtttacagatgatgatcaccatgaatccgaacaaggcattagccaatgtttatttgggggttatatctaatgctttttttataatcttctagatgaatatggttataagatgtgcatgaatctgtttctttcattctcataacctggcatctgtatagcagataaaaatctattcccatggtcaattcagaagccctgcaactacaccatctgtccgatgatgttctacgcagcatattgtcacggttgcattcagagagtcctcgcggatggcctttctttctcgcaggtggcagcagctgtggagatgctgctgtccgaaattggtcttgaaaagaggcaccatgttccagcccaagaatacaagcatgaaacgtacaaggaccaagtttgccaggagagtgaacagtcttctgcggcatctatgttcacctcctaccctgaggaagtttgttgtcaagttcgggctgcgcaggaagcacacctgccatgtcgatgttgatgtcgatggatgggttcgcttctgcgccgcgtcgagagcaaggcacatcgctttcgatttcactcctggagcgaagaacattttcaagggcttgcctgatgacaagtacatcttcccactgcatgttttcagtggcccggacagctccccttctcatgtcagatctcttaacctggcctacgtctgcctgaacacaacaaccactggttttgctggctttgcaaacctcaagaagctcaccctgcacaaagttttgtttttgagtgactcccaatgcctcatgcagtcatgctgccggaatgcactgctcttgagtggctgagcatcatctgctgttcctacaccgagctaaccttgtgcaagccgctgctgcggctgcgttatctttgtttgcactactgcaacctggaaaagattgagctggaagctccaaatctcacatcgtttgacttgatcaatcggccaattccgttggcactaagtgaatctccaaaggtgatgaagtttaaactgctacataagagcgtgcgctatggtgataatctggattacatatgcaccgagcttcctgctgttcttcctggtgtgcagaaactctccattacctcagacactctacatctatgatgaggtttaatttgtctctttctgaaagcaattaaattcattaatcagttagacatctgttcgtcatctcatccataatcgattagactatcatggttgtgtttcagttgaaaaggttcgccaaaacctcagtcagattcatcaatttgaggcatctgaacttgtatttgcctctttatgggaacggcaggtcagttgatgggattcttcgtttggcctacctcttggaggtagctccagttctagaggaattggaactgcacgtgagtggctttaacaacttcataatatgttgacagtttcttaagcatgcattatatgtagacatttttgtggtggcacagcatcatccttgttattttcaattacctacttttctttcattcatctgaaaccaatctttttatttttttccatttcctgtatgtttgttattttcattcatctaaagctacaactacattgcttaaaattggaataccatacgagttggttgattttgatcttatagttgaaaaatacaaaagggtaacaaagtttctatctattggaaattggagactaccatgctttattaccttattatttggtgatacaatacaaatttgtttatatttcgaagcctgttgaattctttattggcataatgttctagaaccattccttcttttaatatttttaagccacaattacaatttgacctttgagcttactttaactgttgttttgtaattacaaagtcatgacaatatggaagtaatttcatatgcatattcaatggtatcatcccatttatgtcacatagcctatatatactatcggattgttttaagtttgagtcaatttcacctaaccccaggtattatgatctaagttacacaaaaccccagagatttcggtacgtggcacataaccccaagtattctggccataaagtttcacaaaaccacactattgatcattttgatattgatttaccatattttttagttctacaataacatattataagttatttatccatcatataaacattagatccatgtaagtaaatgtttttcaaaatttcgatataggagtatgtcaatttggttaacagggtggttttgtgaaactttaggatataatacgtgaggatatgtgcaacgtgccaaaatccatgtggttttgtgcaacttgcattataataatagctggggttttatgaaattcactctttaaattttgaaatatgttggcaccttataaaaattattggcaattgcgatgaccctattcttaagctgcaggtgtacatgctcggctgtgtttgcaatcccatgttcccaacctccctccctcgttttccgcgtgcacgcttttcaaactgctaaacggtgcgttttttgcaaaaagtttctatacgaaagttccttaaaaaaatcatatcaatccattttatgaagaaaattagcaaatacttaattaatcacacgctaatggaccactccgttttccgtgcggagagtttagttcccaacttcccctatccgaacacagtttgaaatagaaaaccgtagggttagagttttgatgtatcccagtttctcatcttgaaatctatgattataagagaaaaattttaaaaatagattaaaacaatctgttatataaaatctagtagattaatgaaggtagattcgttaggataacatctgttctgaagacaacatattagtgcattattattattatcattttctaactattgttggtgatgatgttgttgttgcagctgctcataaaacaccaccaacctgattgcaaacactctggttttgacttttgtgtttgctttttttcattccaattattttttccttcttccacaaattcatgcgttccaaacattggatgaattactgacggaaacattatgcgatgagtctcacaagtgcgctgaattgttgcgtgcagtttgacatctctgatttcgtcatcagacaggtgatcagagcggatatgccaccgtatcggcatgataaagctcaggagggtggtcatgtctggagcctgtcattggcaggggctgatagagctagcacactgcattcttcgttgtgctattagacttgactgtatgatcatggatccgatggtaagaattaagggcctcccggtggttgattggttggtggaaagaggccgcaggattgccaaagagcttcttgagagggaggagtctcagggtgttcttagggtgtgtttgaggataaggggctcgaggagattgggaagatacgtaaaacgagattatgtgaacttgattgggtgcaaggattgcagcatttacggttgacgaatgtaggcgcacgcgcacgggcccgaggggtcaaagaagggggcgatacgtcaacaacttctctgactgtacacgttagcaccactgtactgcagctgtaaaagtcttaaatagcctaagtatatattaatttcatgaacggatc

SEQ ID NO: 28264 - DNA, 1679 bp, Oryza sativa
  ref <308>: DATABASE ACCESSION NUMBER: AK103706
  ref <309>: DATABASE ENTRY DATE: 2002-08-28
gtgaggtagaaaaaaaagaaaagaggaagaaggggaaaaaaagaaagactgcgaaaaccctcgtagaagaaaacccaccggcggccgatggcgtcgccggcgaaggcgcagcggcggccggagggggcctcggtgctggagaccctccccgcgctcccgctcgcgatcatcatcgccaaggccggcccccgctgcgccgccgcgctcgcctgcgccagctccaccctccgcgccgccgcctccggcgaggccctctggcgccacttctgctccgacgacttcgccctcgacgcccccctcgctcccggcgacctccctctcccttccttcaaggatgcttacaaagcttggttccaatcttttgggatgtaccctttgccacttgttaagagggtgaagatcttctggagctcattcagggcatggctatgcgagtatttcccggaagggctgaggactctaggggaaggcgtttcggaagccgagatagccgtcgcggaatgtaacctgggccttgtgcttcctatgcccactaagctactgtaccgtttctgcaacggccagctgcacattggccgcggcgaggaggtctcgtacggcgttatgggaggctatgattatgttcaccagaggtataccgtgcgcttgctaccgctcgcgcaccatgctgttcagaaaaactcaaactacattgtagttgcgacgagttgttttggggagaagatatttcttcttgattgtgcgagtggccgtctttatgtcggcaccaagtattggaatgaagaaagagaaatcatggcatgcgtgccaaaagcgacaataaggctcgctgtggatgatgatcatggtatgcctcaagatggatttctgctgtggttggaagagcaccttagtcgcctacaggatggcttgatcaaggtgcagagttgtaaattcccaatgctggcaaggcatatcagtttgtatccagtacaactcccttactgttcgtcggcaagtatgcatggtatcaaggttcgtgcctctgctgtctttgccccagaaaactctgctttcgctgattaccgatgcagatattcgtactatttctccattcgtctatcccttcctgaagcattcgttgtagatggcaagtggtattcttccttccagcttcagtcatgccactacactattcagattggagatgaagtcctcccttacacatgcaactatggcggccatggcaagtgtcctctcctgaggtgcggcgaggagctgtttgtctatgggtgttccatatcggcagcactggagcctggatccgtgatgggcaacttgacgcttgtcccttggaggtgtggtcagcctagaggaagcccttttattgccgacatagctcctttccctctgcacccgcctgactacatcttctgaagaattggaagctggtccatcaaagcatgcatgcagttgaggctaattcttgctagagcgccttgttggaaattttcctggatatatttttgtacgtgcagctctcggaattgttgtcttgacaagtgacgaaagtctcatgagctgtgaattatatatacacacacacacaacacacttttcggcagtgacatgatgttacttttcggcagtgacatgatgttccgtttgttaatgcggcttgcttgcttctgatagctttg

SEQ ID NO: 28265 - DNA, 1217 bp, Oryza sativa
  ref <308>: DATABASE ACCESSION NUMBER: AK103707
  ref <309>: DATABASE ENTRY DATE: 2002-08-28
ggtgtcatcttgtctatggtagttcagcaatcctctgcctttgtcagttgtagttcacaacgatcgagcatccggccatggcgttgaacccgctgttcaccgtgacgttcaacgtgagcggcagcggcagcgacaactacggcgacttcatcgccggcatccgcaagagggtggccaacccgaggcacttctcccacaaccgccccgtcctcccgccggtggagcccgacgtcccgccgcgccgctggttccacgtcgtgctccggacgcagaccagcgagctcacgctcgccacgcgcgccgacaacctctacctggagggcttccgcggcagcgacggcaccagcgcgtggtgggagctcacccgcggcctcatcgccggcgccacctacctcggcttcggcggctcgtaccgcgagctcctcgggcacacggacaacatggtcggtgtcacgctcggcccgcagcagatgacgcaggccgtggacacgctcgccggtctcgccgccagcggcggcggcgcggcgcggcaacgggccggcgaggcgttggcgacgctgctcctgatggtgaacgaagccgtgcgtttcctgaccgtggcggagcttgtgggcggcttcatgaaccccagggcggtgaggaagagcgggacgatcaccgccgacatgaaggagcaggtgaacgggtggaaggtcttgtccagggcgctgctcaccatggacgcgctgcagctagaggactccaactcggcgtccaagcacaacaaggtggatacaaagaagatggagcaggagaagaaggcgtgggaggcggcggagaagttggccgtggaggcggccaaggcggtggggatcctgctgttcgtcgagaaggtgccggccgggatgacgaaggcgacggcgcttcagctgtttcatgggaactaaagttgctgctgctggtagatttcagcttgcttgatcgaacagcaaatcaatctgagcgactcgagtaaaattgattctccctccaacccaaaatataagtattttcagttattaatctggacaactgcgtgtccagatacatagacaaaagttgttatattttgagacggttgttatattttgggacggaggcagtagttaaatagcctctatagtgtgatgtaactactatatactcccttcgtcccaaaaaagacaaacactggtctccgtgtccaacgtttgactgcc

SEQ ID NO: 28266 - DNA, 1745 bp, Oryza sativa
  ref <308>: DATABASE ACCESSION NUMBER: AK103708
  ref <309>: DATABASE ENTRY DATE: 2002-08-28
gtttccccagccacccgcgcggatcggtcgctaagccgccgagagacatggcgcccgcgacacaaatggcagctccaccaccacgcgctcgcggcggcagcttccgcgtcctgcgcaccgcccgcgtcgcgccgtcgtcgcccgacggtgtccccatgttggtcgagcgcgccgtcccgcttaccttcctggacgcgatctggctcccgaccccgcccgtcgaccgggtcttcttctatcgcctcggcgccgacgacgacggcgtcgacgccgtcctgtcccggctggctgactcgctgtcccgggcgctccacgtcgtctacccgctcgccggccgcctccgcctcacgccgggcaagaccaaccggtacgagctcttctaccagccaggcgacgccgtcgccttcaccttcgccgagcacgacgacggcgtcggtgtcgacgagctggccgcggacgacccgagggaggtcgccaagatcgccccgctcgtgccggagctcccggatggcggcgcggtgctggccgtgcaggctaccgtgctgccccccgcgcgccgcggcctcgccctcggcgtcaccgtgcaccacgccgcctgcgacggctcgagctccacgcacttcctccacacctgggccgccgcctgcgccggcgccgcggtgctgccgaagccgcccgtcatcgaccgcacgttcatccgcgaacgtgaagacctctatgactacatggtcagtcgaacggaggagtctgacaagttcaggtcgcccgacgtcgccgacagcaagctcctcgccactttcacgctgtcaggagagatccttcagagcatcaaggacagagtcgccggcgtggcggcgcggcgcggcaagtcgccgcctcctcggtgcacgtccgtcgttgcgacgttcgccatcgtatggcaatgccacatccgagccgcactaggcgacgtcgaagcagataataagcaccatggccgtgcccacttcatcttccccaccgatcaccgggcgcggatggaaccccgcgtccccgacaagtacctcggcaactgcgtcgggccatgcttcgcctcggcgcccaaggaggagatcgccgccgccgacgcggaggacggcctctacacgacctgcgccgcgatcgccgccgccgtggacgaaggaacgagatacgatccggactactggaagaggtgcatggaacacgttggagggatgagcgcgagcgacggtccgccgttagcggtggccgggtcgccgaggttccgcgtgtacgacgtggacttcgggttcgggaggccggcgaaggtggacgtcgtgtccgtggcgaagaccggggcgatctcggtggcggagggccgccgcggcggcattgaggtgggcgtcggtttgccgccggagcggatggagaggttccggaggtgcttcgctgatgccgtcgcgtggctatcgtcgccgtctcgtccagtgacacgtgacatggatcgatcagctccgggccactccccggcgtaggcggcggcggcaggcaggcaggcaggcaggcacgtgtcgcttggcttccactcgctgggcttccgtgggattcgatgggctggttccccgtacccttattttttttcttggaaaataccgtagcattgtaccgacagggtgtgttcgctaagttgccagcgtggaacagtctgcatggtatgcatggtaaacagaggtattagcgtgtgattaattaagtattattttttt

SEQ ID NO: 28267 - DNA, 1092 bp, Oryza sativa
  ref <308>: DATABASE ACCESSION NUMBER: AK103709
  ref <309>: DATABASE ENTRY DATE: 2002-08-28
gtttccttccatccatctcaccacccctctcctcctctgcacagcaaccaggtgtatgctccatgaggaggagggaatcttgagaggtcacagatatcctgatcctgctgttttttggtggtctctgtgctgtaagttgggtttgtggcaagaattctttgctgcgcgaggcaatggcgtccacctcgggctcggcggcggcggtggaggagagggggaatagtgagcggaagaggaagcgtggcgcgacgggggagtcggaggggtccgaggcgcagccttccaagtggcggacgcggcgggcgcacgagatctactcgtcgaagctcctcgacgccatccgcctcgtgcgttccgggtcgccctcctcctcggcggcggccccgccgcgcagccgggccgtgcgcgaggcggccgaccgcgcgctcgccgtctcggcgcgcgggcggacgcgctggagccgcgccatcctcgcgtcccaccgccgccgcatccaggccgcgcgccgcgcgcgcctccgcgaggccatctccccgccgtcgcgccacccatcctcgtcgtccggtaaagggccgaaggccccagctctggcgaggaaggcgaaggtgctcgggcggctggtgcccggctgccgcaagctcccattcccggctctcctcgccgaggcctccgactacatcgccgcgctggagatgcaggtgcgcgccatgaccgcgctcgccgaggtcctttccaccgtctccggctcaggctcagcctcctcctccggcggctcctcttcgccggcgtgacccccaagcctcaagattcgtgcattcgttgtaaatttgttttttctttctttcattttttccttgggattagttagcctcgagctgtctgctctctagtttgtcctcttcttttccatgagctgggtgagcggttatggcggtggtggtgatggcattgcggtgattaacccgcgctgtaatgcagtaggccacatttgttttgttctcttctttctcctcaggattcttttgtaggatgcctcgtttgttcttcttccatctctgataaatgcaccatgaatggttcacatcacttctc

SEQ ID NO: 28268 - DNA, 973 bp, Oryza sativa
  ref <308>: DATABASE ACCESSION NUMBER: AK103710
  ref <309>: DATABASE ENTRY DATE: 2002-08-28
gtggtttcccctcgccgacgcctccatcgccctccgggctccgcctccgccgccgccgccatggggagaaggcctgctaggtgctaccgccagatcaagaacaagccgtaccccaagtcaaggtactgccgtggtgtccctgaccccaagatcaggatctatgatgttggcatgaagaagaagggcgtggatgagttcccctactgtgtgcacttggtgagttgggagaaggagaatgtctccagtgaagctcttgaggctgcccgcattgcttgcaacaagtacatgaccaagaatgcaggaaaggatgccttccacctaagggtcagggtccacccgttccatgtccttcgtatcaacaagatgctctcgtgtgctggggctgataggctccaaactggaatgaggggtgcttttgggaagcctcagggtacctgtgctcgcgtggacattggtcaggttcttctttctgttcgttgcaaggagagcaatgctaaacatgctgaagaggcactccgccgtgccaagttcaagttccctggccggcaaaagatcacccacagcaggaagtggggcttcaccaagttcacccgtgaggagtacgtcaagttgaaggctgagggcagaattatgtctgatggtgtcaatgctcagctgcttggttctcatggtcgtcttgcgaagcgtgcccctgggaaggcgtttctggctgagaccattcaagcttccgcctagatgcctcttgctgaatggaacttgagagattttgctttagctagtctaattttgcatgctagaactcatgttttaagaattggttgtcttcaggatgatctatttttctgtaatagttccttctgtaggccagcttgatatggaggttttgcatatcatcagtaccttgtttgaatttttgctacatatcgttatcccaaagctatatctcagttggattgtgaagctttattaattc

SEQ ID NO: 28269 - DNA, 1320 bp, Oryza sativa
  ref <308>: DATABASE ACCESSION NUMBER: AK103711
  ref <309>: DATABASE ENTRY DATE: 2002-08-28
gggtgcggtgctgcgggccgacgaggccgagaaggaattttggactttgatgagggagctgctgattgtgagtcaagaacagttgtgaagagtgagaagaaagctagagaagatcaaatggcagctgaatcctccctggttccacaaacctcctctgaatcgattgcgcagaagatgggcttcttcagggtccctgaccttcttgtcaaactgagcagcaaatgtttgattgagctggatgcagtccgcagcccaacatcgcccctagacctcatattcttcccaggcctcggtgccaaatcgccgaggtcgtctttccttggcgacagggttgggcttggactggtggattcacttactgatgatagctccactcccttgggcagcaggaaggttcttcttggatctgagatgaggattactgataatgtaacttccaagaacagcttcactgctcctgtcgaagctggggtggttgatcagaaggatgagagtatgtgtgatgacctgaagggtagtttcatgtctctggatgacattgtcaattcagaggattacacccgtgttgtttgtcgtggtcctaaccctaggacaacccacttctttggagatcatgttttagaatttgaaggtgagcagctgatgcctgatgagagtaagagtgaggagagtttgccccctcgtctggaagagggtatgatgagcttctgttatttttgcggtgagaaactcgaagaagggaaagacatctacgtctatcagggtgacaaagccttttgcagcatggagtgccgggagaatttcatggaagatgagatggaagaaggcgaacccgatctctctgcacctcctagcagcccagtcgccaacgatggttgtattttccaactgatccagtgaacgagcatcagtaaacaacttgatatggtcttatctgaagtgctgtccgaggttaataagttgcagccatggatgtgatcatatttcattgagttgttgcctgaagattttgtctgccgcggcactgatgaatttacctattgatttcttaattttacttacccggatcctcgaatttttggaggagcctgaacggtaactttgcttccggtcatattattattttggtcggaaagggcgtgcgtctgagtttgaatttgtgtttgcttgaacctcatcttcaatcggctgtcatgttgacaccattgatcactatcatgtatctgaatatatgtgcttctgctctttctggcagaaaggaagtgctaatcttcaagtttactaataaatgataatcatgatgtatctgtcatgatgatg

SEQ ID NO: 28270 - DNA, 1417 bp, Oryza sativa
  ref <308>: DATABASE ACCESSION NUMBER: AK103712
  ref <309>: DATABASE ENTRY DATE: 2002-08-28
gtctggttgcctcctccgcacgcgcaacggcgcgaccggcgactctcctcgccgccggtcaccggtcgcctggcccgcctctcgcgccccgccagccaccgcatcggcgcagatcgacggacgccgagacgcgcagccgcagtcgcgcagaggcgccgagtgcctgagggctcagccagccgccgaccgccgcggccgcctggcccccctgcccgtctcgtcttctccagtctcctccaatccttcgtggcaggtctccaaactccggctccccgctgcggcgctccacctccgactccgattggcgattggacaacactgaaggcatgtcaactatttccgatcagaagaaacggaccttagaagcccttcaacaacgttatgctgctgcaaaagctaagaaactgcaagacaagcctaggtgtcagacaaggaataaagatagtgcgcccaagcccaatcttgatgcatcaaggaaaggcaaagctccagatttcattccatctcgaacttctgctccgtttccttcaaaaaaaggtctagcaatctccagttcttctgcttcctcaggtggagaaaccaatcctgtatactctgaactttcatttgctccacatgataatttgctccaaagaagcatttcggatttggacagtatggatgttgtgcacaatgttgtttatgacataattcagaaaggtggagatgctggaaaaattaccaagggagccaaaaagttaaagctggaaaaagggattctgctggataactatgttcacaggggtcctagattagttgatgcacaggcaaaatctttgttaattcattcaaagcgatcaaaaaggcacatgtcacttaagcaacataagaaatgtgggtcatttgatttacctgagacactccgcaagtttgacctctacaagccaatgcatgagatgtggaaagagtatatcacagagcttaccaaaagcacaccgaaaaagcagttatctgaaaccctcctctcagcagatcttcatggggctcttgtaatagtggcagaatgcaaatcagcctcttcttatcaaggcgtatgcggcatcatgattcgcgatactgcagagacttttggaatcatatcagatgacaatcgcttccgagttgtgccaaaagctgggtcagttttcatcctccaagcagactgttggaaggtcacgctgatcggtgacaaactgtcacccagggagaagctgaaggagaaccagcgtcagcagcgagtgcaggcacagatcagatagagtttttcatcctttgtctgttgtaattttggttgttttttctcccccagaaacatgtacagggtttagttgtttaggtgttgttactgaagtttaatggtaatctccctcctcacaccttaagcaagtatcacttgaat

SEQ ID NO: 28271 - DNA, 1289 bp, Oryza sativa
  ref <308>: DATABASE ACCESSION NUMBER: AK103713
  ref <309>: DATABASE ENTRY DATE: 2002-08-28
ggacctaaaccctagctcgcctcctcctcctcctcctcgccgccgccgccgccgccgtcgccgtcgagcaccacccgagcagccatggcgaatccggcagcagcagcagggccgtcggggggagcgaggtcgttcctgcaggccgtgtcgaccgtcaccgaggaggcgccgtcgccgctccgcgtcgtgcagatggagggcctggctgtcctgaagatcattaagcactgtgaggagtttgcacctgctctagttacaggccaactgcttggtttggatgttggcagtgttctggaagtaacgaactgttttcctttcccaatgagagaagatgatgaagaggcagatgcagatggtgcaaattatcagcttgagatgatgaggtgcttgagggaggttaatgttgacaataacactgttggatggtatcaatcttgcttgcttggatcttttcagactgtggaactgattgaaacgtttatgaactatcaggagaatatccggagatgtgtgtgcatcgtttatgacccatctaggtcaaatcagggggttctagctctcaaggccttgaaactcacagattcattcatggatctttaccgtaacaatggtttaactggagagaagttaagagagaagaaattgtcatgggttgatatttttgaggagataccgattaaagtttccaactctgcacttgtcagtgccttcatgacggagctggaacctgaatcacctgtttcacagtgtgattttgaccgccttaaattgtcaactgctccattcatggaaaggaacttggaatttctgattggctgcatggatgatctttcatcagagcagaacaagttccaatattactatcgcaatgtctcaagacagcagtcacagcagcaggcatggctccaaaagagaaggcaagagaatatggcaagaaaagctgctggagaggagccattgccagaagaagacccatccaatcccattttcaagccgattcctgagccgtcacgtttggagggttatcttgtaaccaatcagatctccagttactgcaaccatattaatggggttgctggtcagaatttcaacaggctctacttaatgaaggccttgcaggaggactagatggctaggtgatgagtggcaactgttatgatatttgacttgctagatgtcaattttgccttgtgctttatgcctattataccttttgccaagaaaagccagagcctattgtaccaatcttacggatacaaagtccgcagtatgataaattgattttatcg

SEQ ID NO: 28272 - DNA, 2187 bp, Oryza sativa
  ref <308>: DATABASE ACCESSION NUMBER: AK103714
  ref <309>: DATABASE ENTRY DATE: 2002-08-28
ggcactcacctagccggcggccgcgggcgagtgatgacgacgccacgacggcgcgctgacccatcgcccccgcctgctcgccgcctcctccaccgcctcggctccgcggcctccggtctgcagacgctggcgtacagctcgaagaaggaaggcggcggcggcgacatgggcccacgcaacggcggttcctcttctaatagaagaccaggatttgttgattcttcttcatggagatattttgactcgagggttgttggtattactagaggggatatacctcgccatgcctggactgtcctacacatgctaaaacgaaaagggtttgcagcttatcttgttgggggatgcgtgagagatttgctactgaaaagggcacctaaagattttgatgtgattactaccgcaagcctccagcagattaagaaaatggttttccaacgatgtataattattggcaaacgctttccaatatgccagcttaatatgtatggcacaaaaattgaggtttctagctttagcacgaatgcaaatcatgtgaaaggaagtaaaaatataggatgttcagaggagtttaaacgttatgatgagggggatattcttctctggcagaattctatgaaaagagactttacaataaacagcttattctttaatccatttaactttaagatttatgattatgtgaatggagtaagggatattagcaaaaacaaggtgtctacagtgattcctgcccgtgtttcattcaaggaagaccctgccaggattttgcgtggcttgagaattgctgctcgccttggttttgagttctccagtgaaacttctgctgcaatacgggaactttctttgtccataacagatattgacaaggcaagattaatgatggaattgaattatttattgtcttatggggcagcagcttcttctcttaggttacttagaaaatatggacttctcgattttttgctgcctttccaggcagcatatatgtcggatcagatgaaggataaatcaaatgacacagatttaatgctcatgaaactactggctaatcttgataaattactctctgctgatcagccatgcccctcctgtttgtggttagcactgttgacatttcacagtgcattggtaaattctccacatgatgcccaggtaatcagggcttttgctgcactaatgtattttggatcatgggagggcgcagtcaacttcttgaatcaagacattggagcaccagccccgtttattccagaaacactagggccttctcggagcaaactggagaatctcatggaacaaacatcacatttagcatcactagtcaagtcgtcagttgatacgttgacatctatagatgctctccaacaatcactggccaaatactcaaaggcttcacaagtttcaggactggtgcttgtatctagcagagagagggagagagtgttgagaatatttgagggccttgatactgacttaacttcatatgaagggacaagagggatgcaggaaattgattataagttactgaaggatgggcaccctggtgaggtccggtttgttcttgggcaagtaatcatggacactatgagcgaggagttaccacgtgtatccactgagtatgatcagctcaatatggaggctagtgaagatgatcttgctgacggaagccgtccttcactgtccacattattttccagtaaatcgtgatggctaagccgtagtcactcaacaaaaattagccaggatctctccattccatgattccataatcaacgcgctcagcgcatcgaagtgcttgggcgtgcaggatggtcagttggccaccatacaatgcaggcgaacttttaccgcagctaaactcacgtggatgctggagaatgatgttattgcccaagtgcctgccttgacgtctttttgtagtagaactgagtctagtgcgtagatagtactaccagataattgtaaccttatattattcactttggcttgttagtctccgcgtactgtaccaatgttgagtcgtactgccccttgaacttttgagcttaggtgaactgaaagtttgaaactgtcgccatggttacttgggttgaaaatacttcatcagtaatttgattacatgtaacatagcgaactgccatgggatttgataaccatgagatatttactggatttctgatttgc

SEQ ID NO: 28273 - DNA, 1338 bp, Oryza sativa
  ref <308>: DATABASE ACCESSION NUMBER: AK103715
  ref <309>: DATABASE ENTRY DATE: 2002-08-28
gtcacaaacacttctagctcctcttcttctccccccccccccccccccttctcaccacaacctgctagcaagctcagagctagcagcagccatggcgggcagcaccaagctgcggccattcctcctgacgctgctcctcctcctctccaccaccgtggcttccatcctcgcggagtacgacccggaatgcgactgcgacaagcccaagcaccccaagccctcgcacccttctccctctcccggccaccccaagggccccaagaaccctacccctcgcccccccaagggccccacctacccgtctccggtcacccgcccgccgccgctcgtcgcccctcccaaggtccccgtcacccacccgccgaagggccccgtcacccgtccgccgccggtcacctaccccacacctccggtcaccacccccccggtcgtcgtcggcccgccggtcacctaccccacacctccggtcaccacccctccggtcgtcgtcggccctccggtcacctacccgacgccgccggtgacatacccgacgccgccggtgacgtacccgacgccgccgacgacgacgccgtgcccgccgccgccgccggcgacgcagaggtgcccggtggactcgctgaagatcggggcgtgcgtggacctgctgggggggctggtgcacgtggggatcggcgacccggtggtgaacaagtgttgcccgctgctggaggggctcgtggagctggaggccgccgtgtgcctctgcaccaccatcaggctcaagctcctcaacatcaacatctacctgcccctcgcgctccagctcctcctcacctgcggcaagaaccctccccccggctacacctgctccatctagttcagccgccattcccctgcctcgccatggatggcgcccaagctcaagctcttgtttgttggctactcgatctcggcttattgatgtgttaatgatgagtacgaggtgtattaatttattgttggttttaatttgttagtgtgtggaaacatgagaggatgtcgtctgctagctagctagaggaacggatcaatctgctaacgatagattgatgttcgtattgctgtgtttttttttaatttgtttcaatgtttcagcttaattgcatgcttcctcttcttgattgtgtggtgtgatcaataagacagcaactgttcagaaattgtttccgtcaagatcgtatcctatcaagaaattaattaataatgcctgcagcctgacttaagcgtgtaatcctacatacttccatgtgcggacagtgcatgcaatctgatgtaataatgtgtcggatctaagcataatatgtctgagattaattt

SEQ ID NO: 28274 - DNA, 998 bp, Oryza sativa
  ref <308>: DATABASE ACCESSION NUMBER: AK103716
  ref <309>: DATABASE ENTRY DATE: 2002-08-28
gacccaattagcaaagtagcttctatactactgcctctgccaggtgccatttcattactcaaagaaattgagccgagacctgaggaacatatacaagaattggctagctttgctcgttgattagcaatggagtgcttcaaaactaccctagctggggtggtgctcgtcgtgctgctcctgcagcaggcgccggtgctacgggccaacgaccctgaccctctccaagacttctgcgtcgccgacctcgacagcgaggtgacgttgaacgggtacccgtgcaagcccacgccggcggccggcgacgagttcctcttctcctccaggttagccacgggcggcgacgtgaacgccaaccccaacggctccaacgtcacgcagctcgacgtcgcggggtggcccggggtgaacacgctcggcgtgtccatgaaccgcatcgacttcgcgcccggcggcaccaacccgccgcacgtccacccgcgcgccaccgaggtcggcatcgtgctacgcggcgagctcctcgtcggcatcatcggcagcctcgacaccgggaacaggtactactccagggtggtccgcggcggcgagacgttcgtcatcccgcgggggctcatgcacttccagttcaacgtcggcaagacggaggccaccatggtggtgtccttcaacagccagaaccctggcatcgtcttcgtcccgctcacattgttcggctccaacccacccatcccgacgccggtgctcgtcaaggcgctccgggtggacgccggcgtcgtcgagctgcttaagtccaagttcaccggtgggtactgatctgacgatccgagagtattcttacgcggatctaggtctctgctactatagttgtgcgcagtgtatgttatttgattgaataaacttgtcgtcgccatcgcaggccacgaatgaaactaaaatgtattactactgctttcttgtgcttttccccttctaaataaactatacataaatggtattttggt

SEQ ID NO: 28275 - DNA, 966 bp, Oryza sativa
  ref <308>: DATABASE ACCESSION NUMBER: AK103717
  ref <309>: DATABASE ENTRY DATE: 2002-08-28
gactactcccctccctcttcccccctccttctcgagcctccggcgacgacgacgactcccgccgctcttcctggtccatcggcggcgaacttccccgccgacgtgccagatctcaaaccccactagctcctccggcgaaggcgggggaccagaggatgatggggagcaacagcgcaggcggaggcggcggtggcgccatggttccggggggcatggggggaggagggcccatgggggcagccgccgccggcggcggcggcggcggagacgggcggcacgacgacgaggcggtcctcaccgagttcctctcctccctcatggactacacccctacgattcccgacgagctggtggagcactaccttggccgcagcggcttctactgccccgacctccgcctaacgaggctggttgctgtagccacccaaaagttcatttcggacattgcaagcgactctcttcagcactgcaaagccagggtagcagcacctatcaaagataacaagagcaagcaacctaaggataggcgtcttgtgttaacaatggatgatctttccaaggccttgcaagagcacggtgtgaacttgaaacatcctgagtacttcgcagacagcccttctgcaggaatggctcctgcagcaagagaagagtagactcaactgaactcaaagtgaaaccagggactatgtagggagcatgcaaatgaatgaccatgtcggcatccttacccaaccttattacagcatgcaaatgaatgaacctgtcagcatccttaccgaccttattacaacctgatgtctgttccttgatatactattgaccattagcttgtaactaatagtctaataccactggttgcttctgtacttagtatgaagtactatctgtgctgattgattcctctgtgtgaaacctgttttaaattgcctggtggatccttgacagctgaaaactaattgactttgc

SEQ ID NO: 28276 - DNA, 1385 bp, Oryza sativa
  ref <308>: DATABASE ACCESSION NUMBER: AK103718
  ref <309>: DATABASE ENTRY DATE: 2002-08-28
gactcgcctccgccctccgcgcgcgcgaacccctccctcggcggcggcgacgaccaaggcggcggcggcggcagcggcgcaagaggacgcggtagcccgatggcgccgctcgtgccgtcctcgcagccatgggtggagaaataccggccgaggcaggtgaaggatgtcgcgcaccaggaggaggtggtccgggtgctcaccaccaccctccagaccgccgaccttccgcacatgctgttctacggcccgcctggcaccgggaagaccaccaccgcgcttgccattgcttaccagctctacggtccagagctctacaagtcaagagttctagaacttaatgctagtgatgatcgtggaattaatgtggtgaggactaagatcaaggactttgctgctgttgctgttggttctgcacgaaaaggcggttatccctgcccaccatacaagattattatactagatgaagcagattcgatgacagaagatgcccagaatgctttaaggcgtactatggagacttactccaaagtgacaagattctttttcatatgcaattacatcagcaggataatagaaccacttgcatcaagatgtgcaaagtttagattcaagcctctttcagaagaagtaatgagcaatcgcattttgcatatatgcaatgaagaagggctcagtcttgatgctcaggcattggctacactaagcaccatctctaatggtgacctccgccgtgctataacctatcttcagagcgctgctcgcttatttggatcttctatttcttctactgacttgattagtgtttcaggggctatccctgaagacgttgtcaagtcattgcttgcatcttgcaaatctggtgaatttgatgtggcaaacaaggaagtcaataatattattgcagatggataccccgtttcacagttgatctcacagtttctagatgtgatagttaatgccgatgatattccagatgagcagaaggcaagaatatgtaaaaagcttggggaagcagataagtgcttggtcgatggagcggatgagtatttacagcttttggatgtggctagtgagactatccgtgctctttttgacatgccacaaacgctggtcttctaagagaacatggattggaaagatgacgcaggtggccatttctgcgagggatatcttctgtctcctttccaagtttaggttctgggggaagctcattttctcgacagactgttgtgccttttttatgtttgtgatggggattaaatagtgtgaactccacccttgtaaccaactgaattgtgcaccagtgtgtccatggaaagaatggttttcggcctgtcatcttgtacatcatgcatcattttcttgttctgcttatggtttgatgg

SEQ ID NO: 28277 - DNA, 2154 bp, Oryza sativa
  ref <308>: DATABASE ACCESSION NUMBER: AK103719
  ref <309>: DATABASE ENTRY DATE: 2002-08-28
gggtacccctccatccataaatctcgtttcgtcctcgcccgccgcctccgcttcccattcccgccgcccgcttcctccacctgatccttcgccctcgattcgctgcacttgatccgccgctgcgccgcctctcgattcgatccatctctgtgccctagctaccctcgcagcagagtccactccacccgaggtgcgacatggccgtcgggatggcgcctcctcctcccacggccgccgcgctgccgtcccgccgccgcctcagggagcggatccagtcggagcgccaggtggtcggcggcctcctcaagaaggcggaggccttggtggcccgcgccaaggaggacgtccatggcgggcgcgccgcggcggcgcactccgaggcctgcgctctccctcgccgcggccgtttcttgcgtcgtccggaggcccgaccggaggcggaggccaccgccgcgatggacggggctgcctctccccgcaagaagaggcggaaggcggcgacctccgcgagctcgatcgtggaggtggaggtgatcgagccgaccatgcccaaggcgcagagggaccgcctctacggcctcctctcctcgctgtcggcggagatgccattgccgccgcacatcgtggccttgatgcagagccagtgctgctgcgtcgtggaccctaatggcgaagagatggatgtggaccttggctccgcgaaggatgctgccttgttccagttgctgaacctgctcgaggaattcgctcaacagcagaccaccaagattcagccacggctggcggaggagcaagaaccgcccaagatcgaggcacccgacgccaccagccgctcgtcgtcgatctgccaactgatggaggacggcgaggtcgccgatgagggcgcggacatggacatggacatctgcggcggcgtctctcccctggtagtggacaaggttcagttctcgccgcttccgaagcaagaagaggatgatgagttgatcaacaccagcggcggcggcggcttctctctccaatcgccgcctgccaagcaacaagaggaagaattcgtccgcgatgcctcccctgttgcagttgacaagttccctcaaactgaatctcctagctcgagcactggctcctcttctggatcgtcatcatcttcatcttcgagcggtggctcatctggatcatcctgcagcggttgctcctcttcaggcagcgactctaacgatgacggagacagtgcgagcagccgccctgataactctgaacttcccactgaagctgcagcgaagccattggagcagcagcaggtcacagtctgcggcggcgtctctcccctgatcgatgagttctcgccgcttccgaagcaacaagaggatgacgagttgatcgacgtcactggcggcgtctcccctgtatcagtcaacaagttcccagattctcctcgctcgagcagcagtggctcttcctcctcttccagcagcggttcgtcctcctcctcgtcggaaagtgactcagacgacgacggcgacagtgcgagcagcaagccagacaccgcagatcatcccactgaagctgaggcgccgaagcttccgccattggagcaacatgaggtcgcggagcaagacaagaagctgatcgccgagagagcagcatctccgaacaccgagatgcaggagctgatcgccagggcccaggagaggcagaaactccggcttgagctcgagaggaagacggcgcgcgagctcgagaggaagatggcgcgcgagcagctgcaggagatggagaggacggcacggccggtctacgacagcatcgaccccagtgtcatgaagcagctcgggatctccggcgatgcgcagtacatcgtcagcccggtgaaatctcggcacagcctgcatcggcgcggcggcggcggcctgctacagaagctcggcttcttcctcaaagaatagcatgatccatcatcaatggtgtctgtaaagctctgtaggtttcttgtcacattgggatcatatgctctgagcctctgacaatgatctcatcagttgcttgctctcaagcctttgatgtacttaaaaccattgattagcttgcagctaagttatgctgtacatgtgtcttgtattatatctgattatatgaaattatgaatcgtcttaaacg

SEQ ID NO: 28278 - DNA, 3120 bp, Oryza sativa
  ref <308>: DATABASE ACCESSION NUMBER: AK103720
  ref <309>: DATABASE ENTRY DATE: 2002-08-28
gatctgatccggtcggtcggtggtggtggtggtttccgtgtgggggaaatcgggcatgaggggttcggcgacgggggagttattcggatccgtgtgcaccgagggatccctctcctgatcctacccggagtcgtagttcttctcgggattttatcatatttattatatattggaagtgttagaggggatcgtgtgctcggtcgatttcgtggagaggatttgagtgccttttttggagtttgagggggaactgcttttttttttttaattggggttgcaggcgccaatctgccctgcttagggttcctccagtgagattggttctgttgcggaatcgccgatctgcgcgcgctggttcgggttcctccagtgaggttggttctgttgcggaatcggttttcgtgctctcttgtgaggggcttccatggcggcctgtaacgccgccgcagcggctgccgtcgccgagcagccacagaagcagtatggaattacgaaaccgatatcgttggctgagccggcggaggttgacctgcagaagacagcggagttggagaagttcttggttgaagccggtctgtatgagagtccggaggagtcggctaggcgagaggaggtgctaggggagctcgataagattgtaaaagattgggtgaagcagttaaccagccagagaggttacactgatcagatggttgaagaagcaaatgctgtactcttcacgtttggatcataccgtttaggggttcatggccctggagctgacattgatactttatgtgttgggccttcatatgtgaatcgtgaggaggatttctttattgtactacatgacatattggcacaaacagaggaagttactgagttgcaacctgtacctgatgcacatgttcctgttatgaaatttaaattccatggaatatcaattgaccttctttatgcgagtgtctctctcttagtagtaccaccagacttggatatctcgcaaggatcagtactgtatgatgttgatgaagtaactgttcgcagtcttaatgggtgcagagtagctgaccagattcttaggcttgttccaaatgttgagaactttcgaacaacgctaaggtgtttgaagtattgggcgaaaaaaagaggagtttactctaatgttactggttttcttggcggtgtcaattgggctttacttgttgcacgtgtctgccagctctaccctaatgctgtgccaagtatgcttgtctcaagattctttagagtttttactcaatggcaatggccaaatcccgtgatgctttgtgctattgaggaggatgaacttggttttcctgtgtgggatccacgcaaatatcaccgtgacagatctcatcatatgcccataataacccctgcttacccgtgcatgaactccagctataatgtttcaacaagcacacttagggttatgatggagcaattccagtttggtaacaaaatttgccaggaaatcgatatcagtaaggctaattggtctgctctttttgagcctttccaattttttgaaggtgagccagagagtactccagaagagatcctgtcaatggtgaagtcgctggcgagcccacctcatcgcctccttctgttcctccagcaaagcagcgttgagtggtgctcatcactctggttggatgccatcagagatattgatcccactttcaggcgcacgatgatcgtcatctccaagtttgataaccgcctcaaggaatttaccgaaagttgggaagtcgatagctacttaagcgcaagtggctaccttggggataatatacacccgttcttcgtggctcttccaaaggatcgtggaacaatctccaatgaagagttccggaggcaaatttgccaggttgatatcgatgtgttgcgtcacttgagagacaatgttaagggtggcttcaatgaagagaaatatggaccatacattgggttcagttgtctcaagaagtacctggaatctgaacttcagaagaggtacaaagaagcagctccagccaccctggcattgttagagcagagatgtagtgaagtctcaatggacctatccagattggactccaaactgcaagctacatctgatgtctctcagctgagaagatcagcgatgcttcatgctgctaatatctgcacgcatttgcgctcactacttgatggagcagctgatccagcaccagagctatgggggaaaactactgaagaggaacagatgcatagtggtataggcagctggcctggcattaacatgcctgtaaaaccacccaactccagtcttaaattatatggtggtgcagcttttgagagagtaatgcatgaattccgctgtgcaacatactcaatggagtgtccacaggtttcaagagagaaggttgcaaacatactacttgcacatgctggacgaggtgggagtagtgggttgactgaggcagcagctgagatagcacgtgcagctgcacgatcatggcttgctccccttatcgatacagcatgtgatcggcttgcatttgttctccaaagtctatttgaccttgcaatggagcgatgccgctatcaagactcaaaatatcatcaaaatgttgaagatatggatggatatgttggcttccttgctgctcttcgctgttcatattataagtttgtcaaggaattgtccaagcaatgcaagcagatagtgagacatcatcttgattctgttacaagtccctactctcatatttgttacgagaatgacttccttagtggtgtcgggtctgtggcaaactccatgcataggtttaaccacttcccgggagtcacatcttttgacctatcagacagcggttctgcccttgaagaagctcaggagaatgtgccaccaaaggatcgtcaacatatgacaccacctgctaaaggaaatgagtcaaaggaagttcttagagaaagccagctgacggttcctgagacaccttctccagatctgccagttgatatgaatggtggcaagaagaaagacaacgaaaacttgaatgatggtggtgcaagaaaaagacatgcaaggatggcagcatatgcaaacaggaatcatcataacaatgtgattggtggtgatgacctgggctc

SEQ ID NO: 28279 - DNA, 2783 bp, Oryza sativa
  ref <308>: DATABASE ACCESSION NUMBER: AK103721
  ref <309>: DATABASE ENTRY DATE: 2002-08-28
gcgagccgttggatggccatccaacggttgatggatcgtcttcaacctccagctcatggctactctctctctctctctctctcctcttgaacgattccctcctgcctcctccctccccgcacctgcacctgcaccatctccggcgtctctcgcggccggatccgccgcctcctcacccaccgcccaaggcctcccctccctgtatacgaagccccgatgaactgctcctccctccacaacccctctataccccgccagatccactccacggccccaccccaacccaatatcctaatccattcgccctctctcgccggggaagaaagccaaaaggaggaggaggaggctcatcggcgcagggatgctcgggattcaccggccagctcgacctcgttttggtgggggtggtgtgtgtgagagtgagtaacgaaggcttgaggttgaagaagcaacatggatggtttggatttgtgatctactgccaagaatatttggggagaaatcaatcacctcatgtatggcaaatgcaaggatttttgaggagaaatcaaccggctgatgttttgaagctggagccaacacatcaaacattgacccatggtccatcattggagatgaatcctctgttcacgtgacaactgatcgctcatcctgtttcagtcaaaatcctgttgctgtaaggatagaggttgtctgtgacgattgtccagccggtggtgttggaatttacaatccaggattttggggcatgaatgtagaagaaggaaaggcatataatctggtcatgcatatcagatcattagaatcggtggagttgacagcttcactcacatgctcaaatggatcgcaaaatcttgcatcaaattctgttcgagaaactaatttgtcaacttggacaaagatagagctacagttactagctcaagggacatgcagaacttcaagacttgaactaacaactaggaaaaggggagtaatatggcttgatcaggtgtcacttatgccttcagaaacatacaagggccatggttttcgcaaggaactcatgtacatgcttttggacttaaaaccacggtttctacggtttcctgggggttgctttgtcgaaggcaattggttaaaaaatgcattcaggtggaaggaaactattggtccatgggaagagagacctggacactatggagatgtctggcactactggacggatgatggccttgggtattatgagttactcgagcttgctgaagacttgggtgctaaccctgtatgggtgctcaacattgggatgagtcaccatgatgcagttaatggaactatgctcgcaccttttataaaggatgcaactgacagtcttgagtttgcaaaggggagtgacaaatcaacatggggctctgttagagccacgatggggcaccctgaaccattcccactgaagtatgttgcactagggaatgaagattgtgctccattcaagctgatataccgagaaaattatcccaagttctacaacgccataaaagaggcttatcctgacatccaaataatttcaaactgtgatggctcgtctgggccacttgatcatcctgccgatctctatgactaccatatatatgaaaatgcatccactgtgtttttcaagaagaatgaatttgataggacatcacgtaatggtccaaaggtatttgtaagtgagtatgctgttaatggtgaggatgctggcaatggaagccttcttgcatcattggcagaagctgctttcctaattggtttagagaaaaatagtgatgtcgttcagatggcatgttatgcaccactcttcgtgaatgacaacgatcgcgtctggaacccagatgcgattgtcttcaactcctggcaacagtatggaactcctagttattggatgcagacatatttccgtgaatcaagcggtgctatgattcatccaattatgatcagttccagctactctgatttattggctgcctctgcaatcacctggcaagacgctgagaatacctttctgagagtgaagatagtaaacttcgggccaaatgctgtgaacctcacaatatcttcaagtggacttcaagctggtgtagatacggcaaaatcaactgtgactgttctcacatccagcaacttgctggatgaaaattcatttagtgaaccaaacaaggtcgtgccagttgccagcgagttgccgaatgcagcagaacagatgcaagtcttacattttccttactcaatttgttcgtttgatcttgctctggtttagccgtttaattagcacaagtttatcaggctaacatgttgggacgctgtttctgtccttaatgacatcccaggatttcatagtgatcaaaagctaattattccactgtatcagagcccattaggccaaggatggttttaattaaagcttagtttgaacaactcgctttatttataatatatccctttattgcttctaagaaatcatcgagttgtttgtttggatattagtaatgatatgggaattattaagttgaccagataaaaatgtagaatgcatcaaaaaggaacttggtatcaatgagatcacgtctcctttttgtttgatagccatggatatgatgtttctataatatggggatggtgatgagtctctcttttgttttcttgcggtaatgcagctctgttaatttctctattacggtttggcaagatggccggtgtctccggatgtgattttttttgagtaaatttcactttggacctgttttattgaccaaagtttcaccatg

SEQ ID NO: 28280 - DNA, 623 bp, Oryza sativa
  ref <308>: DATABASE ACCESSION NUMBER: AK103722
  ref <309>: DATABASE ENTRY DATE: 2002-08-28
gcctcactgcaacactcttcggggtgcaggcagccagagccatggcaaccatcctcgccgtggccgccatggccaccttccaggctccgacgaccctcccggggcccctggctcctacgctaccggttcgccggaacgtcgtgtcgttcgccggccgccggcaggggcgcgcgctgggaaggctggcggtggtggtcgcggcgggctcgccgacgccgccggagctggcgcagaaggtgtcggagagcatcaagcaggcggaggagacgtgcgcgggcgacccggagggcggcgagtgcgcggcggcgtgggacgaggtggaggagctcagcgccgccgccagccacgcgcgcgaccgcaagaaggacagcgacccgctcgaggagtactgcaaggacaacccggagaccgacgagtgccgcacctacgaagactgagcccacacgagcgccaccagttcatccatggctttcgccattgctgttactgtgttacacatttcagctctaagcaagctagagcagcatggcatactggggtgtacactttgcctcttgggcgtgtaagtttgatcgttaatttgtcttagtttgcaataatgcgaggttttttatttgttaatt

SEQ ID NO: 28281 - DNA, 1987 bp, Oryza sativa
  ref <308>: DATABASE ACCESSION NUMBER: AK103723
  ref <309>: DATABASE ENTRY DATE: 2002-08-28
gctttctcctccccctcccgccgccgccattcgcctcccacgaaaaccctagccgccgccgccgccgccgctgcccaaaatgtccacgccaccgccggccgccgccgcccccccggccaccgaccaaggcaagaccaagtcgaagaagaagagcaagaagcatcaggaggacacctcctcctccctggccgtcgccgcggcgtcggtggatgaggcggcggaggccaaggccgacggctacctgatcaagccgcagtcggtggcgccgccgctggacacgtcggcgtggccgctcctcctcaagaactacgaccgcctcaacgtccgcaccggccactacaccccgctccccgccggccactccccgctcaagcggcccatcgccgagtacctccgctacggcgtcatcaacctcgacaagccgtcgaacccttcctcgcacgaggtcgtcgcctggatcaagcgcctcctccgcgtcgagaagaccggccacagcggcacccttgaccccaaggtcaccggcaacctcatcgtctgcgtcgaccgcgccacccgcctcgtcaagtcccagcagggcgccggcaaggagtacgtctgcgtcgcgcgcttccacgccgccgtgcccgacaccgcccgcgtcgcgcgcgcgctcgaggcgctcacgggcgccgtcttccagcggcccccgctcatctccgccgtcaagcggcagctccgggtccgcaccatctacgagagcaagctcctcgagcacgacgccgaccgccacctcgccgtgttctggatctcctgcgaggccggcacctacgtgcggacgctctgcgttcacctcggcctgctgctcggcgtcggcgcgcatatgcaggagctccgccgtgtccggtcggggatcctcggcgagaccgacaacatggtgacgatgcacgatgtcatggacgcgaggtgggcgatggacaacttcaacgatgagtcctacctgcggcgcatcgtcatgccgctggaggtcctgctcactagctacaagaggcttgttgtgaaggtttctgctgtgaatgctatatgctatggtgcgaagctcatgatccctgggttgcttcgattcgagaatgagattgaagtaggggaggaggtggttctcatgacaaccaagggggaagcgattgcgatcggcattgcggagatgaccacggctgttatggcgacttgtgaccatggagcggttgccaagattaagagggtggtgatggatagggacacatacccgaggaagtgggggcttgggcctgtggcgcttaagaagaaaaagatggttgctgaagggcttcttgacaagcatgggaagccaaatgaaaagacaccaagtgagtggcttcgcaatgccgtgcttccagctggtggtgatgcaatgattgccggcattgctgcagcacctgagccagagaagccaaaggtgaaagaggaggcagatgtggctgaagagaccaaggagaagaaaaagaagaagcataaggactgggcaggtgacaatgctgatgaggggaggaagaggaaggttggagatgatgatctctctgcttctgtgagtgcgaagaagattaaggttgaggaagaggctgatgcagtggaaggggaaaagagtgagaagaagaagaagaaaaagaaggacaaggctgaatcggcatatgccgatggagaggtgaaggctgagttgtctgatggggagaagggtggcagtgagaagaagaaaaagaagaagaagagcaaggaaggagaagctggggatgatgaagctgagaaaagtgagaagaaaaaggagaagaaaaagaagaatcgggatgcagaggtgacacaatagttggagagtgtaattttagccagatcgttgacattgtaggttgcagattggaggtgtctacactgacctctggcttgttgttcacttgcaaacaataatcattctagaggcctagtttagcatttttgtacc

SEQ ID NO: 28282 - DNA, 1072 bp, Oryza sativa
  ref <308>: DATABASE ACCESSION NUMBER: AK103724
  ref <309>: DATABASE ENTRY DATE: 2002-08-28
gtgctagccgctccttctcctctgtcgccggcggcgcctccgaccaccgcagggctccgtcccgccgcctcccagggtagtcatggcgagattgatgtcgtccgccctcatcaggggtctcgtgagatcgagctgctcgccgaccgtagctgctgtggcccaaccaactatccatcagtttaggaactactcatcaggacttggtggcgattctactgcaactggggactcaagttcaacacgagttgctgctgatcctgatacacatcaagatttccagcctacaaccaaaagttccaacatgtcttttgatgacattgtttctcaggatatcaaggagaacccagtcctgatctacatgaagggttatcctgatgctcctaggtgtgggttcagtgcgttggcagttagagtcctcaagcaatatgatgtccctatcagtgctagggatattttgggagacctcaagctcaaagagagtgtcaaagcccacaccaactggcctacatttccacaaatatttatcaaaggagagtttgttgggggatctgatatcatattagatatgcatcagaagggtcagcttaaggatgtgcttggtgatattgcacaaaagcgtgaacaaaacgaatcatcatgaagaagatatagtacgccatttttgtcacaaccaagtatggatttgcgttctcctgtttgatcttttcatctgaaaaccacacttaaagtttgactgcaatggttaatgtgacaggacaaaacgttatcgagataaaagcgatatgtcattttcagtttttcacagaaaagaaatgcaatatggcttgttgcattacagcggattctgtgtctattggattatcaatctatgaagccaaattagtttgtttctgggcaataatgtgtgagctccacagtacatcacttatgaaacaaagctttacataacaaattagtgtttgtttttttttagctttgatctccccagtggctgggatagttattttattccgtcgtgtagcttcttttaaatgcgatatgccatattcacaaaggaatcatatgccatctc

SEQ ID NO: 28283 - DNA, 2004 bp, Oryza sativa
  ref <308>: DATABASE ACCESSION NUMBER: AK103725
  ref <309>: DATABASE ENTRY DATE: 2002-08-28
gacgcctcatctgctgcgccccaaaaccccgaacccccacactcacgcgcggcggcgttcgccggagagcctcccctccggccgccgccatgccgccgcctctccaggcccagcgcctcctcctgtcccaccgacgcctcccttctccccacctccgctgcttcaccgccgtctcctccctcccgtccgctcccgccaagacggtggcggccgcggcggcccacgccccctcctccatcctctccatccgcgagtcgctcctctccggcgagaggaccgcggcggagatcaccgcggaatacctctcccgcctccgccgcaccgagccgagcgtgcgcagcttcatccacgtggcggacgccgccgccgagcgggaggcggaggagctcgaccggaggattgccaccgaggggctggatgcggtggggcctctggccggggtgctcgtcggcgtgaaggacaacctctgcaccgccaatatgccctccacaggtgggtcgcgaatactggacggttaccagccggcgtacgatgccactgcggtgcggcggcttcgtgaggcgggcgccattgttgtggggaagactaacctagacgagttcggcatggggagcactacagagggctccgggtttcaggtcacaacaaacccttgggacgattcacgtgtgcctgggggatcctcaggtggttctgcttctgcggtctctgctagacaatgtgtggtatccttagggagtgatacaggtggaagtgtgagacagccagcatcattttgtggtgtggtagggttaaagccaacctatggccgggtttctcgtttcggcctcatggcttatgcttcatcactagatgttgtgggatgctttggttcatcagttgttgacactgcgacaatcttgtcagtaattgctggccatgacaaaatggattcaactagtagctctcatgatgtttcagactataaatcagagttggtcccactagatttgctagaatcaaaaccattaaatggtatgagaattggaattattcaagaaactcttggtgagggtgtagaaactggagtcatatcatcaatcaaggatgctgcttctcacttggaacaattgggatcagtggtggaagaggtttctctgccttcattttctcttggcctacccgcatattacatactggcttcatctgaagcctcttctaatctatcacgttatgatggtatcaggtatgggaggcaggtttcaggcgatgacttgaatgaactttatggaggttcccgggctaacggtctgggtcacgaggtcaaaatgagaattttgatgggaacttatgctttatctgctggatactatgatgcatactacaaacgagcacaacagtaggtaaggacactggttaagaaaagcttcaaagaagctctggaaagatacgatattcttgtttcacctgctgcgccatcagcagcttacaagataggtgaaaagataaatgatccattagctatgtatgcaggagataccatgacggtgaatgttaatttggctggtctccctgcattggttgtgccttgtggatttgttgagggtggatctgcggggctcccagttggacttcagatgattggatcccccttcagtgaggggaatttgctgagaatagggcatatctttgagcaaacgctccagaattacagttttgtcccaccattgctggcagagagttagctgcaatgcgccatcaatcatctctgccttgttcatggcttcgaggccctttctattcaagacaagattcttttcatgttgtatattgaccgagacaatttgttaaatgcttgtataattgattgggttctctcgtgtaatagttgtttagaattgagaccatgtgatggcccatctggaaacagcacacacgcggccaaaattggttcatattaattatgttttttccctctatatattggataataatagtggagggagggacagggaactgttcgtg

SEQ ID NO: 28284 - DNA, 1920 bp, Oryza sativa
  ref <308>: DATABASE ACCESSION NUMBER: AK103726
  ref <309>: DATABASE ENTRY DATE: 2002-08-28
gagttcacgcaatcacgccctcaatcccttctctcctcctcgcatctctcacgccgccccctgacccagcgccgtaatcatcgcccgccttccgcatcgcaagcggcggcccctctacgccgattccccaccgccgccaggggggcgactccctcaccgaaccgcgctgccgggacaccgacgcccatctcgtccactcgcccgttcctccgcggcgcgccgccggatcaacgtcagtcgcctgcctcctgcccggtctcctccgtgcctccaccacctcccgaatcccggcctgccaccaccctgtcccgcggcggccttcgtcatcgacagtctgtcaccggcgcatctcctttcttcccctcatcacagagggacatctccatttagaaaaggtaaacaaaaaatcgtttatgccgtctgatttctggacatccccatatagaaaattcgtttcataggtttcttccgtggcagtgtgatatggtattgaactgactgatgtttctccgatatgaaatggatgcagtttgttaataggtttaaaatctgtttggaaaaactagattctcctgttcaaagcttgaacgtgcagaattgggtaccgtggcatcacctccattgctttctaggacagttaaatgctactaaattgcagggcctaacctttctatttgtatgtgctatgagtcaatccaatgaaggcataaattttctatttatcgtagtccaattctggttctgccttataatttgggagaaaggtactactgcatatgaccaggtctcctatacattgtagatatcattttgtgaaagattaaaaccatcttgttatggtagtccccgaattgtaaagttatacatgaaatcatccaaactgaatgaggtttgttttgcttcgattgtattttattttttttataactctcagctgatttgatttcatttcatttaggtggatattaaatgaaaggtttattccagatcaaaattctaccgacatatatgctctcaacgcattactatagaagggattgagattctgttcatgaccattgctttcagtttcaggcaagtatatcatatgatctggaatatttgaattaacacatcactcttggttgtcccaagagtccatacaacctggaggtcatcaacaaaattaatatgatttggaattctttcacatgcatgtcaatttttcttagttgttaattaagcctcaagtgggtcaaaacgaccaaaaatcaacatatcaattctctactgttttcttctgtacatactagcacagtgctgcatcacactttctcaggtaaaatataatatgccagtatctcccttgctttctaggatccgttgattttaaatatcagatatacttttttctggttgatttgctaagtgctggcagtactacatgtctatcagagaggggtgccttgtctaatgtacctcaagttgcattgagatttgagagggccacaaaaacattcaaggataggaaggtagctgtgcaggggaaaaaaaagcattgatcaaatggttaccagtaagtacgcacaatatattactacagagggaaagggaggctatattacctcagtccccttgtcgtctatgaatcctgctggatgttagagtaatcgttgagaagccatttggaatggacttggactctgcagaagattaattcagggcccaccttggggttatttgaggaaaatcaggtctacagatttggtcacaacttaagaaaagagttggtacacaacctggtaaaggctataattttgccaataattaaccacctccgacataataacatttcacagggaagaagttggtcttcatgattttgtattgcttaaacatgtttacacttcccattgtgaatcgatctccattgttcgcctt

SEQ ID NO: 28285 - DNA, 1738 bp, Oryza sativa
  ref <308>: DATABASE ACCESSION NUMBER: AK103727
  ref <309>: DATABASE ENTRY DATE: 2002-08-28
gagtagcttcgcccacaactcagctctcccgagctctcagggcgtgaatgataaaccctagcctccgatccgaggctccgagctcgcttcccctctctctgcgaccaggaggtgaggctgcttagtgcggggcatcatgcctgctggtgacaacccacactcgatctcagagaaaaaggcagcactgagagaatcgcctaaagaacctaagaatgtcggtaatcagcagcccaggacttctccttttcctaaggataaagctgctgggacagttggcatcaagcggccgcaacctaatggtcccttgaacccaactaacccagggacaaatggccatcttgtatatgtgcgcaggaggcttgaaactgatcatagcaaagttagctcttatgctagtgcagatagtatcagttctctaagctcaaagaaaactgttgtagacagacctcaggaacaaggtttgaagcatcagaacagttcgcttcaaactccgttagctcctgctgcagctgctgccacctcccctgcttctccatctggaggttcgctgcctcaaaattctctcagaaagcaatctctaggaaaggtggttgttcagccaagtattatagtgactgctaatcctccacctcgcaatgtggtgtctactacttcagttcctcagaattctatagcagctaagttggcatgttctagtgttgccgctgctagtcctccacctcgcaatctggtgtctaccactccagttcctcgtaattctataacagctaatttggcatcttctagtgtcgcggctgctagtcctccacctcgcaatctggtgtctactactccagttcctcataattctatagcagctaatttggcatcttccagtgttgcggctgctagtcctccacctcgcaatctagtgtctactactccagttcctcgaaatcctatagcagccaatgtggcatcttctagtgttgcggctgctagtccacctcgcaatctggcgtctactactaaagtttctcagaattctatagcagctaatttggcatcttctagtgtttcggctactagtacagcatctcgtggtgctgctccagcatgttatccggttgatccacaaagatcaagcaatcaagattggaaagagaggtttattaggctgcaggctttcttgagaaataacgagcaatcaggacaggaagaatatatccacatgcttcggtctttgtcatctgttggccgaagcaagcttgccattgagctggagaacagagcagtcaagctcttgattgaagaagggaaagagctgcagaagatgaaagttctgaatgtactgaacaagctttcacctactgatgctctaccattaccaactcagcctgcttctgttaggcatctggcatttccaccccgctgacgagaagctgaaagttcagccatgtcacggcataataggtgttgaagaagttcattctgaaatcttcccagctgacaacctgaatgctatagcatggttagcatgtgttgcctttgtgacaataagccatttatatctgccaactgatgctctctcagtgtatcagagcatatcggcagtgcgtagtgtgcattccattccgtagccaaagaaatgctctggatagacggatggttcatcacttcatctacttcaactaacctgcaaatttcatagccccctgtgctgatatttcttctgcgtgcaaaatgattgccatgtttc

SEQ ID NO: 28286 - DNA, 2031 bp, Oryza sativa
  ref <308>: DATABASE ACCESSION NUMBER: AK103728
  ref <309>: DATABASE ENTRY DATE: 2002-08-28
gtttccctcccctctcccctctccgccctagagctcgacggcggcggcaacaagggctgggggatgaagatatccgtgaagacactcaagggatccaccttccagatcgaggtggactccgcgcagaaggttgctgatgtgaaaaggataatcgagactactcaaggacagcacatttacccagctgagcaacagatgctcattcatcaggggaaggtgctcaaggatgacaccacattggatgaaaacaaagttcttgaaaacagcttccttgttataatgcttagacagggtaagggctcatcaagttcagctcctgctacatctaaggcaccctcaaatcaggctccccctactcaaacagtgcctgcagctcctgcatctcaagcaccagttgcaccagcaactactgtacctgtcactgtcagtgctcctaccccaactgccacagcttccccagctcctgctgttgctgtatcctctgaagctgataactacggtcaggccacctcaaaccttgttgctggcagcaatctagaggcaacaattcaatcaattcttgaaatgggtggtggaatatgggatagagacattgtgctgcatgctctaagcgctgcattcaacaacccggagagggctgttgaatatctgtactctggtgttcctgagcagatggacattccagttccacctccgagtatacagccagccaatcctacccaggcttcacaggcaactcaaccagcagctccatcaattctttcgtctggaccaaacgctagtcccttggacctctttcctcaagcccttccaaatgcttccaccgatgctgctggtctaggaaatcttgatgctttgcgcaataatgcacaattccgaaccttgctttctttagtgcaagccaatcctcaaattttacagccattgcttcaagaattggggaaacaaaatccccagattttgcagctgattcaggaaaaccaagctgagttcctccacttaatcaatgaaccagctgagggtgatgatgaagagaatttgctagaccagtttccagaggcaatgccacagaccatagcagttactccagagggtctacggcgacccgctccagcacccccaggtcgagacctactggggcaacgtcaaccccatcggggtgagaagctgctacgacgaggggaagaggacggcggagacactgaccatggactaccaccgtggcgccaacctcgaggtgaggattgctcggatcttcaacacctacggcccccgtatgtgcatcgacgatggccgggtcgtcagcaactttgtcgcccaggcactgaggaaggagcccttgacggtgtacggcgacggtaagcagacgaggagcttccagtacgtctccgatctggtggaggggttgatgaagctgatggaaggggagcacgtagggccattcaacctgggaaacccaggggagttcacaatgctggagcttgccaaggtggtgcaggacaccatcgacccaaacgcgcggatcgagttcaggccgaacaccgccgacgacccgcacaagcggaagccggacatcagccgcgccaaggagctcctcggctgggagcccaagatccccctccacaagggcctcccgctcatggtccaggacttccgcgaccgcatcttcggcgaccacaagccccactccgtcgccggcgacaactgaatctgaatctgaactcgatcgatcttatctcaccggcattttctgtagaagttgatcaagatatacacagtactaccagcatagaagaagcaggagcagcagctagcagtactggtgagtggtgactgatagatccatgaatggctgcattgcaagaatggggatgggatcgcgtcagaatcgaaccaatacgcaagctcatgtttgtaggagttgaatattttatctatgctgcggaattaagcaagcatgatacaagatatatgtaggtcgtcgctggagtggtagctgggatgcagcacgagatcgccctgttatttctt

SEQ ID NO: 28287 - DNA, 1414 bp, Oryza sativa
  ref <308>: DATABASE ACCESSION NUMBER: AK103729
  ref <309>: DATABASE ENTRY DATE: 2002-08-28
ggcagacaccacaccaccaccgcaacggaaacacggtgaacgcctcgtcccgaaaccccggaaagccggcgagagctcgagaagtcgagaccaacctcgccgagcggatcactcgcactactcccacctcgccgcccgccgccgccgccgccgggttcccgtgctgcgcgcgcttcgatctccttctccttctccttctcgcggccgttcttgtgcgtgagtgagagacagtgaggtggtgggagacccgtgggaagggagaggggggcggaaatggcgaagcacttcgtgctcaacaccggcgccaagatcccctccgtgggcctcggcacctggcagtccgaccccggcgtcgtcggcaacgccgtctacgccgccgtcaaggcggggtatcggcacatcgattgcgccagtgcgtacaacaacgaaaaggaggtagggttggctctgaagaagctatttgaagagggtgtggtcaaacgcgaagatctgtttatcacgtctaagctatggtgtgatcatcatgccccagaggatgtgcctgaggcactagatgctaccttgaatgacttacagcttgagtacctggatctttacctcattcattggccattcagaaccaagaagggatccagcattggcaaacctgaaagctacttaccacctgacatcccatctacctgggcagcaatggagaagttatatgattctggcaaaagtcgtgccattggtgtgagtaacttctcatcgaaaaaattgggtgacctgcttgctgcagcccgtgtacctccagctgttgaccaggtggagtgccatcctggttggcagcagatgaagctgcataacttttgccagtcaacgggcattcatctttctgcatactcgccgctaggttcacctggttcaacatttatgaacggcaatgtccttaaggaacccatcattatctcgattgcagagaagcttggcaaaactcctgcacaagtggcgctgcgctggaacattcagatgggtcacagtgtactcccaaaaagtgtgagtgaagaaaggataaagcagaacttagatgtttatgactggtctattccagaggacttgcttgctaagttctcggagattaagcaggttaggctgctcaggggcaacttcattgtcaatccacagagcgtttacaagacccatgaggagctctgggacagggaaatttaggagttccgtcagtgccaatcacgcttattgaacattgattgtattagcaaatttacgcatatttaatgtttggtggttcagtgctctcgagctcctctgtcctatgtaatgaagtgcttgatcagcagcatcatgttcccttggaaatcctttttactgctcctctgaataaaactggaatgccattttggtgcttgtgcttcgc

SEQ ID NO: 28288 - DNA, 1446 bp, Oryza sativa
  ref <308>: DATABASE ACCESSION NUMBER: AK103730
  ref <309>: DATABASE ENTRY DATE: 2002-08-28
tgctcgctcgccgtcgccgtcgcaggagactccggcgagcgcgttgacgtggccatgtcggggacggggtgcttcccggcgggggagatggcggcggtggcgagggtgtgccgggacggggcggcggcggcgaggctcaagacgggctccctgctcgccatcctcgtggcgagcgccgtcggcatctgcctccccgtggcgctcacgggggcgttccgcgggaaggccgggtacgcgcgcggcctcctcctcgtcaagtgctacgccgccggggtcatcctctccacctcgctcgtccacgtcctccccgacgcgcacgccgcgctcgccgactgcgccgtcgccacgcgccgcccgtggcgggacttccccttcgcgggcctcttctccctcgtcggcgcgctcctcgccctcctcgtcgacctctccgcctcctcccacctcgaagcccacggccaccaccagcacgcggaggagggggagtcgccgccgccgccgccgccgacccaccaaccctacgccccaatccccaccaccaagaagtcccccgtcttcgagctctccggcgagatgagccccaagaagcgcgcgcactcagacgacacggaccgggacgacgtggcgctcttcggggccaagagcgcggtccggagcgacgaggtcgtcgtcgccccccgtgtcggctgccatgggcaccacgacgtggtggaggttggggaggaaggaggaggaggggaggaggaggaggcgaggaggaagcagaagatggtgtccaaggtgctcgagattgggatcgtgttccactcggtcatcatcggggtcaccatggggatgtctcaggatgtctgcgccatccggccgctcgtcgtcgcgctctccttccaccaggtgttcgaaggaatgggcctcggcggctgcattgcgcaggcaggttttgggattgcaacggtgggttacatgtgcgtaatgttctcggtgacaacaccattgggaatacttcttggaatggcaatattccatatgactggctatgatgatagcagtccaaatgccctaataatagaagggctccttggctcactttcttctggaatccttgtctacatggcacttgtcgatctcatttctcttgatttcttccacaataaaatgatgtcatcatctaataaattgaaaaaggtctcttatgtcgcattagtgcttggatctgcatccatgtctatattagctctctgggcataggtcataggtgcaaccagagtgaaatacggtgtattgatcctttgtaggaagaaatggatgttttgggagtcaggacttccctcatgtaaattaaacttccacataatgggaaacttaaaaattcttgaatgccttttgatactgtgagccattttcgtctcctgattaccatggacaatcaaaacgtacagtgatttatctttc

SEQ ID NO: 28289 - DNA, 1561 bp, Oryza sativa
  ref <308>: DATABASE ACCESSION NUMBER: AK103731
  ref <309>: DATABASE ENTRY DATE: 2002-08-28
ggtgagtgttccccttctccatctacctgtctgtcccccaattccccacttccccaacccaggcgatcctccgccgccgccgccggcggccggccgcctccctccgccgccacgcagccgcgccccctccgccggacactccagaccccggtgagcctcccctcctccgccggccgccttgcccgcgcccgaacgccacgccaagctcaggatcatttcgtcgatttcgtggattggatggccaaccttggcggtggcgcgatgccggcgggatcctcgggcggcgacggcgaggtggaggccgggttcgcgaagctccagggggaggatttcgagtactacatgcagacctactcgatcatgctggggcgcaacagcaagaagtcgacggtggacgtggacctctccagcctcggcggcgggatgaacatctcgcgccaccacgcccggatcttctacgacttccagcgccgccgcttcgcgctcgacgtgatcggcaagaacgggtgcctcgtcgagggcgtcctccacctccccgggaaccaccccgtgaagctggattcccaggatctgctccagattggggacaagaagttctacttcttgctgcccacccggtccatcttcgcgtccgccgccgctgctcggcatccgcctatcatcccgcagcagatgccctccaccatcctatgtgcggacaggccgccctcgtctgtctgaatttcatgacaggtcctttgagggtgactatggccgggagggtgatgagattgggaatggtatcagtgagagtggtgggatgagggggaagttgattaagaggaacaagaagctgtgcggagtcggagatgtatggcgggcaccggatcaatgttgaagcaatcgggacactcggtgaagacagcagatcagaaataagatcaaggggtgacagggatatggataaccagcacatcctgcaagcagaagaaaaggatgtagtgtcatctgttgcaacagtgttatctgacctctgtggtcctggagaatggatgcctatggcaaaactccacacagagcttcttgaacagtttggcaatgtgtggcaccacagcagggtccggaagtacctttcaccagaggactggtcgccaactgaaacaaaaggtaggccatggtacggtctccttgcattgctgaggaagtatccggaacattttgtcatcaacacaagatcgaaaggcagggtaacatcggagttcgtctcgctggtctctttgctctcctagaggtaacctggaccgtggcataatctgttctcaccgttctggccctgctgaagaatgattcgcatcttcaatcgctgaactgaattgaagcctgttgtactttactggcctgtgtttacccttagctatgtaatccggagaaatacatagggaaacaggattttaacttatgttagtagctgggttcatgtctcactgttgtgtggggtgagaatgtatgtctagtgttgttgagactggaagcgcgaaagttcacagcattttgctgattggaagattttgaaactttgccg

SEQ ID NO: 28290 - DNA, 2568 bp, Oryza sativa
  ref <308>: DATABASE ACCESSION NUMBER: AK103732
  ref <309>: DATABASE ENTRY DATE: 2002-08-28
gttggcttcgcgactcctcctcctcttctcgtcttgggtttctctccctcctcctcgccgtcgcgtcgccgcggaggcggaggcggagagccaaggccgcggcggtgcagccgccctcccctcctcccgccgccatggtgaggccgacgcaggacgcgatcgacaccttcgtcggcatcaccggcgccgatgaggccgtcgccgcccgcaagctcgaggaacatcatggtgacctaaatgaagctgtgaatgcctatttcaatgaaggagataggaccagcaccagagccaatgaaaatcctatacctaccggttatgatgacatggagttggatgaaccatttggtcctgttcctacatttcacatgcctttgggcaaccctttttcacttctggatcaaggttttttagaacgagctgctgctgtgtatggtgggggacctcatattacacaccctagggaggtgaggcggatagatgttgaagttaaggacaacaatactccagcaggtagttctggtcatggtcctgttattgaagatgttactggacatgagttttcacatgggccggaaattcgtgggactgttctgattgatgaagatgatgatgatgataacttgccatctgctcaagatactcgtctcccaagcaatccttcaacttcaaactattctgtaccaagagctcctccaattgctaatgttagtgactacaacaatgacatagaagaggagatggttcgcgctgcaatagaagcatcaaaaagggacgcagatggactgacaaatggtctaagaagtggagaacgtgaaaatgcatcacgtggcagagatgatgatgagattgctcgggcggtttctatgtccttggagacagcagaacaagagagagttctgcgccaagtgggagcgcatgtgtctgatcattctgatttatccgataaggaagacattgaaggagcaactgggacagtggaaaggcaagtaccaacttcagggaaagttggaacatctgatcagttggtagatgaagagaatttccaggatgatgacgttgaggaacattcttttgttagacaacactctaggcgtgtaccatctggaaatgatgagtccacagaagcacttgaaagggccaacagtcatccatccagtctcctccctcataacattgaaaacaatcagcagttcaatggagtttttccatcagagtggggtggcatttcttctgaagaacatgatgaagctgttatgcttgaagctgcaatgtttggtggaattcctggaagagcagcatatccattttctctcccgtatcatcaaaactcaagtcgctaccccacggttgctcatcctccgtcaccaacattaactgcacaacggttgttaagggagcagcaggacgatgagtatctagcatctctcgaagctgaccgagaaaaagaattgaaggcagagcaggaggctgagctccgcagattagaagctgctgctgaaagagaagctgctattgcaaagcaaaaacaagaggaggaagaaaagcgaagaaaacaaactcgagccttctaattaaggtggaacactaataaaaccagggcaagcgtgacggctcatcgtcatcttccctccattaaatcggcagatcgactcggtgtccgcatctctccacttctccaaccaattgcccgattcatcgatctctcatcgttcgttcgctctagctaggttgaagactcgggagtctagctagctgctgtcgagagtgatggcgtcgtctgttcccgaggatggtgctagcgctgctgctgcggccgctactgctgaccctgctgctgctgcggctgaggctcccgggcgacgcatcgtggtggccgtggacgagagcgaggagagcacgcacgcgctcacctggtgcctcgccaacgtcgtctcctcctccggcggcgacacgctcgtgctgctccacgcccgccgcccccgccccgtctacgccgccatggacagctcagggtacatgatgacctcggacgtgatggcgagcatggacaagtacgccgccgccgtctccgccgcggcggtgggcaaggccaagcacatctgcgccgctttccctcacgtgacggtggagacgatggtggagagcggggacccgcgcgacgtcatctgcgacgccaccgagaagatggccgccgatctgctggtcatgggcacccatggatacggcctcatccagagggcgttcctgggaagcgtgagcaatcactgtgcgcagaactgcaaatgcccagtgctgattgtcaagaggccaaaataatagttgctaagtaatatacttagtactggtaataaagctcaactaatgcagagcttgctagtttgatgtttgtaaatattggcatgtcatgcttggtttgttgatcgagaacaaaagctatatgttgtttggtggcatggcagcgttcgatgttcagcgaccgatgcggatctgcggatctgttggcaccttgtaatggttgaaatttgcaggctatttgactttttctatgcatctgagtaattttaattc

SEQ ID NO: 28291 - DNA, 1629 bp, Oryza sativa
  ref <308>: DATABASE ACCESSION NUMBER: AK103733
  ref <309>: DATABASE ENTRY DATE: 2002-08-28
gacttcccatttcttttacaccccaatctcaccctctccatctctctctctcaagctctaaactcaatggtaatgggcacttaatagtagcactaatactagctactgttttagcagcagcatccaagcccaatcaaatcaagctgcctcactgaaagtctgaaactggccaatcagagagctcctgcaaaaacaaccctgaaactactctggtttgctatcatccagctagattctgttgcctcctaacatcgtcgtttcgccgccgtcactttgctcgaatcatcagagctctagggctacctgctaattaaccatagccatggggattattaactggatgcagaatcgactcagtactgctaaacaagacaagagacgaactgaagctgctgctgtggcctcgtcagctcgcagacgaggaggagggggaggagagagttgccgccaagaagaagctcgcgacgagatcaagatcgccggagatcacctcctctccatcggcacgctcgggaacgagtcgccgccgcgaccgccggcggcggcggcggcgacggcggcagaggaggtggcggacttcaccatcgaggaggtgaagaagctgcaggaggcgctgaacaagctgctccggcgagccaagtccaccaagtccggcagccgccgcggctcgacggcggcggagcacgacgccgacgagcgctcctcctcctcctcctcctccggcagccagctgctgctgccgctcgacaggttcctcaactgcccctccagcctcgaggtcgaccggcgcgtggcggcggccgacggcgagttctcgccggacacgcagatcatcctcagcaaggcgcgcgacctcctcgtcaacaccaatggcggcggcgccatcaagcagaaatccttcaggttcctcctcaagaagatgttcgtctgccgcggcggcttctcgccgtcgccggcgccgccgcccaccttgaaggatccagtcgaatcaagaatcgaaaagttgttcaggacgatgcttcacaagaggatgaacgctcgaccgagtaatgctgcggcgtcgtcgtcgaggaaatactatcttgaggataagccgagggagaagatgcaaagggagcatctccatgatgatgaagatgatgatgagaatgcagaagatatctttaaatgggacaaaactgattcagatttcattgttctggagatgtagaccgagacgcacgattcaatgcgatcattattgtttgcacaatgactacatgatggtggcctggtgtcctgatttacgcggaggaaaattcgcagtaattttgatgccacaataatccccatttgttcatgaggttcagttgaatggcgaatcgatcgcacgggacaacatacagaaccgaatgcgatgcgcgacggtgtaattctgaacgaagatcaaacgtcgactggctggctagttcaatcattattggatttgagctgaaaataggagaaattttcaagctctgttatctttttctttttttcagatttcagatacagttggtgtacgtttcaccatatagtactactccccccaatgtatactccatttccattaaatttgtgggatacagcaacaagttttcatttcatttc

SEQ ID NO: 28292 - DNA, 975 bp, Oryza sativa
  ref <308>: DATABASE ACCESSION NUMBER: AK103734
  ref <309>: DATABASE ENTRY DATE: 2002-08-28
gcctgcgaactctgaccgcgagcagccatggagttatccattgcgcctgcggcgatggcgatggcgatgggcctcctcgcgaagaaccccaagatgatcaatcacagatatgccagtgacatgcaactgcagcatcgcctatctccagcttgttcggtgatgttcaacaagcagtgttcataccgaatcacccgtaaagcttgcagtgttcttggggcagtatctccgatacaatgtacagaaaccagcacagagtctttagtatctttcaaagattttcttgtgtctgtgcaaactgaagaggatggactgataaagctacgagtaactgtagctgatacaatgacagaatctatctttgagaaagttttctcaaagaatgttgctgctgcacaaccacttcctggctttcgacgaatgaaaggagggaaaactcgagatataccaaaagagattgctctgcacttaattgggccatcaaaggtgaagaaagaaaccatcaagaatatcatcagcctcacaattgccgaatatgtccaaaaggaggacctcgatgcatcaagaaatctgaaggttctacagacctatgaggagcttgaagcagcattcgaacctggaaaagagttttgctttgatgcaacttttcatttacagtaggttaatgcagttaaggactcgggatttagatagccattagagatgacccctgcaaccaaaggggcttccagttccagctgatgattaatagcacaacctacagataaacttattatctagacaatgatgcatacgaacacttgttagtcagtacaaagtgaaattatgttgcctggctatctgtattcttgtaaaaacaacatgtttttagattagcaaattttcttgcagtcctcgttaagatggccgtgtgcacctttgcatgtagaggccgggggattataagttttccattattataaagaggaactttcttcc

SEQ ID NO: 28293 - DNA, 1760 bp, Oryza sativa
  ref <308>: DATABASE ACCESSION NUMBER: AK103735
  ref <309>: DATABASE ENTRY DATE: 2002-08-28
ggcatcttcaccctcgcgcccttctcctccctcgcctcgctcacccatcacctcgctcgcagccgagctgatccggccgcgggacgggggaggtggaggcccagcgtggctacgccgcagccccccttccctcgctccctcgctgggagctaaaccctagccgctgccgccgacgccgcgagcgcgtttgctgggggtctacttgatcgcgattccagccaagagtaactaggatagttttcatgggctgagaaagcaaatctctagatgtaatctcaacctggctttgctttcgtgattggtctggagagtgtgcacgactcaagtgtcctcagaatagtttgtggaaggcaactacttggagctgctttcatgggaaacattgttaacactgtaaacaagttctcgggcaacaatgctgatggtgttcccttccggaggtgctcttacttgccaaatagtacttgtgacgagaatggtagttcagtgaccagaaaatctgcttctgctacaaatggcagtattaatggacatggtaccttgtataaggatgtgggtaatgaggaaatgcacttggctacagacagtacttctaaaccagggtgtcgtggtgatactaatcactgtactaacaaagaaagagaaactcggaatgtaattgtccacaccgactcaagacaaaatggggatgctactaattctgacaatgctgttttaatttgcaatcagacggctggtcatatgtcctatggtttggatggggaaagtaatagaagttctggaagcttagcggctgtggtttctgaagttcttgttagtaaagcaccacttgaaaagagatgtcgtactaaccttcaggaaactggagatttggaaaatactccaaatgcacatgtgagcaaaaggtcgagactgcacagggtttctcctgcaaacagtctgtttgatcgtgaggcttgtgatgacttaattgatagtgctcataatttagattgtagtcgcactcctaatgcttcagtgcatgatgaaacggtaccaaatgaagataaaacaccttgtacttctttagatgtgagaggttgtgaaggtacccctagagcttccttgaagagacgagtgaacaagaaaagaactaaacgggaagcatcatatccaacgacaccactaaatggaaataccggagctttagttgtgattgaacctcccctgactcgtactaaggctaagggtaaggctttatctcttgctacacctgaatctctcaagagaagcactagatcaggtcgactgatagttccacggttggatccaggaagccagaagattatatatgacatggacggttctatccttgccataaccaacttagagtcaccccggcttcaagggccttattcggagccgcctcctaagaggaggaaaacgcctcggtgttcgtccccaggacacagaagattgctgccattctaatggtgaacatatggtgaaaaagaaattctgacactgtccactggcatgatgatatggtgtccaacccgttgtgcatctgtgtgaaagctttttgtccttttaaccagctaagtagagctagcttctgtaaaatgtatcgtgggtacaccatgatgtatgtttctttgctaggcttcgaaatggatgcttgctaaaatatgggcgtaggtattttgcatacaatagatggtgttgacaccctgtgaactttgtaaggtcacttccagttgagaaactatccttcgtgtatc

SEQ ID NO: 28294 - DNA, 1132 bp, Oryza sativa
  ref <308>: DATABASE ACCESSION NUMBER: AK103736
  ref <309>: DATABASE ENTRY DATE: 2002-08-28
ggccgatcccttcccccatggtcggcgtgctcgccggttccacccaaaccctagcaacctcacgccgccacctccctcgccgccggccgtcgccctcgtcgccgtgtgtctccgccgtcagccgccggccgccctcaaccgcgggctgctgattctgctttcgcccgcatcggccacctgaccgggagagagaggaagagaaggggggaaaggaagaggagtaaaaaggagaaggaagaagaacacaggggggaaaaaagaagaagaagaagaagagaagaaacggggaaagggaagaattcggggatttctctgtgggtttcgtcagatcctccttcgatttgtggttcttgctgccagggtcgtggtgcgaatcaagaagtggaaacctccacccatcgctcatcttcacgcggttaaggagcgagcgatcaaatcaggggataatggaggaggacagcgtcatcagcaacggcggcagggaggaggaggtggtggttgcgaacggcagtggcggaggggtaggggggacggcgaggagcagcggtgggggaggggggaaggtggtgcaggtgctgcagaggaactttggcgaggtgcaggggattttggagcagaaccgtgtgctgatccaggagatcagccagaaccatgaggccgcgacgccgatggcctcacccgcaacgtcgccctcatccgggagctcaacaccaacatcgcccgtgtcgtcgatctctacgctaatctctccggctccttctcccgctctgtcactgccgctgccagcgccaataacaccaatgccaccaacagcacctccccttctgctgccgccgcagccaaggcaagcaagcggtcccgcgccaccgacaccgagtagagcgcctacaactccggctatccgatttcttctccttctcgcccccattttgttctcgcttttttctttctgtctagaattttagatttactgagcagcaggaggacaggaggtagattcggtatcctgctaaactctttttctcttttccctctttttttctcttgatgtaattcagagctgagatggacatgacaacagtaaacacctgccttgtcagagattaaagaaagatgcagatatgatagactg

SEQ ID NO: 28295 - DNA, 2104 bp, Oryza sativa
  ref <308>: DATABASE ACCESSION NUMBER: AK103737
  ref <309>: DATABASE ENTRY DATE: 2002-08-28
gtgcagacgcggcggcgcgacgccatgtcgtcttcctcctcctcgttggcggcggcggcggcgcggaagcgcgcgctgacggagcagaggttctcggagctgtcgcccgcgctgtccccggaggtggtgaaggccctgaagggcggcgggttccggcggtgcacgccggtgcaggcggcggccatcccgctgctgctttcgcacaaggacgtggccgtcgacgccgccaccggctccggcaagacgctcgccttcgtcgtccccgtcgtcgagatcctccgccgccgcccctcgcctcccaagccccacgaggttcttggaatcatcatctccccgacgagagagctgtcttcgcagatatacaatgtggctcagcccttcttcgcgacgctgaagggcgtctcatccatgctactggttggtgggttcgacatcaaggcggagctaaagaaactggaagaagagggtgcaaacatactggtcggcaccccggggaagctgttcgacgtaatggagcgcttagacactctgaactacaagaatcttgagattttgatcctggatgaagctgataggctgttggatttaggattccagaagcagattacgtcgattatttcgaagttgccaaagctgaggagaacagggcttttttcggcaactcagacggaggctgttaaggagctggcgaaagcagggttgaggaatcctgtgagggttgaagttaagacagaggtgaagcccacaggtaaagatggtgctcaacaagagcttggtccatccaaaacaccgttgggtcttcgattggagtatatgatatgtgaagcatcaaataagtcatcgcaacttgttgatttccttgtgcagaacaatggaaagaaaataatggtgtacttcgcaacatgtgcttgtgtagattactgggctattgttctcccgctgttggactcacttaaaggttctccaataattccttatcatgggaagatgaagcagggccctcgtgagaaagctttggcatcattttcagctctctcaagtggtattctagtttgcactgatgttgcagcaaggggtcttgacataccacatgttgatctgattgtgcagtatgatccacctcaagatcccaatgtgttcatacatagagctggccgtactgcacgttatgatcaagaaggagatgctattgtattcctcttaccgaaggaagatacttatgttgagttcttgaagaggagaggtgtacccctcactgaaagggagtgttccacaaatgctgtagatattgtaccacagatcagaagtgctgcattggaagaccgaaatgtcatggagaaagggcttacagcttttgtttcgtttgttcgggcatacaaggagcaccactgttcttacattttcagttggaaagaccttgaaattggaaggttgggtatggagtacggcttactccaaattccatctatgccagaagttaagcaccattctctttcattggaagggtttactcctgttaaagatgtcgatgttacaaaaatcaagtacaaggataaagctcgagaaaaacaacggcagaagacattgaaaaggaaagcagaagaactagctctaaggccagagatagagaagaggaggaaagccccggagaagcctgaaaagccaaagcggaagaagacaggtaaacagcgtcaagcagtccaaaccaaggaggacatggatgagctcgcgaatgagtaccggctcctgaagaagctgaagcggggggtgatcgacgaggacgagtacgagaagctcaccggattcggggaatctgacgatgacgattcctcggatggcggcgattctgacctggacgagagaaaggagaggggcaacaaggtgctcaagaaaatcaagcagaaagggaaggcaaaagggtctaggagatttgaagggaggagcaaacagaagactaggagaagatgaaaagtatatcttgttcttagcaattttgcttttttttttctttaaccagtgtaggttgcaagttttgccctggctattgtatgttcgattttgtgatttgtgacaaggacggtgaatgagcatgagcatcattcat

SEQ ID NO: 28296 - DNA, 3222 bp, Oryza sativa
  ref <308>: DATABASE ACCESSION NUMBER: AK103738
  ref <309>: DATABASE ENTRY DATE: 2002-08-28
gcctcctcctcctttccctccctccgcctccccccacctcgcgtctcgcggagcccggagagcagcggcgccgcccatggagtcgctcgcgctcctccacgccaagcccggcggcctccctccccgcgcggggctccgcctcccgctcccgcgcgcgcgatccgcgcgcgtctccctcccctcctccccggcggcccccgtatcgctccagtccccgctcctcctcgcttcgagaagcggccctacctcgcgggacgccgtcgtggggttgggattggggtgcgggctcttgagacggaggagcggcgctagtggtggtggtggtggtggggtctcttgcggcgcgcagcctgccgcggcggcggcggcgggggcggtgccggcggcgcagccggaggggaagaagttcctcggcgtggaggtgaagacgctgaagaagatcgtgccgctcgggttgatgttcttctgcatcttgttcaactacacgatcctgcgggacaccaaggacgtgctggtggtgaccgccaaggggagcagcgcggagatcatcccgttcctcaagacgtgggtcaacctgcccatggccatcggcttcatgctcctctacaccaagctctccaatgtgctctccagggaggcgctcttctacaccgtcatcttccccttcatcgccttcttcggcgcctttgccttcgtgctctaccctctcaggaatgtgatccaccccaccgcgctcgccgacaagctccttgcggcgctcggcccgagctttcttggccccgtcgccattctgaggatttggagcttttgcttgttctatgtcatggccgaactgtggggcagcgtcgtcatctcggtcctcttctggggcttcgctaaccagattactacagttgaggaagcaaaagaattctaccctctatttggtcttggggctaatattgcgctcatcttttctgggcgtactgtgaagtatttctcaaatctgcgcaagacattgggtccaggtattgacggatgggaggtgtctttgaaaggaatgatgagcttagtggtgcttcttggacttgtcatcacttccatctattggggggtgaacaagtttgttttgaatgatccttctcttccgaagtctgaccgtaagaagaaaaaggataaacctaagcttggaatgaaagagagtcttaaagttctcctctcctcaagatatgtaagggaccttgctactttagtggttgcatatggcatcagtatcaaccttgtggaggtcacatggaaatcgaagctcaaggcacagttccctagtccaaatgagtattcatctttcatgggtgatttctcaaccgctactggcattgctactttcacaatgatgctgttaggccggatcatactccgaaaattcggctggggagtggctgcaatgatcacccccacagttttgttgctgactggcgtcggtttcttctccctgattctatttgggcagcctctcactcctatgcttgccacaatgggcatgacccctcttcttgcagcagtttatgtgggtgcacttcagaacatattcagcaagagtgcaaagtatagtttatttgatatctcaccccgccgccgccgccgccgcagcctcctcaaggctgctcccatcctctccttcgagttagcttcctccttattcaaccatgggtaaggagaagacgcacatcaacattgtggtcattggccacgtcgactccggcaagtcgaccaccacgggccatctgatctacaagcttggaggtatcgacaagcgggtgattgagaggttcgagaaggaagccgctgagatgaacaagaggtccttcaagtacgcgtgggtgcttgacaagctcaaggccgagcgtgagagaggtatcaccatcgatatcgccctgtggaagttcgagaccaccaagtactactgcacggtcatcgatgcccctggtcaccgtgacttcatcaagaacatgatcacgggtacctcccaggctgactgtgccgtgctcatcattgactccaccactggtggttttgaggctggtatctccaaggatggccagacccgtgagcacgctcttcttgctttcactcttggagtgaagcagatgatctgctgctgcaacaagatggatgccaccactcccaagtactccaaggcccgttacgatgaaatcgtgaaggaagtctcatcctacctgaagaaggtcggctacaaccctgacaagattcccttcgttcccatctctgggtttgagggtgacaacatgattgagaggtccaccaaccttgactggtacaagggccccaccttgcttgaggctcttgaccagatcaacgagcccaagaggccatcagacaagcccctgcgtcttccccttcaggacgtgtacaagatcggtggtattggcaccgtgcctgtgggtcgtgttgagactggagtcctcaagcctggtatggtggtgacctttggtcccagcggcctgaccactgaggtcaagtcggttgagatgcaccacgaggctctccaggaggctcttcctggtgacaacgtcgggttcaacgtgaagaacgttgcggtgaaggatctgaagcgtgggtacgtggcctccaactccaaggatgaccctgccaaggaggctgccagcttcacctcccaggtgatcatcatgaaccaccctggccagatcggcaacggctacgccccagtgctggactgccacacctcccacattgccgtcaagtttgctgagctggtgaccaagatcgacagacgatctggtaaggagctggagaaggagcccaagttcctcaagaacggtgatgctggtatggttaagatgattcccaccaagcccatggttgtggagaccttctctgagtaccctcctcttggtcgttttgccgtgcgggacatgaggcaaacggtggctgttggcgtcatcaagaacgtggagaagaaggacccaaccggtgccaaggtgaccaaggctgccgccaagaagaaatgagcctcgttcaagtggtgctttccatatctgcatttgagatatctagctcttttagtactcgttaagttttgtcgacggtcatttcagttgttgcattgaccgttaatatctgctcgctttgtgcactatgtcagtcatttaaaactctattttctgttcggtttaaacttggatgttaagacttattattgcc

SEQ ID NO: 28297 - DNA, 1650 bp, Oryza sativa
  ref <308>: DATABASE ACCESSION NUMBER: AK103739
  ref <309>: DATABASE ENTRY DATE: 2002-08-28
gagatctcctccctcctcatcactgactcggtccctctccgccgcgaagcgtggcggccaccgtcgcggcgaccacttccacctccagctcgccgccgcagccgcctcctcctccatctccacctccacctcctcctcgcctccgttgggcgagagggagacggagaattctccgctgccatggctccggtgcggctcggggctcccacttccggcgccctgctgcttcttgtcctcctcctcatctgcggcggcggcggaggcggtggcgttgctgccgggggtggaggcggaggtggaggcgggaaggggagctcggtgtacccggcgcccgtggtgtacccgcaccactcccgccagatctcctggaagcccagggtgttcctctaccagcatttcctcagcgacgacgaggccaaccacctcgtctccctcgcgagaacggagctcaagaggtcagcggtggctgataacctgtccggcaagagcgagctcagcgacgcccgcaccagctccggcaccttcatccgcaagagccaggatccaattgttgctggtatagaggaaaaaattgctgcgtggacatttcttcctaaagagaatggtgaggatatccaagtgttaaggtataagcacggcgagaagtatgaacggcactatgattacttcagcgacaatgttaacactctccgtggtggtcatcgcatagctactgttcttatgtacttaacagatgttgcagaaggtggagaaacagttttccctctagctgaggagtttacagaaagtggcacaaacaatgaagattcaaccttgtcagaatgtgctaaaaaaggtgttgcagtgaaaccacgaaaaggggatgcacttctgttcttcaaccttagcccagatgcttcaaaagattcattgagcctccacgctggatgcccagtcataaagggtgagaaatggtctgctacaaagtggattcgtgtagcctcattcgacaaggtttatcacacacaaggcaattgcactgacgacaatgagagttgtgaaaaatgggctgccttgggagagtgcataaagaacccagaatacatgattggaacagcagcattaccaggttactgcaggaagagttgcaacatatgttagcgatccaattgtaaataatcaacggtaactgctttgtcggcagtctgatttatacaggaatgggttaaaataagtaggttcatgaggtttttggcacaaattctaccagttttggttacttcctgatgacaacttggtttttgttaccattcttcaatggtaactggcaggaattagaaagcaactcattgttagtatccataatttatgctagatggagatgcactttatcagtgcaatttctttggagagcaggtttttgtttttatttcatagagttgtcgacttgagcctactaggttatggttggattctgccagaatttacaaacatctggtctggttttcatctgtaatccttgagttgtcgacttgaacctactaggtcatggttagatcctgccagaatttacaaacatctggcctggttttcatacctgtaatccttctcatttgtggtatatagcttcagtgatttttgaattcattaatcaaatctctttatcactct

SEQ ID NO: 28298 - DNA, 1840 bp, Oryza sativa
  ref <308>: DATABASE ACCESSION NUMBER: AK103740
  ref <309>: DATABASE ENTRY DATE: 2002-08-28
gatctctctctctctccgaaacagccgaccacaccagaagttcagaggcgagggtttcccacccgcgagaagtcggcgctcccctcttcctcctcctccctcctcctcggtgagccagtcatccaagctctgtcaagatgtctgacagccatgaaactgataggaacattgagatctggaagattaagaagctaatcaaggctctggagtcagctagaggaaatggcacaagcatgatctctcttattatgcctccacgtgaccagattgcgcgagtggctaagatgttgggtgatgaatatggtaccgcctcaaacatcaagagtagagtcaatcgtcagtctgttttggctgccattacctcagctcagcagaggctgaagctctataacaaagttcctccaaatggattggttctctacactggaaccattgttactgaagatgggaaggaaaagaaggttaccattgattttgaacccttcaagcctatcaatgtatcactgtatctttgtgataacaagttccacactgaagctttgaatgagctcttggaatctgatgacaagtttgggttcattgttatggatggtaatggtactctttttggcacactaagtggcaacacacgtgaggtgcttcacaaattcactgttgatctcccaaagaagcatggtagaggaggacaatctgctttgcgttttgctcgtcttcggatggagaaacgccataattatgtccggaaaacagctgagcttgctactcagttcttcattaatcctgctacaagtcagcctaatgtttcaggcctaatcctcgctggttctgctgattttaagacagaattgagtcagtctgacatgtttgatcaacgacttcaagccaagatacttaatgtggttgatgtttcttatggtggcgagaatggtttcaaccaagctattgaattgtcagctgagattctagcaaatgtcaagttcatacaggagaagaagctaattggcaagtattttgaagagatcagtcaagatactgggaaatatgtctttggggttgatgacactcttaaagctcttgagatgggtgctgttgagactctaatagtgtgggagaaccttgaaaccaacagatatgtgcttaagaacagtgcatctggtgaaactgtgatcaaacattttaacaaagagcaggaagctgaccagagtaatttccgtgatccggctagtaatgctgagttggaagttcaggaaaaaatgtctcttctggaatggtttgctaatgaatacaagaagtttggttgctcgcttgagtttgtcactaataaatctcaagagggatctcagttttgtagaggattcggtggcattggtggtatcttgcgttaccagctagatatccggtcatttgatgagctttctgacgatgagggattgtatgaagactctgattagcaatcagccaatcacatgactgtgctggcccagggaaggacgccgcagctgcaacgagtctgattcgctctacttacgcaggaacacttcgaaagcagctatccagaaattgatgggcgtgggccagcctcatcctatgctggaagggattaaggcgaaaggattactgagtcacatcatcatgatagtaatgtgtcaagaagttatcgaacttaaaaggcatgctgttgccaaggtcgtactggttgtctattgtctgctttttgcaactatattcgcaagttctgaattctagtgtctgcttgaaattgagcacgctggacgcgctcgtgactatatggtgtaatctgctacttttgcagtttttgcaatgaagttactgttatgct

SEQ ID NO: 28299 - DNA, 1210 bp, Oryza sativa
  ref <308>: DATABASE ACCESSION NUMBER: AK103741
  ref <309>: DATABASE ENTRY DATE: 2002-08-28
gatttgggaaacggggcggtccttcggcacatgttgtctgtaccccctcttggtgccgtgtgcccgtgtgacagtgtctccccacgcatcggctggagaattggatatgctgggtttagcaccactccggtttgtttctccccctcctcgcggcgccgccgccgtttccgccgccgctatcggcggacatagtatctcgctcggggatggctgccattgcgcggtgccgccgccgggggagaaggacgccgacaaggcgcgggcggagacgacggagggagcgtcgtacaagtggcgtatggtgatcgcctacgacgggaccaagttcaaaggttggcagtatcaaccatcgcctccaaccatacaatgtagtattgagaatgcgctaacacgcatcacaaagctggatcgcaaggagctctgcttggttggagctggcagaacagatacaggtgttcatgcatggggtggcgcatttcaccacgcctttttcctaccattgtcttgatagcatgcactctgcaatcaatgggcttcttccacatgagattcgagtgagggaaattagtgcagcaaagcctgaatttcatgcccggacatccacaaggagcaaaatttatcattacaagatttataatggaccagtcatggatccctttcataatcattatgcataccatagtgcgtataagcttaattcacaagctatgcgggaggctgcaaagcattttgttggaacacatgactttacatctttcgctaatgcagtacacaatgatcgtgtacgcagtcccataaagaagataatgcgctttgatgttattgaaatgggtgctatcttacagcttgagattgaaggcactggctttctgtacagacaagttaggaacatggtagctttgttgctacaagttggaagggaggcactaccacctgacatcgtcgcaaaaatcatcgcagcaagagaccgcaaggaactagcaaaggtggcattatcagcaccacctcatggattgtacctcatgtcagtcaactatgacaaggaaatgctacagcctcctgagggtgcccctcacattagctttggaaggactcatcagattagcaaatgtaaactcctattttattgatttttttcttgaaatactatcaatagagatgtgatatttcctagtttcttttgcctaataaaatttccctattgttaacc

SEQ ID NO: 28300 - DNA, 1354 bp, Oryza sativa
  ref <308>: DATABASE ACCESSION NUMBER: AK103742
  ref <309>: DATABASE ENTRY DATE: 2002-08-28
ggaacgacgaacaacaacatctcgccacgaagaggagggcgagagcctgcacgagtccgaaatccccaatccgggttccctgcttctcttcgcgccaagatggcggctgcctgggcggcggtggtggccgtgatgctcctccttgcgcaggtgtcagccgcggctccggtgatggggcctgccttcctctgggcgcccaagaactacggattctcttctgatgaggctaaagaaatagtccattatcagacagtatccccgaagagcttagtgaaatctgttcttgaagaaggtggttggtcaaacttggtgtgttcaagggaggatcatgcaaagagtgttgatgttgcagttctttttcttggctcgaagctacaatcgtcagacatttctaaagataagcaagctgattctactttagtagacacgctgaagaactcgtttgcaagctccgagttttcgatggcattcccctacattgccatgtcagatgatgacaaattggagaagtcattgccatctgggtttgctgagaattgcaacaatggtttcggagataatcatatcacctacacagacacctgttctgtaagtgaagatctgaacaaacatcacaacatggattccattcatggattggtggcatcacaaactaaaaagaacccgagtggacagactgatctgattgtcttctgtgatggtggtttcaaggataacacaaaatcagaaggggagttgctttctgagctggttactctgctgaagaagtctggagctaaatatacgattctttatgcttctcagccctttggtttgctagagaacccttcaaacctaccattaggcaggtacctcgcagagaagaccaatactactaaacctggccgtggaaaatgtgacggggagtgcttagtaaaatcaactctgctggaaggaagctttgttggaatagtgctgctgatcatcttgatatcaggactcaaatgtatgatgggaattgataccccatcaaagttcgacgctcccccggaatcataagcccattttaaagcagttctgaatggaaactcagggcaagtgctagggaaaaattgaatagctgatgtagcaggaaatgtattgtgcatatagtaagttcgctacttgatgccttatgtattttaatgagccagctgcaatttgcagtcaatttttggtggaatattacatttcaatacgtacaagtgcaagccttgggttgtaccatataacactgcctccagtgtttgctgtgtgaataagctggaattcaggactccgagtagccaataagatgttatacaattcatctaataaaaccttgtgattctttcat

SEQ ID NO: 28301 - DNA, 1381 bp, Oryza sativa
  ref <308>: DATABASE ACCESSION NUMBER: AK103743
  ref <309>: DATABASE ENTRY DATE: 2002-08-28
gtgggccacagccgctgacaacgcgggcccacacgatcccccctctcccctgtcttaaaccccacacaaacacgacccaacgccttcctctcctcctctctctctcccccgctcctcgcgccgccgacatcgccggagaaaatgagtcaacaaggggagtaccacgccgacatgatggcggagttcctgcgggggagcggcggcgcggccgtgattgacggcgggctggcgacggagctggaggctaacggcgccgacctcaaggacgccctctggagcgcccggtgcctcttcacctgccccgacctcatccggaaggttcatttggactatcttgaagctggggcaagtgttctgataacaggatcatatcaggccacaattcagggcttcctttcaaagggattttctcaggaggaaagtgaatcattcctgaggaggagtgttgaactagcatgtgaagcacgggctatttacctggaaaaatgttctaacggttcggacgaagccaaagacgtaacaaaatacaggaagcgcccaatactaattgcggcatcagttggttcttatggagcatacctagcagatggctctgagtatagtggtgactacggtaatgagggcactttggagttcctcaaaaactttcatctgagaaggcttcaagtccttgctgaagctggtcctgatgttattgtttttgaaactattccaaacaaaattgagactcaggcatatgttgaactactagaggagtgtaaattacgtattccggcatggtttggtttcacttcaaaggatggagtcaatgtagtaagtggtgattccctgatagagtgtgcctctattgccgattcatgcaaggaagttgctgcagttggtattaattgcactcccccaagatttatccatgaattagttttatccatccggaaggtgacaagtaaaccaatattaatatacccaaatagtggtgagagctatgatcctataagaaaggaatgggtggaatgctcagggatttcaaatgaggattttgtttcatatgtcaaaaaatggcatgaggctggggcctcactgatagggggttgctgcagaacaagtccagatacgataagaggaatatcgaaggctctgcatggagtttagttgatggagattgagtagagttgatagccagtttttggacagagtcgctaactcactctgtttgcccgatgtgacacaggtcttattggtcaggtagtcagatttcttatggaatttgaatagctattgaggacaatgatttaggaaaaaaaaaaaactaatgctgtgttgttctttcattagcttgtaccagcacctttattgatgaggaaatgatgccaaatgttggcct

SEQ ID NO: 28302 - DNA, 2092 bp, Oryza sativa
  ref <308>: DATABASE ACCESSION NUMBER: AK103744
  ref <309>: DATABASE ENTRY DATE: 2002-08-28
gagccaaggcatgcatgcacattcgctctagccttcctcatcgttgacagtgcgtggcagtgtactcttggttatcatgtcgtcgccgttctccgtgccatctctgatcatggaggaggaagggcggttcgaggcggaggtggcggaggtggaggcgtggtggggaacggacaggttccggctcaccaagcgcccctacacggcgcgcgacgtcgcgctcctccgcggcacgctccggcagagctacgcctccggcgacatggccaagaagctgtggcgcacgctcagggcgcaccaggccaacggcacggcgtcgcgcaccttcggcgcgctcgaccccgtccaggtcgccatgatggcgaagcacctcgacaccgtctacgtctccggatggcagtgctcgtcgacgcacacctcgacgaacgagccgggccccgacctcgccgactacccctacgacaccgtccccaacaaggtcgagcacctcttcttcgcccagctctaccacgaccgcaagcagcgggaggcgcgcatgtcgatgtccagggcggagcgcgcgcacgagccgtacgtggattatcttaagcccatcatcgccgacggcgacaccgggttcggcggcgccacggccgccgtcgagctgtgcaagctgttcttcgagcgctgggcggccggggttcacctggaggaccagtcgtcggtgaccaagaagtgcaggcacatggcggggaaggtgctcgtcgccgtctccgagcatgtcaaccgcctcgtcgccgcgcggctccagttcgacatcatgggcgtcgagaccgtcctcgtcgcgcgcaccgacgccgtcgccgccacgctgatccagaccaacgtcgacgcgcgcgaccaccagttcatcctcggcgcgaccaacccgcgcctcaggaaccggagcctcgccgccgtcctctccgacgccatgtcggcgggcaagaacggcagggagctccaggccatcgaggacgagtggctcgccacggcgcagctcaagaccttctctgactgcgtcagggacgccatcgcgagcctcaacgccaccgacgccgacaagcagcgcaagctccaggagtggagcgccgccaccagccacgacaagtgcgtgcccctcgagcaggcgcgcgacatcgccgcgggcctcggcgtcacatccctgttctgggactgggacctgccgagaacacgggaggggttctaccgcttccgcggctccgtcgcggcggccgtcgtccgcggccgcgcgttcgcgccgcacgccgacgtgctctggatggagacgtcgagccccaacatcgccgagtgcacggcgttcgccgagggcgtgagggcggcgagcccgggcgcgatgctggcgtacaacctctcgccgtccttcaactgggacgcctccggcatgacggacgccgacatgtcggagttcatcccgcgcgtggcgaggctggggtacgtgtggcagttcatcacgctcgccgggttccacgccgacgcgctcgtcacggacacgttcgcccgcgacttcgcgcggcgcggcatgctggcgtacgtggagaggatccagagggaggagaggagcaacggcgtggagacgctgcagcaccagaagtggtcgggcgccaacttctacgacagggtgctcaagaccgtgcagggtggcatctcctctaccgccgccatgggcaaaggagttactgaagagcagttcaagggctcatggacagggcctggaagtgagagcagcagccatgttcttgccaaatccaggatgtgatgaggattattcagaggaaaattttaaacagttgaaatttatgtaataaaagccactctggacttcagccaaggagccttgatactttacagactgaactacagcacgcacggatcaactaattacatatagttacagtatatatgaatgattgagttatgactcaaaatggaacaatcagtttggggtaaaatgtaattgatctgtgagtttatcacagaaagtattttttgcacctagatgcaaaaattgggcacatacagtactgttatgcatttacagagaattctcaagttc

SEQ ID NO: 28303 - DNA, 2191 bp, Oryza sativa
  ref <308>: DATABASE ACCESSION NUMBER: AK103745
  ref <309>: DATABASE ENTRY DATE: 2002-08-28
gcctatctcttactacttgagttaaacttgattgctctgtcgcatggccagcagtagcgaccatggatccctcatggaggactggatgccaccacccacacccagcccgagaacactcatgtcaagcttcttgaatgaagattttgtctctggttcattttccaatattttcagtgatcatgagagcaacaaaccccaggatcagtttgagagaaacagagagcttgtggatttgagtaaggaagtgccttcccaattcgcaagacccgcattccagagggatgcttccctggatcatagcttggtcagtcctacacagagatcaaactcgcatggtggtttggcagagcgcagggctgcgagggctggtttcagtgtcccgaaaatcgatacatcccgtggtggttcatccacagtaattcgatcgcccgtggcaattccaccaggtcttagtccaacaacacttctcgagtcaccggttttcctttacaacgcaatggcacagccttctccaaccactggcacactgccatttttgatggcttcaaatgctaagtcaacaataccgtcagctaccaagatggacgaagattgcacatttggcaatgacactttctccttccaaccgcatgtagggtcgagacggccaaatttctccgctgcagaaaagggtcccaatgcttgtcaccaaaaccaatcgctgtcgaatatccatcagcgggaatccagtcttcagtcaagctttactgcagtcaaagatatcactgatgaaaaaaacattaaaacaaagacatctgactccatgtttggtgataaccactcttctgatgaacaagatgatgagactaaccaaaatggagaaaactctatgccacctccgaaccaccgttcaggtgtccctctgtcacataccaatgatccagaagtgaatgtcctagagaaccgcggttcacagacatgccataactctgcatccttgtgggacaatgccaaaaatgattgccttcaagatgttcaaagtgaagttattgaaacaagaacagctgcttgtcttccagtatcaaccaattgtgatacatctatcatggagtcccaagatgcagttgatgtgtcgtcaacactatctaatgaggaggatgatagggcaacgcatggcacggcttctatagagtgcaacggggatggagatgagactgattccaagagaaggaagctggatgctttgacagctgcaactgctgctattaccaccaccagtaacattgacatgggagctgcggcatcgagaggtgtccgggagcctcgtgttgttgttcagacaacaagtgaggttgacatccttgatgacggttaccgctggcgcaagtatggacagaaggttgttaaaggaaatccaaacccaaggagctattacaaatgtacgcaccaagggtgttcggtgcgcaagcacgtggagagagcatcgcatgatctaaaatccgtcatcacgacgtacgaggggaagcacaaccatgaagttccagctgccagaaatagtggacatgggagctctggatctggaaacgctccatctgcaccgcaatctaacggctctcagcgcaggcaagaacaagggcaagccagcttcagccagtttggtggcgcggctcccttcagctccttcgttctcccaccaagaaaccaatttggaccatcggcgagcaatttcccctttgggatggtcccgccaggcatggcgattcccatgccatctctagggtctcttgctccagcaaagatggctggtcatccatccaccatgcagggctaccaggggctcatgattccggaaggagagatgaagacagagcccatgtcgcagctcggcttccccgcggtaaaccaatcttcatcatccttccaacagatgatgaacaggcctccatcatttggacctcagatgtaaataataatattaaagaaagaaaagaaaatgatagatgtgcttcagcttctatacatggtagcaatgctacaacatagctttgttgttctagcttttacctgttattttttctttgggcttttattttttggaagcaaagaatgcagaagatgttacccgttttgtttatgttgtaattggaaaaaaaaggtggtggtagtgttcaggacaaaaggcaaaatcattcaattggaagtgctgatggtg

SEQ ID NO: 28304 - DNA, 1223 bp, Oryza sativa
  ref <308>: DATABASE ACCESSION NUMBER: AK103746
  ref <309>: DATABASE ENTRY DATE: 2002-08-28
gttgaggcgtactaaaattggggaatctcgtgaagtctctcctccctctcagttttcccgttcgtctccaaacctgcgagaggcggctccctcccgccatcccgatttggcttcccgccccaattcccgccgccgcataaaccctccacaaaagggctcctccgccctcgcctctccctccccatctcgcctcgccgctctccaacccatcgccgcggccgcgcgcgattcctcgcctccgcggcgagcctctcctctcttcctccgcccggcggcgttggcgttggcggcggcggcggcgatgagcgcggtgaacataaccaacgtggcggtgctggacaaccccaccgccttcctcaatcccttccagttcgagatctcctacgagtgcctcatccccctcgacgacgatctggagtggaagcttatatatgttggatctgctgaagatgaaaattatgaccaacaattagagagtgtgcttgttggccccgtcaatgttgggacctaccgttttgtactccaggctgacccaccggatccctcaaagatccgtgaagaagacataatcggcgtcactgtgctgctattgacatgttcctacatgggacaggagttcatgagagtaggttactatgtgaacaatgattatgacgatgagcaactgagggaggaacccccggcaaagcttctaatagacagggtgcagaggaacattctggctgacaagccccgagtcaccaagttcccaatcaacttccatcctgaacccagtacgagcgcagggcagcagcagcaggagccacagacagcttcgccggaaaaccacacaggcggtgaaggaagtaagcccgctgctgatcaatgatcagagtggggatgctaacattttgatgcccgtgccttttaggatatcttgtgatgctgtgagagtggtgattatgcttcttcattctcctaggtttgtcattggtgtctcgtcttttggaaggcaaattgttccctagttcctggtggttgctgaaaactgtatgttctcttgaaatctgccaatctggttaagagtacttgcgcaagttctgtttcatcaaatgctggatgcttcttttgtctagactatagttgttgagtattatgtgtttaggggtatattagtaatttcctatctctattgtactcatatatgccctttgggctaacacaatagcaactgttcattctcc

SEQ ID NO: 28305 - DNA, 2070 bp, Oryza sativa
  ref <308>: DATABASE ACCESSION NUMBER: AK103747
  ref <309>: DATABASE ENTRY DATE: 2002-08-28
ttgtctttgatgtgatgggctactgtgtcacaacagcaaaaggagctgctgaaaccctaaagctgaatatggcaattatcctcctgccagtatgccgtaacaccattacttggttgcgaagtacaagggctgcacgggcactaccttttgatgacaacatcaacttccacaagactattgcagcagcaattgtggttggtataatcctccatgcagggaaccaccttgtatgcgattttccacggttaataaaatcatcagatgagaagtatgctcctttgggccagtattttggggaaataaagccaacatattttacattggtcaaaggagtggagggcatcactggggtaatcatggttgtatgcatgataattgcttttactctagcaacccggtggttccgccgtagcttggttaagcttccaaggccatttgacaaactgactggcttcaatgccttttggtattctcatcatctgttcatcattgtgtatatcgcgctcattgttcatggagagtgtctataccttattcatgtctggtacagaagaacgacatggatgtatctttcagtgcctgtttgcttgtatgtaggggagaggattctaaggttcttcaggtctggcagttattctgtccggctattgaaggtggccatatatccaggtaatgttttgacactgcaaatgtccaagcctcccacgttccgttacaagagtggacaatatatgtttgttcaatgtccagcagtgtctccctttgaatggcatcccttctcaattacttcagcacctggggatgactacctcagcattcatgttcgacaacttggtgattggacacgagaactcaagagagtatttgctgcagcttgtgagcccccagcgggtggtaaaagcggccttcttagggcagatgagacaactaagaaaatcttacccaagcttctgattgatggaccgtatggttctcctgctcaggattacagcaagtatgatgttttattacttgttggattaggaattggtgcgacaccctttattagcatattaaaagatcttctgaataacatcatcaaaatggaggaagaggaggatgcttctactgatctttatccaccaatgggtcggaataagccacatgttgatctgggcacacttatgacgattacctcaagaccaaagaagatcttgaagaccacaaatgcttacttttactgggtgacacgtgagcaaggctcttttgattggttcaaaggagtcatgaatgaaattgctgacttggatcaaaggaatatcattgagatgcacaactacctaacaagcgtctatgaggagggggatgccaggtcagcactcatcaccatgctccaagctctgaaccatgccaagaatggagttgatattgtctctgggacaaaagtccggacacattttgcacgaccaaattggagaaaggtcctttctaaaatttcctccaagcatccatatgccaaaataggtgtattctactgtggagctccagtcctggcacaagaactaagcaaactttgccatgaattcaacgggaaatgcacaacgaagttcgaattccataaggagcatttctgaaatcaagtaaatacttgaggggaaacaaggatagattatgttatgtgtatagcatttttgtcttcgtatattcttcattataatggacaggagatagcaaggtgaggaagcaagcatatagttagcccaacagttcttgctaccaatcaataaaaggagcaacaacaagagtgatttgggataatcatataaatttgtgcgatgtccatcatggcttttgcagcatgtcttatgcagtcatgaatgtacagagctcacttgaagaccttgagcttcttctgattttagttgagattataagtaggatggtatagcacataggaaggtcacaaggctaattaactgtatattattcatgcagctgagtgtctggctaaggccagaagcacgttttacttttgtatttatacataacagaaaacgagaaaaaaaaagtgaaaagggaaaggtatactcg

SEQ ID NO: 28306 - DNA, 926 bp, Oryza sativa
  ref <308>: DATABASE ACCESSION NUMBER: AK103748
  ref <309>: DATABASE ENTRY DATE: 2002-08-28
ggcgagaaaggggaaagaaaggaggtgcctttccatggcggccgagggttccagccgcggcggcggcggcggccggaaagcctcctggctggggatgtcatcggagggcggcgcggccaagttcctgtctggcttgccgtcgcgcggcaatttctcctcgatctccgcctcttccactctcggacggctcagggtttacgtctgcgagcatgacacggatcctccagagggacaagttatagagaccgatacaacaaatattttgatcagacatctccagctaaagaaaaaggagatggatgccaaagaagccaaagaggccagagatgcaggttctaggaaccaaggggaaaccgtcaaatggaaaagagttgctcccagaagtttggatggccaaagttcatctaaaaggcccaatttgggtagctcctctgggctgtcttctgctgaagaagcggcacctggattttcaggtcacacactacagacattcacagttgagaggttgcgtgcacttctgcgacagaggggcctcatgaccaaagggaaaaaggatgaactcatcgctcgcttaagagaatcacaggactgatctagagaaagctcgtgccgtactctctttgtaggttgatgcaatgtgtttcctgatttgctatgtcaagctttgctgggagcagaatgagaaccaggcttcatctgttggctggatgttaaggctctaggagatgtagtcacttaggttgggccttgagaacttgtgcctaattgcattagcttgtcagaaatttgggcttgggttccctgtttgttagggcttatccagtgctttacttggtacatgtagaaggctaatctggcagtgtttgtaaccttttgtctcatactggaggagttaccatgctaatttacaagcatagttaaaagtt

SEQ ID NO: 28307 - DNA, 2157 bp, Oryza sativa
  ref <308>: DATABASE ACCESSION NUMBER: AK103749
  ref <309>: DATABASE ENTRY DATE: 2002-08-28
gatcttcgcgcatccccacatcgccgcgcccgctccactcttccacccccggcgccgctgacccctccccagctcccgcctcccggtctccctcgacccatccccgccgcttgaagccctcccgtcgcgcctcacggtctccatcacgccggctcgccctcgacagatccccggaagccctcccgtcgccagttcgtcgcacacacctaccttgccgatctgctcctcgccgccactgtcggcgcccgcatccacgacgccgccgtcatcccttgagtgaagaccatggatgcagcatgcatgcagagttgcagactgaagacaggccatcattcttcagtctaccacgagatagcggcgcaaatgcttgattcacttgtgagaatcacttctttcaacttccaacctgattttagagcaacagtgcctcaccaattgaaatcaaccgatcaacatatatgtcactggttctcccatctattagatatagttctgaatttttaaacaaaatgactatttgtgtgctgtgagtacaacaaaaatgagctcaagaaaagctatctctatcaacattagcgaaaaaaaagcacacttaaagcctttacaaaaaaaaaatatatgaagtctttacaagtgtaaacatttctgaaattgcctggtgagcgattaaaatgtttttcttgtggtgccttcagagagtttgatatgtttctatatatttttacatgtgtgcctttttctgctgccccgaacattgatctgagagtaatcaaattccttgaatagtttaacttctaaatgttcaaaaataaagggagcgccatggaagtcaaattagtgaaaatcttaggtatcctgcagtgtgtatgggggcactgtgcaatatgatgttgcatgcagtatactatcattcttttaaaagtatcttctcggaataatttcttatttccaaatattctcagatacactttcaatattgtagatatgagatattatgtgcgaatggccaccccaagataatatacttcaggatatgcaaaatcagttggagaatgcaaattcggttgttctctttcatccctcatatatgcatatgtttcttaaataatttacaaaattactgttcagtagtggagtaaataaatatgaatgacggtacctgtcattatgcacatgttctctaaacacatttcatgaatgacaaggtaatttttggtaatattgtttggcagcgagtatttgggtacaatgtactaaagttaatcaatatgtgtggcatatgcattgtttttcattgttaaggttcgaacaactgaaggcaagtaagatgaaagaccttgtttgaaaagggaaagctgaactggaagagcatagaagatgcgctcatctaattagccaggaaggttatgcagctgagtttagcattgaagttattgaagtgcagggacgtatgcgttttgcaggctgagcacatgaagaatcccagttaatgtctctttaacttccatccataaggagactcgtgcactttcctgacaccctagcacaagttattacgctgtgcagacttttggctatacattaagcaagatgcagcaagtattttggattgatgatctgtaagatttgagttcagctcatgctcgttgatagcacatgacacatcggttgaataactgtgttcatttaactctggacctacatatacataatttcctcttactttgattccttggctcaaaaggctcacagaagcctatattttgcaattaagcaacaagaagcagggcttgatttgcattccgattcagggttgacatattgttttccaaaggaaacataatagatcgggcagtttctgtgagctggatcagtacgggcatatgtgctaactgcctcctatgcagttgtgctttgcacaacgaagtgagtgtggttcatctttagagccatgttcaaagagagtttgggtgttgatcaattgtgggaaaatcatgtgtagaaatgccttgggatgatgtctaaaatagggcattgtattcatttcccgtgaattgctgcacaaatattttttgatgtactttatggtgcaacatgcatctattgacactttctactttaaacatattaaaaatatttgatgtattgtttcgtgct

SEQ ID NO: 28308 - DNA, 4080 bp, Oryza sativa
  ref <308>: DATABASE ACCESSION NUMBER: AK103750
  ref <309>: DATABASE ENTRY DATE: 2002-08-28
gacgcgaacacgacgacaccagccagcaagcagcggaggagagagagagagagagagagactccatagacggccatcgatcgtacgcgactccccccatccatccatccacccgccggcgccccctccctctcatcgatcgatcgattcccaccgccgcccccgttttgaccacctacctagggtttcccccatcggaatgatgaccatgagcgacgatggagaccgcacctgcccgctctgtgctgaggacatggacatcactgaccagcagctcaagccctgcaaatgcggctatgagatttgtgtctggtgctggcaccacatcattgatatggctgagaaagaggacactgagggccgctgccccgcatgccgcactcgctatgacaaagataggattgtcaagatggctgccacttgtgacaggacggtagtggagaaaaatgtggacaagaaacagaagacccaaaaggtcaagtcaaaggccgcggtaactgtggaagctaagaaacatcttgctagcgtcagggttatccagagaaacctcgtgtacataattggactacctgcaaatttatgcaacgaaagcatacttgagcgcagggaatactttggtcagtatggcaaggttctgaaagtttcagtttctcggccgactggggctccttcccagcaggcaccaacaaacaacagtatcagcgtatatattacatatgccaaagaagaagaggccatcaggtgtattcaagctgtacacaattttgttttggaagggaaagtgttaagagcgtgctttggtactacaaagtattgccatgcatggctgcggaacatgacctgtggaaatccagattgtctctatttacatgatgtaggaagccaggaagatagtttcactaaagatgagataatctcagcatatacaaggagtagggttccccaaatggcgtctaatgtttctcaaagacgcgcagggactgtattacctcctcaagcagaagatttctcatatagtgcagtggttgcagctaaacatccaatcaagaatggaataactaatactgcaaatcaatccaggctttcgcctccaaacagtagttctgggagatccacacttccaccagctgcttcatgggggcatcgcgatttgaataccaggacaacagcaactggggtggcatcgtcacaatctcttactaaatcaaaagcagatcctcaaagtaattcattctcgagttcttcgactgtttcaagtacaaaactaccttcttcatggaatgatgacacaagcacagttccgaaaatgacggaaggacgagatagtttgtctaaaaccttgaagccatataagcctggtattgcaaaggaaacccaagctgtaacatcactggagtcatcgcttgacatagacttctctaccataccttcagcttggaacgatgatgatgtcacatcagatggcatgtcaaaaggaagtgacgagaagcaggttgtaaatgacaatggaaagtttgaatgttcagtttcttcaaagccagctgaatcagggcatcttacatcgaagtcaacgacatcaccaaagaaagacatcgcagtaaacagtaccaggcaaagtcctctaaattgtgtatcaagtccatcggtttctaaatcagaagtaaaggatggtgatggtgattaccaagtaaccaacatggcttctaaaacatctactttggtaattagaaaggaccaatctaatcaagcagctattgacacagcaaccgaagatactagatctgagagcacggatattgataggctttctgttggagtatcttcagtaacattaagcagaaaagatggggttcaaagtattgccgaaaaccaacaaccggatgcaatcctaagtacttcagttgtggtgccctttagtcagaatttgaaacttgctgagtgtaatgattctacatgtcagcctagttcagataagcatcgtgattggtgttcagatatccagagtagtgtgtctcctcagttaaatgacatagaaagttatgcagtagccactgataaatctcatggtagagtgctggatgctgctgatcaagcttcgtcttcaccatatgtccatttccctaacactgctcctatttcactgtggaatggtaaagagattaaccatacatcaacaagtgatagaacttccacaatgatgcaacctgggctgttatcttcagttgacagcacttctaccatgttaaatggacatcaagaagggctagggactatatatgcacctggtaaggtttctgaacatcctagaatgaaaaaccatcagcctggagcagttggtgcagtgagaattgataacataggcagttttgacaaggctgtaagtgtaaataaggatgagagcagcataattgctgatattttgtctttggagtttgatccatgggatgagtcgtattcaacggctaacaattttgctaagatgcttagtgcatctgaaaagaacgatgtgctttttgatgcacgttcatggaaaacaaaaaccagcaatagtgagtctagattttcatttgctagacaagataatcaaggaagcctcctagattcatctatgagaaattataaaagtgagcagaatttcagtttgccatcccagaattctcatggaaacatttatcagagtggcattgcatttcaatctcctgaggaaggtttctcaaagagcaactctcttactatgttggatatgctagctaccggcacatcaaagcctaaagtatccgcgcctcctggattttcagcaccagcaagagttcctactgggttttcttctggattttcatcccatgaggggttgaatccacctccaggattttcatctcataatgggcctaatccccctcctggattttcttctcagggtgggtctaatcagatctatggttcggcatactcagaaactcgcccatttgatgatcttttgggtataaatactagccattatcaaccacagttagctagacaaacaagtgatatagaatctgttgatcctgctatattggctgtgggtaaagggcggatgcctggaataagtgattcagggttggagatgaaaacttcccatacttttccttcgcagttgcaaacatcaaatgatccaaggtttcaattacttatgcagcagaacatgccttcccatcaaaatgttggatttgcagaacatgttcaagatgcattcaaccctatgaatgataattatcttgcatcccgacttatacctcagaaccatggttctctatcctcttacacacagatgtcactccaacaacctagaagctcacatcttacaaatggtcattgggatggctggggtgatttgagacaagggaataatgtttccatgcctgacatgtcaaggatgttatatccaactgaagcaaacaacttccacatgctgggttcaaatgatctgtataacagagcttttggactgtgattatctttgggagatgcgacttgacctatcacccagctaacttgcacatttctcagttcttgaaattgattggttgcacaggctcaacttggtgattgttgagcttgtggattggcgcatgagtgtttattgaaaggcattggattcaagtggaccagcatgaaactgggtgtgtaaccagacgtttcaagcaccaggttctgttttgggcgaaaggatatatatatcaaagatgcatccatgaggttgtccttcaagtttatatatacttgtggtggaagcagactcgagaatatataaaccgtttagcatttgcttctttcttctttttttgccgtcatgtggaaatattttcttggttttggcatagtaaaagcgtcattttgtacatgatacgttactcgttgctagtagcttttgtggtgcacatgagattattttgttgatgggtttgctgaaccaaacgtaaatggctatatggtaccaggccagccagcttatgctgaattgggtgttgtttggtgttgaatcaaaaacaaggtcgaggagtacttcggtgtgctgttgttaataatatcaattcatgac

SEQ ID NO: 28309 - DNA, 1327 bp, Oryza sativa
  ref <308>: DATABASE ACCESSION NUMBER: AK103751
  ref <309>: DATABASE ENTRY DATE: 2002-08-28
gaatctctccccgctcccctctcgagccgaaccccaaatctctctctcctctctctctctctctagcagcggcggcggcggcggcgaggcgaggaagatgctgtgggtggacaagtacaggccgaaaaccctagacaaggtcaccgtccatgaccaggtcgcgcaaaacctcaagaagctggtggcggagcaggattgcccgcacctgctcttctatgggccgtcggggtccgggaagaaaaccctagtcatggccctcatcaagcagatgttcggcgcaggcgcggataaggtgaagatggagaacaagacatggaagatcgatactgggtcgaggaatattgagatagaactggcaatgttgtcgagcgcccaccatgtggagatgaaccccagcgatgctgggtttcaggacaggtatgttgttcaggaagtcattaaagagatggcgaagaataggccaattgatgccaagggcaagagagcatttaaagtccttgtccttaatgaagtcgacaagctctcacgagaagcccagcattcccttcgtaggacaatggagaagtacagtgcatcatgcaggctgatattgtgctgtaatagctcatcaaaggtgacagaggctgtaaggtctcgttgcttgaacgtgcgagtgaatgcacccagtgaagaccagatcgtccaagttctggagttcattgggaagaaagaaaatctgcagcttccatttggatttgctgctaggatagcagcacaatcgaaccgtaacctgagacgagcgatactgttttttgagacctgcaaagtccagcaatacccatttacatcaaatcaagtagcacctcctcttgactgggagcaatatgtgtcagaaatagcagctgatatcatgaaagaacaaagccctaaaaggctatttgctgtgcgccagaagttctacgaattacttgtgaattgtatcccacctgaaagcatcttaaagaagttgttggcggagttactgaagaaattagactctgacttgaaacatgaaatttgtcactgggctgcacactatgaacacaagatgcgtcttgggtccaaggccatttttcacctagaagctttcgtcgccaagttcatgagcatctacaaggaatttcttgtctctacatttggctgagcatctacaaggaagctgctgcatgtccatttccggcaacacaaggatgttgggaaactctccatgctagccatcttggccaatgtaatcggttcgatcaacgcaacgggatcaagtttgtagcaggtttatgtgagtgacattgagctggccttttgtgtttgt

SEQ ID NO: 28310 - DNA, 479 bp, Oryza sativa
  ref <308>: DATABASE ACCESSION NUMBER: AK103752
  ref <309>: DATABASE ENTRY DATE: 2002-08-28
gacttaccaccgtaatcttcttcttctatctggagagaacgataggatttcaacagccacacgcgtgcccccgccgccgccgccgccgccatcgtcacgcggagctgctgcagttgttgtctccatcgccgtcatgtgaatcagccacctccatccttgctggattcaccgaggaagaggctgactcgccggatccctctgcatcctgctgcttcgctctgttgtatccgccgttcgcgtgaagcacgggaaggaagcaggcactgcagccattccagatctgataccgtgcaagacactgaaggctttcatggtttgtttgattgaatcaattgccaaccagctgaaagaaattgttgcaggttttgctagatgcgtggatttagggattttttttttcttgtgttttaccgttctgttttcccttcatgatgtatacaagtgatttgtttatcaaaagctgggtactacattgattt

SEQ ID NO: 28311 - DNA, 1307 bp, Oryza sativa
  ref <308>: DATABASE ACCESSION NUMBER: AK103753
  ref <309>: DATABASE ENTRY DATE: 2002-08-28
ggctggagtcacccgaagaccgataactcctcgaagaggcactgtgctgaacaaggtagctgatcttattgacccagctacgggctggtgggataaaccactagtggaggagattttttgggagtctgatgccaggaacattctggccatcccggtgagattagacacaaatgattttgtagcctggcattttgatacaagaggagtgtactcggtcaaatctgcgtaccatgtcctggaagatcaaagggagagatcggcgaagaagcaagagggcggttcatcctctggagcggtgaaccagcggaatttcgagtgggataaaatctggagtttgcaatgcattcctaaagtcaaacagtttatctggcggcttgcccataacagcctccccctgaaactcaacatcaaaaggagagtaccagacgctgaaactctatgcccggtctgcaaaaggtttgatgagaatggtggacactgcttcctgcaatgcaagcccatgaaactctgctggagaattttatgccttgaagatatccgtttaagcttgactcagcttgtttctgctagagatgtggttcagaccattttgaagctggagaatgatcgaagaatggaggtcttctttcttttgtgggtttggtggtatgcacgcaacaaggtgaactcgggggaggacgtaatcagagtggaagaagtggtccacaaggtgaaacagctgatctgtgatcatgcctctctgcgcaaaggaaaacatcccaaggtgaatgtgcaaagaaataagtgggttccccctgtagatggtaatctgaagctcaactttgatggagccttccgagctgtaaacaagtctggtggttatgatttcctggttcgtgacctccgtggatgtgctgttcttgcgggtgccggctgcctggaacatgtacatgatgcttttgcagctgaagctgaagctggtttagcaggcctaaaatctgctatttcgcatggtattaactctgtccaggtggaaactgattcaccatcctagtgagagcctttcactctcatgagtacgctctctctccttgcagttctatcgtaagggagatcaaggatctcgtccatttaaatttttctagtgttgtgtttaattatgccccgtgatcatgtaatgtggctgcgcataagttagctcaaatgggtgtgtgctgggaattgggtcaagcaagtgtgtgggctgacctgtccctgacattgtacaaactattgtggatcgtggtatcactgatcctagtatttaataaagcgcgccggtttaaccc

SEQ ID NO: 28312 - DNA, 1897 bp, Oryza sativa
  ref <308>: DATABASE ACCESSION NUMBER: AK103754
  ref <309>: DATABASE ENTRY DATE: 2002-08-28
gagtccgcagtcgcacctcacgcctctgatctgtgtcctccatggagcaagctccaaccgaggcgaagaaggcaaggtcctccgagtcttctccgcaagcctacgccgacgatgtggaccggctcagcgcgcttgacgacgcctccctccacgccatcctctactgcatgccgctccgcgacgcggcggtcacgaccgcgctctcccgccgctggcgccgcgtcttccccacgctcccttgcctctacatcgactcggccaccttcaacggccgcgactacgtcgccgactccctcggcgatgactactgcgaggacccagatcgatgggtcgaagccctggactgcatcgtcggcagccgcgccgctccggttgccgtcttcgatgtcgaggccgacgtcatgttcacggaggaaggctggttccacgacgtcatccgcgtgctctgccggagcggcgggctcttgaagctcaggatctggaacacccgcctaaccagctgctacctgctgccttcgccggtgtacgcctgcgagaccctcgtctccctggagctcttctcctgccggctgcgggtgccggacaggctcaccggcctgcgcgccctgcagtcgctcgtgctccaggacgtggtcgccacggacggcgacctccagcgcatgctctcccggtgcgaggccatgaagcggctggtgatggaagacatccgcaaggcgcggaacatcgtcatagacgcgcctagcctcgagtatctgcagatccattcgtaccgcccgcttcgcgtctcggtgaaggcgccgaagctgcgcttggcaaggctgagcctctgctacggctgcgccgagctttcttggagcttccacgacaacgaggaaacagatggagactactcgattgctgagatccaggagatgtttgattttgtggcgatggaaaagaaggagcacaagcgcacggacgagattaggaatatggtgacgtttttctgtggaatccgagcagccaaggagctccggttggacctgccgcgtgaatattccaaggtcttgagcaagaccaagattgcagtgccaaggatgttgcccaagaagtgctgcttacttgggttgcagaagcttacccttgctctggaccacaatcatgaagcccttgccagattagtttcatgcttgctcaacagttccccaaacctcaaggatcttgaaatcatggatccttttgatatccgctactctggtcacttagctacagagttttgggagaagcatataactgcggattgcatccaaaatcacctgtcagttgtcaccttctacatgcgcgagtcgctctttggaggctaccctcgcatcggcctttgtcagttcctggtgatgaacgcgagggccctcaaaagaatgagcattaagtatcatcgctcgctgtacaagactgaacatgtcgcaaccgtgcttgaagcagttcaaagtgaactgcgtctctggccgagggcttctccggatgtgcagctggagttatctgagattgattgcatcccatcgatctgaacttccaatgaatcccatcgattatgaggtacggttcttctaacaaccgtatacaatggaagtctggcgtctggattggctcttgcaacaagtattttgcaacagttagtactactatgtaatgggacctgttggaatgagactatcattttcttccgtagaattcgctagacaactgcatctggctgtaacaagcagattgctcttatatgtagaggcgttgtcctcttatggtaaaacctgaccccaggaggagaccaggcatctatggatttctggagcaattgtctgcaattcttgttgctcgtttatgtaatcctatttgctttgggactcgtcaaagattgagc

SEQ ID NO: 28313 - DNA, 1649 bp, Oryza sativa
  ref <308>: DATABASE ACCESSION NUMBER: AK103755
  ref <309>: DATABASE ENTRY DATE: 2002-08-28
gacacacaacggcaacgtcttaccagctcggagctctctcgcttgctgcctcttctcttcttcctcccgccaccgacaccacctccaccagcagcttcgccttcgccgcgtcggcatctgcagttgccacttcgctttcttccactccctcctcctcctcgcttacctcacactcctcccccccaatttcatcccccacccaccaccagatcccccaccacctgccgcattctcccccccaagatccagatcgccggtcacccccacgaactcgctcgagatccagagagagagagagaggcagtttcttggttgattttcgaggatgaagaggaagactcggaacaagataatcctgacgacgctgctggtgtcggcggcggcgatcctgatcggcgggacggtggcgctgatcctgacggcggggacatggaaggtgaagatgaaggagtcgcgcgagaagatctgcgacaaggggtgggagtgctcgggtagcaagtactgctgcaacgacaccatcaccgacttcttcaaggtgtaccagttcgagaacctcttctccaagcgcaacagccccgtcgcccacgccgtcggcttctgggactaccagtccttcatcaccgccgccgccctcttcgagcccctcggcttctgcaccaccggcggcaagcagatgcagatgatggagctctgcgccttcctcggccatgtcggctccaagacctcatgtggatttggtgtggcgaccggcgggccgacggcgtgggggctctgctacaaccacgagatgagccctaaggaggattactgcgacaagacgaacctgcagtatccctgcgtcgagggcgccgagtactacggccgcggcgccatccccgtcttctggaactacaactatggcgcggcgggcgacgggatacacgaggacctgctccaccacccggagtacctggagcagaacgcgacgatggcgttcatggcggcgatgtggcggtggatgacgccgatgaagaagaagcagccgtcggcgcacgacgtgttcgtgggcaactggaagcccaccaagaacgacacgctcgccaagcgcctccccgggttcggcgccaccatgaacgtgcactacggcgaccagatctgcggcaagggctacatcgacgacatgaacgtcatcatctcgcactaccagtactacctcgacctcatgggcgtcggccgcgagcactccggcgacaaccgcgactgcgccgagcaggccgccttcaacccctcctacaagaagcccgacgatcagcagcaacaaagctagaacagatcacccccaattccccccaattccacggtaaagaattcacccaatgtgttgttgtatacatcttcttgctactgcaatcgctattgccaatgcaaaccaaccattgccattgctgttgcctcgtgagctatacagattaacggattcttcatcagtgtgaggagctgtggtttgcattggtgtatttctgagtagcggattttgagggaagtgtcaactgtgtgtgtgatgcctatgggatttgggaaatttgttgtagcccttgttgtaccatagtgtacattttcattccatttgatttttgtcacatatacatgtttaaagaggaggattcagg

SEQ ID NO: 28314 - DNA, 938 bp, Oryza sativa
  ref <308>: DATABASE ACCESSION NUMBER: AK103756
  ref <309>: DATABASE ENTRY DATE: 2002-08-28
gtatgatgctaaccggaagctcacggcttatacaggagcaacttcccccaaaactcttgccagttcgcgcggcttcaggctttctttggcgccaaatccgccgcccaatcccagttttcccaagggtagtttcttggtttagtcaactactatggggtcctgtgtgggaaaggaacgcagtgatgaagaagacaagattgacttcaaaggtggcaatgtgcatgtgattagtaacaaagagaattgggaccacaaaattgcagaggcaaacaaggatgggaaaattgtgattgcaaatttcagtgctgcatggtgtggaccatgccgtgtcattgcacctgtatatgctgagatgtcacagacatacccccagttcatgttcttgactatagatgtcgacgagttaatggacttcagctcatcatgggacatccgagcgacaccgacgttcttcttcctaaagaacggggagcaggtggacaagctcgtcggcgccaacaagccggagctggagaagaaagtggccgcgcttgctgacagcgcctgaggcaaattaagccagtgacaatcagacattattgtcaggaaccccaaagttcagttcagagttcagacgttgccagcaaatatcaattatcatcagaggctgtatgttctgctgaggtgtttcttcagacttggttctgtatatccgtcatgagactgtacagtccccgggtataaagtatctttttttctcctgttaaaatcacacttttgacatgccattttggcactattattgcctgattttaccctggtgattagtgatccgatgtatgttgagtgtgaactgatacagaacaatagggaaatatttttactgtaatattgacaaatgccaggaatggctaccaatctgccatgaatccatgatttatggagttcatgattctagt

SEQ ID NO: 28315 - DNA, 1677 bp, Oryza sativa
  ref <308>: DATABASE ACCESSION NUMBER: AK103757
  ref <309>: DATABASE ENTRY DATE: 2002-08-28
gagtaatatcgcaaattaagcagcaggtgcaggaggatgtcgtcggcggcggcggtggtgcgcgtggtgtcgaggcgcaccgtgaagccggcagcgcctcggccgcgggagagcatccccctcacctcctgggacctctccatgctctccgccgattacatccagaaaggcctcgtcttccccccgccgccgccttgcctcctagtcgtcgaccacctcgccgccgccctctccaccacgctcaacacctactaccccgtcgccggccgcttcgtcacccacaaccacccggaacctgaaggcggctgctccgtctccatcgactgcgacggccagggcgtccagatcgtccacgccgtcgccgatgccgtcactgtcgccgacctcctccctcccgacgcccacgtcccgcccctcctccactccttcttcccgctcggggacgccgtcaactacgacggccaccatctccccctcttcgtcgtccaggtcacccacctcgttgacggcgtcttcctctccttcgtctacaaccacgcgctctccgatggaaccgcattctgggacttcctcaatgcgtgggtcgagattgcgcgcgccagctgcctcgccgcgcccacctcgcccccacccttgttcaaccgttggtctccctctcccggagacggagccccggtcgtgctgccgtacgccgacctgtcggagctgatcgagaggctgcagccgccgctgctgtgcgagcggatgctacacttctcatcggagtcgctggtggcgctcaaggagcgggctcgccaagagctcctggcggccggggacacggcgggcgcggccgcgctgacgaggttccaggcgctgagctcgctgctgtggaggtgcatcacccgcgccaggcggctgccggcggagcaacagaccatgtgccgcgcggccatcaacaaccgcgggcgcctccagccggcgctgcccagggagtacttcggcaacagcatctacgccatcagcacggagaaggtgcaggcgtcggagctggtggagcgcgggcacgggtgggcggcggcggcggtggggcgggcggtggcggcgcacacggacgcggacatcagggcgcgggtggcggcgtgggaggtgaagccgataatatacacggcgaggtacttcgacccgtcgggggtgatgatggggagctcgccgcggttcgacatgtacggctgcgactttgggtgggggaaggcgctggcggcgcggagcggcaaggccaacaagatggacggcaaggcgtcgctgtacccggggcgggagggcggaggaagcatagatgcggaggtggtgctcactccacaccacatggcggcgctggacgacgaccacgagctgtgggccgccgtcacgccgctactgctcaacaacaacaaaccttgaagcttttcttcctcctccttcctgccttaattagtgcctgccttttcttccaaaattaaataataaaataagaagctttaagcttttccttccgatgatattgtttcccgtctctgtctcaggttttggtttccttagtgtttgtttgcttgcttgattgataatccagcatcaacaaacaaagtaaagatatatctattcatgtcatgacatcattccagtgaggatgcaatgcacaacaccttcttcttcttt

SEQ ID NO: 28316 - DNA, 2140 bp, Oryza sativa
  ref <308>: DATABASE ACCESSION NUMBER: AK103758
  ref <309>: DATABASE ENTRY DATE: 2002-08-28
gactctctcctcgctcccactcccacccacactgctcacgctgccattgtcgcagtgtttgcacttcattccattccattccacctccactgcttcgtcttctcttctcttctccgagtacggtgacagggagtgcaggttcgcgcgccaccatgccgccgctgtcgctgtcggccaaggcgaggaggggcttctcctcgtcgtcgtcctccgcctccgccgccgcgtcctcctgcaggtcgcagctggagcaggacgtgaagaagctgcagaaggcgctgcaggaggagacgacgctgcacgccatcctcgagaacgcgctccaccgcgccgcgctcactctcgccgacatgtcctacctccccaccaacgcacaggagctgctctccaacatctccatcctggaaggcaccatctccaagctggaggacgacatggtgtccctgcattttcagctcatccaggagcggaacgagaggaggctcgtcgagtaccgcctcaagcaggcgccgccgccaccgcagctgcagctgcagcagccacgctccgtctgctcctgccactccaccaaatccgaatcagatgacaccgcaaacgagaagtcatgtagagtggacaaggtttatccttttgctgtcctgcacgactcagctatgaaactacagaggcagctttcatccaaatgctttggcaatcctaatcagctttcggaggacatcgttcgctgcatgaagaacatcttcatttccttgtcagattcctgcagggagtcctcgaggactccctcgacggagaagcagcagtctggaccatctcctagcggaaactattcaatttctgcattctggtcgctgtccgaaccaacttccatatcctcctgggtgcagagtcctcaggtcgatttgaactacaacaataatctattagcttcagagaccgtctttgatccgtacaaagctcgcgagaagcttagttgggctgacattgggagctacggtgcagcggctgaagtttcgtggatgtcagttgggaagaaacaacttgagtatgctgcagaatcactaaggaaattcagattgctgattgaacaattggcagaagtaaacccaattcacctcggtgatgacgcaaagttggcattttggatcaatttatacaatgcactgatgatgcatgcttatcttgcttatggcgttccacggagtgacataaaattattttccctaatgcaaaaggccgcatatacaattggaggtcactcattcagcgctgcattcatcgagtatgtgattctgaagatgaaacctccaaatcataggccacaaatggctctgcttcttgcccttcagaagataaaagtgcctgaggagcagaaaaagttttgcattgggtcacctgagccactcttgacatttgctctcagctgtggattgtactcttctcctgcggtgaagatatatacagcaggcaatgtaagggaagaactccaagatgcacaacgtgattttattagagcatcggtaggagtcagtcgaaaggggaaacttctggtccctaaaatgctgcactgttttgcccgcggttttgttgacgacaacagcttccctatctggatatcacattttctacctcagcagcaagctacttttgttgagcactgtgtgtctcaaaggcggcaaagtctcctgggcacccgcacatttggcatcattccgtttgattctagatttcggtacctcttcttgccagatatgggattttcaaattaactgccctgacatgtttccccatccagataacatagaagcctaacatgagaaacacagtgaccaagtctcgtgagcaaacctattggttacagttgaaacaagcttttgcagcaagcaagtatctggattacagtatttcttaaacaagcaaatgcacatccagtgatcttggaaatgcaggtttggtaaaattttgaatcggtataagcactggattaagattgacatctttggatgtcagatgtaaaaaaaatcttcagcatgtcttaataggttcccttgcctcgacttcttgtcgaactcagcaaaacatgttgtacattgtatgtgtagtagcaaataaacaatgaagttagtaaaggaattcactg

SEQ ID NO: 28317 - DNA, 3932 bp, Oryza sativa
  ref <308>: DATABASE ACCESSION NUMBER: AK103759
  ref <309>: DATABASE ENTRY DATE: 2002-08-28
gagttcttccaaacgaaccaaacagtcaccacagatccgagctccccgtcctccccggccaccaccccggcggcgaccggacctagcgcctcccgaccgttcgcctcgcctcgccgcggcgccgcgggtggggcggccatggaggactacccggaggagctgcggacgccgccactgtcgctggtgtccatcgtggggtgcccggagctgcaccccgcgatctcggcggcgctgagctccaggcagccgcccatgaacttgctcgccctcccggacttctccaaggcctccatcctcgctcgcaccgccaaggcccgcgacccgctcgcgccgccgcaggcccccgccgggatcctgaagaaggactggctcctcaagcaccgcacccgagtgcccgccgccgtcgccgcgatgttccgggccgatcaggtctccggggaccccgcccagtggctccaggcctgctccgatctcgagaacctcaagtctgtgattcagggaagaaacactaaattagtggtgatccttgtacagagtcaagctggtgatgaactgagcgaggatgttacggttgctctgaggaaacgtgcagaaattgattcaaagcacctggttgttttggttgagagagatgaaatggaatggaccaaatctctcaacaagttgacaactgtttttgcggagttatgtacgacatactataaggatgaaggacgaagggtcaaagctcgcatcgagaaaaggaatttctcatctgttgagctgagcattcgctactgtttcaaggtcgctgtttatgcggagtttaggcgggattggcctgaagcattaaagttctatgaggagggcattcgtgttctgcgtgagatgataggaacttcaacaagactgcctccaacacaacgccttgttgaggtaaaagcagttgctgagcaatttcactttaagatatcaacaatattacttcatggggggaaggttgtgggagcaatcacatggttccgtaagcatatcagaagctatgagcgtgttgttggatcaccagaagttgcttttcttcactgggaatggtttagcaggcagttccttgtctttggtgagctcatagaaacaacatctacaactgttccggatacactatctcctcgttttggcactgctgacaacgcactgaccgagtgggaatttcaaccagcttactactatcagttggcggcaaattacttgagagagaagaggtatgccttagagttctcttcatcaagtgtaagccttaccaaaggagtcaatggattacctgagtcagtaatgccttccgtatatgttggtcagtatgtacgcttgtttgagcaaggagatacagttgcggtgcttcccctttctgatactgagtataccagctatgctttgtcagaagctgaaaggtttcaagattcctatgagataattgcattgttcagaaaagcttatgaatcatttcggagcctaggtgccacaagaatggcttctgcctgtagtggtggaatggccattgagtattatgcagcaggggattttagtaatgcaaaacaactttttgatggtgttgctggcctataccgtcaagaaggttgggccactttactttgggaaaacctaggttacttgagagaatgtgcaaggaaacttaagtctctgaaggactttatcagttattcacttgagatggctgcattacctttattctctggcagtggacagggaaattcagaaaataaaaggaaaaatggaccagcaggatctcctaccatttccagtagagagcttatacagcaggaagttattaatatcttggaaggaaagcatgcatcggagaacactgatgatgaatttgatcttcatttgatggtagaatctactcacctcgatattgatcaaataagtccactaaggatagtgtttctcgcatctgttgcttttcacgatcaatctgtaaaacctgattcaccaatgcttgtcagtgtctctctacagtctcatcttccttgtccagttatgattgataagttggaggttcagtttaaccaatccgactgtaactttgttatagttagtgcacaggaagattgttctgcatcaaattcacatgttcatgatggagctgttcagactcctctgacactgttcactgataaatggatgcggttgactcatgaagttaaaccagagtggaaagctggaatgtttggcggtgaaggcaacaataagtaaacgtcttgtagtttgctgccaagcggaaagtcctgtttcaatgggagaattttcattgtggaaatttgaggaccaagtagaggcattacctatgaaggacaatgtacttgctttttctgggcagaaactgatccaagttgaagagccagatgctcaagttgaccttgtcttagattgtcctggtcctgcattggttggagaattatttacagtcccagtgaccatattgtcaaaaggacacgcagttcattctggtgaactgaaaatcaaccttgtcgatgccaaaggtggaggccttttgatgagtcctagggaagcagaagaatctgaaagtcatcatgttgaacttcttggtgtctcagatgtgaccacggaaaatgggtcaaaggaagaagttgatagcataagaaaaatccagcactcgtttggggttgtatctgttcccacattatatgcaggtgattcctggtcatgcaaattggaaataaaatggcatcaagcaatgtcagtgatgttctatgtctcacttggctattccctggactcgactgaagaagcagcactgcacagacttaatgtgcacagaagcttgcaaattgaaggtaagatccccatgatagtcagtcaacagtttttgagaccatttaggcgagaacccctgttattatctaggatcagatcctcaagtgatgatgataaaaaaagttctcttgctttcaacgagtcaaatatgcttattttaagtgctagaaattgcacagaggtacctttgcggctacacacgatgactattgtgtctaatgatgatggaaaacaactctgctcagtgcaacagatcagtgggatttccaatgaatacgcagttattgctcctagtgaagaatacaaaggaatattttcagtgaatccacatactattagtccaagcttttttctaggtgaaatttgcctgagctggtcaagagattcaagcattggagagagtcaagatagccgtgttataatgaaagaaaggttacctgaagttcatatcgaggagccgccacttgttgtgaccatggagtgccctccttatgctatccttggaatccctttcacttttcatgtgaagatctacaattcaacatccttacttcaggaaatcaagtactctcttgttgattcccagaacttcgtcttctctggggctcacaatcatgctgcatccattctgccgaaaaccgagcatattgttagccataagcttgtgccgcttggttctggttcccagcagctgccaaggataacaataacttcagtgaggtattctgctgcactgactccttcagcctcagccgcaactgtctttgtatatcccagcgagccgaaattcaatttggaaaagggctattcgtcaactgatccgtgcgttagctagacttgtatatactcagatactctggcagctcttagctttgttccggagaagcgaggtatgctcctgaaaaaaacacgccagttttatcttaattcttgaataggcctggagcagattctgttggtgaacagcggttggatcattgcaaaagttttggcattcttttcaggtgttgatttcgtatacctttttggattgaccacatttctgtgacttacgatttttgtaccgttgattttggctaaggataatcaatcgtacacac

SEQ ID NO: 28318 - DNA, 1545 bp, Oryza sativa
  ref <308>: DATABASE ACCESSION NUMBER: AK103760
  ref <309>: DATABASE ENTRY DATE: 2002-08-28
gaatcgcaaccgcaagccaccttgctctgcttgctactctcgttgttggcgcggcgcggcccggccttggggggggatggatggggatgtggctggggtgggagtgggagcagccatagatttcctcctcctcctcctcccttagccgccaccaccacctccctccaccaccatgccgtcaccatcccagccgtcctcctcctcctcccccaagcttctcaaccctagccgcaacgcaaaccctccactcctcctctccccttagcccccccctaacgccgccgcaaattaaccgacgtcgacgatgatgcagactgccgggcgccgccgccaccgatgggtcaaggagtgggttccgcaggatctggtcgtcgccggtggcccatgcgcgctctacaaatgggtgcgagaggataggttgtcagctctcaaatccagggacaaggaacaagaagcagaactggcaaaacctgaaccaaccaccgaggttctcttcctgtgcagctatgagggctgcgggaaaacttttgttgatgcaggggctcttaggaaacatgctcatgttcacggggagaggcagtatgtgtgtcactatgccggttgcgacaagaaatttttagacagctctaagctgaagaggcattttcttattcatacaggagagaagaactttgtctgccctcatgaaggctgtggaaaggctttctcattggattttaatttaaaggcacacatgaaaacacattctgtggataactatcatgtgtgcaagtacccagaatgtgctcgaaggtttacacaggaatcaaaattaagggctcatatcaagcaacagcatgaaaagggtggtctccagaatccaggtgggtctgcaacaaaccgcagtggtctagcagaccactcccataatagtcacacaccgaaaccgtcagcagctccacccactccctcagctgatcgcccatacgtctgtccttatgatggttgtgccaaggcatacattcatgagtacaaacttaacctccatctgaagaaagagcaccctaatcactaccaggatgccggtgctcaagccgcctcttcgaagatgtcgaagcgaagaagcaagccctccttgacggccaagatgccactgcccaaggtccctaagcgcaggggttacacagagccataccaacctcctgttagtgttgtcgaagagcaccagtggccgaggaatgtgctgtacgaggacgatagcgaggagactgaggaagagggagataatgttggggacggggcgaggtacagagctgctagcagcgacgacgatgaggagactgaggacgaagaatgagctgctcagatcagtcgttttttcatccagtgcttgtgcatatgatttacaaaatcttagcttttgggttatagttttgcatacatgtacaatattcaaaataaggctgggtagttggtcagaattgagaattaccccccttccttctgaattatgcaggttggtaatgttgggctgctcccattaatcaaattcaaaaggacaatcac

SEQ ID NO: 28319 - DNA, 2493 bp, Oryza sativa
  ref <308>: DATABASE ACCESSION NUMBER: AK103761
  ref <309>: DATABASE ENTRY DATE: 2002-08-28
gttgggcaaatccggcgcaaaaaagaagaaacccgccgccgccgcctccgcctccgccgccgccaccaaatcatctcccgctgcaacagagccgaaggcaccgacgcagtcccagccccccgcggccaacggggcggcgccgcatctggtggaccccgccgtgctcctgcgccgcgcgcacgagctcaaggaggaaggcaaccgcctgttccagtcccgcgactacggcggcgcgctgcggcagtacgagctcgctctccgcctcgccccgcgcggccaccccgaccgcgccgtcttccacagcaaccgcgccgcctgcctcctccagctccgccccgtcgaccacaaggccgtcgccgaggagtgctccctcgctctccaggcggagccgctcttcccgcgcgcgctccttcgccgcgcccgcgcgctcgaggcgctcggtcgccacgagctcgcgcttaccgacgcccttgccctcctcgctctcgaccccgaccaccaggacgccgtcgacctcgtccaccgcctccgctcccgcattctatccccgtcctcctcagcctcaggctctgccacctccacccccgaaccaactagccgcccctcccctgctgctcttggtgcctccgctgttgttgccggcctaggcccgtccctccccgctcgccctttccccaagaaaccatcacctcctcctccgcctgctcaacaacagcaatcggttcctccaatgtcaaaatttaatccgtcgccaccatcgcccaagttggtgcctttctccaactctccgccatcttctgccaacgcatcagctgctgagagctcccagaaggtcacgccgacacctctggttccctcttcactttcgttgaaagacaaagcgctgatggacaagaaggttgtcacaagatcaaggccgctcaagctggtgtacgatcatgatataaggcttgcgcagatgccagaaaaatgcagcttccgaacactccgtgaagttgtggcatcacgattcccatcgtccaaggctgtgctgattaagtataaggatgctgatggtgatctggttaccattacttgttccgcagaacttcgattggccgagtcctgtgttgatatagctggcagtgaggtgatagaagatggtgcacggcatggtcagaaacttccaatgttgagacttcacattgttgaagtaagcccagatcaggagcctccaatgccaacagaagaggagaagctggagcaggataatgagttgctggtgaaaggtgaagataactctccacatgcttcagcagctgtggtgactgatgcagaggtgacgaaacaagatgtggagaatgtagttgctgaagctgaacagaacaccctgacagggaagaaagattgtggccatgctgagtgcaaggaagctgaaattgatgattggcttcttcagttcgcagatttattccggaaccaggttggtgttgatgcagatgcacatctggacctgcatgaactgggaatggagctgtgctctgaggcgcttgaggaaacggttacaagtgaggaggcacaagccctctttgagatggctgcagctaaattccaagaggttgctgctttggccctattcaactggggaaatgtgcacatgtgtgccgcaaggaaacgcattcccctagatgaatcggctccaaagaaagtcatgtcagctcagctctgcacagcttatgattgggtgcgagataggtatgctcttgcagggagcaagtacgaggaggctcttaaaatcaagccggacttttatgaagggctacttgctttaggccagcaacattttgagactgcaaagcttcattggtcatttgcactagcagacaaggttgacctgtctgcttgggattcttcacagacattcaagctttttgacagtgctgagcacaagatgagggctgcaacagaaatgtgggagaaagtagaagagcaaagaatggcagaattaaaagaaccatctagcgaggcactgaagaaaaggaagaagcaacataatgcagatggtcaaggggagttgactccagaggaggcagctgagcaggcagcaataatgaggcagcaaattcacctgttctggggtaatatgctttttgagcgttctcaagtggaattcaaacttgatatcgctgattggaagaagaatcttgatgcgtccattgaaaggtttaagttggctggagcgtcagaatcagatatctctgcagtcttgaagaaccatttttccaacacagtttctgagtgtgaagataagaaaatcatgactttagatacaggaatctcccaaataagtaacaatattgaggacaagtgtatccttgaaagctaggttttcatggttttaagttggataacatccatgcccatattcttatctgttcttgataatattttcctgatgttgttttatgacctcctaattagggattacagcacaatgaattttccgttacctgc

SEQ ID NO: 28320 - DNA, 1622 bp, Oryza sativa
  ref <308>: DATABASE ACCESSION NUMBER: AK103762
  ref <309>: DATABASE ENTRY DATE: 2002-08-28
gagcgctccacaactcacgagacgaggcagaggcgctcgccgcggaggagccaccaccacccaccgccgccgccgccaccgcaaactctctttcttctctcgcctggacgagccgccggagagctcgggggagagctctgctgcttggggaggggaggcggaggcgatggagtcgatggagcccaaggacatcgactggagcagggtggtgtcgcggtacgtgcgcgacgagacctacgagggcatcgaggccccgcactgggccgacctcaccgatcccgaggccggcgtcgccgccgtcgacgacgaggcctggttctgccgccccgattgccggcatccaaagacggtcgaggacttcctcaagatgagccccagccccaagggcaagctactgcgatcagtgtcggccatgatgatgccgttcggcgagagggacaccaaccttagagacggcaacaacaatctcaagaggcggggagccgtcgccggcagcggcatcgccgccaccttcacgccgcccaagcccaaggctgcggccaagaagaggttccaggacgacagcgagaaccaggacccggcattggccactccacctccgccgccaccggcggcgagtaggccaccgttcggcgcggcacggtgggccaagaacgccaaggacgccatcaagtccagcgcggagaagcggccgggcaatgcagagaaggaggccctgctcagcaagaacgccgcgccgaggcagctcaagagcaccctctcggcgaggaacctcttctccgggaaggacatacttggccagatatcagacttctacaatgagctcaagcggatggccggcggcaatggcagccggcctgggtcggaggccatggaggaattaagctcaaacccaataaatgagggcgatgtggccgagaagaaggtcgattgtggctgtggcactggtgatcaggttccctctgaagaagccatcaaggagaaatcaaggcaagaaacagcagaaaagagtccaagcacaatgaaggggaagaagatgggattgaaagtggaagctgcgaagcccaccaggtcctctgtgttgaaggaggtgaaggccacaccaccgactccgcagcggttcccatctccctcgacgaaccgtgtcaagaacgtgaaagcaggaggcatgtcgatggcaagctcaccactcaagaagccactgaaggagaaggggacacctagtaaggatctggagaacagcaaagatgctaagaggcaaccttttggtgtcaaggacatgaacaacaccaaggcttgtgatgcagaaggctctagtagcatgttttggttcttgaagccctgcaccttcctagtggagtagcagcaaaataacgggaagctttaaagaactgcattttatgtagttagaatacattatttcattctatttgagatacctgtttggttgattcatttgatggacatttttgtcagggaaataaacagcaagctatgtatagttactagcaaagtcattcaagtttgagagattctttccatatgtggggttcgagatatagcaaaatgttgttgttctttatgctgcctaactgtttggccggagatctgccattttccgg

SEQ ID NO: 28321 - DNA, 913 bp, Oryza sativa
  ref <308>: DATABASE ACCESSION NUMBER: AK103763
  ref <309>: DATABASE ENTRY DATE: 2002-08-28
gctctctttctctcctcccactccgctagctccggccaccaactttgacccgtcctcctcctccgcatcccccatcccctcctccccggcggcggcggcggcgcggaggcggcggcacgggagcggctagtggtttcgtcggcggaggcggaggcggggccaagatgttcgggcgcgcgccgaagaagagcgacaacaccaagtactacgagatcctgggggtccccaagaccgcctcccaggacgacctcaagaaggcgtaccgcaaggccgccatcaagaaccaccccgacaagggcggcgaccccgagaagttcaaggagcttgcacaagcttatgaggtattgagtgacccggagaaacgtgaaatctatgaccaatatggtgaagatgccctcaaggaaggaatgggtggaggcggatcccatgttgatccatttgacatcttttcatcattctttggaccttcttttggtggtggtggcagcagcaggggcagaaggcaaaggaggggagaggatgtgatccatccgcttaaggtttctctagaagatctttacaatggtacttcaaagaagctctctctttcccgcaatgtcctctgcgccaagtgcaagggcaagggttccaagtctggtgcttccatgaggtgcccaggttgccaggggtctggcatgaaaatcaccatccgccagctggggccttccatgatacagcagatgcagcagccttgcaatgagtgtaaggggactggagagagcattaatgagaaggatcgctgcccaggctgcaagggcgagaaggttattcaggagaagaaggttctggaggttcacgttgagaaggggatgcaacacaatcagaagatcactttccctggtgaagctgatgaggcgcctgataccgttacggg

SEQ ID NO: 28322 - DNA, 2135 bp, Oryza sativa
  ref <308>: DATABASE ACCESSION NUMBER: AK103764
  ref <309>: DATABASE ENTRY DATE: 2002-08-28
gaagctggcagcccacccacatcgaggtctcccatctcccctctctcgcctcgcgttcacacatccccccttctccttcttccccccctctcccaagccgcgaaatcccctactaaaccctaggattttctcccctcccaatgctggagacggagccgtagcaaggtttcttacctctggaatttgggggattctcaacgcccaagctagattacataacatgaatgcaggattcagcccacagatcttggcgcagaagcttttgaagctcaataattcacgacaaagtatagagactttgtcacattggtgtgtctttcattatcgacactgccgacaagttgttgaaacatgggaatctgattttcactcagctcctcgtgagaggagggtatctttgctgtaccttgcaaatgatatcgtgcagaacagcaaaaaggactctggtagatatgtaaatgagttctggagggttatccctgctgccttaaacgatgtgtttgtcaacggcgatgattttggaaggaatgtcgtacagagactggttgacatatgggaagaacgtaacatatttggatcccatgggcaaagtctcaaggaagactattctagaaggttcaaggagttcaaatccaagtcgagaaattctagtggggagctgctggaaaaggttatctcttgctacaagcatatgttgaatgctcatgtagacgacgatactctcatgcggaaatgtcaaaatgctcttagctttgttgacaatctcagcaacgaatatgagaacaactctattttagactgtagtaatggatctggctttgtggaggagctgcaagaacaacataacatcctgagagactccattgaacaattcaaaacatcagaattactcagaggcaatcttatttcttgcttaaaggaagcactccatgaacaggagttcaaaatggaacgggccagaagccagattaaggaagttcaatcccgatacaagaaagctgatgacctctgccagaagcttggaatacatgtagaaaggcaggaacaaccgaaccatgggcctaagaactcaggttctgaaatgcatggtagctttggcccagattcagctaatgccagttcttttgagaagggacaatcaagtgcggtgatgtattcccaggagaacggcggtgagcatgagatccccaatggcgttttctcttcacgggccaccaaggataacattgagcagaaactagaagagcactctacgaataagagacagaaactacagaatgatgtgtatgtttcacggcctcaatcgccacctccgccactgccatctgatgcatttgaacagccgccgccaccacctgagcatcccccgccaccagagtctacatcgccccctccaccgccaacttctgatccacctccagtccccccgccaccaccgacaacaggttcattcatgccaattccttctgctccgtttgcgggactgccagtacctgccggccctatgacagcagtaccctacaactcttacccagtatttcctcctatgaactatcccatggtcaacatcccacctcccttccctagtgctccaaataccccccctggtttccaaggtttggctggtcccttctatggccctccttaccccgcaccaccaccgccaccgccaccaccgatgaacaggaaatagactagtttcttgcctgcagattagtactgccagccagctttggaggatagccatagactttgcttcactgaagaatatgatcgtgatgattcatcgccatgtgttgtggagcttggaatatactgttcctagtgttgtacattagtcagctggccagatagtagcggatttaacagttaattagcattagttgttcaggtcatggtcatgaagcaaaaaggaaaccatgtgtgactgctagaaagaaattctggagttatgagttatgacagctgaaggcaaatgccatagcatgacatcttttgttactcttctttttcttccttagaaaatgtttgtcacattttgcttgtgttgtttactagattattatgtccatagttgttgcaatgttgagagcaggtaattctgttgttttggtatgagatgcaaattttaatcc

SEQ ID NO: 28323 - DNA, 1679 bp, Oryza sativa
  ref <308>: DATABASE ACCESSION NUMBER: AK103765
  ref <309>: DATABASE ENTRY DATE: 2002-08-28
ggaccccttctcgccttctcttcctcacccctcctctcatttcaagaagaacaagagaaagctaagaacattttctagctctcaagtagtactcctatataataccaagaagagaagcagtaatagtctggggaggcttgaagggggaggagaagcatcaaatcgaaacagaccaacagaatctgaaaaatttactagtggtagaacaagattagtcctttcctcttccaaataatagtggattagctactagtttattagttcctttcttctaccaagtagtggattagagattagctactagtttgcaccttgaagagtgatctaggatggcaccgagctttgattttgcggcatcaatcctcctttgcgcggaggacaacaccgccattcttgatcttggcgaagagagcgaggagatttcttgggttgttggggttgatgcttctctaggggacttgtcgatggatttccccttgcaatccgatgattgcatcgaggccctcctggggagggaggagcagcagcacatccccatggagggctacctccagcggcttctgctgcagcctgatgggctcgatttggtagccgtcaggagcgacgccattgactggatttggaaggtacatgagctttataagtttgggcctttgactgcagtcctgtcggtgaactacctggaccggttcctctccgtgttcgatcttcctgtaaagatctttctctgcattgcattgttactgtatttcatacaaactcgatttttttatgcttctgagataaatgccaagtcatggagcaattgcattctgagtttcagcaagaggaggcttgtatgacacaactcttagcagtagcttccttgtctttggctgcaaaaatggaggaaaccgttgttccacaccccttggacttgcaggtgtgtgatgcaaaatatgtgtttgagactaggaccataaaaaggatggagcttgcagtgcttaatgccctaaagtggaggatgcaagctgtgactgcttgctcatttatcgattattaccttcacaagttcaatgatgatgatactccgtccacatccgcactctcacgctcagttgacctcatcttgagtacatgtaaagttgctgaattcttggttttcagaccatcagagatcgcggccagtgtagctctagtagcattggaggaacatgaaacttccatgtttgagagggtggcaacttgttacaaaaatttaaagaaggagagggtattacggtgctatgaaatgattcaagataagattattatgagaaacattatgcgccaatcagccggctccgttttctccattccaaaaagccccataggtgtattggatgcagctgcatgtataagccaacaaagtgaggacacttttgttggatcacctgcaacaaattatgagagctcggcgtcaagcaaaaggaggagaatttgcagatgattgttttcgttgtacatttgtagccttcaagtatgttgctcacccatttgttttaatggacccaagaacatggtcattaggacaggtttttgtagagacgagcaatctcttgttatttcgcattcatgcttccatattcatttttgagagaaccttggagaatggatatgctttgatgattctaaagaaaatataaaaacagaggaaaagg

SEQ ID NO: 28324 - DNA, 3420 bp, Oryza sativa
  ref <308>: DATABASE ACCESSION NUMBER: AK103766
  ref <309>: DATABASE ENTRY DATE: 2002-08-28
ggaggtttgatcttggtttcgatccgaagggtctcggttggctgcgtgggaagggggaggaggaagaaggcgacctgctatctaatcctctaccccctctgctgcgaaaattctctgctgtttgctcaagcatcttgctgcttggagccttggatcgaagagagttttagttcttggagttctgagaattgtgttgcttgagccgaattcgatcccaaaaaggctcttttttgggaggctttgaggaggaggaggaagaagatgggggtgatgtcgcggcgggtgctgcctgcctgcagcagcctctgctacttctgcccctcgcttcgggcgcgctcgcgtcagcccgtcaagaggtacaagaagatcatcgcggagatctacaagcttccaccggatggtgaaccgaatgataggaggattgggaagctctgtgattatgtctcgagaaatccgacgcggatacccaagatcacagagtaccttgaggagaggtgctataaagatctgagacatgagaatttcaccttggccaaagttgtaccatgtatatacaggaagcttctgtgttcatgcaaggatcatacaccattgctggccacaagcacattgagcattattcgtactcttctcgatcagagaatgaatgatgatttgcgggtcctgggttgtctaatgcttgttgactttctcaacggccaggttgatagcacgcatatgtttaatctggaaggcctcataccaaaactttgccgaattagtcaagaactaagggaagatgacaaagggttccgcctccgatgtgctgcacttcaggctcttgcttctatggtccaatacatgggtgaccactcacacatttccatggaacttgatgaagttgtgtccgtgatcgtaagttgttatgaggttaatcaaactctctcaataaaagaggttgtcaggcttcaagatgatgatgatttggtaatcaatggaagtctgactgggttgccagtatctgggcaaaatagtgccaaagtggcatctgatacaatgtctgcatctgaaaatccagcacattgggcaagggtttgcttacgtaatatggccagtatcgccaaggaggcaacaacagtgtggcgtgttcttgatcctcttttccgcctttttgatagccacaactattggtctcctgaaaatgggattgcattttctattctacaagaaatgcaggcactgatggacaaatcagggcaaaatggccatttgctgttatctttcaccataaaacacatagatcataagagtgttgccaagaagcctgccaagcaaacaagcattttaaaagttgcttcgcttcttgcaaaacatgcaaagttgaaggcgtcggtgacaatagcaagtgcaacaagcgacttaataaagcacttgcgcaaatgcatgcattgtgctgttgaatcaccaaatgctcaaaatgatgttgacaagtggaacagtgcactttatgtggccttggaggagtgcctggtgcaattgacagaaaaggttggtgatgttgggcctgttcttgacatggtgggagtaatgcttgagaatctctcttgtactgccaccattgccagaacaacaatttcatcagttttccgcacagtgcaaatagcagcttccatccacaagtcattgtacaaccagaaggcatttcctgaagctttgtttcatcagcttctcttagcaatgatgcacccagacaaaaagacaagggttggttcacatcgtgtcctatccaccattattgcaccttcacttctatgcccatggtcaggcataagttttcctatccctgtgaagggcaatgattcacagagcattactttgttggctctttctgccttttcttctgaggccgtaatggatgaagtccggatcaaaagcaggacccatgaacagttacaaaacaatgtaaaaccagaaactgtagttggctctgagaacggatacacacatacagaaccaaattcaaggaagagccctggtcttggaattccattgaaagatgaaaatcttaagttcatgaagctgaacagtagccaacttgttctcctcctttcatcaatttggagtcaagcacctctagaagataactcaccagcaaattttgaagcaatgtgccatacctacaatattgctttattgtgttcaatgacaaagagctctagtcacgcagcattagttcgatgtttccagttggccttctctctcaggaggatgtcccttaaccaagaaaatggtttgcagccatcacgtaggaggtgtttgtatacaatggcatcagcaatgctgattttttcagcaaaagttgctgatattcctcagacaattcctcttgtgaaagcagcagttccagagaaaatggtcgaccctcatctttgcctgattgatgattgcagactcgttattagttcaccacagtcatctaacagtgggatagtttatggttctgaggaagatgaaagtgatgcacgcaattttctttcttgtgtaaataaaaatgatacacagttaaaagaaattgtgatatcccacttcaaggagaagtttgaaaatctatcagagaagtttaatggtatagaagagcagcttcttcaggagttttccctggatgattcattccctctcagtgctccactattcatggaaacaccacactcttgttcgatgtacgctgaaaaggatgaccattgttttgatgaggaagtcattccttgtgagatggatgatgacgatgacatcgtttttgaacacagtggatcgcaatctgaaaggaaaacctctggatctatggcttcatcagatgttctaaacgtcaatcaactaatagaatcggttcatgagacagcaaggcaggttgctaatgctccagtttctgccaaccttgtaccctacgatcaaatgaagagccaatgcgaagccctagtcatggagaagcaacagaagatgtctgttctcctgagcttcaaacactcgaggaccgattcccgtggctcgactgcagaaaatggactggaaacaaacgagtcatctgctcggtctgagcctgagacgcagtcgacgaggaaggagcgaatgcgacgcagcgactcggcatcaagcgaatctgaccggtcgttcaggctgccaccggcaagcccatatgacaagttcatgagagctgctgggcgataggctggtgcaatgcaatgcgatggcgccaaggatctgatactagttttcaagcctgtatacagaaatgtttttacagatacaagtcttctaaagctgtttcttttcattgtcgccttgtattttttattcttctgagtgtaaatttctcgagaaggtgtacaaatttctgttactgttgtagagacccagaataaataaaagtataggcattggtgc

SEQ ID NO: 28325 - DNA, 1308 bp, Oryza sativa
  ref <308>: DATABASE ACCESSION NUMBER: AK103767
  ref <309>: DATABASE ENTRY DATE: 2002-08-28
ggccgttcgactcttcgacctccacgccgacgtcgcgctgcgcctgccacctttatcttgaaccgcgacgtcgttgtccgcccctcccgcgccggcgaggcgaccgagccccctcccctccttccctgcctcgtgccactagcgccgcccttcgccgccgccgccgccgccgcccgcgagggagacgcgagaaggatgagggtgaagaggcggtccaagaaccgcaaggtggtcaggttctacgccacctgcttcggcttccgcgagccctacagggtgctcgtcgacggcaccttcgtccaccacctcctcagtcacagcctcctccccgccgacgacgccctccagtccctcctctccgcctccaggccccctcccctcttcacctccaagtgcgtcctcgccgagctcaggcgcctcggcaagtcccacgccgacgccttcgacgccgccgccctgctcgccacggccaagtgtgagcatgacaaagtagtcagtgcagtggattgtgttctgtcactgataggtgaaaagaatcccgaacacttctttgttgccacccaggattctgatctccgtgcaaagctacgggaggttcctggtgttcctgtgatatatggtctgaagagctccttgttcattgaacaaccctctgtgcagcaacgtaaatttgctcagttggacgaggagaagcgtctgcatatgggtaaatcagaatatcagaagctactgaaggttccatcggatggaaaggcggctgccagtgaaaacgcaagtgatgatgaaaagaacagaaggcctatcagttctcttgtagaaaatgcacttggggtggccgacaaaagcaaatttaagaagaaaagaccaaagggaccaaacccactctcctgtaagaaaaagaaaccaaagccccaattgtcagctgctcaaaatcaggggcccaaagctgatggggaggcaaagcgaaagagagttaggaagcggaagagaagccacaaagatagcaagcaaacggaaacaatgagctaagaaagatgagctgcaaagttaagaaactctcgctgcatatccagaggcagagctaggtggcacaatgttttgaagatagaaatcatactgatctcatggtgtgccactcattgagtcggctgcgttctttgaattgtaatgcttgattgttcacagatatttatgatagatccgtataggatgtatctggatgtcttcttgtagcagttgatgcaacactgtctatcaaatggaattcatggtgctactgctaatctgatagaatttcctattgggttc

SEQ ID NO: 28326 - DNA, 3827 bp, Oryza sativa
  ref <308>: DATABASE ACCESSION NUMBER: AK103768
  ref <309>: DATABASE ENTRY DATE: 2002-08-28
gacccattctcccctctctccgccgaaccctccagactccgccgtgccacgcacggcggcgccgcccctctaaacccaccaactccggcgccgcctcgcccccgcacttatatgtcgctctcctccacctccacctcctccctcctcctcctcctctccccacgcggcaaccctaggcgcctcctccccctcctcctccctctccgcctctcctcctcctcctccgccgccgccgctgccgctgcaatgcctccccgccgcgaccgccaccacggcaagcagccgcagcagcagtggaagcccaaggccacggaccccgcggccgcggcgccggctgtggtggcggcggcatcctcacccgcgtcgtcgacgtcctcttccgctgatttcgccgggggggtcgagaggatgaccatctccccgtccccgcagggaggggcgtcgcaggtgtgggtgcccagggggtacgcgacctcggcgtcgtcgtcctcctcctcctcgtcggcggcggcggctgagcagcgcatcgacgctgaaaagctctccagggtgttcaaggccgccccgaacttcgaggtggacaacaacacgttcatccagtcgcagatcagggccaccttctaccccaagttcgagaacgagaaatccgatcaggagactagaacccggatgattgagatggtgtcacatggcttagctaccttggaggttacgctcaaacattcagggtctcttttcatgtatgctggccaccatggtggtgcatatgccaagaacagctttggaaatatttacacagctgtgggcgtttttgttctgggacgattgtttcgtgaagcttgggggaaggaagcacctagaatgcaagaggaattcaatgtttttcttgagaaaaaatgcataagcatttcaatggaacttgtcactgctgtgttaggagaccatggtcaaaggccaaaggatgattatgctgtgattactgctgtgactgagttgggtcatggcaagccaaaattttattctactccagaggtaattgagttttgtcggaaatggcgtctacctacaaaccatgtctggctattttcgacaaggaaatctgcctcgtcattttttgctgcatatgacgctctatgtgaagaggggacagcaacatctgtttgcaaagccctagatgagatagctgatgtagctgtaccagggtcaaaggatcatgtaaaggtgcagggtgagatacttgaaggcctggttgcccgtattgttagccgtgaaagttcagtgcaaatagaagaagtcttgaggaactatcccctgcctccattagatggagttggctctgatttaggaccaagtctgcgagaaatatgtgctgctaatagatcagatgaaaagcagcaaattaaagcacttcttgaaaatgttggaccttcaatgtgtccagaccattctgattggtttggatgtagtggccttgatgatcatcagtctccaagtgctaacagatcggtcgtcactaagtttttgcaagcacatcctacagactacacaactaagaaactgcaggagatgattcgtgtgatgaagcagaggaatttccctgcagcttttaaatgttattggaactaccacaaaattgactctctatcgaatgacagcttgtattacaaaatggtcatccatgtgctcagtgattctgtttttagacgctatcagcaagagatgaggagaaatcaagggttgtggccactgtataggggtttctttgttgatgtaaacctgttcaaggttaataatatgaaatcttccataccttcggaagacattgacacctcactgaaaaatatcaatggtgccttggattcaaattcgtcagctaaggatggtctggctgatgaggattcaaatctgatggtgaagctaaaattcctgacatataagctacgcacttttttaattcgaaatggtctgtctacacttttcaaagacggtccttctgcttataaaacttactacctgaggcagatgaagaactggggaacatcagcaagtaaacagaaagaacttagcaaattgctggatgaatgggctgtctatattagaaggaagtatgggaataagccactttcatcctcaacatatcttagtgaagctgagcctttccttgaacagtatgctaagcgcagccctgaaaaccaggctttgataggggcagctggtgacttggttcagacagaaaatttcttggcgatacttgaggcaaagagagatgaagagggtgatcttcaggctgaacgtggtactgcaccacctagtcctacatcaacatccttggatgtagttccgaaagccgaaggcttgattgtcttctttcctggtatacctggctgtgcaaagtcagctctatgtaaggagatattaaccactcctggtggcctaggtgataatcgtcctcttcatagtttgatgggagatcttattaaaggaaggtactggcaaaaagttgcggatgaacgaaaaaagaaaccatttcgaataacccttgctgacaaaaatgcaccaaacgaagaagtgtggaggcagattgaggatatgtgtaggacaacaaaggctgctgctgttcctgttattcctgattctgaaggcacagattcaaatccattttctcttgatgctcttgctgtcttcatgtttcgtgtacttcaacgggacaatcatcctggtaatctggacaaggcatcaccaaatgctggctatgttctgttaatgttttacaacctctacgatggcaagagtcgaagagaatttgaaagtgaactatatgagcgttttggatccttggttaagatgccactattaaagccagatagagccccgctgcctgatgaagtgaaagctattttagatgaagggatcagcttgttcagactgcatcaaagcagacatggaagagcggagccatcaaaaggtgcatatgctaaagaatgggcacagtgggagaaaaggttgcgccaggttttgtttgcgaacaaagactatctcaactctatccaggttccatttgactttgcagtgaaagaagtattggagcagttgaagtctgttgcgaaaggtgatcttaaaacgcctgataccgcgaagcggaagtttggcaatattgtcttcgctgctgttacgttacccccagcagatatattgggtgctctcccaaagctagcagaggacaccgacgccaacaagttcctcaacaacacaaaactcgcggataacctgaccaaggctcatgtcacccttgcccacaaaagagcccatggcgtagccgcggtctcaagctacggtgtctaccagaaccatcaagtccctgtcatcttcaacgccttcctcttctccgacaagatggccgccctcgaggtggagctcgggacggtgaacggcgagaagatcgcgtcccggaacgactggccgcacgccaccctgtggaccgccccaggcgttgcgccgaaggaggcaaacacgctgccgcagctagtcacggaagggaaggcgaagcgggtggccatagaccctcccatcaccatatcaggagtgctggacttctactgaccgaccaccctcttttttctttattttctggtggcctagaggttgaacattactaacaagtggtaacggcgatagcttgtagatgcatcgagttggagggctcttgttttttcggggattacaggacaggtcgaggtattgttttttatgtttgaatttggtgaaaaatgaaatataggagtatatgctgcagtataaataaaattatttaactgctgtctacgggc

SEQ ID NO: 28327 - DNA, 1553 bp, Oryza sativa
  ref <308>: DATABASE ACCESSION NUMBER: AK103769
  ref <309>: DATABASE ENTRY DATE: 2002-08-28
gaccccacaccaacattcacattcagtgcaccccaaacaccaagaactcctcctttttttctcctgtaataatcctgtaccctctctctctatctccctgcagctgctgcctagctccagtacggccaccgtcgtcgatcggtctctctctctcaccggatccgagaagcaaagaaccgatcttttttcttcttttttcccctgcgtgatgcttcttgtttactactacgtgggtgcagtgcaggtttgttgatcgatcttggggcggggcgggatcgagcatatgaaaggcgagattgttgacagaagagagtgagcacacggcgcggcggctagccatcggcgggatgcctgcccccgccgcgtgctcgctcctctttctgtcagcatctctcatcactccctcccgcatcccccgccccgatctcgcgtcgatctctcatctccggagaggagccatcttttaatttgtttgatttgatttgatctcgtttccctgaatttcttggtggaaacccgcgccgacacgcgtggcttttctttctttctttcttttttttgtgcagagacagagagatcgagatagcaaggacatgtcacttcattatcttctagatatgcacgcaaaacattttttgtttgtttttctctctctcttcttgattcgatttcatctctttcttgctgtcatcacagccttgcatgccggggagctactaccgaggagatcagcgattattgctgatatgatgctgctgctgatggagtgatggcaaggaggaggaggagaaaagatgagcatttgatgtgtgctgctagctgggcttggtgagctcctgctggctcaaaaatggagcatggaggtcactaggaggagaaccatatttggcaaggacggtggtctcgcctttgctttggccagatctgatggatgataaactactacatgcatgatataatggatagcagaagcaagctaagccaccaccaccaccagcagcaggagcactagctgcaagtctctgcaatatcaccaatactaagcagtacaggtgcacacgatgaagagggaacaacagctgaaaagaagtgaaacataggctgcttctgcagtattgataatttctaacagttgctgtcatagaaggcaaatgcatctgcagcttacatggagcattctgcaagagtatgtttggtgataactgagtttttagaggatgtgtgcaaccaattctcgcacgcaagtccatcgcgataggggatttggtgttcactgaattcaaaccgttcctttcaagcaagaagggtcctgaaggatataacagcttcaaatcatacaatctttgcccctcccttttattcggctggaactattgaaatgtcactttcaggatggttagaagcttgtgctttaggggaaaatttcaaaacttttgcattttttccttagcctttctttgtcagtagtaccaaactgcgcctttatttccagtgttcctggagaaacgtcacgctcaatattagttgaccatatacacaaattctttgcttcc

SEQ ID NO: 28328 - DNA, 1673 bp, Oryza sativa
  ref <308>: DATABASE ACCESSION NUMBER: AK103770
  ref <309>: DATABASE ENTRY DATE: 2002-08-28
gacctttccccacccatgctactcccaaatccccaatccccatcccaaaatcctcgccacctccgccccaaaaatcctcgccgccgaccggcgccgccgtcttctcgcggagcaagcagcgagcactacagcctccatgtcgccgagccagccagccaacattgtcgtcttctcgccttacttgccggcgaccccgtgtcgcttcgtcatcgtcgagccagctgtgccgctcccttcccttggagccactgttctgcgccaccccctgtggagccaacatccgccgtcgtcttctcgtggagccaatggtcagcactgccaccaaacatctcgtccatggccatctcctcgcttcctgtgactgctgcttgtcggctcctccacacctctccaattggtactgccatcctctaccactctgtatgcactaatacttattaggttcattttgttttcctcgtattgttgatctgcataactgtccttttctgcagtaggtattttactactcagattacctttgctttgctctctatataggtatgattcctactaatccataaatatttcttctgatatgtttgctacctgtacaatcggcctaaaatgcaaacaacaataaggttatcctatttctttcataatacatgattccccattgtttcagggatgcatgatagttttatatatattgctgggattccatttgtttaacagcaatgtggttatagcacatattttcatttttttacacacagcaaaatagcatgcacaaagagatattggcctgatttttttccctatgtaattgtacgatgtgaccatatacctatggttagtgcaggatgccacaaaacaatgcaccatgaagggtaaacctataaaaaatcattgtgctacttgtccgattgcacatgttctatttgtgcatgcataggaataattagttactgctttggtgtacataagattgttttttttgctacctgcttcagtgttcctaattggcttcatggcgatacaaatgagaagaatgaagtgttgattcaagctagaagataatttactatttcatagataatcttgatgtttagtacagaaggcacacaattcaacttgatcgcaaccgcttgctgtagtatgatgccatgattgcttacattacaaggcctatgtatggactgtcaggttcatggtcttcagtgagtgatatatttgttgaactgcatgtgtaacaccttgcttttgtaggttccatggctttgcatatgcttttgtaacatttatgggatgagggccttcatttgagtgaatacacataagttgatggcatttcttcattttgcatagtacaaactctgctgttatgtgcaaatgaggccatatgaacagtttatcaccatgaggcttcaattcataataaccatcaaggtaataattaaatttgttctaacatttctgcattttctttcagtaactgatgtttatcagcaagggagtaaactaccgcaagtcttccaagttcttctatctgaagaaaagaacacatttatccgcggtagcaccatttgtaattatgagcacaaattatattcaaattattttagcaattgtttaatttctttgggatagctcagttattaattttgaaaaaggatgaatgtcatgtgtgc

SEQ ID NO: 28329 - DNA, 1121 bp, Oryza sativa
  ref <308>: DATABASE ACCESSION NUMBER: AK103771
  ref <309>: DATABASE ENTRY DATE: 2002-08-28
gaattctgggcctaggcatctcccctcttctcgggcaagaaccctagccaccttcgccagtctccggctcgaacgcggccacggcgaggctgcgcggccagtgatcttgcggtctaggcggcggcggcggaggaggaggaggaggaggaggcgtcgagatggtggtggcatccggtggagggcggaacgcgtgggcgaaggagatgaccatccgccgcaggattaccagcatattcaacaagacgcgggagcattttccgtccctgaaagattacaacgactatcttgaggaagtcgaggatatgactttcaacctgatcgaggggatagatgtcgaggtgattgaagctaaaattgccagatatcaacaggaaaatgctgaacagatatatttgtcccgggctaaaagggccgaagatcttgctgccgcacttaaagcaagcagaatgaaccctggcaaggctggtgccaatgacacggctgctggaagctctcagggcattagtagtggcgcgggagttcaggaaggccagtatgcgcctgctgctgttcccggtgggctagctcagcctcggccaacagggatggcccctcaaccgatcggcggttcatcggttcctcttcaaggagatgatgaggagaccatgaggctacgtgcggagagcggggctcgagctggtggatggtccatcgaaatgtgcaagagaagagcattgcaggaagcgttcagtaccatattcgtctgacggtcagattagacgcaagagcacctaacatgtaggatgcctgataattttgtggacatcctttggatgagatgatgggtttttactgaccgattgacatggttggcttggtccaaacatatgaattttgagcacttgggattgaagctccaatcatcgtcaagtggcctggtgattggaaaagaccatcccttctcattctcagcaatctggaaaattgtgcatttctgtttttgttcatagcatatgaatggtgattggaaaagaccatcccttcccattctcagcaatctggaaaattgcgcatttctgcttttgttcatagcatatgaatgttgtgtgcttgcctgactaaattatcaaaagcatattgtg

SEQ ID NO: 28330 - DNA, 1208 bp, Oryza sativa
  ref <308>: DATABASE ACCESSION NUMBER: AK103772
  ref <309>: DATABASE ENTRY DATE: 2002-08-28
gactacactacactgcaatacggcaatggcaatggcgaccatcccggaggtgcctgcgagcgcgctgctcccgaccatgccgcgcatcggcatgggcacggcggcgttccccttcacctcctccgaggaaaccacggcggcgctgctccgcgccatcgagctcggctaccgccacttcgacacggcgaggctgtacgcgacggagggctgcgtcagcgaggccgtcgcggaggccgtccggcgcggcctcgtcgcctcccgcgccgacgtgttcgtcacctccaagctctggtgcagcgacctgcacgccggccgcgtcgtgccggcggcgagggagacgctccgcaacctcggaatggactacgtcgacctgctcctcgtccactggccggcgaccgtggcgccgggcagctacgacttcccgttccccaaggaggagatggcgccggcgttcgacatggagggcgtgtggcgcggcatggaggagtgccaccggctgggcctcgcgcgcgccatcggcgtcagtaacttctccgccaagaagctggagcagctgctgtcgttcgccgtggttcggccggcggcgaaccaggtggagatgaacccgatgtggcagcagaggacgctgcgggaggtgtgccggcgagagggggtgcagctgtgcgggtactcgccgctgggggcgaagggcacgccgtggggcagcgccgcggtgatggactccggcgtcctgcacgacatcgcccaaaccaagggcaagacgcttgctcagatttgtttgaggtggatgtacgagcagggtgatgttttgttagtgaagacatacaatgaaaataggatgaaggagaatcttgatattttcgactgggagctcactgaggaagagagagacaaaatcagcaaactcccccagcagaggggtctgactggaatgcagttcgtctgtgacaatgggccttacaagtgcgtcgaagatttgtgggatggtgcttaacatgtcgcaggctggccctatgcaccaataatctggatggatcatgcttgctggggatctagcaaaataatttgtaattcaattttaatcttctgtcttctcgcaaaataattgtgtgaaatggagcgccagatgtgctcaattgttatctttcttctattcgtaatcgataaatatggtattttccaaaataatattgaaatttcgagatatt

SEQ ID NO: 28331 - DNA, 1061 bp, Oryza sativa
  ref <308>: DATABASE ACCESSION NUMBER: AK103773
  ref <309>: DATABASE ENTRY DATE: 2002-08-28
gagtacatcgccatggttcttccctgcgtactggccccccatctccgagctccttccctccgtgctgccgccctccccgctcttcacctcatgcgcagcttgagcagtcaacggggcggagtggcctcggcagcggcacggagtgtactccgcggcggtggtctgcttccggtcggcctctcctccttcccttccagccgccaaggcgcatgtgaattggcgggcgcctcgtcgacatcatctgcggcatcggcgccatcacagtggcttgatctgcggttgtttcttggtctccacgccaccggcaacctcctgcagtcatggcggccgtcgatccgcaccgtgccttccggatccagtgttcggctgtgcgtagggcgcgagctgctgtccagattcgctcagggcctccgatggtgacggcatgcgtcagctgtgtcaacgacggcaagctttccccttcgtcgaggcagatcggttgtagacggcggcttgcgtcgaggcaggtcattgcttctatcgatcgagttctaggttggcagattgttcttattttgtgtttactggatcagctgggctgcaaggtagcggtactggacgtggtcatgttcgttgatatggacttccagaacaagctgatcgacagcctatcaagggaaccccaaggatttgacactgctggtgcaaaatactcactacaggtaatatgtagtattattaactacacaacagagtaatatgtaaaatgcatacaacggagttgttggattacctgggatcgacataggcgcggaactctcggtgccacactttggactgagggagagttatgtgttgttttgtcttttacccagtgctaagtgctataaggctgcatgtaattctttgttatgtgctgtgattttttatactatgtatgtatatatgcacttgttctcctggtgatgctaaccgaataggacttggtataattcaaaccaagtcctattcggcctaaacagaaacaaagtcctaatcagcccaaacggaaacggatgggagtttgtttcctatttttgtgg

SEQ ID NO: 28332 - DNA, 4099 bp, Oryza sativa
  ref <308>: DATABASE ACCESSION NUMBER: AK103774
  ref <309>: DATABASE ENTRY DATE: 2002-08-28
gacctccccccacgcaggcgccacacagcgtcttggctcacccgcacacgcgatcttgttggtagcgagtcggagaagatgagctcgccggtgcatggcgtgcaggagcatcggcagagcggcggcggcgagaagaaggcggagcagggagagaaggaggcggcggcgaaggtggagaaggtgccgttcctgaagctgttctcgttcgccgaccggtgggactacgtgctgatgtcggtggggtcgctgggcgcgtgcgcgcacggcgcctccgtccccgtcttcttcatcttcttcggcaagctcatcaacatcatcggcctcgcctacctcttccccaccaccgtctccggccgcgtcgccaagtactcgctggacttcgtgtacctcggcatcgtcatactcttctcgtcgtggaccgaggtggcgtgctggatgcacacgggggagcggcaggcggcgaagatgcgccaggcgtacctccggtcgatgctggaccaggacattgccgtcttcgacaccgaggcctccaccggcgaggtcatcaacgccatcaccagcgacatcctcgtcgtccaggacgccatctccgagaaggtgggcaatttcatgcactacatcagccggttcctggccggcttcgccatcggcttctcgcaggtgtggcagatcagcctcgtcaccctcgccatcgtcccgctcatcgccatcgccggcggcatctacgcctacgtcaccatcggcctcatggcgcgcgtccgcaagtcctacgtcaaggccggcgagatcgccgaggaggtgatcggcaacgtgcggacggtgcaggcgttcgtcggcgaggagaaggcagtgaggacgtaccgggaggcgctgctgaggacgtacaagtacggcaagaggggcggcctcgccaagggtctcggcctcggctccatgcactcggtgctcttcctctcctgggcgctgctcatctggttcaccagcgtcgtcgtccacaagaacatctccaacggcggcgagtccttcaccaccatgctcaacgtcgtcatcgccggcctgtcgctcgggcaggcggcgcccaacatatcgacgttcctccgggcgaggacagcggcacccgatcttccagatgatcgagaggaacaccgtcaacaaggcgagctccaaggccggccgcacgctgccgtcggtcgacggccacatccagttccgcgacgtgcggttcgcgtacccgtcacggccggacgtcgtcatcctcgacaggttcagcctggacttcccggcgggcaagatcgtcgcgctcatcggcgggagtggctccggcaagagcaccgtggtctcgctcatcgagcggttctacgagcctctcacgggcgcggtactgctcgacggccacgacatcaaggacctcgacgtgaagtggctgcgccagcagattggcctcgtcaaccaggaacccgcgctgttcgccacgagcatccgggagaacatactctacggcaagggggacgccagcatggatgagatcaaccacgcggcgaagctgtcggaggcgatcaccttcatcaaccacctccccgaccggtacgagacgcaggtcggcgagcgcgggatacagctctccggcggacagaagcagcggatcgcgatctcgagggcgatactgaagaacccgtcgatactgctcctcgacgaggcgacgagcgcgctcgacgccgagtccgagaagagcgtgcaggaggcgctggaccgcgtcatggtcggccgcaccaccgtggtgatcgcgcaccggctgtccaccatccggaacgccgacacgatcgccgtcgtggacagcggcaggatcgtcgagaccggcacgcacgagcagctgatggcgaaccctcgcagcgcctacgcctcgctgatccagctgcaggaagcagctcagctccagaacaagcaatctttctccgacagcgccagcctcagccgaccactaagctccaagtattcgagggagctatcgaggacgagcatgggtgggagcttccgctcagaggaggactcggttagccggtacggcaccgtggaggcgcacgacgaaggagggcacaagagcaagccggtgtcgatgaagaagctctactccatgatacggccggactggttcttcggcgtgtcgggcaccgtcagcgccttcgtcgccggctcgcagatgccgctgttcgcgctcggcgtcacacaggcgctcgtgtcctactacatggggtgggagaccacgaagcgggaggtgcgcaagatcgcggtgctcttctgctgcggggccgtgctcaccgtggtgttccacgcgatcgagcacctcagcttcggcatcatgggggagcggctcacgctgcgcgtccgggagaggatgttcgcggccatcctccggaacgagatcgggtggttcgacgacaccagccacacgagctcgatgctgtcgtcgcggctcgagacggacgccacgctcgtgcgcaccatcgtcgtcgaccgctccaccatcctgctgcagaacatcggcatgatcgtgacgtcgctcatcatcgccttcatcatcaactggcggatcactctcgtcgttctcgccacataccccctcatggtcagcggccacatcagcgagaaaatgttcatgaaaggctacgggggcaaccttggcaagtcgtatctgaaagccaacatgctggccgcggaggcagtgagcaacttccgaacggtggcggccttctgcgctgaggagaaggtgataaagctctacgccgacgagctgaaggagccagcgaagcagtcattccggcgaggccagggcgccgggctcttctacggagtttcccagttcttcctcttctcttcctacgcgttggctttatggtatggttcggagctgatgagcaaggagatggccagcttcaagtcggtgatgaagtcattcatggtgctgatcgtgacggcgctggccatgggggagacgctggcgatggcgccggacatcatcaaggggaaccagatggtgtcgtcggtgttcgagatcctggacaggaagaccgacgtcctgatcgacgccggcaacgacgtcaagagagtcgagggcgtgatcgagctgaggggcgtcgagttccggtacccggcgcggcccgaggtggtggtgttcaagggcctcgacctcctcatgaaggccggcaagagcatggcgctcgtcggcatgagcggctccggcaagagcaccgtgctctcgctcatcctccgcttctacgaccccatcgccgggaaagtcttgatcgacgggaaggacatcaggaaggtgaagctcaagtcgctgaggaagcacatcggcctggtgcagcaagagccggcgctgttcgcgacgaccatctacgacaacatcctctacgggaaagacggcgcgacggaggcggaggtggtcgacgcggcgaagctggcgaacgcgcactccttcatcagcgcgctgccggagggctaccggacgagagtcggggagcgcggcgtgcagctctccggcgggcagcggcagcggatcgccatcgcgcgcgccatcgtgaaggacccggccatcctgctcctggacgaggcgacgagcgcgctggacgtggagtcggagcgcgtcgtgcagcaggcgctggaccgggtgatgaggaaccggaccaccgtgatggtggcgcaccggctgtcgacgatcaagaacgccgacgtcatctcggtgctgcaggacggcaagatcatcgagcagggtgctcaccaccagctcatcgagaacaggaacggcgcctaccacaagctcgtcagcttgcagcagcagcaacagcagcaggaccagatgcagaggcattgatcttgatcgatctcctgtgcttctgtatatttgctgtgtgcctccgcttcttcttggttgttaaggagtacagtacatggaatgaaacaaatcgctgcggtaagattcaattatttttccattgtaaaacgaggggttcacgattatgtacaagagaaagtattggatttgtttctctttttctgtacaagttaaataactgaatttagtagatacgcgattacattt

SEQ ID NO: 28333 - DNA, 3039 bp, Oryza sativa
  ref <308>: DATABASE ACCESSION NUMBER: AK103775
  ref <309>: DATABASE ENTRY DATE: 2002-08-28
gatttcgattcgagactcgaaaacccaccacccctctctccctccctctcgctcgcctcggctcggctcgccgtctgtctctctttcagatcacatcaaagcgggcaccagcaccagcaccagcaccaactcctctctagggtttggtaaaaacctccatttcctccgcggatcgaagggaggctagggttccgatcgagaggggaagctttcgggtactcgtttcagccatgatgtcgcggtcgtacaccaaccttctcgatctcgcggaggggaacttcgcggcgttgggcccgggaggcggcggcggcgggaggcggaggtcggggtcgttcgggctgaagcggatgtcgcgggtgatgacggtgcccgggacgctgtcggagctggacggggaggacgactcggagcacgcggcgacgaacagcgtcgcctccgacgtgccctcgtcggtggcgggggatcgagtcatagtggtctccaaccagctgcccgtcgtcgcacgccgccgtcccgacggccgcgggtggtccttctcatgggacgacgactcgctgctcctccagctccgcgacggcattcccgatgagatggaggtgttcttcgtcggttccctccgcgccgaaatccccgtcgccgaccaggaagaggtctcccaggcgctgctcgatcgcttccgatgtgctccggtgttcctccccgaccccctcaacgaacggttttaccaccgcttctgcaagcgccacctatggcctctgttccactacatgctccctttctcctcctccgcatccccgagtccctcctcctcctcctcctcctcctcctccccctcatcctcatccggcagtggccacttcgaccgcggcgcgtgggaggcctacgtgctcgcgaacaagttcttcttcgagaaggtcgtggaggtcatcaacccagaagacgactacgtatgggttcacgactaccatctcatggcgctgcccaccttccttcgccgccgcttcaaccgcctgcgcatcggcttcttcctccacagccccttcccctcgtcggagatctaccggaccctccctgttcgcgaggagatcctaaaggcgctgctcaattgtgaccttattggattccacacttttgactatgccagacatttcctctcttgttgtagtaggatgctgggaattgaataccagtcaaagcgtggatacattgggttggattactttgggcgtaccgttgggatcaaaatcatgccagtgggagttcatatgggtcaattgaagacggttctgagcttgcccgacagggaatggagggtctccgagctgcagcagcaatttgaggggaagactgtgttgctcggtgtggatgacatggatatcttcaagggtatcaacttgaagcttcttgccttcgagaatatgttgaggacacatcccaagtggcaggggcgggcagtgttggtgcaaattgctaatccggcccgtggaaagggtaaggatcttgaagccatccaggctgagattcatgagagctgcaagaggattaatggagagtttggccagtcaggatacagccctgttgtcttcattgaccgtgatgtgtcaagtgtggagaagattgcctactacacaatagcagaatgtgtggtggtgactgctgtgagggatgggatgaacttgacaccatatgaatatattgtctgtaggcaggggtctgactccacatcagaagtgaatggaccaaagaagagcatgctggtggtatcagaattcattgggtgctcaccatctctgagtggtgctatccgggttaacccatggaatatagaggcaaccgcagaggcactgaatgaggccatatcaatgtcggaacaggagaaacacctaaggcatgagaaacattaccgttatgtcagcacccacgatgttgcttattggtcgaaaagtttcatccaagatttggagagggcttgcaaggaccacttcaggaggacatgttggggcatcgggttggggtttggttttagggtggtggccttagatccccatttcacaaagcttaacatggattcaattgttatggcttatgagcggtcagagagtagggctatatttcttgattatgatggaacactggtgccacagacttccatcagtaggacacctagtgcggaagttttgaggatcatcaataccctgtgctcagataggaggaacaaagtttttcttgtcagtgggagacgcagggacaaattgggagaatggttttcctcttgtccagatctgggcattgcagcagagcatggttacttcttaaggtggactagagacgaagagtggcaaacatgtacccagacctctgacttcgggtggatggaaatggccaagccagtgatgaatctgtatacagaagcaactgatggatcttacattgatcctaaggaaagtgctttggtgtggcatcaccaggatgctgacccaggatttggatcctcccaggcaaaggagttacttgatcatctggaaagtgtattagcaaatgaacctgtttctgtcaaaagtggccagttcattgttgaagtcaaacctcagggagtaagcaagggagtagtagctgagaagatactcgtctcaatgaaggagagaggaaagcaggctgactttgtattatgcattggtgatgacaggtcggatgaggacatgtttgaaaacattgctgataccattaaaaagggtatggttgctacaaacacatcattgtttgcatgcactgtgggacaaaaaccaagcaaggccaaattttacctggatgatacgtttgaagtggtcaccatgctgagcgcactggcagatgctactgaaccagaacctgagactgatcttaccgatgagtttgatgaactggccgtgtctgtctcctcagttgatattgatgatgaacaaacgcccagtgataaactgatcggaggatagtagtcaaggttgcttatatctgcagattgtcatgattaattcaaccatctctatacaatttttgatg

SEQ ID NO: 28334 - DNA, 2338 bp, Oryza sativa
  ref <308>: DATABASE ACCESSION NUMBER: AK103776
  ref <309>: DATABASE ENTRY DATE: 2002-08-28
ggtgctgtttgcaggcggacgccgcgacggacgaggtgtacgcgcaggtctcgttggtcgccgacaacgaggaagtggagaggcggatgcgggagggagaggacggcgcggcctgcgacggcgagggcgaggacgccgtgaagcggccggcccggattccccacatgttctgcaagacgctcacggcctccgacaccagcacgcacggcggcttctccgtgcctcgccgcgccgccgaggactgcttcccgccgctggactacagcctgcagaggccattccaggagctcgtggcaaaggatctgcacggcacggaatggaggttcagacatatctatcgaggccaaccacggaggcaccttttaaccactggatggagcgggtttatcaacaagaagaagctagtatctggggatgcagtgctattcctcagaggtgaagatggagagcttcgattgggagtgcgccgagctgctcagctaaaaaatgcatctccttttcctgcacttcataaccagatctcaaatactagtagtcttagtgaagttgcacatgctgtggccgtgaaaagtatttttcacatctactacaatcccagttgtactcacaggttaagtcagtctgagttcattataccatattggaagtttatgagaagcttcagtcaacccttttctgttggaatgcgattcaaattgagatatgagagtgaggatgcttctgaaagaaggcgtactggaataataattggaagcagagaggcagatccaatgtggcatggttcgaagtggaaatgtttagtggtgaaatgggatgatgatgtggagtgccgtcggcctaatggggtatctccttgggagattgagcttagtggatcagtttcaggatctcatctgtccactccccattcaaaacggctgaaatcatgcttcccccaagttaatccagatattgtgcttccaaatggaagtgtttcttcagattttgcggagtctgccagattccacaaggtcttgcaaggtcaagaattgttgggtttaaaaactcgtgatggtactgttaatacagcttctcaggcgactgaggcaagaaattttcagtacactgatgaacgaagttgctctatcaacatgagtaacaatatcttaggggttccgagacttggggtgaaaactccaagtggaaaccctgggttttcctaccattgctcaggctttggggaatctcaaagattccaagaggtcttgcaaggtcaagaagtgtttcgtccttaccgaggagggactttgtccgatgcctgtataagaggttctggcttccgtcaacctgatggcaaccatgcacctggtgcagcatttaaatggcttgcaccacaaggatgtgatcatcatgggataaccacatcagttctgccgcaagcatcctctccatcatctgtcttaatgtttccacaaactagttcaaagatgcctggccttgaatacatatacggatgcctggatagaaatgagaatagccgacattttaagattggacctacacaagatatgacaagaactgatcaaacattacgactctggcctcatcttatttcaggcaaagtgctagatgagtgtacgagaaatgagaagctgcactctccagtcagtggtgctgagcatgaatcaaataacaagtgtcttaatacaaatggctgcaaaatctttggtatatcattgactgaaaaggcccaagcaggcgatgaagtggattgtggcaatgccagttatcattctcggctccagtctttaaaaccacagatgccaaaatcattgggcagcagttgtgccacggtccatgaacaaaggcctgttgttggcagggtcgttgatatttcagcagtgaatacgatgatctgatacatttactgtatccagggagtatgcttgcagaaatagggaccaacattagtatcatactcactggtgctgaggacacaacttccattctggctatctcgtccctctacgtgcttgttgcctcaacttcagcatttccacaggctgtgctaccgcatccaggatgatgacaggggaaatgcagatgatacacgaaggatgcttgtcaagtttgttgtaatgcacttctaagttctaagctttgaacctcttaacgttgctcctattttaagctcccgttgtaatcggcatttatgttgcctgacctacttgcatatttttcaatttgtccgttaagacagcccttttagagggcttgcttatgttagcaacccttaatttccaaattccaagtatggcgaccgttcgaggggtttgtttgctcctgggacgacatcggt

SEQ ID NO: 28335 - DNA, 1356 bp, Oryza sativa
  ref <308>: DATABASE ACCESSION NUMBER: AK103777
  ref <309>: DATABASE ENTRY DATE: 2002-08-28
gagtctcaagtctctgtctcgtcgtcctcgcatctccactcgccatgggcaagattaagatcggaatcaacggtttcggaaggatcgggaggctcgtggccagggtggccctccagagcgaggatgtcgagctcgtcgccgtcaacgaccccttcatcaccaccgactacatgacctacatgttcaagtacgataccgtgcacggccaatggaagcacagcgacatcaagatcaaggactccaagactctgctcttgggcgagaagccggtcaccgttttcggcatcaggaaccctgacgagattccgtgggctgaggctggtgctgagtatgtcgtggagtccaccggtgtcttcactgacaaggagaaggctgctgctcacttgaagggtggtgccaagaaggttgtcatctctgccccgagcaaagatgctccgatgtttgtctgcggtgtcaacgaggacaagtacacttcagatattgatattgtctcaaatgctagctgcaccacaaactgccttgctcctcttgccaaggtcattcatgacaactttggtattatcgagggtctgatgacaactgttcatgccatcactgccacccaaaagaccgttgatggaccgtccagcaaggactggaggggtggcagggcggccagttttaacatcattcccagcagcactggtgctgccaaagctgttggcaaggttcttcctgatttgaatggcaagcttacgggaatgtccttccgtgttcccactgtcgatgtctcagttgttgatctcacagttagaatcgagaaggctgcctcatatgatgctatcaagagtgctatcaagtctgcatcagagggaaagctcaagggaatcataggatatgttgaggaagacctggtttctactgactttgttggtgacagcaggtcgagcatcttcgacgccaaggctggaattgctcttaacgataactttgtcaagcttgtcgcctggtacgacaacgagtggggttacagcaaccgtgtcatcgacctgatccgccacatggccaagacccagtagaatccttttgcttgccatggtattccatggccgccgagccggagataccggtatgctttgtctatgctgagaataaaacgtggacggtgttcatcaggacccaccccctctgttaatgctagttgggataatgagttgcattttgttttccaatctacctacttgtaagttgtaacgatgctgatgatatggacctgagtctacttttttgcttgtgaagaatataagccgtccagtgcagttgtaattttgttatgctggttgcatatatgggctttgtgtttggttcgtgctacct

SEQ ID NO: 28336 - DNA, 1092 bp, Oryza sativa
  ref <308>: DATABASE ACCESSION NUMBER: AK103778
  ref <309>: DATABASE ENTRY DATE: 2002-08-28
gactgaacaccatggcggcggcggcggcggctccggctctatccttggccgaggcggcgccggtgacagcagttctggcaccgtgtcccacgccctcgaggacgttccgccgccgcagctgggtcgcggctatctgccggcccgccctgaaatgccaccacagtcgtcccctgaccgccgtggtcgccgcggctgcggctgccgctgcggcgggggactcgacgtcggccggcgtattccacggcgagtgcttcgtcgtgggggataacatcgacaccgaccagatcatcccggccgagcacctgaccctggtcccgtccaagcccgacgagtaccgcaagctcggctcgttcgccttcgtcggcctccccaccgcggcctacccgacgccgttcgtcgcccccggcgaggagaccacccgctacgccgtcatcatcggcggcgccaacttcggctgcggctcctcccgcgagcacacgcccgtcgccctgggcgccgccggcgcccgcgccgtcgtggccgagggctacgcgcgcatcttcttccgcaactccgtggccaccggtgaggtctacccgttggagctagcggacactggagcctggaaggagtgcaagaccggggatgtggtcacggtggaacttgataattgcgtcatgatcaaccacacatccggcaagcagtacaagctgaagcctatcggcgatgccgggccggttattgaggcaggcgggatctttgcctatgcccggaagaccggaatgatcgcatccaagtctgcgtgagggaaaggcgagtttggtctgctgtcaagatagtcgaggcctctgcagatagcaagtaagactgggttgtggatttgaacctattgcacctctatgcgattgtccatcagttgtactgctgtttttacctaggttgtgtgtcatcagtggtgtttttggaataagttaaaagttacagagtactgaactatgatgtattagtccatgtgatcttatgtaacaccttatgtaatacactcgtttatacctgccgatttgcctatctcgtttcgataatattgtttcttataccaaagaaattatcatt

SEQ ID NO: 28337 - DNA, 1469 bp, Oryza sativa
  ref <308>: DATABASE ACCESSION NUMBER: AK103779
  ref <309>: DATABASE ENTRY DATE: 2002-08-28
gcggagaggtgactgctagcgaggaaagggagcatatatactactatagcttagcttgctgcaggtgctagctagctgaggcatggagcttgacgaggagtccttcttggatgagctcatgtcgctgcggcgtgatggatcggcgccgtggcaggcgccgccgtacccgggtggcggcggcggcggcggcggtggcggcatgatgatgagtgacctcctcttctacggcggcgacggcggcagcgcggaggcgaggggcgggatggacgcgtcgccgttccaggagctggcgtccatggcggcgccgccgcctcagcatccgcacgaggagttcaacttcgactgcttgagcgaggtctgcaacccgtaccgcagctgcggcgcccagctcgtcccctcggaggcggctagccagacgcagacgcagctcactcctctccgcgacgcaatggtggcggaggaggagacgagcggcgacaaggcgctgctccatggcggcggcggctcgtcgtcgccgacgttcatgtttggaggtggcgccggagagagctcggagatgatggccggcatcagaggcgtcggcggcggcgtccacccgcggagcaagctccacggcacgccgtcgaagaacctcatggccgagaggcggcgtcgcaagcggctcaacgaccggctgtccatgctccggtccatcgtgcccaagattagcaagatggacaggacctcgatccttggtgacaccatcgactacgtgaaggagctgacggagaggatcaaaaccctcgaggaggagatcggcgtcacgccggaggagctcgacctgttgaacacgatgaaggattcctccagcggcaacaacaacgagatgctcgtgaggaattccaccaagttcgatgtcgagaaccggggcagcgggaacacgaggatcgagatatgctgcccggcgaaccccggcgtgctgctgtcgacggtgagcgcgctggaggtgctggggctagagatcgagcagtgcgtcgtgagctgcttcagtgactttgacatgcaggcctcctgcttacaagaggacgggaagaggcaagttgtcagcaccgacgagaacaagcagacattgttcaggagcgcaggctatggcggaaggtgtctgtagctagctagctatacaatccattgaacgctgagcactgtgagcaggtacaggttgcatatatatgatcttcatcatccatgatataggagtaatagctatacatgcatatgcacttcgctccaggaattatagtagatcgagtaccatttatgagttcatattcatcagcagtggtagtacctcgtttctgaacacaccagagagcaaattaaagatttgctcaagtattgtaagctttgcatttgtgaatcggtatgggaaccggccgtgtgatttgtcgaacattggatttgaattaaacgccaaggtaccaattgtttgt

SEQ ID NO: 28338 - DNA, 1585 bp, Oryza sativa
  ref <308>: DATABASE ACCESSION NUMBER: AK103780
  ref <309>: DATABASE ENTRY DATE: 2002-08-28
gatttcaacttctggaggactccgaccgccgtgcctcttcatcgtcggtgccctaggttctccacgcccattgcccattactaatccggcactgctagctcaggtatacgccacgaaacccactcctacgccaaggtatccaccactcgcgcgcggcgcgcgcacgctcgccggcgacggcagcgcggggtgctccttgtgttgggcgcgctcggcgaaggtgtggcggtgtggcgcatggaggttcagcgggagaccgggcgttcctggcacacgcggccgtgtttggcggagctcgcgcgcgctcatggcgttgtcatgggggtggttttctcgtgttcaggttcaggcacgaagggggcgccgcgtaactcgccgtgaaggtgttcgatcagatgcccctctcagggcgaaggtggctactctggcaacttatcaattcaactgtcgcaacaaacaactggttttttttttttacagaagatcgcataaattcttctggagaccaacctgtctactacttagatttgcattgtcgatgtttctacgactacgactcactgataacttttgctttttgaagttttgtgaagttgacacttcggcagatttgattaataacaagacaaatgcagctgttagaaggccacggttcatcagagttctgctccctggatccttcgcaaagatggtccacagatgcttgtatactactacatgttctgccgttctgaatttcgtagcgaattcttaacaagtttgcaaggacagtgccggtcaaattggccatggttttcagcctcgttggcaatttttggcacgttaagctgtattgaggatttgagatctactcttctttttaagagctattgagatctactttagggagtggcagaacagggtttgtgagggctcgtgatttttctgagggcaaacttctgctgctgttcagatacgaagatatcgtcaaatgctcgaccaaaaacagaagataattcagatgacgaactacctcaactctgaataaaatttggccgccttccttctttagcccggcgagaaaaaggatggaaagggcctgaatgacaggctatggaagagaaaaaagttgggaagtaggataagtcggaggaacagtgcagattgcactgcaagtctttgagatgagaatgacccaagagacaggccactgaaaaagatgaagaagcggctttgaagttttgtggatcagtcaaaatgggaattgcgagaacggaactgcaagtcatgcaggagacaagaatccaaaaaaagccacattcaaagtctgatcacgatgagtgaagtgcttatgggcttagccacagatttgagcactccgtttcatgacttgatgcatgcgcttccacgggcttcccacaagctgcacaatcacactaaaaacgaagagccatttcacaacatggaagaaggcgattttggtcacagcccataaactcccgttgctgacaaacaaacttcaggcttcatgtattcacagcagtacaaagcaacacgcctacaatttctatccaaaatggcacaatttcagctcatcagattaagc

SEQ ID NO: 28339 - DNA, 1224 bp, Oryza sativa
  ref <308>: DATABASE ACCESSION NUMBER: AK103781
  ref <309>: DATABASE ENTRY DATE: 2002-08-28
gtgccgaacacccgtacacgtctgaggggtgggcccgacccggttccgccggctcgtccccccgctttcccctcgccttcttcatccccctcctccctctccattcctggatctcctccgcctccgcctccgcctccgcctccctcgcaaggggtctcccacgcatcgccgcccgccgctgacgcgtgggacccaccccttcccccccccccccacaccacccgccgcttcccatctccgacaagcgcctacaacgccgcaagtagccctaaccctaggtcgctggatgcgccgatggccgccgccgccgcagcctgcgtagagagccccgacgagggcgtggagatccgggaggtatgggcggggaacctggaggcggagatcgcggcgatccgcgacgaggtcgaccggtacccgtacgtcgccatggacacggagttcccgggcatcgtgtgccgccccgtcggcaacttccgcaccaccgacgagttcaactacgccaacctcgaggccaacgtcaacatgctcaagctcatccagctcggcctcaccctctccgacgagggcggcgacctcccgcggcgggggacggggggcaggcgctgcatctggcagttcaacttccgcgggttcgacccccggaccgacccgtccaacgccgactccatccagatgctccgcacctgcggcatcgacttcgatcggttcgccgctgagggggccgacccgatccgcttcgccgagctgctcatgtcgtcgggcgtcgtgctcaacgccgacgtgcagtggatcaccttccacagcgggtacgacttcggttacctgctcaggctgctcaccggccggaacctgccggacaacatgcccgccttctttgacctcatcagaatctacttcccggtgctctacgacatcaagcacctcatgaggttctgcagcaacctccacggcggcctgagcaggctcggtgagcttcttgatgtcaagcgtgtggggacctgccaccaggccggctctgactcgctgttgaccctcgggtgctacaacaagatcaaggaggtgtacttcaaaggatcgaccgagaagcatgccggtgtgttgtatgggcttgttattgaggatggggtgaacagaccaccaccaactcagcccaatgaatgaatatggttagttaaataaaacaatctgaaatgggaaaaaaaattgaaactttcgttggtgaat

SEQ ID NO: 28340 - DNA, 3299 bp, Oryza sativa
  ref <308>: DATABASE ACCESSION NUMBER: AK103782
  ref <309>: DATABASE ENTRY DATE: 2002-08-28
gggctgctgttctcatcacacaaaacgccatgcctcctgtaaaactttccacacagttgcaggtcgagttcagaggcttctttctctttcatccctctcactccgagaagtcaatgtcactgttgctgccgcctcttgcctcagtacagtagagtgtagctaccacactacactgcctcacatttactacacctctagctccctctcctctcctcttctcttctcttccatagctggtgcaatttatgttcttggcagtgtgaccgctcttgcttgcttgctactgctgctgctccgatccaagaagtagggcaagtttgtttgtgttctctttgatccttttttttttatctttgtttttcatactttgatgtgtctgtctgcttctttggctcgtggcaatggtgctttgctttttgagaagctaaaacaaatgtacccgtgttcttgttcttggtctgagtctgactagtgggaaggtggtgttcttgatttcttttttccaggttatttttttgcgttgtttattgagatttgttggttccctgagcgcaacatttctgtcgtttcttggcctgaaaatcttcgaaatgtttgatgccttcctgttcttgctcaagttccaaaggccagcatcttttttttaactgaaagatttgtcttttccccccttttcatcgacatgatttgttgagcccaatcccaactgctccactaaccctatttgtttaaacttttttccccacttctgtgtttgcaggagagaagagattgtgctagtagggtttagtttagtcattcctgttttgggtaaattggatttgaagaggacgcaatgccgaagatgtttggtttctctcgtcgacggatgaagcttggaaggttgaagggtcatttgcatgatccttttcatggctcccggagtcctgctcggacaaagcggtccagtcaccccaatttttcacgctttgtccagggagaagaccaagtgaccacatcagtgagcggccgagctgacgaccttgcttggcgctgctcatctgatacttttgatctcaatggccgcgcatttgagaactccgagaattgggcagtgttgtcaacagaaggggacaagccgattcctcgttttgatcatgcagcagccatggtaggaagcaaaatggtggtctttggtggagattctggccatcatttgctggatgatacaaagatattgagcttagacaagcttacatgggattcggtggctcccaaaatccgtgtatcacaaggtggacatgctccaaagtttcgaccatgcaaaggccatagcctggtataattcttgaagctcattgttctctcactagtcactactcatgtccttgcatttatttataatcaggattatcagttgatgtatgacctattgttctgattttactggaattgaattctcatagcctccttgtcaaagtagtagatgtaactacgacacaaagtacttgctttttgaaattttaggttccatgggggaagaatgtcattcttgttggagggaaaactgatccaccttctgaccggatatcagtctggtccttcaatactgaaactgatctctggtcgtatatagaagtcaagggtgatatcccggtggctcgaagtggccatacagtgattagagcaggtcctgttttaattctctttggaggtgaggatggaaaagggaagaaactacatgaccttcatatgtttgacctgaaatcttcaacatggcttcctttgaattataaaggtgctggaccttctccaagatccaatcatgtggctgctctgtatgatgatagaattctattgatctttggaggccaatcaaaatccaaaacactcaatgatgttcatgctctagacttcgaaacgatggtatggtcgagagtgaaaacccatggccatcatccatcacctcgagctggttgctgcggagctctctgtggcactaaatggtatatcgcagggggtggaagcaagaaaaagcgtcatccggaaacttgggtttttgacattctggaatccaagtggtctgtttgtgtagtacctcctagttcctcaattaccacaaagaaaggattcagcatggttccgttgtactacagggacaagattgttcttgttgctttcggaggaaacaaaaaggaaccatctgataaggtcgaagtactagtggtactgcaaaacgagcactgcttcagctggcggtctgcccctgatgtagaacctttactgtatgaggactcacctccaagctcaaaggaactttctgatcacctgaacaacaattgtgctcctctgtactctactggatctgtagcaaggcatagccttgccaccactgtggagagctcgtctgggcggaaatcgctccctgattcgctgctacagcaacctaatcttggcagttcatcactccgcagacagttccgtcaggaggaggaatgcagcctagcccacaaactgcagaaaccaattgatgatgacagatacaaggatgttgatgactgttccgagctaccctcggtcacaaatcaaaagcagcgcaatgatatatatcagtctccagatgctgatgctaaagcgaagagggtgggcagaagttcatcggacattaaccatcagtatgacaccaaaatagcaaacctgatcaggaggaacatggcattggaagagcaaccttcagcggcaatggcaagcaaagatgaagcggagaagaacctctctttggtcatcgacagcaaggaggagctagagaagaggttgtctgagaaggacagggaggtcgagacgctgaaggagaaggtgacaggattagagctggcgcaagaagaatcaaacagcctctcaaacaccgtccatgctgacaatgtgcgcctcgaacgcgaggtggcgttcttgaaggctgtcatggatgaaacccagaaggagcttcactctactcgcggagttttagcaggagaacgctcgagggccttccagctccaggttgaagtgttccatctgaagcaaaggctgcaaacaatggaaggaagatccccaacaccaaggaaacctcagaatctgtaggggtgcagactgcacaagccaagtgtacagttgccatgagtttgttgtatcctctgttgtaaattaattcctgagcctatttttccatggagacatgttatgtaaccataagttttggtccatccatgaagaatgtttatgtgacaatacctgagctctgagtttgtaactcagcagaagatgttaattattaaagaccc

SEQ ID NO: 28341 - DNA, 1689 bp, Oryza sativa
  ref <308>: DATABASE ACCESSION NUMBER: AK103783
  ref <309>: DATABASE ENTRY DATE: 2002-08-28
gtctctccaatattttgtcgaaccgattgagggaaaaaaaaaagagaaaaagaaaagaaaaaaaagaagaagaagagagaactcgaactctcgcctaccatttcgcccccctccgcaagcaatccaccactgcatcggcggcgagggctcaccggcggcgagccatgtgcggcggcgccatcatccaccacctgaaggggcacccggaggggtcgcgccgggcgacggaggggctcctgtggcccgagaagaagaagcccaggtggggcggcggcgggaggcgccacttcggggggttcgtggaggaggacgacgaggacttcgaggccgacttcgaggagttcgaggtggactccggggactcggatttggagctcggggaggaggacgacgatgacgtcgtcgagatcaagccggccgccttcaagagggccctctccagagataacttgagcaccattaccactgccggatttgatggtcctgctgcaaagtctgccaaaagaaagagaaagaaccaattcaggggcatccgccagcgcccttggggtaagtgggctgctgaaatcagagatcctcgcaagggtgttcgtgtctggcttggcactttcaacagtgctgaagaagctgcaagagcttatgatgctgaagcacgcaggattcgtggcaagaaggccaaggtgaattttccagaggctccaacaactgctcagaagcgtcgtgctggctccaccactgctaaagcacccaagtcaagtgtggaacagaagcctactgtcaaaccagcattcaacaatcttgccaatgcaaatgcgtttgtctacccatctgctaacttcacttcaaacaagccgtttgttcagcctgataacatgccatttgttcctgcaatgaactctgctgctcctattgaggaccctatcatcaactctgaccagggaagcaactcatttggctgctctgactttggctgggagaatgataccaagacaccagatattacatcaattgctcccatttcaaccatagctgaagtcgatgaatctgcattcattaagagcagtaccaacccaatggtccctcctgttatggagaacagtgctgttgatctgcctgatttagaaccctacatgaggttccttctggatgatggtgctggtgactcaattgatagccttctcaacctggatggatcacaggatgttgtcagcaacatggacctctggagctttgatgacatgcccgttagcgatttctattgaggaattcgaagtcttctagtcggagcatgtacacagggaaaaaaaaggaataaatactattggagattgggaggcacctgcatggcaccttgggggtagcatatcgttatgtttagcttagatgcaaaaggctgcatcctgaaactctttggtgattggacctgttccctatccgctgtctatgtatggcagccatctatgagactcaagaactgcttttttttttccgttctagttttctgtcgttgctacctgtatatggctatgaacatcgtgaatccatggccattatgttttaatctatgttgttgactgctctttctttcggtctttgctgtgctgcgctatgttggtgataactagctaccatattgattttctgtacataattcatttgttgaatccgaaattaaatagtgcattgacc

SEQ ID NO: 28342 - DNA, 1781 bp, Oryza sativa
  ref <308>: DATABASE ACCESSION NUMBER: AK103784
  ref <309>: DATABASE ENTRY DATE: 2002-08-28
gcgtcgctcccgtcccgtgccgtgcgctgcggccgccatgggctcctccgactcccaggcgccgctgctgctcccgagggggagccaccgcaaggaggaggaggaggaggaatacgcggcggcggggaaggtgcggggctgctgcggcggcgatggggaaggagggtggtggcgggaggcgactgcggaggccgggaggctggcgtcgctggccgcgccgatgatcgcggtcgcgctgctgcagctgatgatgcagctcatctccaccgtcatggtggggcacctcggcgaggtcgcgctcgccggcgccgctatcgccaactccctcaccaacgtctccggcttcagcgtcctcatgggactggcatgtgggctggaaactatttgcggacaggcttatggagcagaacagtatcataagctagctttatatatgtacaggtccataattgtgcttcttgttgtgagtgtaccaatcgccatcatatgggttttcatcccagaggtacttcctctcataggtcagcaaccagaaatagcaagtgaagttgggaagtatgcattgtggctaatccctggtttatttgccttcactgttgctcaatgcttatcaaagttcctccagactcaaagcctaatatttcctatggttctaagctcatcaataacactagcactcttcattcctttgtgttggttcatggtttataaagttgggatgggtaatgctggagctgctttatcagtcagtatctgtgattgggtcgaagtgactgttcttggtctttacattgttctctcaccttcttgtgaaaaaactcgtgctccactcacatgggaagcatttagtgggattggaagtttcttgaggttggctgtaccatcggccctcatgatttgcctcgaatggtggtcttatgagctgcttgttctgctttctgggatcctaccaaatccagcacttgaaacttctgtgctttctatatgcatttctactgttgtgttggtgtacaatctccctcatggtattggaacagctgcaagtgtccgtgtctcaaatgaactaggtgcagggaatccagaaggtgcccgcttgatagtaggggttgctttatctgttatactttgttcagcagtcctagtgagtgtaacacttctagcgttgcgtcatttcatcggaattgctttcagcaatgaggaagaagtcataaattatgtaacaagaatggtacctgttctttccatctcagttattacagacagccttcagggtgtcctctcaggtgtttccaggggctgtggatggcagcatctaggggcctatgttaacctaggtgcattctatcttgtcggagttcctgttgctctcttttttgggtttgcaatgcatctaggaggaatgggtttttggatgggcatggtagctggtggagcgacacaggtcactcttctatctatcattactgcaatgacaaactggagaaagatggctgaaaaggctagggacagagtatttgaggaaaggattccgacacagtcagtctaaccacattgactaagttttgttggattcaatcttcaaatttttcctgtacggtacatgttctttttttttttcttgaggattagtaacagaatggcaaatgaatcctgtagcatcttagctcgaagagttagtcaagtcccaggaagacttgaaagatgtgatgttacatcttttttacttctctgtaggaaagcatatataatctttgtgttgaacagggagcaaagtatactgg

SEQ ID NO: 28343 - DNA, 2111 bp, Oryza sativa
  ref <308>: DATABASE ACCESSION NUMBER: AK103785
  ref <309>: DATABASE ENTRY DATE: 2002-08-28
gactgattttagcacaattcacatggtatcagagctaggttgctcttgcgattcccgtcgatgtccgccgccggcgagctcttcaccggtcttggtctccggcgagtgtcctccctcatctcttctcccagtggaagttttctgctgtgtgttctgtttttcgtggtcacttgattttggggatcgaccctcttctcttctggctggagcatctttttctcctgctggatctgctacttgattttggggatcgaccctcttctcttctggctggagcatctttttctcctgctggatctgctacttgattttggggatcgaccctcttctcttctggctggagcatctttttctcctgctggatctgcttgactgctttttctcctgcttctttttctcctgctcgaggttgcattatccaattgtgctagctgcagtggtgtcggctagctgcagtctgcaggacccgcagcctccatcctttgctgtcgcacttgccgccaggactctttccaacaaatctgccatgtgttggatctcctgctgctgattacaatacctaattgcagccactaattgcagcagcggcagcccagtgcagcagtgcagtagcagcgtttcaagtgcagcagcagctcagcctttcagattgcaaccatggcatcagatccacttgggaatgtcattcttttgcctttggatataaaactcaatggacaaaattaccgtgagtgggcttcctctgctcgtatgcaactcaggtcgtatggtgtggcctctcacttgaatgatgatccacctcatgagaaggaagatgagaagaaaattgcagcttggcggcgtaatgatgagcgtgtgatggccttcttgtgcatgagcgctgaggtccccattagaatgaattttattgatctttcttctgctaagaagatgtgggagtatcttcaacaacgctatcaacagagcagtgcagctctccgcttttctcttcgcaagagcttgcaaagccttgaacagggcgacatgaccattgaggagtttcataatgccttcacctcattgtctagacaattggattctatggtgccaaaggctggaggtgggtgcagacagtgtatatgcaaggagaaatatgaggagcagagccttatgtttgattttgtgatgcgtcttcggttagactttgaacctattagggtgcagcttcttggtcggtctactcttcctaccatggctgaggctctcgcagacttaattgccgaggaaactcgtctacagtcacttcccaacgccacaacaccgcaacacactgtccttgcttcttcattgatgggaacctccttgtctggtgatcatgctttccagcatgggtccttagcaacttcttccactcagattgtttgctcccactgcaagaggtctggtcaccgtgttgagaaatgcttcaagctacatcctgaattgttggctgagtttagggccaagcgtggtgcatctcgccgtgcccctagtacttcagttacacttgctgctcccgctgtgactgcagcttcagttagtgcaacttcaaccaatcagccctacatgaatgcttatcaacctaatggatcagcttctttggcccctgcaccaggatcgtcagacaagagcactcgttggtactggccatcgccatagtagttctcctgggaagctctatgttctcgatcacttgagtcttccaccttcatcttttggctccaccaccactagttccacagccttgggttatgcatcttctacaacttttccacaatggcatcatagattggggcatctttgtgggtcccgcctttcaactttaattcgtcagggtgttctaggtcatgtctctattgatactacttttgattgtacgggttgtaaacttggaaaacagatacaacttccttaccctattagtaattctaggactagttgtccttttgaccttgttcattctgatgtatggggccctgccccatttgcttctaagggtggacacaaatattatgtcatatttatagatgattattcgagatacacttggatttacttcatgaaacaccgttcacaacttttatccatatacc

SEQ ID NO: 28344 - DNA, 4284 bp, Oryza sativa
  ref <308>: DATABASE ACCESSION NUMBER: AK103786
  ref <309>: DATABASE ENTRY DATE: 2002-08-28
gggacctccccaccttcgtccgtctccgtcctgggcacccaacgcccaagggccaaggccataccatcgtcctctcccccaacctccttcccgcgccagatcagatccaccgccctctctctctctctctctctctctctctctctctctctcctccgctcgcctcagcggctaggggtttcgcctgccgctgccgccgccgccgccgctgggggacggctagcgaagatgctgaccaagttcgagacgaagagcaaccgggtgaaggggctgagcttccacccgcggcggccatggatcctggccagcctccacagcggggtgatccagatgtgggactaccgcatgggcaccctcctcgaccgcttcgacgagcacgacggccccgtccgcggcgtccacttccacgccacccagccgctcttcgtctccggaggtgatgattacaagattaaggtgtggaattacaagacacaccgctgcctcttcacacttcatgggcaccttgactacattcgcaccgtgcaattccaccacgagtacccatggatagtaagtgctagtgatgaccagacaatccggatatggaactggcagtcacgcacatgtgtggctgtgctgactggacataaccactatgtcatgtgcgcatcattccatcccaaggaggatctggttgtgtccgcatcactggatcagactgtccgtgtatgggatattggtgctttgaggaagaagacggtgtcacctgcggatgacatcctgcgcctcacccagatgaacactgatctgtttggaggtgttgatgcagttgtaaaatatgtgttggaagggcatgaccgtggggtgaactgggcgtcatttcaccccacattgccgctcattgtttctggggcagatgaccggcaagtgaagctatggagaatgaatgacaccaaggcttgggaagttgatactttcgggggcacatgaataatgtgtcctgcgtgatgttccatgcaaagcaagacatcattgtgtccaactcagaggacaaaagcattcgtgtctgggatgccaccaagcgaactggtattcaaacattcaggcgggaacatgatcgtttctggattcttgctgcccaccctgagatgaatcttcttgccgctggtcatgacaatggtatgattgtgtttaaattagagagggaacgtccagctttctctgtgagtggtgatactgtcttctatgtgaaggaccgttttcttcggttctttgaatactccacacagaaggaggttcagttggctccaataagaagacctggatcggtcagcttgaatcagtcacccaggacactgtcgtatagtccaactgaaaatgccgtcctgatttgctctgatgtggatggaggctcctatgaactctatatagttccgaaggattctgctggcaggactgattatttgcaggaggcaaagaagggagctggtgggtcagctgtttttgttgcacgcaacaggtttgcagtgctcgagaagagtagcaatcaagttctggtgaagaatcttaagaatgaaattgtaaagaaaagccctcttcctattgcgatggatgcaatttattatgctgggactggtaacttgctgtgcaaagctgaagaccgagtgaccatctttgatctgcagcaaaggttaattcttggcgagctccaggcacctgctgttaaatatgttgtttggtcgagtgatatggaatctattgcattgctgagcaagcatgcggtggttatagcaaacaagaagcttgtccatcgttgtacgctccatgaaaccatccgtgtgaaaagtggtgcctgggatgagtatggtgtgtttatttacactactttgaaccatatcaagtattgtcttcccaatggagatagtgggatcattaaaacccttgacgttcctatttacataacaagggctattgggaataatattttctgcctagatcgtgatggaaagaacaagctgatcacagttgatgcttctgaatacattttcaagctggcccttctacggaaacgatacgatcatgtgatgagtatgattaagaattcccagctgtgtgggcaggctgtgatttcttatttgcaacagaaaggctttccataagttgccctccactttgtgaaagatgagaagacaagatttaacctagctcttgagagtggtaacatccaaattgcagttgcttctgccaaagagattgatgacaaagatcactggtaccggttgggaatcgaggccctgaggcagggaaacgttggtattgtggaatatgcgtaccaacgtacaaagaattttgagaggcttgctttcctatatcttattactggttacatggacaaggtggggttcatgtgcaaaattgctggacagaacaataacctgatgggtcaattccacaatgctctgtatcttggtgatgctatgaagagagttgagatcctagagaatgctggacagctacctcttgcttatattactgctgccacccatggactcacagaaattgctgataggcttgctgctgaattgggtgaaaatattccttctctacctgaaggaaaaactcgctctcttttgatcccccctgcacctctcacagccagtggtgattggccattgcttagggtgatgcgtggtatctttgagggtggactggatgctactgggaaggctgaacttgaggaagacgatgaagctgctggtgctgactggggtgatgaggacctggatatggttgatgcaagcgaagcgatggcgaatggtggtgatggttttgatgctgaggagggtgaagcaaatgaggaggatggtgaggaaggtggctgggacctagaagacctggaacttccgcctgaagcagagacccctaaaaacgccggtaatgcactctcagtggtctttgttgctcctcctccaggcatgcctgtcagccagatttggactcagaaatcttctcttgctggggagcacgcagcagcaggaaactttgacactgcaatgagattgcttagccgtcaattgggcatcaaaaactttgctcctctcaagcccctatttctcgatctgcacatgggcagccactcatatcttcgtgcacttgcaactgcccccattattccggttgctgttgagaaaggttggagtgagtctgcaagtcctaatgtgagaggccctcctgcacttgttttcaccttctcacaaatggaagacagactcaaggctgcctacaaggccaccacagaaggtaagttcccagaagccctgaggcagttccttaacatcttgcataccatccctcttatcgtggtagactcgaggagggaagtggatgaagtgaaagagttgatcgagattgtgagggagtatgtccttggcctgaggatggaacttaagaggaaggaattgagagatgatgtcaaccgccaacaagaattggcagcttacttcactaactgcaagcttcagagagttcatatgaggcttgtgcttggaagtgctatgggtttgtgctacaagcaaaagaactttgctactgcagagcactttgcaaggatgctgctggagaacaaccctaatgagagccaagcaaagagggcccgacaggtgcagcaacagtgcagtggaaagaaggatagctgtgagctgaactatgactacagaaatccatttgtcgtctgtggtgccacatatgttccaatttaccgtggccagaaggatgtttcctgcccgtactgtggatcccggtttgttccttccatcgaagggcagctttgtaccatatgtgagcttgctgtggttggtgcagatgcttcaggcctcctctgctcccctacgcagttgagataagtggcgctagatgccttatttccagctcaggaaaaacaattggacctttaatgcttacatggatggaaaaatgggatgttagatttgatttgtgatcagagaaggccattacatttgtgcaaaattttgaaatttaatagttcatacaaaaaagtgtgcaaatccaagaccaggctcaggataccaaggaacctcatcttgcctatgtaaattaactactttgagcagctgtggctagaagaatggatatatatcggccatgcctcatgtcagagcatttcagaataaatattcgtgtttagaatagactttttgatggtgaaatatttcaccgaggaattgtgagttcttacttcaaagcacattgcaaattgaggtcgtgttcctggatggttcgtct

SEQ ID NO: 28345 - DNA, 3135 bp, Oryza sativa
  ref <308>: DATABASE ACCESSION NUMBER: AK103787
  ref <309>: DATABASE ENTRY DATE: 2002-08-28
gggttcgctcgtcgcctcgcgtctcgtctcctgttcggctcgactccacccgccgcgagagagagagagagagggagggagcaaaccctatctagggttttgcccgcccaccgccctcgccgtcgacgccatggaagccggaggaggcaagcgggccgccccggagggcaccaacggcgccgccaagcgcgcgagaggtgagcctcttcgtggtttccttcttcttcttgttttttttcccttttcttggttgctggctcttccattggaaggatggctggttcctagggtttctccagccggctaccttgttggggggctcggattctcggcggcgctccggcttggttttgagctgggtggtgattggtgaagacgggagacgaagatttggggggtgttgggattggggagcttgtggccgccttaagcctttcatgtttttttttcttgttttgttcgtttggagatgatgacggaaggctcgccactatttttttaaaatttatttttggcaatatttcgcaaagagatctagaaacgcgattggtgacctagtggacctgctaaatatgtgaacggatctagctgctcgtcgaattttcttgagtgagttgaaagagatgtccgatttctcaaggcgttaatttgaaagtgaaactcattaagctctggatactggacattattgtattgtaccatttaccttttttttttctttctgagaaggtaatgctcagtggcttttgaaatgattaatgtgtacatgttgtttatatacatgccatgttttagtaaaaatcaacgctattaaccggcggaaataataaatttggtgtaacagcatcggagtcgtctcaagtgggtgtaggaagcaaattgaagccatgcaccaaatttttcaggttctaatctaacttaaaatgaactatcacctgtttacacatgctattctgcactttgctgtggttttgccttaaataattataatttgttattttgctaagaaattgttgttgaggggtaacaaatgggttaagtaagatttttctacaggtttccattgtgtataatggataacatagcagctatatgtaaaactccatttctgatgaacaatcaaatctatctgttacactgtggtaccatatcacctgcagcaatcaagataatagtattaaacgttccatatgggattgcaattgacttgccattatggaattatactacttactaaatgataacattcagtgtagcagcttattttcagtacacgcacagtgtgtttaccttgaatttgaacttggagagatgtttttctttttatattctactattgattgatcatgtgttttagttatcacatcgatataagctactccttctgctacactcctgagttgcaaaagatgttcttattatatacaattgtgaatgaatcatgcagtaaagtgataatgtgttgtcatgttcatataagtaaagtagctataagacaatagggaaataacttctttgacaaactaaaattctattattttttttaaaaaaaatggtgacacactgataggcaaattattctgtgttgctgtatgcctttattaatatgtatgctatatttactgtttaccacagtatatgtttgcttctgtattaatatgttcagtttcatgtgatgctacgagtgcttcttaataattagatagtattcaccatcaagctttgaccactggtaaatctagattgatcccattgaaaataactttgtagatttacttaacctgtgaaaataattttacagataagatatccacataatgattatagatgtgttttgtacgtcaattattaatgtttaatgtcatttatatgaatcaaaagagagaggtggtttcatctattttgtgttgtttactcgtatctgttagcagtgacctaataaggttccatcttcagctaaatataacattacttgtttcatccatattgggtcactgtaattttcctttcgtacacatttggtcgctgtaattttattccttaaatgatgttttctttgtgcagtacttctggctgtccttttggttcaagttgtcattttctccataacttccctggtggctaccaggctgctgcaaagatgaccagccatggtgggacagctgttgcagctcctcctggaagaatgcctttaggacctggtgctcctaatgggccacctacatccagcgtgaaaactcgcatgtgtaacaagtacaacactgcagaaggatgtaaatggggtagcaagtgtcattttgctcatggagagagggagcttggaaagccgatgctgctggacaactcaatgccacatccaatgggatcaatgccgtttgaggctccaccaatgcctggcccggacatcgttcctccctcaacctttggtgcctcagccacagcaaagatcagtgttgatgcatccctggctggcggtatcattgggaagggtggaaccaacacaaagcatatatcccggatgactggggccaagctagccatccgggataacgagtccaaccccaacctcaagaatatcgagcttgagggtacatttgaccagatcaaacatgctagtgctatggtcacggagctaatcgtccgcatcagtggtaatgcccctccagccaagaacccgggcagggggtcgcatgctggggggcctggaagcaacttcaagaccaagctgtgtgagaacttcaacagaggctcctgcacgtttggagacaggtgtcatttcgcccatggtgaaagtgagctgcgcaagccgccggctgctgcttgagacatgcgtgtcgtggcttggactagacggccagcatacctgagctccaaatatgaaaacgattgcacacaaggtgaaaatgatatgtgcattgttgctgcttctgcagcatgagatattttgtcatgggaggaaactggatgtaatctgggaggaaatagataacagggaatttcggtgtctttgatttgtagaattaccttggagtttttccctcggcgcttcagtcaaattttgtaatgcttcgaatgcactatataacctagcaaaactacaatgattccatttacttgggtgctttctgatgcttc

SEQ ID NO: 28346 - DNA, 1373 bp, Oryza sativa
  ref <308>: DATABASE ACCESSION NUMBER: AK103788
  ref <309>: DATABASE ENTRY DATE: 2002-08-28
gagtggtggcgctcgcatttttttttcagctccgcggaaggaacgaaacccaacccaagcgaggcaaaagcggcggcggcggaggagtagaggagcaatggagagggcggtgccggtgaggaagccgcacacctcgacggcggacctgctcacgtggtcggcgacggggcccgacgccgccgccgccgcggcctcgccggtcgcctcctcccgccccagcctcaagccggccggggggatcacgccggcgatgttcggcgcgccggtgagcgagaaggaggcggaggatctgagcaagagtgaacgaaaattttgctcgggctcaaagttaaaagaaatgactggaagtgggatattcgctgagaatagtgaaaatgatgattcagaggcttcaaatcctgcaaacaaaacttctgtaaggatgtatcagcaaactgtaactggaataagccaaatctcattcagtgctgatggaagtgtttctccaaagaagccatcgtcattacctgaggtggctaagcagcgagagcttagtggtacactggagactgatgctgaggctaaaatgaataagcagcattctgaagccaagagcaaggagctcagtgggagtgatatttttggtcctcctccagagatccctgcaaggccattggctgctcgcaatatggagctgcaaggaaatctagattttgcacttccacaaccgagaagcgtccacacatcagtgaaagtatccaatcctgctggaggtccaagcaacatcacgttcagtgaggagcctgtagtcaagacgtcaaagaaaatccataaccagaagttccaagagttgacaggcaacaacatcttcaaagaggacgctacccctgcatcagctgagaaatctctgagctcagcaaagctgaaggagatgagcggcagtgacatctttgctgatggagcggcagctccccgagactatctcggcggtgtccgcaagccccctggtggcgagagcagcattgcactgatctaatcgccgcaggctgccctaatctggactggctacttttaccctcatcgctgaagtccgtggcatgtgctcttcctggaccctggttcttgatcatggttgagagctgatatcttggccctgatatcatctagagtcagcagaatctgactcagcttatgtgttgtaaacttgacttaatctcatctgtcttatggtacttatgtattaatctccttggactgagactgaaataagttttattggttcatttttgtgagctcatggtatcatcaggaaataatgtctgtcttgtatcaaattaacttatttgtgagttatgcaaaagataacgaaggtatctacaataccatttcctctt

SEQ ID NO: 28347 - DNA, 2379 bp, Oryza sativa
  ref <308>: DATABASE ACCESSION NUMBER: AK103789
  ref <309>: DATABASE ENTRY DATE: 2002-08-28
gatttcgccacagccgccgcctttctcgtcgccacctctaccaccgtcgtcgccgccgccttagccgccgccgccgttttcgcccctgttggccgccgttcccccgcctttccgccgccgcctctgccgcctccgcctcaaccgccgcctcctccttagtctcctgccgcagccatccctccgttcgccggcgatttgccggccgggttaggccgtcaccccccactcctcattggagtcggaggccggccggacccggatgcagttccccatgaccccatttgctagggtccggctaggagatccgtggggaacgacaatcgtggcgcggaggacgggacggcgcgcagcggcggcaccggcgtatgggcgcgacgaaggaggagtgaagagcggcggttcccccctgcgcatggcaagtgtcccggtccggccgtagcccggcggctcgggagtggggaagcgacttcggcgtggtggcagtggaggtggctgagcggctaccggtggcgtgggagttgggaatcagcgtcgtcgtgggggcggtgtcggggatgtcggagacagcgacgaacggagccggcgacgactccatctccagtgggagggtgcaaagctcgccaccgggagaggccaccgccgtccatccatgggtggtacaatactgtaccccctggacttggacgcggttaggaggtccggcgttcatcgaggcagttattggaggagaaggtgcagcgatcggtggagaaggagtaggcgcgtcagggaccagcggggcaggcacgatcggagtggcagacatacggcggcgagggtagtggcgccggccaccaacccccaccatgagatcccggcgcgtcctccttgtcgatcgtcgatgaagatggcaaagacggcgtgcgtgatcatggcgagggatgccgagaatggcatcgaggatggaaataaaggtagacataccttctgttcttcgcttttcctgtagatcaaaaaagcgaggtttcttccttctttctttcacttcgagatctccttcgcgagagcgaaagttctgataacgtgttgaaagtgtataagattgattgagcgagagggattgagtgagagagagaattgcacacaagaatatagagaatgaatgagcggaatctttattgatcaatgcggtacaatatatagatgggaaagtggtggcaaccggagacgcgatggtttgggaaccatcgcgtccgttgctagaatcgccgtgaggcgagaagaggtgtggggcacgaccaaccgtcgtggattgctgctctatccatatagatggatgagatcacccaaatatttcataacaacatatacggagtttttgtttgcatgctttcccagcccacagttaacatgagaaaagtattagttttttaaaaaataatatatccaatctaatggtctaaaatattccacaaatttaagtagattaaacaatgctatgtggcgatctaggagcgtttataggagcgccacgtgacggcttatgagcgtttgtagaaagtttaatggacttttagtatataatagtatataatagatagatatgataattttatatggtactctcttcattccaatttgatcatcatctaatacttttgagatttttctgcaaatgatcatcacctaccaaaatgtctctttttaatttatgtaaagagtagatttgcatcgtgaaatatcctgcgtgcatacaacatttaaaacgtaaattaattttttgttggacacaaaacaatattgcaccttgatcgataagaattaatttcaaaatgatagatatttcggtctcatagctcttggtgtcatttgcttaaggaatgattaaattgggatagataaagtatataaagtaaagaagctgaaaagcagagaggcagaagggggaaacaagctaattaaccaaacattctttctggtgctaaacggcagctataccatcttcccttttttttcttatgagctcgactaaccaatatgatatcgactaacacactgtataaatcgactaaccaattgagttcaccgcttgtaatcagtaggatcagcatgttcaccagttcagcacgtagcatcagcaggcaaattattttgagtgttcctagacattaaccgcataaatcccacgaacagcagtgagcctgcctgcagctttccgcaactgcagctctcttggacgtcgctgagattgttcaaatgtgcggtaggaatgccatctttattgcttacaactgatgtgtaacgatgttccttccccatgtctcgcattgcccaccgttaattcttattcttctccaattaacccgcttggacactgaatatatatgtttttcttttttt

SEQ ID NO: 28348 - DNA, 1095 bp, Oryza sativa
  ref <308>: DATABASE ACCESSION NUMBER: AK103790
  ref <309>: DATABASE ENTRY DATE: 2002-08-28
gcttctcccgctctctctctctctctctctctctctcagccatggctcgcctcctctcgcgaaccctagccttggcccgcgcggactccgccgcggtgccctcctacggccgcctccatgtccgtggtgtctcatcgaaggtggagttcatcgagatcgacctgtcgtcggaggacgccccctcctcgtcgtcctcttccggcgtcgaggggggcggcttcgggccgcgggagatggggatgcggcgactggaggacgccatccacggggtactcgtgcggcgggcggcgccggagtggctccccttcgtgccgggaggatcctactgggtcccggagatgcggcgcggggtcgccgccgacctcgtgggcaccgccgtccgcagcgcgattggcgccgcctggaacgcggaggcgatgacggaggaggagatgatgtgcctcaccaccatgcgcgggtggccgtcggaggcttacttcgtcgaagggaaattttctcatccagtggagagttcaagaaaagttgctactcaaactgatgaagaggaaagctaatttgtttgcatcactttagcagggaccccctgagaaataggaagcttggagctgtcgagttctgctgatgttgtacatacagacagctatgaacgtgagcaccagcgtgtcatctcatcagtcgcttcagaagatgatgtgcccagtgctgttactactatcaaaatgccatgaacatggatccgtgtattcctgcaacacagtgccttgcgctatggtctttttttctgagagcttgtacttgtacctgtagaatgtagtgtatgcatcaagctgctgctactgaataaaagaaaaaagaaaaatatatgttgtgggttgggctgaatgcctgtaccccatgagcacaggatgctctcgatcattgagcgtgctgtgcacgtcgtgggcctccaactaaaactgtaatcatccttgggcagaagacggcagaaatcttgaactttttgttttgtcttgttcttcggctgataatgctgcttcttctgataacaattgcccctggaaatgctaataatgtaagaagagcactgctatacgt

SEQ ID NO: 28349 - DNA, 2013 bp, Oryza sativa
  ref <308>: DATABASE ACCESSION NUMBER: AK103791
  ref <309>: DATABASE ENTRY DATE: 2002-08-28
gaaatgtaaaaatccagccaaaatcattgtgcggccctggtgctcggcgtcgactcccgtctcgtctcctcgcgagctcgcccacccgccgccctgcgccgatctccatcgattccgcgacttcgcgagcagtggcgccgtcgtccgtcctgctgcttccgccgcatcctggtttgggggttcaactgaaccccctatgtccctcgttagatccgcccctgcccggcaatgggcagcatggacacgccaagaggaacaaaattttttcaatgcgctgcgccaagtagggaagaattttgagaagattacgctgcgtgtccagagcaaaagcaaagatcaggtcagacattattactatcgtcttgttcgacgcatgaagaaacttctcggtcctgagttctcgctcgatgcaaaaaattccaaggacaccattgctgctatgctctgctggtggtctctgcttgaaaaatttagctgcagtgcatcaaaactgcatctgaagcctcggagattcaaaactttcgtagaagcattgggaaatcaactactaaaggatagaaataaaaccagaaaaaagtgtccacgtggggatgtgtgcctgtcctcttcatcttcggctgtcaacaggactcctggaaatgaatctttctcagtaaaactcttggctgtggatgtctccaatggtagcaaagtaggatcttctaaagggtcatttttcaaaaaggtcacagaaccaaattgcagtaacaagtcaggtgcaactaaaggggacctctccgccacaagaactgtgaaacagaaaagaagagcaggtggtgttgttgcatctgctgcatataaaaaatgggagagagctgccatggctggtgtttctttggttgctgatgcagctgaagagcttgagcgcaacacagtgaacgctgatgcaagaatgttatctccatcatcaagcaatgcctgcacagttgatggtcttggcacaaatcatataaaggaagcagatcaacaagcacctgcaaagctaaagttgcagctatttccaataaatgaagctacacgaaaggcattagagaaggatgaacataatccacatctggaactcacattaagtgctaggaaaaaaatatcatcagtactagaacatttgaaccgcaagtggggcaactcaaacattgcatctggagagcttttgctttttccatattgtgctcatcaagaagatttagctacatatcagaggtggaccacaaaagatactgtcgcagtggctgacgttttcctttctgtgaatagcccatctgtttttcgattaaggtatggttggttttcccttgctgagcttgaagcaggcgtaagtgaaatatctttgactcattttgagaattgcttgatacctgaagacatccatgccaaatctcccttagaggcttgtgtgcaaaaggatggtaattcgctcagtagttgtgctcctgagcaacacccttgtggttcgaaagatcagtcagcattattgtttgctatgccatctagtacaggcaagagtgctcaggtgccagagcagtgcattgatgttctcccctcacagtttggcaggcagaatcaagaccaagttaccacgaaccaagtttttgaggttgatcaagggatggattgtgctgcagtatctgaaggagagtgggcagatacccttactgatatcagtgttggatacttactgacagaagcttccagaggtgctaatactgattgtccagggacatctgttgtcaaaaacacactgttgcttgagaatccctgcagctatgattcatttgatgctgctgttgctcttcatgcttctcgttataaatcagcagagcagccagcccttgcatcccattcaaccatctggggtgctgaagaaacctgtgacgcattcagttttaacctaccagcatctaggaagcgagaaggttcaaataattcagctagcagctctcccgatagtgacagtgatgttcatccttcaaactc

SEQ ID NO: 28350 - DNA, 1464 bp, Oryza sativa
  ref <308>: DATABASE ACCESSION NUMBER: AK103792
  ref <309>: DATABASE ENTRY DATE: 2002-08-28
gaccggtgatggccggcgtgggcgtggtagtagatccggaggcggtgggcggcggtggagatggaggtggagatgggcggatgaaggaagggttggcgcggcgggcggtggaaaacctgaggttccggtcggtgtggggcgaggtgaacggcgccatgggcgacctcgggacgtacatccccatcgtgctgtcgctggcgctgtcccggcagctggacctcggcaccaccctcgtcttcaccggcatctacaacgccatcaccggcctcctctacgtcgtccccatgcccgtccagcccatgaagtccatcgccgccgccgccctcgccgacccctccttcgccatcccggagatcatggccgccggcatcctcaccgccgccttcgtcctcttcctcggcctcacccgcctcatggacctcgtctaccgcttcgtcccgctctccgtcgtgcgtggcatccagctcgcccagggcctcaacttcgccatggccgccgtcaagtacatacgctacgagcaggacttgggcaagggcaagtccctcgggcggcgcccctgggtgggcctcgacggcctcgtgctcgccatcgcggcggtctgcttcatcgtgctcgtcaacggggccggagaagagcaggagcagcgtcagcagcagcagcagcagcaacagtggtggcgtcgtcggttgggttccgttccttcggctgtggtggtgttcgtggtgggcgttgcgttcgcggtggcgcgtcacccagcggcggtgagggagctgcgcgctgggccgtcgcggatgcgggtggtgcacatctctcgggaggcgtggaagcaagggttcatcaagggcgcgctgccgcagatcccgctgtcggtgctcaactcggtggtggcggtgcgcaagctgacgcgcgacctgttcccggagcggaaggagtcgccgacgtcggtgtcggtgacgatgggagccatgaacctggtggggtgctggttcggcgccatgccgtgctgccacggcgcgggagggctggcggggcagtacaagttcggggggaggagcggcgggtgcgtggcggcgctgggcgtgctgaagctggcgctgggcctgctgctgggcggctccatgctgcgtgtcctcgtccagttccccgtcggtcttctcggcgcgctgctgctgttcgccggagtggagctcgcggcggcggcgagggacatgtccacgagggcggaggcgttcgtgatgctgctgtgcacggcggtgtcgctggtgggctccagcgccgcgctcggcttcctctgcgggatgctcgcccacgcccttctctacctcagggcctgcgcgctcagggaacgcatcgtctcatctcaaacggatttgtaattccaattccatttcactatcatctcaaaaaacgccagccaaacattcataaataatcactcaatacagctcgttccgtatgctgtcc

SEQ ID NO: 28351 - DNA, 2199 bp, Oryza sativa
  ref <308>: DATABASE ACCESSION NUMBER: AK103793
  ref <309>: DATABASE ENTRY DATE: 2002-08-28
ggacgtcgttccaaatctgtagtagcacctccttccccaagaatcgcgcgcgcgcgcctgcctcgtcgccggcggccatggcgctcctcctccgccactctcccaagttgcgaagagcgcatgctatcctcggatgcgagcgtgggactgttgttcgtcacttctcatccagcacttgctcctctcttgtaaaggaagatactgtatcaagttccaaccttcatccagagtaaaaaaaaaattggaggatcagatttttcccatgacaggcagtctggaaaagagcttcagaatttcaaggtctcaccgcaagaagcaagtagagcctccaatttcatgagagcatccaaatatggaatgccaattactgctaatggggtacatagtttgttctcatgtgggcaggtagtaccgtctaggtgtttttcaagtggagcagatttgcctccacatcaggaaatcggaatgccttcactctcccctaccatgactgagggaaacattgcaaggtgggtgaagaaagaaggagataaagtctcacctggtgaagttctttgtgaagtagagactgataaagcgacagtggagatggaatgcatggaggaaggctaccttgctaaaattatccatggagatggtgccaaagaaattaaagttggtgagattattgccgtaaccgtggaagaagaggaagacatcggcaaatttaaggattataaggctccatcatctgctgaatctgcagctccagccgaatcgaagccccaatctgagcccacagaaccaaaaaaggagaaagagcagcccaaggctcctgagccaaaggctacaaagacagaagaatcttttctttcagaggatcgcacattctccagtccaattgcaaggaaattggcagaagacaacaatgtaccactgtcaagcataaaaggtactggccccgatgggcgaattttgaaggcagatattgaggattacttggcttctgtggccaagggtgccaagaaggaaacagcagcagctcctggactaggctatgtggatcttcctaatacgcaaataaggaaggttactgcaaaccgcctgctgcactccaagcaaaccattcctcactactatctgacagttgatactcgtgttgacaaacttattaagttgcgaagtgagttgaatcctctgcaggatacctctggtggcaagaagatatccataaatgatcttgttatcaaggccgcagcattggctcttcgtaatgttcctgagtgtaatagctcttggatgaatgattttattcgccaataccacaatgtgaacatcaatgttgctgtacaaactgaggatggcttgtttgttcccgtaataagggatgctgacaagaagggcctagccactatcgctgatgaggtgaagcaactggctcagagagcaagggacaacagccttaagccagaggattatgaggtataggccgaatatatatttgattcgatagtatttttcctttgacaatttggatgcaatgtcttgcagggtggcactttcactgtgtcaaacttgggaggcccttttggaattaagcaattctgtgccatcgtaaatcctccacaatcagcaattttggctattggctcagctgagaagagggtgatccctggagctgagggtcagtttgaagttggttcgtttatgtcagcaacattgagctgcgaccaccgggtcattgacggtgccattggtgcagaatggatgaaggcgttcaagggctacatcgagaatccaacgaccatgttgctgtaaatgaggatgacggggagagttattttttgtaggttttcacaaataaggctcacaataacggtgtcttcgttcttttcattgttttacactgtataacctcggcacggccccatgaggtcttgaaaccaaagagcaaacatacataggagtcagcacagcatcccttgtcatctctgtaaatgcatttttatcctgagctaaatcacaatttacagcgcgtagtggaagtttgatgttctcttgtttaagacaaattttctactccaggagttaaacctttttcattttttctgtccaaggtgataaatgataaggagaaatgtggcctgtgggtaaggaagtctttttttggaatggaagccccatgtacttggctctttttcgaaacgtttttggctgtgc

SEQ ID NO: 28352 - DNA, 3063 bp, Oryza sativa
  ref <308>: DATABASE ACCESSION NUMBER: AK103794
  ref <309>: DATABASE ENTRY DATE: 2002-08-28
ggccgccgcggacgaaaccctagctaaaaccctcctctccctctccctctccctctcaccgagccgcgcggcctcgccaaggaccggcagcgatggggaagagcagcagcaagaagaagaaggacaaggtgatcctgcccccgcagctgccgccggaggtggacgacgacgacgtggtggtctctgacgaggacgtcgagttcttcaggggcaacgagggccacgcccgcgcgctcgccacgctcgacaggaagtccatcgacagctacgtcaccagggtcgcccaccacgacgaggacgaggtcgagcgcctctacgaggagcgcgagcgcaggaggaaggcggtcgaggccctcaggcccaagaaccacgacgacgacgacttcgaggtcgaccgcgtcgacgccctccccgtcaagaccctgcaaggggagctggtctacaacaacgccaagaaagcgagatttgatgacagttctaataatgttgaatctaaatctgaagacaaagtaggaaattccaaacaaactattcaaaagggagaacggaaggaaaaatccaaaagcaaaaagggagatggtaaattgcaaaatgtgcaagctcaaactgaagcttcaaatggaaaattacaatcaaaagtgctggaggaggtgaaggaggaactttcagctgaggaattatttgagaaaaagaaggcccagctggctgaaatagggatgtctatgcttgaagatcctgaatcacatattagatctctaaatgatatgttaaacatatgcaatgacaaagaccagaaggttgttaaacttagtctgatgtccttgcttgctgtgttcagggacattattcctagttaccgcattaggcagttgacagaaaaagagcttacggtagaggtttcaaaagatgtaaaaaagatgagatattatgaatacacacttcttcgctcctacaaggcatacctgcaaaagttaatctccttggagaagcaaccaaatttttccgctctggctgttcgttgcatgtgtactttactagatactgctccacatttcaacttccgtgaaagtatacttgccagcgtggcaagaaatttaagttctccagatgatgcagtgaggaaaatgtgttgtgaaacgataaggtctctatttgtagatgaaggaaagcatcgtggtgaggcaactgttgaagctgtgagattgattgctgatcatgtgaagctaaacgattgccagcttcatcctgatagcattgaggtcttcctatctttgagatttgatgatgatcttggaaaagatgacacagaggaagaaaagggaaaaccaaagaagaacaaacgacgacaaaaccaggaagtcccaaagcaattgccagtgagtgataataagaaagccaaacaggaattgatctcaaaggctagagaagaggttgatgctgaacttagatctgtttcctttactcttgatccaaaggaaaggagaaggatacagaaagaagcactctctgctctttttgagacttactttcggattttgaagcatagcatgagtatttcaaattccaggggcaaggtcattaatgtctccccagatggctcacacccactacttgctccatgtttggagggtttaggaaaattctcacacttaattgatttggatttcatgggtgaacttgtcgcgtgcctcaagaagctttctgggtataccgaccatcactctggcacagtacatgacaatacactgtctgtatcagaacgtctgcagtgctgcatagttgcatttaaagtctggaggagcaaccttgaagctctgaatgtagacctgcaagacttctttgtgcagctttttaacctcattctggagtatcggcctgacagagatcgtggtgaggtattagctgatgctctgaagacacttctctgggaaggcaaacagcaggatatgataagagcagctgctttcattaaacgcctagcaacctttgctttgtcctttggttctgcagaagccatggcagcattaatcacactgaagcatcttcttcaaaagaatagcaagtgcagaaacatgttggaaaatgattctggtggtggctccctgtcttgcttagttgcgaaatatgacccagaagctaaagatccttatctgagtggggcacttgcctcagtcctatgggagcttagccttctgcagaagcattacgattcctctgtttcctcaatggcctcaaatatcttgagcatggccaatttgaatcctacacagaatcctgttccaatttcaaatgcaagccctctagaagcatatagagacttgtcaatggaacggaaattgtctaaaccagcgaataaattgttgccactaaactgcagaaagaagaggcgtggtaaggagtttgttgccctaagccctgcagcgctcgagggatcagattgcgttgcgggtggagatgaactcaaagagaagttaaaaaatcattttgcggtactaagaggtatctcagagaatgagagattgagagctgagctgaaccacacgttgtcatccatcaacttgtacaaggaatacaagaagcagaagaaaagcaggaaatcaaaggctgttaagaaaaaggtttcaagggcttaagttgtgctgcgtttgggggaaatttttgcacaccagggaccaaaggtgtgcagaatgaacaattttgccatacccactttgtagcttatcgtagcttttgggtgtaacacatttgcagttccaagcatttctttttaagctcgttctatttcctgacatgtccttttattcttgttgcctggacctaaccaggctaacaagtttgctgccgctgtacaagatataacagtggcatgcttgtgttatctatatatattgttatgcatgaacaatgccatcccctatgcaaaactacagattggtagtcgcaaggtgtagggtgctcgcgcagaaagggggaaaaatagtaggttttactgtccactagcaaaatatccatgttttgctatgttaaagtacacatttatttgaatatatgtttttcatattt

SEQ ID NO: 28353 - DNA, 1187 bp, Oryza sativa
  ref <308>: DATABASE ACCESSION NUMBER: AK103795
  ref <309>: DATABASE ENTRY DATE: 2002-08-28
ggggacctgtggctatcgcggaagggagcggcggcgaacccagctcggtgagtcgtcgtcggcggcggcggcgacggcgacggctaggaccacgtgacgcggatcagctcggaggcagcgacgacccatctctgatctccctcacgttcagaggcgcgaccaagcgtcgagggggagcgctcgacggcgagagtcatgcagggggcgcgtgttaatctgaaggggtggcaacaggctgctgttgcattcggttctgcatttggggccttgcttgaccctagaagagctgatctgatagctgctcttggggagactactgggaagccagcatttcagcgtgtgcttcagcggatgaggaacagtgctgaaggcagggatgttctcctggagcgtcctcgagttatatccacacaagtttctcatgcctgggacatgcctcagaacacatttggtgcagcatatgctcagttcatgggatcaaggaacttctcaccggatgaccgcccacctgtccgtttcatggatacagatgagcttgcgtatgttgcgacccgcgcccgtgaagtccatgacttttggcatgtgctgttcggccttcctacgaacctgattggagagactgcccttaaggtcattgagtttgaacagatgttccttccaatgtgcatgctttcagtcgttgggggctctgcgaggttcaatgagaaacaaaggacactgttttttcagcattatttcccatgggcttcaaaagcaggtcttaagtgcacagatcttatgtctgtgtactatgagaagcattttcatgaagatttggatgaagtgaggaggaactggggaattataccatgccctgatcccaaaaggagcagtgtttagacttttagatcggtacattttgcatgaaagatgtctgaacttggttttcactttgtctacgttagtattagctcttccctttcaagaataatagcaagagttatgctattgatacctaaaaaaactagtaattctctttaacttagcatagcaactaagcttgcaatgttgatgttccctttaacaatagtgtagatgagttaattacatttttatgtgtaatactagctgaatgccggtacttcgctatggacagaagaaaacatatcataatattgtctgaaataaataaaattatattttccgcg

SEQ ID NO: 28354 - DNA, 768 bp, Oryza sativa
  ref <308>: DATABASE ACCESSION NUMBER: AK103796
  ref <309>: DATABASE ENTRY DATE: 2002-08-28
ggcgccttttcctccccccttcctcctccaccgccgcccatctcgccgccgccgccgccgccgatggctccccccaccgccctctctccggtggccttcaagtcctccttctcgccgctcctcttcaacccgacccgttctaagataaatgtcgaaggtgcattctgtttgccatgttacaataggaaaaaggctagcaatagatcctttcgcgtgtacagtttatttgggggaaaaaaggacaaagacgagaatggtgaagaagcaccatcaaaggcaggaattttcggaaatatgcaaaatctttatgaaactgtgaagaaggcccagatggttgtccaagttgaggctgtccgggtgcaaaaggagcttgcagcgactgagatcgatggttactgtgaaggggaactaatcaaggtaacactttctgggaaccagcagcctgtaagagttgaaatcaccgaagctgcaatggaagtgggtgctgaaaaactttctgagctggtgaacgacgcctacaaggatgcacatcagaggagtgtccaggcaatgaaggagaggatggctgatctggcacagagcttaggaatgccagcaggccttggtgatggactcaagtgatagtgtggtacatgaatgcttttcaataaaaaaaaaagtgtatctcaattttgtatactagctgtattgagtcatcagtttaaaattcgtggcgagtactgttagctgtgtaagaactgtaatcgagaacatctgatcctgttttcc

SEQ ID NO: 28355 - DNA, 1568 bp, Oryza sativa
  ref <308>: DATABASE ACCESSION NUMBER: AK103797
  ref <309>: DATABASE ENTRY DATE: 2002-08-28
gccgcggcgcacaccggaatccaccgccgacgctccggcgccaccgagggagggggtgaggaacgcgggggagaagcgtcgtaggcgaggtgccggcgatggagagggaagtcgtggtctccgaggacgcggccgcctcctcctcctcctcctcctcctccgccgccgccgcctcgttctccctcgcggaaaccagggtcatctgccgcgtgtgccagaagcagttcgcgcagtacacttgcccccgttgtaacgcccggtactgctcgctcccgtgctacaaggggcatagtgttcagtgcactgaatccttcatgcgtgagaatgttatggatgagcttaagcagatgcaacctgaagatgaatcaaagaagaagatgttagacatacttaaaaggttccacttggaagaagaagatatggattcagaaggcgaagatgagtcaattctgtcagaggagcttattcaaaaagttatgtctggagatgagatcaagcttgaagacctctctgatgatgaaatcaaacgatttcgtcaagctctggcttcaggtgaactcagcaagatgatcgagccatggacaccatggtggaaaaaaccttccgctagatcgatttccctcagtccagatggaagccagcttatcagacaagtgagtgtagaagacactgatacgtcagatccaatggctgacccagagtctagcatcagtgaaatcccagaagggccagaatctgctctcccgtcactcgaacagctaaccagagcggagccatctccgctgcttgcggttcacttggttgatatactgtacagttactgcttcacacttcgcctccacaatggcgattggcgctctgatccttttggtgcctctactgttgcgttgtctgtgtcaaaagtcatgggggaggatgctaaacctgagacagtatctgaagccctcacggcatgtatagaggagacatgctcaccggcttacaggcacaccggaggtttcaggtttgctatagctctcgtggatgatatcatcagccttctcacgttaggaggcaatgcgcttgtttgtgccctctgtgacttccgcaggctcattcatatcggtgagaggatgctcaaggcagagaaattgggcaaggcggagcgatcacggagcacccaaaagcttcgtgccgcagataggaagttgtacttcatgacatgctgggttcatgagcaaccaaatgaggcatggtcgtctttagctcgcctcgttgaggtgcaggaagcatctctggaggagttggattgcgggagtcaatttcaaagggctggtagaaagaacgatgcccaatccaaggttcttattgaggagatttgagcgtgagaatgtattgatgcaagtgatactcataatcttcttacccctatatcagctgtatcatgtatggctgtataatctttgttgtaaagaacttcggatgttacttccccatgagtttctgatgtcaaatctgatatgttaaaggagttgtatgcaattctgaaatcctgatatgaaagccatattggcagaattcagatgcct

SEQ ID NO: 28356 - DNA, 2136 bp, Oryza sativa
  ref <308>: DATABASE ACCESSION NUMBER: AK103798
  ref <309>: DATABASE ENTRY DATE: 2002-08-28
gagaggccggaaaactctttcgccgaccttccccacacggcttcaccctaagccagtgagcccaggcggcggcggcggcggggcggaatggcggagccggactggatcctggagagggagcggaggcaggtggagcagatcctggagcttgacatggaggagctccaggtcgaggaggtcgacgacgccggctcatcctcctcctccgaagtcgacacctttctcagaaacactcatggggatggaggatctagaacttctgaagcacttgcattcaatacgtctgtggtttcgctgcccacctgtgatggtgaggttcatgatgccccaggcagatttgctttcttggatggtggtgtggttctctgtttaccaatgttttatcttcaaggtgttgttttgtttcctgaagctatcctgcctattagagtagttcagcctagatctttgacagctgttgacaaggctgtcaatcatgttgacgctccatgcatgataggtgtggttcatgtttatcaacacactaatgatggacaccatgctattgcttcagttgggacaacagcggagatacatcacattaaacaacttgatgatggctcatcaaatgttgtcacacgtggtcagaaccgttttcgccttagacgccgttggatcgatgctgatgacgttcaatggggtgaagtacaaattatcgaagaagatacacctcagagaactccaagagatgcatttggccagttagctacaaattatattttcaaccagtgtggcacatcgttactcagtttgggtacatcttgtttcagacaagatgatcatgtgaactctgatcaagattgggattctctatcatccactagtacttcaagtgaacattcagtaacagatgcaagaacatactgttcctcaaatgaagatgaagatctcatgcttgaacagtcttggcagaagtatgattctgtgaaaagaaatgctgaattagagaatccagtcaagcatagcaacacaagaggcaagggtgaaccttgctttcaatccccaaaatctttaccaacaaaaaacaaaggtgctgaacaacgcaggcggttctgtgctgcttatagttcaaagctggcattgcaggctccattgtcattttggcctcgctgggcttatgaaatgtacgattcatattcccttgctcgcagagtggcagatttgtggagacaaatagttgtaaatccaagcatggatgattatgtgagaaaaccagatattttgtcatatcacattggaagcaaacttcccatgtcatgttctgtgagacaagaattgcttgagatcgatggtatctcatatcggctacagaaagagatccagctactcaaggcctttaacatcataagatgcagaaattgcctggctcttatctcaagacgtagtgatggccctgtcggtgcttatgtcaagcagttcagctgtgggcaagagatgatgacagtgtacaatgcaactggtcttgcactccgtggcgctccttccaaagctcacagtttgtttccaggttatacgtggacgattgctctctgtgctgcctgtgagtccaacataggctggctgttcagggcggagaagacaaatctgcttccaaaatccttctggggattacgcagctcccaagtttcagatgacacacaatcaggacataactgaaccttaacattatgacaggaatgtaaaagcaatactcaatgtatattcttataatacaatacgcgatgtatagatggatgttcagagttcagacatgttgcagcagtctaaagtaaatgtgagcaatgcagaatgcaccctccatatcactgaaagggaaggtcagcttacctctcctgcgccaaagaataagaatgtgtgatcagctaaagtcccactgacaaatttctgagcagcaatgaggcctgcaagcactacagcagccgttccctgtttacaccacagtttcatggtttactcctattgttgtgaaacccagtataaatgcacattcactagttcgctttcatttaggaactgtaacgagaccaatacgaagagtaaaaaagtgagatctgaacctactacctgaatatcatcattgaagacaagattgtttgc

SEQ ID NO: 28357 - DNA, 1604 bp, Oryza sativa
  ref <308>: DATABASE ACCESSION NUMBER: AK103799
  ref <309>: DATABASE ENTRY DATE: 2002-08-28
ggtcagccgccactgccgtcgcgtcgtctccaacctcctcgccttcgcctccacccagccatggcgacgagcgccgccgcgcgcttcctcgcgttctgtacagcgacaaggacgtgcaagctcgaaggtatataaagggaataatgaatcagcttggcctgtccattcgtgaagacgctgttggcaacatttttgggcgctgggagggttctgaggcaggactaggagcggttgcaactggttctcatgttgacgcaatcccattctcaggcaaatatgatggggtggttggtgtcctgggtgctcttgaggcaattagaatgctgaaaaggtctggtttccagccaaaaagatctttggaggttattatgtttacatcggaggagcctacaagatttggaattagctgcttgggaagccgcctaatggcagggagtgaaggactggctcgatccctcaaagaaacagttgacaatcagaatgtgtcattttttgatgctgcagactctgctggctacaagatgcatcctgaggagctacataatgtgtttttgaagaaagacgactattttgcttttgtagaattgcacattgaacagggccccattttggaaaaagaaggtatcaaaattggcgttgtcactgctattgctgctcctgcaagtattaaggtggagtttgaagggaaggggggccatgctggagcagtgctcatgcctgcaagaaatgatgctggactggcggcagctgagttggcattagcagttgagaaacacgttttggaatcaggatcaattgatactgttgggacagttggtattctgcagctacatccaggagcaatcaatagcatcccaagtaaatcgcatgtggaaattgatgtgagagacattgatgagaagaggaggaataatgtcattgagaaggttcaccaatccgcaattgagatatcaaagaaccgtggcgtgctattatcagagttcaagatcataaatcaggatccacctgctctatctgacaaatcagtcatcagcgcaatggaatttgctgcaaaacagttgaacctcgaatataagctgatgattagcagagcttatcatgattcactcttcatggccagaatatcaccaatgggtatgatcttcattccatgttacaaaggttacagccacaagcccgaagaatatgcgtcaccagaggacatggcgaacggtgtgaaggtgcttgccttggcaatggccagattatccctgcagtgagcttagacatggaggaaggaaggaatcaatgagttcagatcacccaacaccttcgtgttcctgcaatggaaacacgatgtacagcaattcctcgcgtggcaaaacaaagccatggtgattcttcaggaataataaattaataacatttggaagccatggtgattcttcaggaataatagattgataacatttggatgggcagcagaaaactagtccgtatgttttcagcgagggaataaataaataaatttctgatggcatcatcatgaatctgaatgtatcctatgttcttgcttgaatttttctttttgaaggaaataataatagtcgatggcaaaatttagc

SEQ ID NO: 28358 - DNA, 1501 bp, Oryza sativa
  ref <308>: DATABASE ACCESSION NUMBER: AK103800
  ref <309>: DATABASE ENTRY DATE: 2002-08-28
gaagcgacgaacacatctcatcacacccgtcacctctcctctcccccaaatctcgcgctccgctcctgctcctgctcctgccatggaggaggctcaggttgtggaatccaaggacggaacgatctcagttgcttcagcatttgctggtcatcaggaagccgtacaagacagggatcacaaatttttgtctaaagcagttgaagaagcttaccaaggagtagattgtggccatggaggtccatttggtgcagttgttgtccgtaatgatgagatagtagttagttgccataacatggttttggattacactgatccaactgcgcatgctgaagtaactgcaataagagaggtaacttgccctgtgtactgtggctaccagctacatggtgtttactctttacatttcgttgatacttagcattctttagtagtggcctcatctctgctgattaaatgtgcctgattcacgctctaacttaaaactagaatgcaaatatactggacagccaaatagattcaccttttcattttgatattagtgccgcagcttgaaaaatatactagatgttatcttcacaagttacaacagctaggatggtgtatgcttgtccttttcctttcatcctttgtatcagaacatcagaggtactcaattctaactatagaaaagtgctgtaaatagctatgttttggcaggtggtaacttaaaatacagagatcttattggcctaaaaattgtttagattccagtaaaacaaggtcatgagtgaatacagaaattcctagtttttgttttgcactctcagaatttctttggctgatggtgtaaatggagtagataatttcaagctggcggataaaacaacagaaatgctttaaaaaataaaacaagctcttatttattaggaacaattcactgagacactgattggcagcagtatgactattgtattctttgccagccaatttgggccgataatgcatttaacattagtttctttccattgtttggttatcttttcacataataaatgtttttctgtgctataggcttgcaaaaagcttggaaaaattgagttgtcagactgtgaaatgtatgcatcatgtgaaccttgcccaatgtgtttcggcgctgtgcatctatcacggattaagaggctggtgtatggagccaaggcagaagctgctattgccattggattcgatgacttcattgctgatgctttgaggggaactgcttactaccagaaggccaacttggagataaggcgggcagatggcaatggagccctgattgctgaacaagtcttcgagaacactaaggagaagtttcggatgtactaattgtaagtaaatacattgtgggatttcacatcgcaaaagttccaaacgttcagaagtcagaaagaataatgtaaccttcggcattctgccattagtggaccataagctatcaatttaaatatatgttactctcattatgaggaaagaaaattgttct

SEQ ID NO: 28359 - DNA, 1512 bp, Oryza sativa
  ref <308>: DATABASE ACCESSION NUMBER: AK103801
  ref <309>: DATABASE ENTRY DATE: 2002-08-28
gaagtaaacccaaagccgccaactgcttctctcgccgccgccgccgccgccgccgccgctcaccgtcgccggagaagagggcaggaggaggaggaggaggaggaggggggagccatggcgccggagcccgaggacgacatcatgaacgagaagaacccgcgcccgctcgacgaggacgacatcgccctcctcaagacctacggtcttggaccttactcgaccagcattaagaaggttgaggaggaaatcaaagagatggcgaagaagataaatgatctctgtggaattaaagagtctgacactggattggctccacctagccagtgggaccttgtatccgataagcagatgatgcaggaggagcaacccctgcaggttgcaagatgcacaaagatcatcagccctaacacggacgatgctaaatatgtcatcaatgtcaagcaaattgcgaagtttgtggttgggttgggcgacaaggtctcccccactgatatcgaggaaggaatgcgggttggagttggtcgaaacaagtaccaaattcaaattcctttgccaccaaagattgatcccagcgttaccatgatgactgtggaagaaaaaccagatgtgacttacaatgatgttggtggatgcaaggagcagattgagaagatgcgtgaggtggttgagcttcctatgcttcacccagaaaagtttgtcaaacttggtatcgatcctcctaagggagtactgtgttatggccctcctggaactgggaaaacacttcttgctagggcagtggccaaccgcacggatgcttgctttattcgagtcataggaagtgagctagttcagaagtatgttggtgagggggcccgcatggttcgggaactcttccaaatggcacgatcgaagaaggcttgcattgtcttctttgatgaagtcgatgccatcggtggtgctcgctttgacgatggtgttggtggtgacaatgaggtccagcgcactatgcttgagattgttaatcagcttgatggatttgatgccaggggaaacatcaaggtcctcatggccaccaacaggcccgataccttggaccctgcattactacgtccagggcgtctggacaggaaagttgagtttggcctgccagacctggagggccggacccagatcttcaagatccacactcgcaccatgaactgcgagcgggacatccggtttgagctgctcgctcgcctctgccccaactccactggggccgacatacggagtgtgtgcacggaggctggcatgtacgccatccgcgctcgcaggaagacggtgacagagaaggatttcttggacgcggtgaataaggtgatcaagggttaccaaaagttcagcgcaacgcccaagtatatggtgtacaactagagggcactgaccttgatttcccgtttcttcctgtgcccctcctttggaccttcagaaagattgagcctgtttgtttccctttcttactcaaaagaaacctgggctgttttctgcatc

SEQ ID NO: 28360 - DNA, 1428 bp, Oryza sativa
  ref <308>: DATABASE ACCESSION NUMBER: AK103802
  ref <309>: DATABASE ENTRY DATE: 2002-08-28
gaacggcgttccccgcctccttaaacagttaaacctacccaaatccccaaattccgccgccgcctcctcctcctcctctcgccgccggcgagaaccacggcgaggtgaccaaccaaccccaacccccatcgcgccccccgccactgcctcttctccccccgcccgcccgggattccgtccatggaccggccgaggaggccggggagcgaccgccggtaccctccgctgcggttcaggaagcggaagaggagcagcagcgacagtagaagcagcaagctcaacaacaagccagggtctgataagtgggaggatgtctgttcaatttgtgatgatggtggtgattttctttgctgtgagggcagatgtttgaggtctttccacgcaacagaggaacacattacagaaataaaccagtgcacaacccttgggctaactgaagaacaatggaagatctttaggcaaaatgatgaaaagagtgaaccgctatatatatgcaagaactgtaagtataatcagcatcagtgtttctcgtgtggattgctgggttcttcagacttgtcatcaggggctgaggtattccaatgtgaagatgaaaaatgtggacacttttaccatccgaagtgtctagctagactactctaccctgatagcagtatgcagcccttaaattttgaggaggaagttgcccgtggactgaaattcctttgtccggtgcataaatgccatgtatgcaagggaggagagaacaagaatgacatggaaaatcaatttgcagtatgcagacgctgtccaactgtataccacaggaagtgcttaccaagtgacatagtctttgaagatgatgaaagtaatggtatcgtgcaaagggcgtgggatgacgtacttcgtgatcaaattttgatctactgcatgaagcatgagattgatccagaactgggaactcccgcgaggaaccacattatctttcctgattgcaaaaaccttttaacacgtggtccttcgaagcccaaagggcaagaagacgcacccgcagtactagatatacctgaagaagacatgtcgcctgatcattcctccgaaccatcccagccgcctccacagccggcagctgaaactgatcaaactgaccaggatctttccaatggtttcaattcgtttgcgccgaaggccttgttcccacttccatatccaggctcctgtggttggcttgatgactgaccatccaacctcactcatctagataaatcctaacacatatatacgccagcagattggtgtaattcctgctagaacactttgttcggaaattgggaagttagaatgtgcaacgcaatctactctgttgaactgtcacgtgctaagccacttgtgtgtattgttatcattattatgttattattttaatggaagataacattgcggttgacc

SEQ ID NO: 28361 - DNA, 1977 bp, Oryza sativa
  ref <308>: DATABASE ACCESSION NUMBER: AK103803
  ref <309>: DATABASE ENTRY DATE: 2002-08-28
gccggagcgcagcagtgtgagtagtggtaagccatggaccgcgtgcagctcctcctcgtcggaccaagttgcggaggcggtagagttaatgaaggaaatggaggagcgagggtttgctgttgatttggtcacagtaacatcattgctcatagggtttaacaagagtagacgttgggacttggaagagcagatagttaagttcattagagatagttctgtgttgccagatgctattcgatggaaatcaaatatgatgtctgctttgcaaggaccacaggacagagagaaagatggaacatcaatttttccctttgatggcaatattgatgatgtgatgagtttggtcaatcccgtggtatgcactggtgcgaatgaagaaacaccaaaagatgagcccaaggatgattggtctttgtcaccgcacctagatcatcttgctaaacatgctgatcatttgaatagttctgctatattcacaattgacagagggcagagggtgcaaggtatgggagccaagacatttgatgctgacatggttaatacatatatgtcaatttttttagcgaaagggaagttgagtgtagcttgcaagttgtttgagatcttcacaactctgggaaggaaaggaacgagttatacatacaattcattgatgacgtcatttgtcaagaaagggtatttgaaacaggtatgggcaattcttcatgagagaggtggacagctctgccccaatgatatagctacatacaatctgatcattcaaggccttggtcagatgggaaaagcagaggttgctggctcgattattagtgaactgtcaaagaaaggtgtttacatggacatcgtcatgtataacacattgatcaatcaattgggaaaggccgggaaggttgacgaagcaaactctttgcttgagcagataattgggaggggcataaaaccagatgttgtcacttttaataccttgatcaatattaatgcaaaagctggtagattaaaggaagctgacaagtatttgaggaagatgattgcagaaggaattgctccgaactatgccacggaaacaatattggttttccttgataaggagattgaaaagaaaaggcagcagcctagatgacgtgatgaaataccaaacatcacttattaagacaggtgtttggccagatgacatttgagagagtggatttaaaactccacaagctttgcctcgtcaaccaggtcacgttcattatcacatcaatcaaacttcaagtcagaagagtcaagaagagcaggtcctagagagacgatgcagttcaccgaccacaaaagcaaaattagagaagagagattgtacttgttgatatattgctcatttgttctgtgaagctgatgctccatttaatatagtaacattgcttaggtttcacagtctgctggaaccaattggtggccatggttgaaatttaaaggttctgattttctatgagctttttgacaggctatgggcatggttggccacttctgaggtgagaaaaaagctgtcaaatggccactgaaacaagaagagcaaaccagaccatgggcattgttgatgttaaagcaacaacaattatattggcacaattacacagcccacatcagcgacctcatgctagaagatattgggctacacctaaagtgtgactaacataaccttcaaggcaaaggttgcagctgtactgctgaagtgctgattggatgccagaggctggggccaaccgcacgtttcatcagtgaaacggtgtaggagtcacggacatcagcgtccgtccaaatggagcccaggtaaactgtttcgttggaaattttgaaaagctttctgttcttgcgagaattgaacccccttttttttgtttatttctaaaaaacgtgttctaaatgagtgcccgggcaaggttttgtccgtcccaacgtgccatggtgttaatgaatgcgtgaatctttacgtcttgc

SEQ ID NO: 28362 - DNA, 2254 bp, Oryza sativa
  ref <308>: DATABASE ACCESSION NUMBER: AK103804
  ref <309>: DATABASE ENTRY DATE: 2002-08-28
gcctaaaccctaaccccagccaacgcgtcttcctgcccatccccggcggcggcggcggcgtcagcggcggaggtcggcgactagtaccagcgaggaggaggagaagaaggcaaccggagatgccgctggggcaacgcgcgggggacaagagcgagtcccgctactgcggggtggaggtgctcgacttccccgccggcgaggagctccccgccgtcctctcccactccctctcctcctccttcgacttcctcctcgcccccctcgttgatcccgactaccggccgacgcccgggtccgtcctccccgtggcggcgtcggacctcgtcctcggcccggcccagtggagcagccacatcgtcgggaagatcagtgagtggattgatttggatgcggaggacgagcaactccggttggactccgagatcactctgaagcaggagattgcgtgggcgtctcatctctcgttgcaggcgtgcgttcttcctcctcccaagagatcttcttgtgccaactatgctagagttgtgaatcatattttgcaaggcctgaccaatttgcagttgtggcttaggatacctctggagaagtctgaacctatggatgaagaccatgatggagcaaaagataatagcgacatgagtgataccgtagactcttgggaatggtggaattcatttagactattatgtgagcatagcagtcaactgtgtgtggcgcttgatgttttgagcacactgccatctatgaattcactagggcggtggtttggggagcctgtaagagctgcaattcttcaaacaaatgcttttctgacaaatgccagaggttatccttgcctgtcaaagcgccaccagaagctgcttactggattttttaaccattcggttcaggttataatatctgggagatcaaatcataacgtatcccaaggaggagtgctctcaggtgatgaaaaccacactgaagatactgctgttcggcatgcattgagcccataccttgactacattgcttacatatatcagaggatggacccacttcctgaacaggaacgctttgagatcaattatagggattttctgcaatctcctctccagcctctaatggacaatttggaagctcagacatacgagacttttgagaaagataccgtgaaatatacccagtatcaaagagcaattgctaaggcattggttgatagagtttccgatgatgatgtctcaacaacaaaaacagtgctgatggttgttggagcaggccgggggccactagtgagagcgtcgttacaggctgctgaggaaactggccgcaagctaaaagtatacgccgtcgagaaaaatcctaatgctgttatcacccttcacagtttgatcaaattggaaggatgggaaagcttggttactataatttcaagtgacatgcggtgctgggaagcccctgagaaagcagatattttggtcagtgagttgcttggttcctttggtgataatgaactttctcccgagtgtctagatggtgctcagagattcttgaagccagatgggatttctattccttcatcatacactagctttattgaacctataacagcatcaaaactacacaacgatatcaaagcacataaagatattgcacattttgaaactgcatatgttgtcaaactacaccgaatagcaagacttgcaccaacacaatcggtttttacttttgatcatccaaatccctcaccaaatgctagtaaccaaaggtataccaagttgaaatttgagataccacaagagacgggatcatgcctcgtgcacggatttgctggatattttgatgccgtattgtataaagatgttcatcttggaattgaaccaaacacggctacaccaaacatgtttagctggttcccgatcttcttcccattgagaaagcccatctacgtaccgtcgaagacgcctatagaagtgcacttttggcgatgctgcggtgcaacaaaggtgtggtacgagtgggctgtgacggcaccttctccatcaccaatccataacagcaatggtcgatcatattgggtcggcctataagtaaagccatgaagccagttttgttttgttccgattttctttttagggattctttttgttgtcttttgaaagagaggagagaacagattccattgtatggtttcttgtgtggagtgactctttatcagatatgctgcgtgggagattgattcttcagccttaaagcaagtgataactgacagtgg

SEQ ID NO: 28363 - DNA, 3005 bp, Oryza sativa
  ref <308>: DATABASE ACCESSION NUMBER: AK103805
  ref <309>: DATABASE ENTRY DATE: 2002-08-28
gaaccctccgtcgccgcagccggagccggagccgcaggtccgccctatctccagccgctcgtgcccctccccctcttcctcggatccggccgtgctgctctcccttccttttgggggctgcctctgcccggtgtgtgagcccgagcccgacccgttggcgggggtccgtctgcggcctcccgatggcggggctcgaggagctgaagaagaagctgcagcccctgctgttcgacgacccggacaagggcggcgtcagtagcagggtgcctctcccggaggacacctgcgactcctacgtgatcattgggtgagtataacatcaatgagcatggctttcataaacgaagcactgggccagaggagtcagattctggtgaaaaggcataccgatgtgcctctcatgatatgcacatatttggccccattggtaatggtgcaagcagtgttgtgcagagagctgtttttataccagttcatcgaattttggccttgaagaagataaatatatttgagaaggagaagagacaacaaattctgaatgagatgagaacattatgtgaagcatgttgttatattggtttagttgaattccagggtgcattctacatgcctgattctggacaaataagcatcgcccttgaatacatggatggtgggtccttagctaatgttataaagattaagaaatcaataccagaaccagttcttgcacatatgctgcagaaagtattgctcggtttgcgctacttgcatgaagtaagacatctagtgcatagagatataaagccagcaaatttgctggtaaatctcaagggtgaggcaaagataacagattttggagtgagtgctggtttggataatacgatggccatgtgtgctacctttgtaggcacagtcacatatatgtcacctgagagaattcgtaacgagaactactcttatgctgctgatatttggagtcttggactagcaatattggagtgtgctactggtaaatttccatataatgtgaatgaaggcccagccaacctcatgctgcagattctggatgatccatcaccaacaccaccaaaagattcttattcatctgagttttgttcgttcatcaatgactgcttgcaaaaagacgctgatgcaaggccttcgtgtgagcagcttttgtcacacccattcatcaagaggtatgaaaacactaccgtggacttggtagcttatgtcaaaagtattgttgatccaacagaaagattaaagcaaatagcagagatgcttgccgtacattactacctcctctttaacggcactgatgggatttggcattatatgaagacattctacatggaagaatcaactttcaggtacctttggtgatattaaacctattcaggattgtaaaaaaatatctgtagtacgctatgtagcatcattttgctgtttaagggttcactaacatagagtttctcaagaaaaagcaaacctgtatatagagtgtagcccatagatcagttgtgtttccgtaattaatttctaatccagatactagcaggccatcagtatgtggccactgattagggccatgtatctgaatcaactgtgtccgaatcttatttgaatcctattttggacccagttcattcaaaaccaaagaaagttggcttgctaagatttttcttccatttttttcaatcaatattgcggttctgtttttctgacagcataatgcgggaactggctttaatgttggcttgtttctgaaatttagacagaactaggtgaattatcagtcataatttgcgtaagccatgctttcctctttacttttagattgcaaggagtcatgactggctattactgccagagtgcgagtttctcaaccattatccaacaaacatatgtattctacttttatgatttagactatcactttcctgcaagggagcatccagtattttcagccaccataaatcacatgatattttgtatcatctattctgttatttcagtttctcagggaatgtgtatgttggccaaagtgacatatttgatactttatcaaatatacgaaagaagttaaaaggtgattgtcctcgagagaaaattgttcatgttgttgagaagctacactgtcgtgctcacggagaaacaggaatagctatacgtgtgtctggatcgttcattgtgggaaaccaatttctaatatgtggtgaagggttgcaagctgaagggatgccaagcttggaggaactctccatcgatattccaagcaagcgggtaggtcagttccgtgagcaatttatcatggaaccaggaagttccatgggatgctactacatattaaggcaagatctatacatcatccaagcctgaaacatgtataatttgtaaggtcagtttcataaactcatgtcagcgattttttgcacgaaaacaatcatgtcttcaatgctcttctattatttttgcaattgcaacaaattttattttctacattctgatattgcctctgttatcaactgtgctttggtagattgatgatgttgataatgcattctctctagggattgctttgtttgcagttaaatcctatttatgctgtcatggtgccacggtgggattcagatggttcaggattgttgaaagttgctgatgaagactatacaatccacgtctcaagacacttaactttctctaagtaatatcgtgaagtcttctggcttcatcattttatgacttcttgctacgagaaaatttgtaatgcaaaacatttcctattgttgtctgtagggaaattaagacatcaaatatatatatattttgcataggtctgtcctgtggggaaattgtcttgtttctattgacccactatcgggaagttggggtagtctctctgttgtagattagaatattcttatatgttatgctaagtgtaaaataattcaatgtagggctgacatgctggtgtgtggggtctcaacccagattacaatgagcatattatggtcatgttg

SEQ ID NO: 28364 - DNA, 1613 bp, Oryza sativa
  ref <308>: DATABASE ACCESSION NUMBER: AK103806
  ref <309>: DATABASE ENTRY DATE: 2002-08-28
gattccttcctcctctcgcgatcgccggcgcgccatgcattcccagacgccggcgaagcccaaggccagccctgtccgtagccgcccgcagctgcctgcttctgctgctgctgcggcggcggcggcggtggagcctccgttgcagctgcagcagctccacacaacccctcctccaccgccgccgccgctgatgccggcgggtggagaagtgaccggcggtagcaaggcggccaagaagcggggcatgcagaagctgctcaagtcggcgttcaagcgcggcgaccaccacgcgccggcgggcgcttcctctgggggtggtgagcaatccggcgacgacgaggcggcggcggccgcagcgcaggacctcagccggtcgtcgtcgtcgtccaccggcgggagcagcgggaggaaggggcgcaagggcgacagctccgtcgaaggcgacctttctagtcgtgacagcctagagctacaagagtccaagaatgtcaagggggcagccgcagcgctgcgaaacgccaagctcagccactcctacgaggcattcccatgggagaggaagatgagggatcttctgcaggtggccggcgccagcggcttcctgtccctgctgcttctgcctcgggcgaccgacgagacccagaccaagttccactccctggaggacacactggccagggctgagtcctggctcatgtcctcccagatgtcaggtgtcccaattgtccccatgaatgtgcagacagaagcacttctcaccaagatatgtggggacgtggcatcgtcaacggtgaacatgaactccctaggtgaccttgcaaacatggcaacggtgagcctctacgggtttgaggactaccatggcgtcgacattggcgtcgtcagggcgatccggctatggtatgctccttttgcaggggagatggcactggagatcaaactgcaaccgggcgacaccaggctgggttttgccatcagccgcactgaagaggggttcatctacgtgtcgtcggtggcggaggagagcacgccgggggtggcgtcgacgcggtcggggcttctggagctgtaccggcgcgcgcggcgggcgtcgaagctcctcgtcgtctcccgcgtcggcgacgacaaggtgctcccctgggccacctccaccgccggcgacatccgctgcttcgacaccgtctcgctcagccagcggctgtcgctgcaccgccacgcgctccgccccgtcaccctccacttcctcatgtgggagcgcctcccgcccgccgccgtcatcaggggcggcgccgccgccaggccgaccgtgcagatgatcgtgcagggcgacgaggagggaggaggggacgcggccgacgagtccaccgacgaggtcggcttcgacggcgacgggccggagatcgtgctcagcggcaaggacgactccgacgaccgctcattcaggttccagaacatcggcctcccggatagctggctgtgacccgagtttttactttttacgttgctagttcgttcgctcgatcgcctcatgatgaacactgatcgattagcccccttgcagtaataatggaacataaactcgtcgattaaccattcaaaatccttcgttcccc

SEQ ID NO: 28365 - DNA, 1205 bp, Oryza sativa
  ref <308>: DATABASE ACCESSION NUMBER: AK103807
  ref <309>: DATABASE ENTRY DATE: 2002-08-28
tttcttcttcagtgtactctgcctttataacaccctactcctctctctcacctccaccatctagctcactcacacagtctccactcacacgcattgcagaggagaggcgacaatggaggggaaggaggaggacgtgcggctgggggcgaacaggtactcggagaggcagccgatagggacggcggcgcagggcgccggggacgacaaggactacaaggagccgccgccggcgccgctgttcgagccaggggagctcaagtcgtggtctttctaccgggccgggatcgccgagttcgtcgccaccttcctcttcctctacatcaccatcctcaccgtcatgggggtctccaagtcctcctccaagtgcgccaccgtcggcatccagggcatcgcctggtccttcggaggcatgatcttcgcgctcgtctactgcaccgccggcatctccggaggacacatcaacccagcagttacttttgggctgttcttggccaggaagctgtccctgacccgggccatcttctacatagtgatgcaatgcctaggggccatctgcggagctggagttgtgaagggcttccagcagggtctgtacatgggcaatggcggtggtgccaatgtagttgccagtggctacaccaagggtgacggtcttggtgctgagattgttggcaccttcatcctggtctacaccgtcttctcagccactgatgccaagaggaatgccagggactcacatgttcctatccttgcccaactgccaattggttttgcggtgttcctggtccacctggccaccatccccatcaccggtactggcatcaacccagccaggagccttggcgctgccatcatctacaacaaggaccatgcctggaatgaccattggatcttctgggttggtcccttcgttggcgctgccctggctgccatctaccaccaggtgatcatcagggcgatcccattcaagagcaggtcttaagccccgcgccgccgctgcgcagccgacgacatgcaacgcaatcgtgatgtcctgtttcccgcgcgctactgctgcgcatctgtcgattccctctatctctagtccccaagatgtttttcctatctgaaccctgaacaactcaatcgtgtaatccagtactcagtcactgtatgtttttatgtgatggagatcttaattcttaagttatcatctctgttgctgg

SEQ ID NO: 28366 - DNA, 2066 bp, Oryza sativa
  ref <308>: DATABASE ACCESSION NUMBER: AK103808
  ref <309>: DATABASE ENTRY DATE: 2002-08-28
gacctctactccattcctctttctttgttcatcatcaaggaaggaagggcaaggccgcaagggaagacacggatcggcggccatggcggcggccatcctccgcttcttcttcttcttcttcttcttcatcctgcccgcctccctcaccgccaccgcctccacctccacctcatcatgccctgatggttggcaaatcactcctgctctcgacaagtgtttcatctacatacctacacccctttcttgggacagatccgaggctctctgccgcaacaacttcaccgctcatttggctgccctatcatcacttcaagacctcaatcttgcaaagtctctctgtggaccttccccctctggatgctgggtcggaggtcatcgcaacaacactgcctcggcttttgcttggaaatggtccgatgattcatcttcttggaatgatactgccttccctgctgaccaattgcgcgccaactgcagcactactgggtgtgctcttgctaccaccaatgatgcatgcactttggttaccaatacccatgccgcacttaccgcaaaaagatgcagcgactcacatggactcatctgtatgatcaatcatgaagaccgatgctaccatgatcactgccacaaggagtatttcatagtgctcgtcgttgtaagcggattcattctcttgaccactctagcagtagtagtttggctacttgtctataggcgaagcaagaggaggagaagatcgcgtgaaggttccagtacttcagctaccgcgttagttccaccgctatggaaagtgttcaccagtgaagaacttagatcaatcacaaagaacttcagtgagggcaaccggcttcctgggaatgcaaagactggtggaacctatagcggaattttgccagatggatccagagtagcaatcaagaggctgaagagatcaagcctacaaaggaaaaaagatttctactctgagattgggagagttgcaaagctgtatcatcctaatttagttgcagtaaaaggatgttgttacgatcatggtgaccgctttattgtttatgagtttgttgccaatgggccgttggatgtttggctacatcatgtccctagaggagggcggtgccttgattggccaatgaggatgagagttgctacaactcttgcacaagggatcgcatttttgcatgacaaggtgaagccgcaggtcgtgcaccgtgatatccgtgcaagcaacgtgctacttgacgaggaatttggttcccatctgatgggggttgggctgtccaagtttgtaccatgggaagtaatgcacgagaggactgtgaaggctgcaacctatgggtaccttgctcctgaattcatatacaggaatgaactgacaacaaagagcgatgtctacagctttggtgtgctccttctagagatcatcagtggccgtcggcctactcagtctgtcgagtctgttggatggcagactatatttgagtgggcaacacctctagtccagtcacaccggtacctagagctgttagacccactgattcaggagttgccagatgtaggtgtcatccagaaagttgttgacttggtctatgcctgcacccagcatgtcccttcggtgcgaccaaggatgtctcatgtggtccatcagctccagcaacttgagctaaagtcagcagcatcagaacaactgagcggcacaagcactagcgctacatctccaatgttaccattggaggttcggactcctcgctgaaatccactgctagaggaaaaccaattcagtagtttccgatgtcagtcagctggcagcacatctattgaagtgtctgcttaactagtactaggagaagtacttgaggggagaagttaggacccccataggccaaaccaaattaacctttgtgtagcaatgggctgtttgttgttaaaatggtcattgcccatgtgtacttgagttggcctctatgtagaagatatcagtttagtgagcacaaatttctgaatggttgtaatagtgaccttatctatatatctacatttgatagaaggtgtgataatatcttcctgtc

SEQ ID NO: 28367 - DNA, 796 bp, Oryza sativa
  ref <308>: DATABASE ACCESSION NUMBER: AK103809
  ref <309>: DATABASE ENTRY DATE: 2002-08-28
ggcacacctttccccccctctctccctccctcctccgccatccctagcagccgccccgcacccgcgcccgcaccatgacgagctcctcctccccttcccgcaaggtgctgagcaagatcgcgtgcaaccggctgcagaaggagctcgcggagtggcaggtcaaccctccctccggcttcaagcacaaggtcaccgacaatctccagaggtgggtcatcgaggtcgcgggggctgcgggcacgctctatgccggagagacataccaattgcaggtggacttccctgagcattaccccatggaggctccccaggtcatatttcttcatccagcgccaatgcatccgcacatttacagcaatgggcatatctgtttagatatattgtatgactcgtggtcaccggcgatgaccgttagttctgtttgtatcagtatcttgtccatgttgtcaagctcaccagcaaagcaacgtcctgccgacaatgatcgctatgtcaggaactgccgcaatgggaggtcgccgaaggagaccaggtggtggtttcatgatgacaaagtgtgattggttccaacttccggttggcttctcctcagcaacccttttacccgccaccctacctttacatggcgtcctccatgggagatgatttaggcatatttttaagcgatctatttgaccgcaaattaacatgcctttgtggtttgtaaatgaatgtgaacctgtatcgaatcctagacttattaattactataccttggatatatagaataattacatgtgtatcttgcttattgcgc

SEQ ID NO: 28368 - DNA, 2127 bp, Oryza sativa
  ref <308>: DATABASE ACCESSION NUMBER: AK103810
  ref <309>: DATABASE ENTRY DATE: 2002-08-28
gaagccctcgatgctgtcgtctcaaaggatttcacgcacgaagcagtccggccgccttgctagatctgcagcctcgagaagatgccaccatggctgctagcatttgattcgttgataatatgaacaaaatctacctggtgtggatatctttgtatgcactgcggatccacaatcagagccaccaagccttgtcatctctaccatcctatcagttatggcatacaattacccatcagaaaaaataagtgtgtacctttccgatgatggaggttcaattcttactttctatgctttatgggaggcctccatatttgcaaagaaatggctaccattctgcaaaagatataacattgagccaaggtcaccagctgcttacttctcagagtcaaaagtgcatcacaatctgtgcatcccaaaagaatgggcactgatcaagaacctgtatgaagaaatgagagagagaattgatacagctaccatgtcaggaaaaattcctgaagaaatgaagctaaagcataaaggatttgatgaatggaactcagattttactttgaaaaatcaccagccaattgttcagattctgatagatgggaaaaaccgaaatgcaattgatgatgatagaaatgtgctaccaacaatggtatacgtggcgcgcgagaagaggcctcagtaccaccataacttcaaagctggggcattgaacgctttgataagggtatcatcagtgataagtgacagccctgttatcttgaacgtggactgtgatatgtattccaacaatagtgattcaatcagagatgcgttatgcttcttcctcgatgaagaaatgggccagaaaattggatttgtgcagtaccctcagatcttcaacaatatgacccaaaatgatatatatggaaactctttcaatgttagctatcatgtggagatgtgtggtttagacagtgttggtggttgtctctacattggcacaggatgcttccacagaagagagatcctttgtggtaggatattcagcaaagactacaaggaaaactggaacagaggaataaaggaaagaggaaaagagaacataaatgagattgaggagaaggcaacatctttagtaacttgcacttatgagcataggacacagtggggtaatgacattggagtgaaatacggtttcccggcagaggatatcattactggattggcaatacattgcagaggatgggagtcagccttcataaatcctaaaagagcagcatttttgggtttagccccatcaacacttgcccagaatatactgcaacataagagatggagtgagggtaatctcacaatttttctttcgaagtactgctccttcttgtttggacatggaaaaatcaagttacaactacagatgggctactgcatatgtggattatgggcagccaactcactgcctacactctattatgttgtgattccatcactaggtcttgttaagggcacccccctattcccacagattatgagtccatgggctacacccttcatatatgtattttgtgtgaagaccctctacggtctttatgaggcattattatctggggatacattgaaaggatggtggaatggacaaaggatgtggatggtgaaaagcattacctcatatctatatggcttcattgacaccatccgaaaatgtgtaggaatgtcaaagatgtcatttgaagttacagcaaaggtaagcggtcacgatgaagcaaagaggtatgagcaagaaatcctagaatttgggtcatcgtctcctgaatatgtgatcatcgcaaccgtcgcattactgaacttcgtctgcctagttggagggttaagtcaaataatggcaggtgtctggaatatgccatggaatgtgtttttaccccaggccatcctctgtggaatgatagtaatcattaatatgccaatttatgaggcaatgttcctaagaaaggacaatgggagaataccaacagcagtcacactagcttcaattggctttgtaatgttggcattcctagtaccaatagtttgaggtccctaaaatgggatttgatgccttataaaacattgggtgtttctgatgatgatcatgaaaataaattgcattgccatttcatg

SEQ ID NO: 28369 - DNA, 1494 bp, Oryza sativa
  ref <308>: DATABASE ACCESSION NUMBER: AK103811
  ref <309>: DATABASE ENTRY DATE: 2002-08-28
gagcctaaactccatccacagtatccactccgccgccaccaccgtccccttcctcctcctcctcctcctcctcccacccgccgccgcggccgccgctgctcatcaccatctccttcaccttctctttccccacactcacgccgccgcctaccacgccgtcgtcgtccttctccgggaacggccgggaactgcacctccattcccaccacctcagccgagcccctcccctctcgacctctcgcggctctctcccaacgctctctctctctctctctctcgctgtctctctccctcccttttctcaagccgtctcatggcgcctgcccacggtcggcggctggccagcaaaggcggcagcggcaaccacgccctcccctccgccagatccggcgggagggcaggcgcagtgagagggcctcctccgacgtcgaccgcaagacggcctccgcgccgctatctcatcttcccgttctctccccaccccgagcgatccatccattccccctcccctcaagcgattccccggttccccttcgcaatccgcactcaactcccttccaagatccgattccccaaccactgctcagtcgcctaaaccctagcgccgccatggattcggctacgctctcgcccaccaccaccagcacgcagcagctcgccgccgcgctagatctgggactgggaggatgaggggtgggtgggtgtggctgcttctgcggtcatcgacgccgcccccgcctcctcctgctccttgttattctcctccctagcatccacgatcacgctgcctccagccctctactggtacatccacgctacctccagccctccagccatctaacccgggtcctgcacatagctcccctgaggaacgccgccatcatcccttctgaccacatcaacctccacctgggattctagatttcaaggaagcagaaatgggggcaaaggggatgggcacctggttgttcttgttcttttctgatggggcagatgggatggagacttgtgggtggagccgtggaggcgacaagggtttattgcttcgtgcacaaggttcctgtctgcggcgaatgcatccgcttcccggagcatcagttatgcgtggttggcacttttagtggccagagtattttttttttgcgttggttgctggaacgcaggattttttggcactagttgctgactgctggcaggatgcaggccggaagtgcagcggctgcttggtggaatttttttgctggctactggcaagatgcacgccgccgaaacttagtggctgctaggtggaattttttggtgcaggaacttggcactacctgtaggaactttgtagtcagctgggacttgtgtagttggatggtggatggatcattttgtattcatgttttgtgcttttgtatggaaatatgttggaaactgtattttggaacttgcttttgtatgggctagaaaattaattatggctggaatgtgattataatataattatgc

SEQ ID NO: 28370 - DNA, 2090 bp, Oryza sativa
  ref <308>: DATABASE ACCESSION NUMBER: AK103812
  ref <309>: DATABASE ENTRY DATE: 2002-08-28
gagtagcaaaccctcacctacttctccccatctctctcgctccgcttctgtgtttccggcggaggcacggccacccccacccttctcccccacctcgcctcgcctcgcctcctcctcgggctcgccgccggcgagcagggcaccgtggggggacacggcgtcgacgggcctcctctcctccctgaccccgccctctagccttctcccccttgcgtgcggccttctcgcacgcgcgcgcgggtaccacgagcatcccggtgatcgaaaaatcgaaatcgaagccaccgccgcgtccgtttcttcactctccgtctttccaagcagcatgacgagaggcgagaaggggatgcagcccaagatcagtgcgttcttcaagcgtcaggcccccgagcccgagacgagcaggttcttcatcttggtcccctcttcaaatctgttagctgtagcgatccggtaccaaatattgccggattccattctagtagcaaatttctgcaatattccatcaattagagcgaatattaaaatcgctcgtcaggttggaaaaaaatggttgttgatttagttctcgttaattcccaagcatgctgtccgacattggcatgttcctggattcagatttgataatggactgatcaatctttgttgatttggtaagtggcggtgacacgcatagggaaggaacctgcgggacggaggtgaagaggcccaagagctgtgcggatggcaaggtcctcaacaagaagaggaactacgcgcagttccacctggagcttgggcagcccgattttctcctccacatgtgctcggtttgtggcatgatgtatgcccgcgggaacgacgacgatgagaaggctcacaaggcataccacaagagttacttcgagggtgtcccgttcaaggtgttgcacctgatgtatatttgtgaatctcactcttctgttcatctcgtgttataaatttctgtgaagagtttatgacaaatgtttgagttgcagggttggcgcaatgaaaccgtggtcgcgaggtctgaaggtggggatcggataattcttgtgactgatgaaaattcatgtgctcggaacagcaaggtattttgcctgaatgactaactgtattgcctagatagttgaaagaaatcactagttggggtcttggggaaatgaatattgaaaagagtgggttcctcatagttctaaactgtagaatgtgtgtctttactaactgcgaagtttctgatccaattttgcaaccactttacatttacgagaagttcagaagcagattgcagacattttatgattatgtaatgtcatgtgaatatttcaggtccaggaggtgatcaaagtggtacagaaggagctggggtttggtgaaggtcagctccttcacaagctttgtaaggtatatttgttcatatctagtcagaggatagtgggatgccttgttgtggaaccaatcaaaacagcacataaagtgattccaggctccacagaggaaaacggcagtgatctgcctgttgataaaattgaaccagtcaaaacaaaccatacattagcgttcgggaaaatcagttttaagagggaagtcctgaaacggcatgatcattcagacaagaacaaagaagagtaccgagatcctggtgctataatatgtgaaaaggaagatgttcctgcacattgtggatttcgagcaatttgggttgtaccgtcacgcagaagaaagcgaatagggtcacaactgatggatgctgctagaaaaagcttccttgaaggcgagactttgtgcatctcacagtgcgctttctcaccgcctacttcctccgggaaggcgctggcacgcagctattgcaagaccagcgcattcttagtctacaaggagcaagatgcataggagatgctgcagaagatgttacatatctgaaacttctcttcccattgtaaaaattgttttgctggggatatatgtgaaacataaacaggcatgttctgtttttagtgtaagtctaagcaccagaagcagtgcgtttttgcaggatctctatgtattgacactttggatttcctgatcagcagcattttctgaatatc

SEQ ID NO: 28371 - DNA, 1959 bp, Oryza sativa
  ref <308>: DATABASE ACCESSION NUMBER: AK103813
  ref <309>: DATABASE ENTRY DATE: 2002-08-28
gagtgtctcagtcagtggatcactgtgtcagcacaggcagaggctttgctcttgctccggtccaagccaaggtgggcgccccgcaagatatcttcttcttccccaaatcgaggacccgattgcggcagctccggtggccggagcagctccctggtcgacgcgtcgccgtctccgtcccggtcgttgccggattccgcgcgcgtgggcgtccatcggatggcaattggcaagcgctaagacaaatcccttgattttttttaatccgttggacaggcggcaagatgattaattagcatgtttgtttgtgtcttcgatgatatctttccctattcaatttttgttgttgcagggtacccgcgctcgccgtttcatccggtgagcatttcgtcgagcagttggtaggcggggggagttcggggtttcttgattcatggggaggagctttgccgttgatttcctgcgctgaagcagttcatcgtccagtttcttgggcaatcgtttctagggaagcaaatgagatgtctctgctgctagacgcgagctctgttcctcgtttttaccattctcagaacttgacgattgagcatggcagattagggtcgtagagaaaacggtgttcgtgtcagcttcttgaggtcagagagccaagaagccatttgggtttttcttggttcatggaggaaatgggctctgctcagctttctgccctagctgtgtgtgtctgcattttcggatgcctagccatggctgatggccagaacgtcactggaggtgatggttcaaggccagctgagctgcgcatcggtgcattattcacatttgattcggttatcggtagagcagtgatgccggctattgagcttgctgttgcagatgtcaatgccgatccaggtgttcttcctgggacaaagttgagcgttataacgcaggataccaattgcagtggctttcttggaaccatggaagcgttggagcttctggctaaggatgtagtcgctgtattaggtccacaatcttcaagcattgctcatgtcatttctcatgctgttaatgagttccatgttccgcttgtctccttcgcggcatctgatcctaccctttcttcccttgaatatccttactttgtgagggctacaacaagtgattatttccaaatgagtgctatagctagcatcatcaatcaatatcgatggagagaagtcattgccatctatgttgatgacgactatggtagaggtggcatcacagcattaggtgatgctctagcaaaaaagaagtctaagatagcctacaaagccaaattgccacctggtgcttcaaggactaccatcgaggatatgttgatgcatgtgaatgaaatgcagtctcgcgtctatgttgtccatgtaaaccctgactctggcctggcagtttttgctgctgcaaaatctttgggaatgatgagtactggctatgcatggatagcaacagactggctctctgcagtgttagattcatctgatcatattagcactgacagaatggaacttactcagggggttattatgcttcggcaacatgtttctgattctggcattcagcattcgttggtttcaagatggaacaatctgaccaggaatggaggtcattcaagctttagttcttacagtatgcgtacttatgattctgtatggttagttgctcgtgctgttgaagattttttgagtgaggggaatgcggtatctttttctgctgatccaaatttgcaagatataaaaggaagtaaccttcagttagattccctcagaagtttgaacaatggagaaagattactggagaaagtttggcacacaaatttcacaggggtttctggcctggtacaatttactgcagaacgagatctgatccacccagcttttgatatcttgaatattggtggtacaggtttcagaaccattgggtattggtcaaacatttctg

SEQ ID NO: 28372 - DNA, 2087 bp, Oryza sativa
  ref <308>: DATABASE ACCESSION NUMBER: AK103814
  ref <309>: DATABASE ENTRY DATE: 2002-08-28
ggttcgctccgccgcatcgctaaacccccatttttagggtttctcgccgcgacgcggtgcgacgcctcctcttcttctccaacccagagttccacacgctccaaatccttattcgaatcccctccacgccgcctccccccagccgaggcacgcgccgggacgcatccgtcgagcagcgaccatgtcgtcgttttggggcgcggaggtgaagcccgggaagccctacacccacacccacatcccgcgcctcggccgcctgcgcctcacccaggcgacgcttggaggggaggctgggaaggtggagaagggcggcggtgggaagaagaacgtggtgcagttacagtgcactgtgaagaacaaggatcccgtgttcctgtgtgccctggtgccggggcagtcggagacttgccacctggagctcgagttcgaggagaagcacgtcacgttctcggtgctcgggccgaggagcgtccacctcgctggatactacattggtgatgtgtatggggaggagatagatgacagtgatactggtagtgactctctgcaaggctcagatgatgatgcttttctggatactgatgatgatgacagtggcgctgatgatggcactgttctcatcccattatctcctggaaactcagatggtgaagatgatgattcagagtatgactcagaggatgatgactcagagatgatatacaatcagcgtagaggcaaaagttcagttgttattgaggaaattcaagaggatgacaagcctgctgctggtggagcacaaaagggatcaaacaagaagcaaaccagcgaaaatggtgatgattctaaactgcagcttgttgttaggactccacctgctgaatctttggaaagcgaagatgaagatggctttcctgtatcattttctgaatcaaagaaaagaactgatggtagttctaagaaaaaaggcaacctaaacaacaagatgagcactgaagataggaaaaggaaaagcagtgctgttggcgaccatcatgacccttcaggggaagtaaaggatgaaaatgatggagtgtcaaagaaaaataaaaaggccaaggccaaaaagactgctgtgggcggtgtggaaaaggagatcaaacaggaagattctccagctgatcttgttgatgcaaaacaaaagaaaaacaagaacaaaaatacctcagaagcagaagctggtgctcatcagaataccgataagacaaaacatatccacactgatgctgaggaagacactgcacaggaggctagcaaaaagaaaaagaacaagaaaaagaagacacaggagaagaatgaaagtgagaaccagacaccaaaaacacaggagaagaatgctaaaggaaaccagacgtcaaatacagatcttacggggtcagagagcaagaagcagccgctccaaacacgcacttttggcaatggtatgataattgaggagatagaaatgggcaaaccagatggtaaaaaagcctctcctgggaaaaaggtttctgttaaatacattggcaagctaaagaatggcacaatttttgactctacggttggtcgaagggcatttgattttagactcggtattggggaggtcattaagggctgggatataggcatcaatggtatgcgtgttggggacaaaaggaggctcacgatcccaccatcaatggggtatggaaacaaaagaatggggccaataccgcagaactcaaccctcgtgtttgatgtggaactcgtgaatgtaaagtgaggcgagagcaagagatcttgtagcttcaagatgctgaaactgaagtggtctcgcaagagttttgtaggacaccatttcccttcagcaaagctatcttcatttagacacagaccatatgccttattttgtgaactgtagccatgtaggcttaattttgggggcacagcagagcttgtcacttcgatttttcttcagtgctcgattttcatacagtttctaatactccgtatgaaagtagtggatgggtatttccgctttgaagtttcaactgactggattacgagaaaccgctgtaactatttcgtttactgcattgatcgtccttgtc

SEQ ID NO: 28373 - DNA, 1597 bp, Oryza sativa
  ref <308>: DATABASE ACCESSION NUMBER: AK103815
  ref <309>: DATABASE ENTRY DATE: 2002-08-28
gatcggcacccccatcgccatcggcaccatcaccaactacgccatcagctacgtgaccaccatgttcatcggccacctcggaaacctccccctcgccgccgcctccgtgggcctctccgtgttcgccaccttcgccctcggcttcctcctgggcatgggcagcgccctggagacgctgtgcgggcaggcgttcggagccgggcaggtgtccatgctgggcgtctacctccagcgatcctggatcatccttctcggcgccacggtcctgatggtccccgtgtacgtgctggccgagccgctgctcctgctggtggggcaggacccggaggtggcgcgcgcggcggggcggttcacgctctacatcctcccgggcgccttcgccttcgccgtgaacttcccgtcgggcaagttcctccaggcgcagagcaaggtgggggtgctggcatggatcggcgtggcggggctggcgttccacgtgggcatcacctacctcgcggtgtcggtgctggggtgggggctcccgggcgcggcggcggcgtacgacgtgtcgcagtgggcgtcgtcgctggcgcaggtggcctacataatggggtggtgcagggaggggtggcgcgggtggtccatggcggcgttccacgacctggccgccttcctccgcctgtccatcgagtcggcggtgatgctgtgcctcgagatatggtacctgggcctcatcaccgtcctcacgggggacctggacgacgcccagatggcggtcgactcgctggggatctgcatgaacatcaacggctacgagggcatgatcttcatcggcctcaacgcggccatcagcgtccgggtgtccaacgagctgggctccgggaggcccagggcggccatgcacgccgtggtggtggtggtggcggagtcgctgctcatcggcctcctctgcatggcgctcgtgctcgccttcagcgacaagctggcgctcgtctacaccagcgacgcccacctgctccgcgccgtctccaggatcgctggcctgctcggggtcaccatggtgctcaacagcgtgcagccggtgctgtccggtgtggccgtcggcggcggatggcagggcctcgtcgcctacatcaacctcgcctgctactacctctttggcctccccgtcggctaccttctcggttactacttcaacctcggagtcgggggggtttggggtggcatgctctgtggagttgcacttcaaacactcattctactctttgtagtctggagaacagactggaaggcagaggctgcgcaagcttcagctcgtgtgcacaagtggggaggcacagatgaaaccaaacctctcttacaaggagatcattcagacagagattagcatatgcataccctgtttctctttttcttttccccctgcgcagagcagatacgaagttggactccaaattcaattcttatcctgcatgtaccaggcagctctgtattcttcaattgtacgatttttgtatacgctactgggtcacaatttattaacattgtacgctattggggatttggggttcttccctccctcttctatttattattacaaacaagaatacaacagacc

SEQ ID NO: 28374 - DNA, 5050 bp, Oryza sativa
  ref <308>: DATABASE ACCESSION NUMBER: AK103816
  ref <309>: DATABASE ENTRY DATE: 2002-08-28
gatcgaatatttgagctgtaaacttgaaaccaaactctgtctctactgctctttcccctgctccaagtatttctctctcgttctgctctctgttcatcctcttccttccaaaatccccaaaatctctagcccgatcgtaacattaggtatcagagccaccaatcttggagtatctagagaaaccacgctatcattcgcgagctcaactcaaatcccaggagatggagcaacaattggcggaacttgtggaggtcatgtctgcgattcagaagcagaattcggcgattcaaacttcggttggatcgctggaggagatcaagcccctggtggtggagttagcgagttggaagccggcgatggacaaggcggtgacagagctgcatgaggagatgggggatctgcgccaacaagtggagcggatagcccgtaatccggtgctctccgtcaagccatcggagttgccggcgctgcttcctacaccgactcggcctcgggataccgctcccaaggaggaggaggtctctccaagtgtgggtggcgaaggtcacgggccgttaggccaccgcgttgcttcgattccacgggggaaggcgtgtgggaaggagtcctctccatcgtctctcccggccaagggtacgtgctctaatcagttgccccaccgtttttctctggaatttggagagggttcgaatcggggttttactgcggggtttcacggaggaaacgctcgggtagattgtccacagtttgatggggagaaccctagagcctggaaaatgaagtgcgaaacctatttccgtgtgagtggaatttgctctgaagtgtgggtaggtgttgcttctttgcaattttccgggggggggggggggggctttgacttggcttcaatccacaaatgctcatgttgaatttatggattggagtgagttttctgagctagtgtgtgcaaaatttgggagagatgagttccagggcttagtgcgtcaatttaacaggctcaagcagacatgttcggtgcttagcttagttatgcggagaggtttaatgagttaatgcaccagtttcacgctcatcattcctcttgggattccatgttttttttactcaattcatagatgggttgcgggcaaatattcatggtgctattcttttacaccgtcccacggacatggatactgctgtggatctcgcttgcctgtaggaggaagtactggaatctgctcgataggaggctatgacgagttaccgagctacggcccgttctgctacaccgtcgtttgcttccaagacatttggtggtggccgagctgatgaacggacactgccagtggaagataaggtagctgccctgagagcttatcgcaaagcaaagggattatgccatacatgtggggaacggtggagtcgcgatcacaagtgtggacctactgttcagttgcatattgtggaagagcttttggaattgttagctgattctgctgctgatggtatgcctgagattattgaaccaactactgacattgggtctgagtctgaacctcaaggcgaagtctgtcagatttctcgtgatgctatgattggtacgaaatctgtctgtacgcttcgattgcaaggacttattcagcagtaagaaattctcatgttagtgaactctggcagcacgcatagttttatgtctgaaaagctggctggcaagttgaactgtaagctgcgtgttgttcctgctattcaagtcaggattgcggatgggggtatactgcactgctcaagggagttgacaaattgcctttggtgggtgcagggtttctcctttcaatccaatttcaaggtgctgcctctgggaagttatgacataattctcggcatggattggttggttgaccatagcccaatgcagattgactagcgaagcaagattttgcaatttcagtatcaacaacagaatgtctgtctgaagggtgtggttgctaatactcagaaatgctctgaactttcggttgttcaggtgcagggcttaatgaatcatgatgcggttttgtagactgttgagttatgtcctctagaagattcagattcctctcttgaaataccagccgaaatttctcagctccttcatgagtcaatcttcatccctaccgttataacccagcccagaaggatgagattgaacggcaagtgaaggatatgctgcagcagggagttattcaaccaagttcaagtcccttctcttctccggtgctgttggtgcagaaaaaggacctcacttggcagttttgtgttgactgccgtcacctgaatgctgttacagttaaaaatcgctatccccttccaatcattgatgaattattggacgaattgtcaggtgctagtctgtttaccagcttggatctgcgcgcggggtatcatcagattagaatgcgagctgaagatgagtataagacggcgtttaaaacgcataatggtcattatgagtttcgggttatgtcctatggacttacaggagccccggccacttttcaagggttgatgaacatgatttttgcaccgttattgaggaagggagttttggtgttcattgatgatatattggtgtacagtcgtaatttgcaggaccatgtcatgctgttgcgtcaagtgttctagctattgacgactcaccagttaaaggtcaaacgatctaagtgttcgttcgctcaatccagccttacttatttgggtcatgtgatcagcgctgcgggtgtaactactgatccgaagaatgtcagggctgttcaagcttggacagtgccgcagaatgttaaggaagtccggagtttcttgggacttgccggatattatcacaagtttgtcaagtcttttgggatcatcagtcggcccttaactgatttgttaaaaaagtaggtggtcttcgtttggacttcagaacatcaagctgcatttgaagctcttaaggctgctttggtttctgccccagtgttggcgttgcccgatttttctgggacctttgtaattgagactgaagcttctgatttgggggtgggtgcggtgttaatgcaggatggacatcccttggctttccttagcaaatccctgggtccacgcaacagaggcctgtcaacttacgaaaaagagtgtctcgctatattgctggctgttgatcattggcgctcttatctgcagtttggtgagtttatcattcgtacggatcagcgcagcttgattcatcttgatgatcagcgtttggtgacatcttggcaacaacgagcattaaccaaattacttggcttatcttaccggctggtatacaagaaaggtcttgagaataaggcagctgatgtgttgtctcgttgcagatccaatgaggtgtatcaattgagtactgtgtcatcttgcgtgccctcttggttggaggaagttcagaagggttatgattctgatatttgcacttctcaattgctcgctaaagtgttgctctctcctagtcaatttccttcttattctctgaagaatggtattctctattatatgaggctcatttggctgggtgcaaactctgaattgcaacttaaaattctgtctgctttccattgctctgccgtgggtgggcattctggtatacaagttacttacagcagagtgcggcgcttgtttgcatggccgggtttgaagcaggccgttcgccagtttgtgtccaactgttcgatctgtaagcaagcaaaagctgaacgtgtgcgttaccccggtcttttgcaacctctacctgtgccggagcatgcctgggtaactgtttcacttgattttattgaagggttgccttcttcagcaggttttgactgcatactggtggtcgttgataaattcagtaagtatgcccatttcctggctttagtgcacccattcaccgcttttgatgttgctttggcttatctgaacaatgtttataaactttatggattgccacatcatatcatttcggacagagtccgtatttttaccagcgccttgtggacagagttatttcagttgacggatactcgtctgaagttaagtactgcttatcacctacagacggatgggcaaacggagcgtgtcaaccagtgtttggagacatttctccgctgttttgtgcatgcctgtccaaagaagtggttccgttggtgggctttagcagaattttggtataacactgcttatcattcagcgcttgagaggtctccatttgaggtactttatgggcatcctcctcgtcattttggggtgtcgagtacagctgaatgtgcagttccagatcttgacaagtggctgaaggaacgggcagtaatctccagtttgttgcgtcagcatcttttacgagctcagcaacgaatgaaatttcaggtcgacaagaagcgttctgaccgcgagttcgctacgggagattgggttttttgaaggctcaaccttatgcacagagttctcttaccgggcataccaatcacaaacttgcttttcgctatttcggaccttttcaggtactgaataaggtgggagcagtggcttatcgactacgattgccggatgattgctcgattcgtcccgttgttcatgtctcccaacttcgacaagctgtggcaccaaccactgcgactgatgttcgtgctcttcctaccatggcaccagaggaggtggttcctgttcaagttctcgcccggcgagtttcgaagaaaggagctggagctgtggaacaagtcttggttcgttggacaggtcaatcatcaagtgaggctacctgggaagatgctgcggctttgcgtcttcgatttccggatgcgccggcttgggggcaagccgctttcgaagggggaaggaatgttacgggtgctgctactgtatctgaaccggtaagggagaataatcctgtgaagtctgggaaacgacctcaaagggagagggccgaatgtccgagtctctgggccggagtggtcttaggccagctgtatgccgtgcatgtatataagcacaggtagagagaggaaaggatatcaaatatttgagctgtaaacttgaaacc

SEQ ID NO: 28375 - DNA, 3383 bp, Oryza sativa
  ref <308>: DATABASE ACCESSION NUMBER: AK103817
  ref <309>: DATABASE ENTRY DATE: 2002-08-28
gactcgccggtcgcggctctcccccgcacggccgcaccggcgctcgcggttgcgactcagggagccgagccgcagctgttgttggacgatggtgaggtcgcacgctcgcagcgcgcacgcgctcgatccggcggcggcggcggcacagtctttggttggggagcgaccgatgagcagcagagagagctcaactggggacgaggcgtgcaatcgcaatctggggctacttcatgtcttcagctggggatgggtggtagcagtagcagctcgcgcaccggccacgaatgcggcactatcagttagtagcacttagcagtagatgcctgccgtgatggcttcaaaaagacaagaacgtggatgaaacaagtcagggaggtagcatttgatgctgaggattgtattgacacattctggtgctacattggccatcattatggtgccaggggagtccgctgttattgtgtaccaaaggtagtctacaccttgaagacgttgaaagtgaggaacaacctggccatcaaaatccaaagtctcaggactcgtgtgcagagagtgagtgagcggaggctgagatacatgctcaacccaacgggatctacttctaaatcaaccaatggatctctgtcttcttcaaactacattgatcaagagcgccgattatctgcactaaacatcgacgaatcacgacttgttggaatggctgataagacagaagaagtcaccaagctgctagacgaaggtcatgtgcctaatcttaaagtagtctccgttgttggctttggtggactaggaaaaaccacccttgcaatgactgtttacaagagcccagcagtgaaagggatccagagccgtgcttttgtggcagtgtcccaaaactatgatccccgagcacttctggaatctttactgaagcagcttatccaaagaccctttctcagagagccaaggagtgtggatgaagaaactagtactgaagaccccctcaaaggcatcgaaacctgggacatatgccaactcattaataggtgcagaaattacttggagaacaaaaggtacttcattgttcttcatgacctttggaggccagaagcatggatgactttgaagatagcctttcctgataatgataaacggagtagaatactaattactacaaggaatcaccttgtagctcaaatttgctgctattatccccatgactgtatttacagcatggagcccttacccagtgaagaatccagacatttattcttcaagagagtgttcaaattggacaaatgtccttcacagtaccaagatttggtggatatctccgatgccatattaagaaaatgtaatggcttgcctctagccattgtgagcataggaggaatgctagctcgaatgaaaaacaagacatatgcagaatggcagaaggtgtgtgacagattggactgtgggttagagataaataatactgtagggggaatgagaaagatactctctcttggctacaatgatttgccctaccatctgaaggcttgcttcttgtatcttagtgtttttcccgaggattttgagatcaaaagaggacccttgattagaagatgggcagcagagggtttcattggtagagtgcgtggatcaaatttggaagaaattgctgataagtattttgatgaatttatcagtagaaacatcgttacacctattcggattgatagcagcggcgaggtccggagttgtagggttcatgacatcatgctggaagtaatcagtgccatatctgtccaagaaaacttcatctcactcctagggaattacagttacagcataacagggcatgacaaaattcggcggctttccatccatgtaggtggtggtaaggagcaagatttctcatgtaggaacttatcccatctacgttctttgacaatcctaggctgcaaggagaaaccaatacctatcgctttggctgatctaacacttctaagggtgttagaccttgaaggttgcggctggttaagtgattcagatttgaaagatatttgcaagctgtatctgttgaggtatgtaagtcttcgaagcacaaatatttcaaagctaccaaggacagtggggaacctgaaagaacttttgacattggatgtaagaagcacttacattagggagttacctgcaactatcactcagctccggtgtctcaaacatcttcttgcaggccgttacaagtactatacaaggacacatcatgtgaaacattttgcttcaaaggaagctgtgactatacctgctgggttgaaaaatatgagtgcccttcagagcattgctcctgtaaacatctcatcaagcttccgtgcaatgcatgaactgggagagctgtctcagttgaccaagctttgtgctatcaacagaaagggagtagagaaatggagacctttcgctacctcattaagtaaactgagcaattcccttcgccacctatcagtaattcatatcgacaaaatggaacatgggcttgagttcttaatggacctaagctcgccgcctctcttcctgaaaaagctctacttttggggaagagtgagtgctctgcctccatggatttcatctctcagcaacttagtcaggctatcgctccgagaaaactatctggagagtgaattggtcaagatactagggaaacttcatagtcttttgtccctcaaactgtatgttaactcatatctagggacagaactatgctttgagcataatctttttccgagactcaaacaacttatgatagataatttaaaaaatcttgatgagcttagctttaagggaggagcgcctgatcttgagagactcacgttggcttttgtaaaagcacccgaaagaggcatttctggcatagagaatctcccaaaactaaaagaagttgagttcttcgggattattgttgactctgttgtcgagggggtgatagctgctgccaagattcatccaaatcatccaagagtttacagagacgagacaatcgacccaaggagccttactacagcatgagccaggaatacattcaatctcctgctaggcaggcggttcagggccaacgactaagtaataatgccaaggaatctaccgtagtgactagcaaggaggatggacggtcattggtgaatggcctgccccgaaattctagagaaattacttcaactagcatggtggcccgcgcagattgcgcggctagcatcattatattttctctcatataatagcatatatgttttctcattatattattcaaatatattaaaataacatcataattttaaattttgcaataactttacgaaactacaaatgtgtaatattcatattgtattttatatacgtgttagttattaatgatttttagtatc

SEQ ID NO: 28376 - DNA, 2382 bp, Oryza sativa
  ref <308>: DATABASE ACCESSION NUMBER: AK103818
  ref <309>: DATABASE ENTRY DATE: 2002-08-28
gacatcactacatcagagcttgaagctctcttctctctctctacttgccatgtccggccatggctgccaccactcgatctctcttatcggagcattgccggccaagccctcgcgccaatatatttgcctcgacgaggagaacccatttcacccctttcccccaacccttccaccttgagttaagccaccaccgccagctcccaaatcggccgaaccaagcacttgccgccggcgttccggtctcctccctctccctctccgccagccaccgccctccctaggtgcgtggcgctcgggaacaccacccaccgacggcgtcgtcgccttccgcccgccggagagccagcgcccctcctctccttctcctctgttgctcggctggaaagagaagaaaagaagagaggaagaagaagatgagaggagagagaaaaagaaaagaaaaagaaaggaagattgacagttgtatcttccaatatctcaggcttagtccgtcagtgatcaactgcaaagtgcatactcgccatcagattccaagagcattcggtacgccctgtctatttctcgtaatttatctggttttgtgtcctggatttatatggtttttttcatcaatattaattcttgctcaactaacacacgtgttagcatcagacgatgcctggatggatggttcgcacggtgttcttgctcaattcgtgggtaatccgggcgttggtagtattcagcttcgcagcgcacgtcaccatcgtcttcttggccggagtccgccgtcgtagggctattggcttgccgataaccatcctgtgggcggcgaaccagctgggccggtgggccgcgacgtacgcactcagcaagctcgccctcggcagcacgccgcaggagctggagctggtgacgctctggggggctttcctgctgctccatgccgctggtccggacaacatcaccgcctactccttggaggacaatgttctgtcgacgcgccagaaggtagaaatgatcttgcaggtatcaggagcagcatttgccatgtacaagaatatagtcatcagaagcgggtccggtacgatggtctggatctcttctttcatgttcatcatgggcatttttaagtattgggagagggcgaaagctatgcagctcgccaacctagaaaacttgcgaagctcaatcaagaagaagaaggagacaaggagacgacgaagcttgagaaatattaggcgtccgagcagttcaaagcatgataatgacgaggaggcactgctggttgctcatggcctgctcgacatcaccaaaggcgccttcgtcgattcttcaatcaacgagcatcaaatccctgtctatgctggcaggagacgagagatatttcctaagagtggctgggggatgatgtacaaggtggtcgacatggagctctccctcatgtacgacattctctacaccaaggcggccatggtgcacacctggcatggctacgccatgcgtgccgcctctccgttcgccacatccatggccttcatgttgttttggtttgacagcaagcaaggtcagcggatgaccgacgttttgataacctatgtcttgctgggaggtacagtcctcctagacatcatatggcttctcagagcagtggcatcaacatggacctattcgttcctcaatgataggccacacctgtgggttcatcacgcgttattgtgctctgggaagtggcgccagctccatcgttccattgtctccctggatccgtcattgatcctcgccaaggaaccaagtagctacaggaagtggtctggaaaaattgggcagtataacttgttgcacgagtgcactcgtgacaaggaccaaaggaccagggaatacttgagctctgtggtgaagaaagtagcatcggagggcatgtggatggagtacgagtaccacaacttgaggggtattcatatttcacaggatttcaagaagaaattgttggattgtatttgggactatatgtatttagcatacccagttgaagacatggaggaggtggaggaggaggagaagaagaagaaagaggcggagaagaagccaaaactgctgatgatgcttcctgagcatcacaatgttgagaacattcggaaattggaagaagctctggattttcttcctgaatttcaggagtccattcttatcatgcacatcgctacggatattgtcttcatgtatactaaatttgaacaaaatgcagcatcgtccaagtccaaagacaatgtgaagatgatcaaggccttgtcggattacatgatgttcctcgtcgcggtgcgacccaccatgctacctggtcttaagctgcgcagcctgtacgaagctactaaggaagctcttgccaaaatatggtctaag

SEQ ID NO: 28377 - DNA, 1481 bp, Oryza sativa
  ref <308>: DATABASE ACCESSION NUMBER: AK103819
  ref <309>: DATABASE ENTRY DATE: 2002-08-28
ggaaatagcccgcgacctctctctctgtgtctccgccgccgccgcctccgccgctcgccgcatccgtcggaggcgagatgggcatcaagggtttgacgaagcttttggcggacaatgcgcccaaggcgatgaaggagcagaagttcgagagctacttcggccggcgcattgccgtcgacgccagcatgagcatctaccagttcctcattgtagttggaaggacggggatggaaaccctcacgaacgaggccggtgaagtcaccagtcatttgcaaggtatgttcaaccggacaataaggttgctggaggcaggaatcaagccagtatatgtttttgacggcaagcctcctgatctgaagaaacaagagctcgcaaaaaggtactcgaagagggaggatgccaccaaagaactaacagaggcagtagaggaaggagataaagacgcaattgaaaaattcagcaagagaactgtgaaggtcacgaagcagcacaatgaagaatgtaaacgactattaagacttatgggggttcctgttgtagaggcgccatgtgaagcagaagcagaatgtgctgcactttgcataaatgatatggtttatgcagttgcatcagaagatatggactctcttacttttggagctccacggtttcttcgtcatttgatggatccaagttccaagaaaattccagttatggaatttgaagtcgcgaaagttttggaggagcttgaactcactatggaccaattcattgacttgtgcatcctatctggatgtgactattgtgatagcattaaaggtattggaggtcaaacagctctgaaacttattcgtcaacatgggtccatagaaagcattctggaaaacataaataaagacagatatcagattcctgaggactggccttatcaagaagctcgacgcttgttcaaggaacccaatgttacattggatattcctgagctgaaatggaatgctcccgatgaggaaggtcttgtagagtttctggtgaaagaaaatggtttcaaccaagatagagtgacaaaggccatagagaagattaaatttgcaagaacaaatcttcccaaggaaggctcgaatccttcttcaagccagttgttagcacatcagtgcctctgaaaagaaaggacacttcagaaaaaccaaccaaagcagtcgctaacaagaaaacaaagggagccggcggaaagaagaaataagttcgattgtgccattcatcaacaagacctcctgcacgtgtcatttcaattttaactcccatgtttgtaactcatcctccatctgatgttttctatgttcctagtaaaccagaagtccagaacttcgtctaatactagttcatctatgtagtacgtctctcttctctactagggatttgtagtgttggtttggttgctgcgtagtgtatgaagaaccaacaaaattggctttgccgcgcaaaattaactggttccgattccc

SEQ ID NO: 28378 - DNA, 1760 bp, Oryza sativa
  ref <308>: DATABASE ACCESSION NUMBER: AK103820
  ref <309>: DATABASE ENTRY DATE: 2002-08-28
gggacacagagaagaaagtttaagcccttcgaaatcacggaggtcagctcgagctggttcaaggtcaccaggacagcacaaaggaagcaaattgtcgccaactcgtgaccatcattcttctcgccgtagtaggcgttctagatccagatctcaagagaagaatcgcaacagtgataaaaaggacagcaaaaaatctgagatggaggataaaaaaaggagatctgatagaggcaatagaggtgacaaagatgaaaagtatctaaaggatccaatggaagataagaaactagatgtgtcttctgttgctcataaaaggagttcatccgcatcagaagatgaaatgctgaatagtaattccaagagatctaaacatgatgctgctttggagtgtcatgagaggaaggatgaggatcatattgaggaggacagaagggatttggattctgtgggatctaaatctgagaagagaagcctaggaaatggtgatcatgaaaaacaaaatcatgatacaaataggaaaacagacaagagtcatgacagggatgattcttctcgtaaggacagaaaatacagagaggatgaatcaagacattctagagatagatgttcccgtcattcatcttcaagatcccatagaagttcaaggcattcaagggaaaagtatcatggagataccactgatcagcataaatcaaagaaatcagaagagggttccaagtctaggaaggatgattgtctccttgatgataccttgtcttcagatagaaggaaagttcagagcgaggactctcctcgtaggaagcataaccagttagcagctagttcagatgttcatggcatcaaccatgatactggagttaaggtgccaaatgatttctcagaagctgatcagggtatccaggaagccaagcaggtcgttcatgaaactgatatgtcctctgcaccacgccttgaggacccatttcttgcacaagacaaacaagataaacctattgttgctggccttaatgggctacatgaacctggagttgatggtgcatttgtgggcactgaagagtctgctatatgatattaaccagagtgtttacttgatggttgctatatcattgagttggctgatcacaggatctacttgatcagtggatgcagatagatgaattggtgtttgttatcttcctttctgatttaggagttttatttgcaggatatgaagaacatggagaacttgagtgctgatcgaagtgttcatctgatctataaaaatgtactcattaactcttcagatggagattttttctgtggagtaaacttctagatgtaacgctggagcttgtgaggtgatttagtactgtgaggtcaaaccaaccatatatttgtcgttgcaggcttgtggttccatgaagagttggagctcattctggggtgtcaattgaagatacaagggaggtcacacttttccgtactcaagtaaagtccattatacaaggctatataaaccacttctcttgtaggctgtgatacatttcaattggcatgctttggctagtgcaatgatccaaagatgtttctacatgtaaacatcctttgattaagttgacatgctccctgtatttgttatgcgtatgatttgcattatgtctgcatcagtaatggttgaaaagatctatagcttaatacgtatttaaatcttagaacacgtaaccagtccattttactttgtattttgattaatgcagagacttgccctgtggttcttgttt

SEQ ID NO: 28379 - DNA, 1230 bp, Oryza sativa
  ref <308>: DATABASE ACCESSION NUMBER: AK103821
  ref <309>: DATABASE ENTRY DATE: 2002-08-28
ggctcctgcaatccacccgccccctgtttcgtcaaacttctcatctccccttcccgtccgccgccatgccgccggccggtagcctcaccgacgagcagctccgcttcttcgacgccaatgggtacctcgtgctggggtcgttctccagcgcggaggaggtgagggcgatgagggaccgcatggcggagctcgtcgacggcttcgacggcgctggcgacgtcttctccacaaaggatcaccggcaggtgaagaacgactttttcttcaagagtgcggagaatatctctttcttctttgaggaaaaggcatttggagatgatggatgcttgaagcaggcaaaggaactttcaatcaataaagttgggcacgcgttacatgaacttgaccctgtgttcaaaaagttctcttttggagcgaatgtttccagcctgttctcttctttacgctacaagagacctgcagttattcaatctatgtacatctttaagcaaccaggcattggtggcgaggtggtaccacaccaggataatacattcctatatacagaccctccatcgtgcactgggctgtggcttgcactcgaagatgcgacaaaaacgaatggttgcctttgggcaattcctggatcacataaaaatggcctgaaaaggcgaatgatcagagatgaaatcgatactcattttgatcatccttcgccaacctatgatctgaaagaatttgtgcccttagaagtaaagtcaggtgatttggtggttattcatggagatcttatacaccagagctttgaaaatctttctccggtgtcaagacatgcactgagcttacatgtaattgataccgaaggatgtgaatggtccaagcaaaactggttacaaaggaaaatcccacctcagccactttatgaaaattagttgaagcagttacctatatgtcaaataaacgagtggtgacctagaagcaatggtgatgatgctgattacctgtcctcgtcgcaataaatctgcagtacgatgttgagtagctgtgctttcttctcccgtcttcagacagtgtaaataccttgctactctgttttcatggatgaattttatggcaataaatttgatgtacgatgtagagtagctgtgcttttttccccgtcttcagacacaagtcacacaactacgctgctactctgtttccaggggtgatatttatgcttaataaaatctatctccagttcttaatgtt

SEQ ID NO: 28380 - DNA, 1280 bp, Oryza sativa
  ref <308>: DATABASE ACCESSION NUMBER: AK103822
  ref <309>: DATABASE ENTRY DATE: 2002-08-28
gtaagaagccgttcgttctggagcgcgccgccatccgctcgaacctttcccctctttgccttgcgcaccaagtatggatattgggggtaccctctcgatcttctcgtcgctggcaatgtgggttgcgtagtcacatgtttctcgatctcgttgtgtctcaggttttttttcttgaggagttagattgagcaggagaagagccgcggccggtgtggatttttgtgttggtcggtcgcgaggatcgatggcggcgggggaaggagacgtggggatggaggtggagacgaaggcgccagcgatgccgccgccgccgccggcgtcgtcgagcgcggccaggaagaagaagcaagctcgcgcgaagaacggcgacacgcctgagcctgacgccgccggcggtgcccgtgcccgggcgtctcggcgagcgaaacggggaccgggcagctaccgcggcgtgcggcagcgccggtggggcaagtgggtctcggagatccgcgagcccaaccgcgggaagcggcactggctgggcaccttcggcagcgccgtcgacgccgccctcgcctacgacaaggccgccgcgtccatcctcggtccccgcgcggtcctcaacttcccggcattcagccctcctgccgccgccatcgccgcgccggagcaatgcgaacccccgttccgttctcctgccaccaccgccgccgccactgcgccggagcaacgccaaaccccgggctgttctcctgcagccgtcgccggcagcggcggcggcgcagtgttcgaggagcgtgacgtgaagccggtggtgttgccgttgccgttgccggccatactccaggatggcggcggcacggaggcaatggcgcagcattgggattgggagtgggacgcgtcttggcctgagctggagatgttcgagtgtctggatgacatcgccatgtacctcgacgtcgacgctgtgatgacgactcgggattgcaaggttgaggagctcgacgccgacatcgtcgactcgccgctgtggacactgtcggactgaaatggcaaatgtggcagccatctagacaggtttcctttggtgagagattttccagtagatgagttagctttcgttttgcttagctgatagccatgtagaccgttaacaacgcttatatgtagtttactaatatattattagtcttcattttgcattaggaaaaagtataactgatagcattcaaatgtaaatagtagaactgaaaccaaaatactactatatttatccggagagaattgcactttggact

SEQ ID NO: 28381 - DNA, 1891 bp, Oryza sativa
  ref <308>: DATABASE ACCESSION NUMBER: AK103823
  ref <309>: DATABASE ENTRY DATE: 2002-08-28
gccatatatattttgctcaaggtttttttcagcaagctgtgaaaatgtaccaaaactgcctgcggaagttcttctacaacacagatgcaactatacttctatatcttgcccggacacactatgaagctgaacaatggcaagactgcaggaaaacattgctgagagctattcatttggctccatcaaattatttattgcgattcaatgtaggtgtttcgatgcagaaattctcagcttcaactctacagaagacaaaacgaacagttgatgaagtcagtactgctgctttcctatagttggtctctgtttatttgatttttgaaataaataactaaactggcaaaaactcatcaaattgacctttatgttattttaggtaaaatgaattggggaatcttcagccatagttacttatatatctgaattgattgtgtttagagatgagattatgaattagagttgtaatatagaaagaaatgagtacttgtcattctgattgatatttgaaaaatgtatcatcttatatatttactttgaaaaccttatctgtttaatcttttttctctatttccaggttcgtgcgacggtctctgagcttcagaatgctattagagtattcagtctattgtctgttgcatctacataccattcccatggttttgatgagagaaaaatagaaactcatattgagtactgcaaacatttgcttgatgctgctaaggttcatcgtgatgcagctgagcaggctgagcagcagaataagcaaaaaatggaagttgctcgacaaattgctttggctgatgaagctcgccgcaaggctgaagaacagaggaaggcccagttagaaagaaggaagcaagaggacgagctaaagcaagtaatgcaacaggagcaacactttgagcgtgtcaaggagcaatggaaaacctcaagtaacactcctggcaagagaaaagataggtctaagcatgaagatgaagaggggggaggtgaaaagaggaggaagaagggtggtaggagaaggaaggatcagaagacaaaggcacactatggggaagaggaagaagacgaatatagagatgaaccagaagcagaagatgattatgcaaacacggcgaggagtaacgatggtggcgattcagagaaagccccaggtcaccttcttgctgctgcaggtcttgaagattctgatgctgaagaagatgacatgggacaccctcaatctgccatagaacggaagagacgagcctggtcagaatctgaggatgatgagccagtgcagaggccagtgcaacctagcgcaggcgagaacgatctgagtgattgaattagacggtgaagattatggccgaatttgggatcacttcatatatttgtgacgaagaatggctcctgggatgcggaatcaactatagggcgtgctcatatgcacttgtggataattcgatgttgaaatggagctcagacagatggttgaaccagaagtgttaaaaaaatttatctgggagcagagcagtcactgatattcaacaattaatctcgcgtcattctagacatgccatgggttggtggagctaacataaggcaatttgtaatttatgtctagtttacgcttaatcagccagacttttgtcctgtgagcttctaacgctgtaccaattttagctcacttacatctcaggatagctgatctcctactttgttctttgctgctaggcaagcgtgccaagaaaagatttccaaaagtagctgatctcctactttgcacctaatttttcagacacttcggtttggcaggcaactgtacgtgctcattggcattcgctaatatcgccctgctctcgtccaaacaaagtaatggatatatagatctaaagtaacggattttttc

SEQ ID NO: 28382 - DNA, 1896 bp, Oryza sativa
  ref <308>: DATABASE ACCESSION NUMBER: AK103824
  ref <309>: DATABASE ENTRY DATE: 2002-08-28
gaaagttttcaggcatctgaagttttggacttgcaacacactctgctttcaagttctgaactagcattctactctgttctagctgactaggtcacacatggctatcaaggatgagcagcagccactgcacatcctcttcttcccattcctcgcgcccggtcatctcatcccgatcgccgatatggccgctctgttcgccgctcgtggcgtcaggtgcaccatcctcaccacccctgtcaacgccgccgtgatccgctcggccgtggaccgtgccaacgactcgttccgtcgcaacaacggcggcctggcgatcgaactcaccgtcgtgccatttccggacgttgggctcccgccgggcttcgagagtggcacggcgcttacgacccaggacgaccgtgacaagttcttccttggcattaggctgctccatgagcccttcgaccggtacctgtcggagcaccacgtcgacgccgccgtggtggacagcttcttcaggtgggccgcggacgccgccgccgagcacggcgtcccgcggctggggttcctcggcaccagcgtgttcgcgagggcctgcaccaacagcatgctgcgcaacaacccgctggagaccgcccccgacgaccccgacgccgtcgtgcccctgccgggcttgcctcactgcgtcgagctgaggcggagccaaatgatggacccgaagaagcggccggaccactgggagaagttccagagcttagacgccgccgaccagaggagcttcggcgaggtgttcaacagcttccacgagctggagccggactacgtcgagcactaccgcacgacgctcggccgccgcgtgtggctcgtcgggccggtcgctcttgcgaacaaggacgtggcggtgcgaggtaccagcgagctctcgccggacgccgacggctacctgcggtggctcgacgcgaagccacgcggctcggtggtgtacgtctccttcggcacgctatccagcttctcgccggcggagatgcgggagctcgcccgaggactcgacctctccggcaagaacttcgtgtgggttatcaacggcgcggacgccgacgcgtcggagtggatgcccgagggcttcgccgagctgatcgcgccgcgcggcgaacgcggcctcaccatccggggctgggcgccgcagatgctcatcctgaaccacccggccgtcggcgggttcgtgacgcactgcgggtggaactcgacgctggaggccgtgaccgccggcgtgccgatggtgacgtggccacggtacgccgaccagttctacaacgagaagctcatcacggaggtgctcgaggtgggtgtcggcgtcggctccatggacttcgcgtcgaagctggagaaccgccgggtgatcatcggcggcgaggtggtcgcgggagccatagggagagtgatgggcgacggcgaggagggcgaggcgatacggaaaaaggcgacggagctgggcgtgaaggcgaggggcgcgctggagaagggtgggtcgtcgtacgatgatgttggaattctgatggacgagttgatggctcgccggggctccgtcaatgtgtgacagcactccctaacaaggtgattgacggcttgacgcatcaagaagatggtgatcggacattcggacatctccagagtccagactattgtctttttcctcagagttttttttttttggagtaactatatttatggcgccatatttttcatcaaaaaatagtcggtatatatttacattgtaaatttctaaattacatatgtaattttagtgtatttacaatataagtcataaaattacatatgtaagtctctaaattacatatgtaagtataatgtaattataatgtaagtgcaatgtaatttctatattttgcattgaaaatt

SEQ ID NO: 28383 - DNA, 586 bp, Oryza sativa
  ref <308>: DATABASE ACCESSION NUMBER: AK103825
  ref <309>: DATABASE ENTRY DATE: 2002-08-28
gactgaccatgacgctggcccgcccggaggaccgcgacaacatcagctgcgccgccaccgtcaaccagcagagccacgcccacaaccgccgcctccaggccagcctccgccggctccggcggcagcacccggccgccgtcatcgcctacgccgactactacgccgcccacctcgccgtcatggcggccccggcgaggtacggcttcacggagcccttcaagacttgctgcggcgccggcggcggcgcctacaacttcgagatcttctccacctgcggctcgccggaggtgaccaccgcctgcgcgcagccggccaagtacgtcaactgggacggcgtccacatgacggaggccatgtacagggtcgtcgccggcatgttcttccaggacggcaggtactgccacccgccgttcagcaccttgctcgccaggcggaacaaaggcaattaagcaagtgatcatatcttttctgccattaagcaatattgatcagtgttgttgtctctttagtagctaggtgatcattgatcagcattgccattgaagtattgaactgaattctgagcagcatcagtattaagctcttc

SEQ ID NO: 28384 - DNA, 2179 bp, Oryza sativa
  ref <308>: DATABASE ACCESSION NUMBER: AK103826
  ref <309>: DATABASE ENTRY DATE: 2002-08-28
ggtcactttccccatccctcccgcgaaaagcagacagacgcccacaacccaccaccacgtctagggttccgccgctcctccggccgccgccgccgccgccgccgacccccctcgatctcctccccgagccgccataggtggtggcgggggcgggggagctagcatccgtccgtcaacgcacatcgtcactgctgcttcctgaaatctgccaccatgtccgacatggagtccatggctacacttatggagtccacaggctccaagctgcagcagcttcagcgtgcatttgcagagctcgagagccagagcgctgtttccttgaacttaaagtggaagcaactggaggaccatttccatgggcttgagcagtcgctcaagaaaaagtttgatgatctgaaaaggcaggaagaggagttcgaggagacggttgcaaagtcagagcagatgctggagcaacaagaggctgttgtcgtggcaaaggaactgacttctcttgaaaaactgcagcagaaaagggatgccgcgttggctgtgatctttggcaagtccaagctgaacttgtctacgcctcttatcaacccaatcagcaaatccgtgaataacaatgctgtgtttaatggaaacatcggtggtagtctttctgttaagtggcccaaacctgcaactgcgcatggtgcatacctgcaagatgaaaacactgctgtgaagcctcgttctcaacttgttgtcctctgtgaagagatgaatgttaacgggcttcataagttcatatcagacaatcgcaaagacttaacatccatccgtgaggaaatccccgttgcacttaggggagcaactgatccatatggcttggtgttagcttctctagaagacttctattttggagacaatcttatattggatggcaaaaaggatggaaaccttctgggtgtacggaggacgtgcctcatgttgatggaatcacttgctcagctgcaaactgatgctactactggtttcatatcggaaggtcaagtgcttactgcaagtatcaaggagcgtgcaaaaaagattgctcttgagtggaaatccaagttggatagccttgactttgatgctagcaatgggaactgcctggaagcacatgcgtttcttcaactcctggctacctttggtatatttgctgaatttgcacaagatgagctgtgtaagctacttccctcagtcagtcgtcgtcgtcagacacctgagctttgtagaatacttggattgtcccagaacatgccaggtgtcattggagttctggttgaaaatgggagaactattgatgcaattaatttggcttatgcatttgagctgactaatcagtttgaaccggtggaattactgaaagcctatctacaggaggtcaagagtgtgccacatttcaagactggaaagatatctctgcaagtacagaatgaaatgaatgaacgagagctgtctgccttgaaagctgctattaagtgtatcgaggagcacaaacttgatgagaaatatccgattgacctgcttcagaaaagagttatccagctagagaaagctaaggcagacaagaggagggctgttgaagctgcaaagccacagtctaagaggcctcgtgccaatggatccgtatatgcgccacatactagctttcctgacaaaagcttctaccaggctgctccgccgcagaggcattcctacccttacgagaggcagtatgtgtatggtgctgaggcccatcaccatcccacaatgataagctcagctccctatggcatctcacctgcccacacaacatattatggtaatggctatcaggttcagtaccaggtaccatatatccactgatggagagagcgtaatgtgctctttcctaactatgtactagcttttaacctgctgctactatgtgctgtagttgtatcaatccactagctagactgcctagcttaaattagttcgaccactcttgtgtgtgctgagtggccagtgtgaaaatctgttaatttccctcacgacttatgacataatttacttctaatgtctagttaaaataatttgcttttgtttaatatatagcctatggcatatatatgttggagttgagatagtcccagtactgcagaattctggaattatgtgctctgcttggtggaattatccactaattcctttc

SEQ ID NO: 28385 - DNA, 1547 bp, Oryza sativa
  ref <308>: DATABASE ACCESSION NUMBER: AK103827
  ref <309>: DATABASE ENTRY DATE: 2002-08-28
tgagcccaaaaatctcccgtctcggcgtctcggctcctccgctccttgcgccatctcgcggctgaacaggcgaggggagggcgcgccgatctccatccggcgagcaggggaggggagggtcgctgatctccatctggcgagtagagcaggcgaggggaggggaggggatccgatcgatgattccacaaaatgcagctttggaccatataagcacaccttcagaaagtggtgaaatacctttggttataaatgttgaaagtcagcacattttttgacgattctatggcatggaaggggatactttgttagctgacatacaactggcacttccaaataggtgctatttgttaccttcaggcatgcacaaatctaatacatcatcatgtcctactatcacatgtgaagaagctcttaagagggagttggagtatcggcaaaaaattgaaaggagtcatccacatctgctggttggccttaatggatcccctgcattgctgaatgaggttggatctggttcatcacctgatttgtcaatgaggaactcagcccatgacagctatatgccctcaccacaggcatgttttgttggttccactgtacaaagaccaccagcaaattggtacccctcaaagaaaaagttgaaagttctacagcatccttcacaggctttgcaggcccccaggccaaatttgataccttccttttggtgcaaaatttgtaaggtggattgtgttacagaatttaattttggtgcccatattggaggaaaaaaacacaaggcaaaaaagctggagattcttggtaatagaaacaatgcaagacctgccactggcaatcaatgtacaggtaatagaaatcccagaccaaatggcaacgcaggttctggaagcagaaacaatgaaccaaatgtgtttaatagcaatattgcccaaccaagcagtgacactttctctggaagtcaaaccaacggaacaattggaaatcctcacaaggaaatgtcatctgatggtgatggaataagcaatagcaaactagagcaaaattgctgatactggatcatctgaacacaagtgatgaataaagatacttgaagcttatggttgaaccggttatagcatacttcaggaacatcttcccagttgtccccatgtgtgtgtcatgccacaagtgcagccaaggatttgagcaccacacattgggcaaagaaacgggaggtactgcagctgaactgtggcgtgctgtcattcagtaaagaaacaaacttggctggaaccaaacaggtctttaacctgctgatgtacatagttttctctttacactagttgtcttattttttgttgcaaatcatgtagaaataaaaaaaaatccttgcttggatgatggtatcttgcatgctttagcttgaattgctctggaaattttatctggtcagtaagacagtttctggttatcactcttctgtcttctccagttttctttggtcataattttgcttttagtttgtatagttcaaatatcataatttattgcaatgtacctttgatatt

SEQ ID NO: 28386 - DNA, 2038 bp, Oryza sativa
  ref <308>: DATABASE ACCESSION NUMBER: AK103828
  ref <309>: DATABASE ENTRY DATE: 2002-08-28
ggaagcagcgttgccggcgtcgtccccctcctgctcacttcctcttccttccgctcgccgccgggggcgcgctctctctgatggtgatggatccccttaccaacaaggctgccttcagtggcctgagacagtatgtgaaggagcttgattcgaacacgctcccgccatttcttgcccgcgtttgtgaccccgtgaagccatgctccttctccgaggaggagatgctgtgcatcttcgagaccgccgcgcaagcgcacggccgcaagattgtgccgcacatcgccctgatcgtctcggcaatcgttaggatgatgtcctcgcggaatgccgttggttgctccaaggttgtttgcgcgctatcgcggtacgttgttgatcctctggcgacggaagcgttgaaaagcgcgatcattggctcgctttgtcgtccctttgcagattgtctgatgagcactaaggtggagagcaactcttttggctctgctctttgtgtcgccgcgcttgtgcaatccaacaactggcggtttgcgtctaacgagctggttaatgatgtctgcttgaaagtctcaggggccctagaggaggcgcatgctcagagtatcgcgcacttaaacttggtggttgttttgctgacacaaaatccactgatgcttgagccttatggccgatctttgattcgatcgggcttacagatactggatgagagtgctaaggcaagcagttctcagatgattatttcatcgattcaaatgatacattccatcatgaagggtttggatctaggcattatatcttctgagatcagtagtattatccatgctatggaacaattccaggacgacactatgccagccatcagcattgcagctttcgaggcatctgagactgctaagctacttgttggcaggcaaaaagagagtgggcatgacaataatttgagtcagttagcaaactattctgtaagaaatggcagaaagggttcatattcacattctctcatggatgatgcggatatcagagacgatggttcatgtgattcacattcttgtgacctgaactctgttcatttgtctactgattttgattctcaacattcagtgggacaatgtggttctggaagcacacgtgcaaggcggcagctatggtgtaacaaatctgacaaatcacatggaatgtccaatcatgacttatttcgcactgttattccagatagtcatgaggcttcaggtttgatggcacatttcagctctgttgatccaattaagccagacaggaggttgtcagatgtgccaacaagagttgctggcccatgttatgtctgttcagcagcgcatgaaacgaatcactgctctcagatatccagggcacaggttttatcaggtgacatgaggatgaattctactccaagaaagcaactccattcttgcaccttctgtagagacccagaacaagatggtcacccaccacttgaaagtccagctatacaacactgctcagggccaggtactaatattcttcagttcagaaaaaacagtgagcttaaggaaagaaaagaattttgggactcaattcggcaggaaaatcaatgccatatgcaaaacactgatgccctaatagaagatttgaagttcccggctgacgatgatgatgaggattttgatggtgcagccaaatctccatgtcaagaatgtcaagctgtgaatgagaagaagactggaggcaagaaaagaaatgcaaacagttctcactatccagtttttcttttcgtttttgttgtggcaatcattgctctcttctttccttggtggaaggactacaaagagccttatgttgttcctacataaacatatctgtttgttttgcgatgtgcatcaagccatccgttttttcaggaattgtatggtggcaatctttagtatacagaaattataggcagcagtttacatggatgactttgaatggtgtaaattctgtgataaggtgatggaatggttaaaaagttgtaccatttctggatgtacttttctcttatgtggcc

SEQ ID NO: 28387 - DNA, 1819 bp, Oryza sativa
  ref <308>: DATABASE ACCESSION NUMBER: AK103829
  ref <309>: DATABASE ENTRY DATE: 2002-08-28
gaccagatccgatcagatcagatcagcagatcaccaagtctccttcacactcccactccagcggcagctgagcagagagctccaccgccgccggccaccatgagttctcaccaccgctacgcccacctcctcgacgaccccttcttccccttcccaccgccgtcctcctcctcctgccccttcctctccccacccgccgcttcctccacctgcccattcttcgccctcgactcccccttcgctgctgaccctttccatctccaccccttcctccccacgccgcccactagctccctcctcgaccccttcctcctccacaccctcaccgaccgcgtctcccaactcgagctcgccctcgccgcccgcgccccacaccccaggcccaccagcaggaagtgcacctatgtcaccgagtccaccggccgcaaggtcaagtggaccaccgaggacaagcctcgcgccggcgagagggtgctcaagtgggaggctgagctcgactccccctacgacgatggattcgaccgcaagtggaagtgggaggccaaggccaagaccgcctccgctgctgccaccaagctcaagtgggccacccacctcaagggcaagggttgcctcgagccatggtcacactcctacacctgggaggaggacttctctgccaccgacgacgacgacgacgaggagatcgaggaccaactccatcacaaggccctgcaggatcacagcaagctcaaaaccaaggccaaggacgacaagaagaaaaagaagaaggacaacaacaccgtggtggtcaacaaggagcagaagaaatgccccttctccgtcaagatcgaggagatcccacctgaggaggacaacaccgctggatgcgtcgccattagaaaggcttttgcattgggcaatggcaaggcaaagaagaaggaactgtccccacaggatgcggcattgctgatccagttgaactacagggctcacctggcacaccgttcacaggtgcttcgctgcctgcgtgatctggctgtggctaaggccaagctcaaggagatcaggtccctcttctataacatctcttacaggcatcgcatggcgcatgaccatgaagagcgccaaaggttcactgagaaaatcatcgtgctgctgctcactgtagatgcgcttgagggtcctgactacatggtgaggacagcaaagaagtctatgcttgatgaacttgaaggtatgctggagattgtggaccctcagccaccagggaagcagaggtcgttgacccgcaggaagttcgatcttccagaaggagggccgatcacagatgagaagatggccggtgtgaacaatgcagtcaaagtcatccaaaagggaaagaagtaagaggccatatctcatctcgtctagtggttatcacgcatatgatggagcttgtagcactgtatcatcatcatcatcattgtagcactgtgataaccaccgttgttgttttcagtttgttgaggaacacattgtgcactatgcatggtagtctgattgtgctagctagcaagcactaagcagctgtttggtccggacgtccagccattttatttgctttgtactcgtatgctgttgttatccagatgttgttgttgctcttgttaggatctctgtcggctgttaaactgccaagatgccctagttccatttaagctgagcactgccgcactggatgtgtgtgcgcctgtgcgtgcctatgggctatggtgtcgttgtggccttcatcgggcctgcttagttaattaattgcttccctgattctccagtcaactgaataaatcatcaattcatc

SEQ ID NO: 28388 - DNA, 1279 bp, Oryza sativa
  ref <308>: DATABASE ACCESSION NUMBER: AK103830
  ref <309>: DATABASE ENTRY DATE: 2002-08-28
gcttcggcttccccaccacgacaaaacctcgtcctcatcgagtcaaaacaacccatgaaaccctaaaaccccaatccccccagcccaatccgccattgcctccccgatgcaagcgtccgcgcgcctctacaccgccgccgcatccaagcgggtgattgcgggcgtctctagcacgatctcgcgctcgtgccaccggacttgccgatggaagtcacatgccgcgccgctgtccgctcaggaggcgcccaaagggccaaagaggatgaccaagcaggagaggagggttaaaatagagaaatttgttgaggagtataaggcatcgaatgatggtaaattccccacgatgacgactgttcgtcaacatgttggagggggtcactacacggtgagggagatagttcaggaacttgagtacaaccagagaatgttacaactggaccagtctaaggcagctgagctgcccgaaacagctgaacattctgagcatttaaagcccaaggatgtccatggaaatgctcaatttaattctgaaagcttcagtggaaaccaaaatacagatgaccttcacctctcccagaaagttgctgctaccagcactgaaatcatagataagactgaaacatggggattggaagaatcacagatgacatcaggcacttctcattacactggagaaacagaagctgtcaagcaagaccttcacactgcagatagtttacagggtgcaaatgaatcaatcaagtcatgtcaaacagaaagtgacagcataaagaatgaagattccatatctctgggactagatactaaatcagatccaactgacctagaactaggggaaagcaaatctgacaagatagagctgaatagtacagcaaggtttaagaatgtcagtgaaccacctgtatcagatccaattgaaggtgataagacggtcaaggcaaatgtactggacagagaagagaacccggaggttgagccgaagacaggtctttttgggagcctgaaatcttttgcttctgggatcagaaatttttggagaaaactgtgaatttcttgttatgtctggaagatgacacattcctcttgctgctacgactttgcgaggctggagcaaattatgacgttttctgaaagctgtagaattggttatcagcctttgaaatttgtgagcctgaagcaaattgtaaagtcgcctttaagctaccgaagtaatggtcaaattcatgctgtcacgttactgacaagctaggtatgagcattgtgtatccattgggcgatc

SEQ ID NO: 28389 - DNA, 2101 bp, Oryza sativa
  ref <308>: DATABASE ACCESSION NUMBER: AK103831
  ref <309>: DATABASE ENTRY DATE: 2002-08-28
gatgtagtggtcgagggtgccgtttgagacaaactcataaactagcatgggaacttcgacttcaagacaacaaccgagcaacttgacgacgttcttgtggttgatctgggagaggatgcacatctccttcgcaaattccttggtctgtgcctcctctatcatctttgacttcttgatggccaccaccatgttgtcctccaggacgcctttgtagacgatgccgtagccaccgcggccaagaacacggtcggcggcaaagctgttggtggccttctcgagctcttccttggagaaaatcttgaacccacccgctccgccgctggtgccaccttaggaactcatctgttgctggagaagcacgccaccgttctgctcaaagaatctttgcttcgttctgatgagcttcctcttttggagccccaggtagagccagaacaacatgaacagtaacaggaacacaccgacgctgacccctgaacatggtatgccaatgatattcattagttcccgacaagaaaataagtgcattaataatgttgcttgataaccggccgattgaatacctgtaacgactttcagagctaacgtgaacttgtccgttgggaggcatccattctcctgggttgcatttccactagtccccggtcggcattcgcaggtgtagcttccgattgtgtttgtgcattttccgaagcatgggtattcctttgtgcgttggcattcatcgatgtctagcgttggcaaagcaaaacatattcatcacttaattttttttttgtcagaaagattattactccttttgcgttttaggcacccacctttgcatccaccgtcgaggtaggggttgccctcgtagcccttggagcacctgcaccggtacccctggccgtcgctggcgttgaagcactcgctgtgcgcgctccggcacgcgtagtccgtcctgttgcgcacggcgatgtcgcagttgccggcgttccggatggcccagtcgagcacgacggggacggtgaagtcgctggttcggttgatgaaggcgcgatagctgtaggtggtgttgatccacttgtcctccgccacgaacacatactggcattttgttgagtcgagatggcggaagacgggttccgtcggcgggagctcctgttggtcggggacgtttcgcgttggttcctctgtcttattcaacgtgagtatgtaaggcttgtagacgttgagagcgcggggcatggtgttctggcagcaccccgactcgccggtgcactggcccggcaagtcaccctgcgactgcgaccgccggcacgtggatgtgcagccagtgacgtagttatcgtcggcgtcaaccaagtagccaaggacggggcacccgagcacgacaaggcggttcctcgctgtggagaaccggtaggcgatgctgcggccgtagtccggcgtgcggtagtgcccactgattgctttgaagcggtcgtcgtggcagttgcttcccgcgtcgacgaagacccggacctcgccgtcggcgatggaaaggctcaccagctttttctcacgatcatccaggtagttgaagtgcggagtgttgccgtcgcactcgagctggaagtctttgtcccgggcgcagccggcgccaatgccgaaggggtaggagatgctgatgttcccgcacttgtcggggcagcccggccatggctgagccgatgccggtgtcaccggcgccaagcagacgagcatgacggctaataagtaggcaaccgcctgatgcagtgtactagtggtagccatttctaacatgtataatcgccttcgtgttgttcttcttgccgtcttgcttttacatgccggccgggcttgatatccatataaatagatcgcgcacaagcttccttccttcgttttttggagggcaaatatgccaagatcaggaggatgtgtcatggaagctgcgtcgtgtattaggagttgactgaaagaacacgcggcgacgtgttcttttcttagagggcgcgctgtgtttagttcccaaagcaaaaaaaacttacgctgttaaaacaaaaatttttatgctgtcacatcaaatgtttgaatacatgtatagaatattaaatgt

SEQ ID NO: 28390 - DNA, 1790 bp, Oryza sativa
  ref <308>: DATABASE ACCESSION NUMBER: AK103832
  ref <309>: DATABASE ENTRY DATE: 2002-08-28
gataggactccatctactcacatcagccacgcgcgcggatagctcgctcgctagccgggagacatggcgcccgcgacacaaatggcagctccaccacctcgcggcggcagcttccgcgtcctgcgcaccgctcgcgtcgcaccgtcgtcgcccgacggtgtcccctcgctgcgccagcgtgccgtcccgctcaccttcctggacgcgatgtggctcccgaccccgcccgtcgaccgggtcttcctctaccgcctcggcgccgccgacgacgacgtcgacgccgtcctgtcccggctggctgactcgctgtcccgggtgctccacgtcttctacccgctcgccggccgcctccgcctcactcccggcaagaccaaccggtacgagctcttctaccagccaggcgacgccgtcgccttcaccgtcgccgagcacgacgacggcgtcggtgtcgacgagctggccgcggacgacccgagggaggtcgccaagatcgccccgctcgcgccggagctcccggatggcggcgcggtgctggccgtgcaggctaccgtgctgccccccgcgcgccgcggcctcgccctcggcgtcaccgtgcaccacgccgcctgcgacggctcgagctccacgcacttcctccatacctgggccgccgcctgcgccggcgctgtggtgctgccgaagccgcccgtcatcgaccgcacgttcatccgcgaacgtgaggacctctacgacatcatggtcaatcgaacgaaggaggagtctgacaagttcagctcgcccgacgtcgccgacaacaagctcctcgccactttcacgctgtcaggagagatccttcagaacatcaaggatatagtcgccgccccctcggtgcacgtccatcgtcgcgacgttcgccgtcatatggcagtgccacatccacgccgcactagcaagcgacgtcgaagcagagaacaaccctcgaaaccatggccgtgcccacttcgtcttccccaccgatcaccgggcgcggatggaaccccgcgtccccgacaagtacctcggcaactgcgtcgggccatgcttcgcctcggcgcccaagaaagagatcgccgccgccgacgcggaggacggcctcttcacgacctgcgccgcgatcgccgccgccatcgacgaaggaacgagatacgatcccggctactgggagaggtgcagggagcacgtcagagggatgagcacgagcgacggcccgccgctagcggtggccgggtcgccgaggttccgcgtgtacgacgtggactttgggttcgggaggccgacgaaggtggacgtcgtgtccgtggcgaagaccggggcgatctcggtggcggagggccgcggcggcggcattgaggtgggcgtcggtttgccgccggagcggatggagaggttccggaggtgcttcactgatgccgtcacgtggctatcgtcgccatcgtccagtgacacgtgacacgtggcgcgcggcaggcaggcaggcaggcacgtgtcgcttggctttcgtgggcttcgatgggctgcttccgtcagctatcacgtgcgtgccctatgtgagccgtcggatggcttggacgattgataagtgctgaaggcacgctatatgcacatgcaccccggacgctttgctctttttttttttaagagaataccgtagtattgtatcgacgtatccgtatcccaatatccatccctatttaaaacatatatggatttttctcatcgtcgcagataaatttgtaatgaaaaaaacaaattaaactacagctagtttaatc

SEQ ID NO: 28391 - DNA, 2694 bp, Oryza sativa
  ref <308>: DATABASE ACCESSION NUMBER: AK103833
  ref <309>: DATABASE ENTRY DATE: 2002-08-28
gagttgcagaccaaaggagccagagcagcacaaatattgagaaaataaggagaccggccactgaagagcatgccttctctctacatattccttgggcttcttctcttctccctgcaggctcctccatgtcctgctgcaactgatactctgaaggcaggacaagtgctctctgccggtgacaagctcgtctcgaggaatggcaagttcgcgctcggcttcttcaacccaagcgcaaacatcagtaagtcatctgacaacatctcctccagttggtacattggcatatggttcaacaagatcccagtttttactgtcgtgtgggtcgctaatagggagaggtcaatcgctgagcccgacttcaagctaacacagctcaaaatatcacaagatggcaatcttgccatcgtaaaccatgccaatgaatccataatatggtccactcgtattgtcaataggacagaggccagcatgaacacaagtgttcttctccacgacagtggaaatcttgtcatacaaagcacatctaatgcagtgctgtggcaaagctttgactacccaacagatgttgctcttcctaatgccaagattggctggaacaaggtaaccggtctgaaccgttttggtttcgaagaagagcctcattgatatgggcactggctcttatagtgtacaactatacaccaatggcaccagaagggtgaccctcgagcaccgaaacccttcaatagagtactggtattggtcgccagatgaatcgggaatgaagataccagcactcaagcaactactgtacatgaatccacagaccagaggtttagtcaccccggcatatgttaacagcagtgaagaggagtactacagctacaattcatcagatgaatcatcttccacattcctcttgctagacattaatggccagatcaaattcaatgtttggtctcaagacaagcactcatggcaaagcctatatacccaacccgttgatccgtgcaggtcatatgatacttgtggaccattcaccatctgcaacggcaattcacaaccattttgtgactgtatggagaatttcactcgaaagtcacctcgggattgggaccttggtgatcgaacaggagggtgttctaggaatagtccattagattgcaccagaaacacaagttcaacagacatcttccacccattaattcatgttacattgccccgtaacccccaaaccatacaagaagctaccactcagagcgaatgtgcacaagcttgcctcagctcctgctcctgcactgcttattcctaccaaaatactagcacttgctctatctggcatgacgaattgtttagtgtaaaccaagatgatggcattgaaattcattctcaagatgttctttacctccgccttgccgccaaagatttgcagagtttgagaaacaacaaaaggaaaccaaatgttgcagttgttattgctgcaagcgtaattggttttgtgttattaatggtcgggatgtttttactgatttggaggaacagattcgagtggtgtggtgcgccattacatgacggtgaagacagcagtggaataaaggcatttagatacaatgatctagttcatgccactaaaaatttctcagaaaagcttggagcaggtggttttggctctgtgttcaagggaatgttaattgatctaactaccatagctgtgaaaagacttgatggtgatcgtcagggagagaaacaattccgtgctgaggtgagctcaattggattgatccaacatatcaacctagtgaaattgattggtttttgctgtgaaggccgtaagaggctacttgtgtacgaacacatgttaaatggttctctggatgcccatttgtttcagagcaatgctggtacactaaactggagcattaggtatcatatagccctaggagttgctcgaggattgggatacttgcatcagagttgccacgcatgcatcatacactgtgatattaagccacaaaatatacttcttgatgcatcatttactcctaaaattgctgactttgggatggcagcatttgtagggagagattttagcagaattctgacaacattcagaggaactgtagggtatcttgccccagagtggattagcggagttgctgttacaccaaaagttgatgtttatagctttggtatggtactactggaaattatatctggacgaaggaattcacctaatgaatacactagtgataattaccatgtttcgtatttccctgtgcaagccatcgacaagctacacgagggagatgtgcggaatttggtggatccacaattatgtgatgattttagtttggaagaggctgaaagggtttgcaaggttgcatgttggtgcatccaagatgatgagcatgatcgaccgacaatgagtgaagtggttcgggtccttgagggtatgcaagagcttgaaatgcccccaatgccaagattacttgcagctttaacaaaatgctctgatgtgggttcaatataatagttcataaatacttgtatttcactatatttcggaataatttatgatgctaacgtgtggcaggagaaattaatagaggaagtcaaacctgcaaatattgttgaattttatggtatggtgtatgttttccccccgttctgtttgtaatgattacctattatattctgatgagcagatacttttgg

SEQ ID NO: 28392 - DNA, 913 bp, Oryza sativa
  ref <308>: DATABASE ACCESSION NUMBER: AK103834
  ref <309>: DATABASE ENTRY DATE: 2002-08-28
gagagagcagcagcgagagacgaacaaaaaacagaatccatcgccataatcgaaggttcgctcttgcttccaccccgcaatccacatggagaacgaattccaggatggtaagacggaggtgatagaagcatggtacatggatgatagcgaagaggaccagaggcttcctcatcaccgcgaacccaaagaattcattcatgttgataagcttacagaactaggagtaatcagctggcgcctaaatcctgataactgggagaattgcgagaacctgaagagaatccgcgaagccagaggttactcttatgtggacatttgtgatgtgtgcccagagaagctgccaaattatgaaactaagatcaagagtttctttgaagaacacctgcataccgatgaagaaatacgctattgtcttgaagggagtggatactttgatgtgagagaccaaaatgatcagtggattcgtatagcactgaagaaaggaggcatgattgttctgcctgcagggatgtaccaccgctttacgttggacaccgacaactatatcaaggcaatgcgactgtttgttggcgatcctgtttggacaccctacaaccgtccccatgaccatcttcctgcaagaaaggagtttttggctaaacttctcaagtcagaaggtgaaaatcaagcagttgaaggcttctgagggttttgttgggctcctgcactgcggttctatattcaacctgaataagatgtgctatagcaatgtaaatttagcacagtggctatggtcgccactcaccaacttgaagtgaaagatttaatgatttttgttaattcttatgtatcaatcggcatatagcatttccgaaatgtgttttcaataaacagaaagtaagagtcatgaagctgaaaatgaacaaaatttctc

SEQ ID NO: 28393 - DNA, 2485 bp, Oryza sativa
  ref <308>: DATABASE ACCESSION NUMBER: AK103835
  ref <309>: DATABASE ENTRY DATE: 2002-08-28
gagactccagagcattccacggcctccctacaagtcgcggccgcgccgccgtcgtccgccgctcatcgaatccagcggaagcggaagcctcgcaaaccctcgtgctgtctccggccaggccagccatggcggcgtcgctgcttctccgcgccgtgcgccggcgagacctcgcgtctcctctcgggaccttgaccgcgaacgtccagtcaaagtgtgctgcaaatgtgtgttcaagatgggctggttttgcaagaactttcagtgcaaaagcaactggaaatgaggttattggaattgatttaggaacaactaactcatgtgtttcagttatggaaggaaagaacccaaaagtaatagagaattcagaaggaaccaggacaacaccgtcagtagttgctttcaatcagaagggagagctacttgttggaacaccagccaagcgtcaagcagtgaccaacccacagaacactttctttggtacaaagcgtctgatagggcggcgctttgatgacccgcaaactcagaaagagatgaaaatggtaccatataaaattgtgaaggctctgaatggtgatgcttggctagagacaacagatggcaagcagtactcaccgagccagattggtgcctttgttttgaccaagatgaaggagacagctgaatcttaccttggaaaatctgtttccaaggctgtgattactgttccagcttatttcaatgatgctcagcgtcaggctaccaaggatgctggtcgcatcgctggacttgatgtccaaagaatcatcaatgaacccactgctgctgctctgtcttatggaacaaacaacaaggagggtttgatcgctgtgtttgaccttggaggaggaacatttgatgtgtccattctagaaatatccaatggagtttttgaggtcaaagcaacaaatggtgacacttttctgggtggagaagactttgataatactcttttggagtttttagtaagtgagttcaaaagaactgaaggtattgatctgtcaaaagacagactggctctgcagaggctacgcgaagcagctgagaaagcaaaaattgaactctcatcaacagcccagaccgagattaatcttccattcatcacagctgattcctctggagcaaagcatctaaatatcacattgacaagatcgaagtttgaaagtttggtgaatagtctgattgagaggactagagacccatgcaagagctgcttgaaggatgctggtataactactaaagatgttgatgaggtccttcttgttggtggcatgacaagggttccaaaagtgcaggaagttgtttctgaaatctttggtaaggcccctagcaaaggagtaaacccagatgaagctgtggccatgggtgctgctattcagggcggcattctccgtggagatgtaaaggatcttctcctccttgatgtaacccctctatcgcttggtatcgagactcttggtggtatcttcaccagactaatcaacaggaacactacagtccccacgaagaaaagtcaggtgttctcaactgctgctgacaaccagacgcaagtgggtattaaggtgttgcaaggtgagcgtgagatggcagcagacaacaaacttcttggtgagtttgaccttgttggcattccaccagcgccaagaggtatgccacagattgaggtcacattcgacatcgatgccaatggaatcgtgacggtctcagcaaaggataaggcaactggaaaggagcagcagatcacaattcgatcctctggtgggctttctgaggctgagatccagaagatggtccatgaggctgagctgcactcccagaaggatcaagaacggaaagccctcatcgacatcagaaacaccgcagacacaaccatctacagcatagagaaaagtctgggtgagtacagggacaagatacctgcagaggttgcctccgagatcgagacggcgattgccgatctccgcaatgagatggcctcggatgacattgagaagataaagagcaagatcgaagcggccaacaaggctgtctcaaagattgggcaacacatgtctggtggtgggtctggtggctcgcaagcaggatcacagggcggaggtgaccaggctcctgaggctgagtatgaggaggtcaagaagtgaaattgaccgttgccctgcatttaggagtagtagtagctaattttgtaagaacttcgagatgctagagctgtgcacggtgtaataatgttctggggattttgttctcctatgacacgtcttcaattcccaagggcgtccaatagtgatgtactcctataactttggttgcatgtgttcccttgctcgagaggaacatgggcaacacaagctgggcgtgatcctctactcctgttaacttggatatcttgttcctctaattctgtatgtaaattgcactatcgacctgggtttcaatgaagcggcggggtcgttagttctgtgtttccatg

SEQ ID NO: 28394 - DNA, 820 bp, Oryza sativa
  ref <308>: DATABASE ACCESSION NUMBER: AK103836
  ref <309>: DATABASE ENTRY DATE: 2002-08-28
ggggggaagaacacaacacagcaggtgaagcgagagagagagagagaagccacaggcgcagcctccttgctcgcatcatcatccatggcggcgaccgcgcctcgtctcctcctgatggctctcatggccgccaccctcgccggccggtcagagggggcgtggtgcatttgcaggcaggacatgccggacagcacgctgcagaagacgctggactacgcgtgcggcgacggcgccgactgcaagcccatccagcagagcggcgcctgcttcagcccggacaccgtcaaggcccactgttcctacgccgtcaacagcttctaccagcgcaacaaccagaactcccaggcctgcgtcttctctggcaccgccaccctcgtcaccaccgacccaagctccaacggctgcatgtaccctgcctctgctagcgctgctgggacgggcacaccgacaagcggcaccgggggcagcactggcgtggacggccctcctggaatggggctaggtccttcaagcttcaacgacaacagtggcgccagcctcctcccggaggtcggaacggcgatgtggatactgatcctcgcttgctcaatcatggttctgaactttagttagagtttagggcgtgcgatgaggagacaagacaccccctctcctccccccttactgttcaggggtcttgtttcttgcacttttctttctagtggtagtggtggtggtggcaagcagaaaacgaaccctttgatgacaatgattgtattccattctggtgaagaatttgggagtgctgagaccctaacgggttgcatgttgctgtgctgcc

SEQ ID NO: 28395 - DNA, 2585 bp, Oryza sativa
  ref <308>: DATABASE ACCESSION NUMBER: AK103837
  ref <309>: DATABASE ENTRY DATE: 2002-08-28
gggcttccgcctttcctcgtcgcggctatacggctattatacctacctgccaccacaccacccttctcccacacttctccactgactcctcgagatggatcccgcgccggcgacccctcgctggaacctggagcggccgtacctcaccggccgcttccatcaggaggccaaggtggctgcggcggcgcagggggccggatccaagccttactccctcgactccttcagccgcggcggcggcggcggcggcggcgctgagagtgtcatcggatcgtacgccgtctcagtgcaggagcttttggtcattgatgatttgttatcagctcttgtgggtattgagggacgatacatttcgattaagagagtacggggaaaggaggggtatgttgtcttccagattgattcttcaatggaccttgcactccaggaattaactcgtcggatttttcccttatgtgaggattttgtcttggtataccattttgtggagtccagatcacatttcaagagtggcctggtcaaccatgctctagctgcagcattgagggcattcctcttggattatcaggcaatggttgctcaactggagcaccagttccgtcttgggagactgtcagttcaaggattgtggttcttttgtcagaggatgatgagttcattgaacgcacttgctgttctagtcgagaaagctatctccaataacaccagtggttctgctacacttaatctacttcaaagtcaggcaaaggcaatggctggcgatagtgctgttcgatcattactggagaagatgacagagtgtgcaagtgcagcgtatcttaggatgttagaaaggtgggtctatgagggcgttatagatgatccttatggtgaattcttcattgctgaaaacaaatccttgcagaaggagagccttactcaagattatgatgctaaatattggcagcaaagatacagtctaaaagatggcatccctagtttccttaccaatgttgccgccacaatactgacaactggaaaatatcttaatgttatgagagaatgtgagtacactgtccaggttcccttgtcagagagttctaagctgatgggctttggttcaaaccaccaatatcttgaatgcatcaaatctgcgtatgactttgcaagtggtgaactcttgactctaatgaaagataagtatgatctcattgggaaactgcgatccctcaagcgatatctacttcttgaccaaggtgattttctggttcactttatggatattgcccgagaggagcttacaaagaaaccagaagaaatatctgttgaaaaacttcagtctcttgttgacatcgcgttgcgaagtacggcagctgcttcagatccaagtcatgaagacttgacttgctgtgtggaaagaagttccctccttaagaaattgagcaccctgaaagacttggattgtgcatatccttcagacaagcttgtggcagctgatgttgaccatcccatgccgttaagtgtgactggcttggaaactttctgcctgagctacaaggttcaatggccactatctctagtaatttcaagaaaatctttgacaaaataccagttgatttttcggctgttgttccactgcaagcatgttagtcgacaattgtgtacagcatggcaaattcaacaaggtttccgttctgtcaaaatcctaggaacaccagtcctacggtcatcaattctttgccgcagcatgctcaagtttgtaaacagccttttacattatctaacctttgaggttcttgaaccaaattggcatttgatgcatgatcggcttcaaactgcaaggagtatagatgaggtcatacagattcatgatttcttcctgcagaagtgtctaaaagaatgcttattgttgttgcctgaactccttgtgaaaatcgagaagctgaaagctctgtgtctccagtatgcgacttccatccagctattgataccatccattgatgttgctaagcctgaaaatacatcaaaatctagaatgccaagatcaaaaataaaagaaaccaaaaacagaggccagcaactgaaattggcatcggaaaatgttgtaatgtcagagtcaatcttgaaattcgaggcagaattcaattcagagcttcaaagtcttattcctacgctgagtaacagttcacaggcagaaccatacttgactcatcttgggcagtgcattcttggtgtgggagttgatcaatgattgctgcgcgccatgttccgcggacttcagacgattgctaagtttgcatgtgcagtgtggaattcctcatccccgtcaaggcggtgttcttgtgaatgtattgaatattgatgaaatatgcatggtatgcttcaacaagatagatagtactgtaggatttatgtagtgttagttctcttggtggtgttgggccgtgggtagtttaggcgtttctagtttgttctgtttgaagattatgattgaactcctacgaagagaaactgccctgtggtactgctgccaccaatgtaacttgaactagatgtgatgaattagtgacaccactaacaatttgtcttgggccgttgtttccttg

SEQ ID NO: 28396 - DNA, 1509 bp, Oryza sativa
  ref <308>: DATABASE ACCESSION NUMBER: AK103838
  ref <309>: DATABASE ENTRY DATE: 2002-08-28
gacattctcctctctctctctccctctctcatccatttcaattctctctcttgacacagctacaagacaagccacctcctccctccctcctctactgaaccaagaagaggagagagaaagtagaggagagggagacaagcagacagacagaattgcctgccaagaaacgagatacacacacatctagagagagaaagtagagagagatcaagaacaagaacaagatcaagaagaggagatctgtggcgatggggatgaggccgggttgggtaggcgggctggtggaggagagcttcttcgtgggttgcccagcgcacgagagccggaagaagaacgagaagaacatcttctgcctcgcctgctgcaccagcatctgccctcactgcgccccctcccatcgccaccaccctctcctccaggtgcggcggtacgtgtacaatgacgtcgtccgcctcggcgacctcgagaagctcatcgaatgctcctacgtccagccgtacacgatcaacagcgcgaaggtgatattcctgaagccgaggccgcagtcgaggccgttcaaggggtcaggcaatgtgtgcctcacctgcgaccgcatcctgcaggagcccttccacttctgctccctctcctgcaaggtggaccacgtcatggtccacggtggcggcgacctctccaacatcatcctcctccacccccaccaccaccccaacaccgccaccgcctcggccttcccccgtttcgaggacctccgtgtcggcgctgacgatgatgctgccgctatcaccgccgtcacgccagaaggacgttatggtggcggcggtggtgggtctagtgataatggcggcggtgatggcggtggcggcgaggtgggggaggtgaagaggaagaagaagaaggggggagggttcttcccccagattctggggctggggagtaggaggaagggtgcaccccacagatcacccctgtcctaagcctaatcaccactttgcccccctagctacatatatgtgccattaatagcagctagctgttaattaattactagtagtagctaagctagcccctagctgtactagctagttctagcttttagtgtgtcatgtcattatagccctatgattagccatgtagagagagatgagtgtgtgtgttaatttgtgtgttggttggttggttggatgggttctttgggaggtaggggcttttgtttgtgtgatctagcttagcttaaggttaattagcttagctagggccacttccaagctaataggcacttaggcagtgttttgatgggagacagagagggagggagaaagagaggaaaaaagcaagcaattctcctactgttacaggcctaggtagctgagtcacaggtatgtggggcccaggttgcatggcttcccctacatgatagtgtgtggctaccaattttgtacttgatgtaacagcagggttacttgcatacacttccataaccacatatataattaattaatatcgttcctc

SEQ ID NO: 28397 - DNA, 2252 bp, Oryza sativa
  ref <308>: DATABASE ACCESSION NUMBER: AK103839
  ref <309>: DATABASE ENTRY DATE: 2002-08-28
gattctgaaaacttcagtctttctctcttcagcatctctactctcgctccatttctaagggatcgaaatgatggaggcgaaagacgggcaagcatggctggggacgaacggatacggcagcaggagggaggaagacggcgtgtgccacgacgacagcgcgacaccggtgagggcgaacactgtcgacgagctacactcgctgcagaggaagcctcaggtagtggaggatcgccacaggctgcagcttcagtccatcagtgcgtctttggcatcgatgacatgtgggattgggccaaaactcgtcaacggtgacccagcaaggaaaaaagaaatggctggcaaggctgtgacacatcaccaacaccatatcactgtccccacgatcactgtgagcgacagtgacctcaagttcacccatgttctgtacaacttatccccttctgaactttatgagcatgcaatcaaatatgagaaagggtcattcatcacatccagtggggcgttagcgacgctatcaggagcaaagaccggtcgatcacctagggacaagcgtgttgtcaaggatgaaacaacagatgatctgtggtggggcaagggatcaccaaacattgaaatggacgagcaaacctttctgatcaacagggagagagctgttgactacttgaactcccttgataaggtgtttgttaatgatcagttcctaaactgggaccccaacaataggataaaagttcgaatcatctctgcgagggcctaccattctctcttcatgcacaacatgtgcatccggccaacatacgaggaactagagaattttggcgagcccgacttcaccatctacaatgctggacagttcccgtgcaaccgttacacgcattacatgacatcgtcaactagcatagacttaaatcttaagcggagagaaatggtcatcctgggaacacaatatgctggagagatgaagaaaggcctcttcagtgtgatgcactacctcatgcccaaaaagcagatcctctcgttgcactctggctgcaacatgggcagagggggtgatgtagccctgttttttggattgtcaggtactggaaagacaactctgtcaacagacaggaataggatcttaattggtgatgatgaacactgctggagtgataatggtatctctaacattgagggcggctgctatgctaaatgcatagatctttctcaggagaaagaacctgacatttgggatgcaatcaagtttggcacagtgttggagaatgttgttttcgatgagcactcccgtgaagttgattatacagaaaaatctgtcacagagaatacccgtgctgcttaccctattgaatacatagctaatgctaagataccatgtgttgggccacacccaaaggatgttatcctacttgcatgtgatgcatttggtgtcctccctcctgtcagcaagttgagccatgcacaaaccatgtaccattttatcagtggctacactgcattggtcgctggaactgaagatggtatcaaggagccacaggctacattttctgcctgctttggtgcagcttttataatgctccacccaactcggtacgctgccatgctggcagataagatgaacaagcatggagctaccggatggcttgtcaacactggttggatcggggggagttatggtgtaggtgagcgaatcagcttggcctacacaaggaaaatcatcgatgccattcactcgggtgagcttttggctagaagctacaaaaagacagatgtctttggactagacatccccacaaaagtggaaggagttccatctgaattgcttgacccaataaatacctgggaagacaaagactcatacaagttgacacttctaaagctgtcagatctgttcaagagaaatttcaaggtatttgcaaattacaagaaaggtggtgttagtgatctggctgatgagattgctgctgcaggaccaaatttctgattttaattgaatagtagtagtatgtcttaatgtataccaaataaaagggatttttttatgttcctcgaggatgtatcgcaaggtaccacttattttagtgtaaatttttatacctcatggtacttctctagtgtaaagtaccaaaaagtatcataaattaacactaaaatatggtatctctcgttacctagtcttgtacggtaaaactgaacaaaatgcccattttgaggatggtgacatatatatattaaaagctatttcagagtgatgt

SEQ ID NO: 28398 - DNA, 1833 bp, Oryza sativa
  ref <308>: DATABASE ACCESSION NUMBER: AK103840
  ref <309>: DATABASE ENTRY DATE: 2002-08-28
gtgtagtgactagtgggctttacacagccaaataattcagattaccgtaaaacctccgcccccagctagcgggctggtgtttcctccgccgccgccgccgcaaatggaggccctcctccggtgggcggcggagctgggcgtctccgactccccgtccgcgccctccccctcctcctgcctcggccgctccgtcctcatcgccgacttccccgacgccggcgggaggggcttggcggcggcgcgggacctccggcgcggcgagctggtgctgcgggcgccgcgcgccgccctgctcaccagcggccgcgtcatggacgatgaccccaggatcgcctcctccgtcgccagccacctcccccgcctcccctccgtccagaccctgatcatatgtttgttgtctgaagtgggaaaagggaagagttcaaattggtatctatatttgtctcagctgccctcctactacactatcttggctaccttcaatgattttgaaactgaagctctccaagttgatgaggctatttgggttgctcaaaaggctcttcgtggaataagatcagactgggaagaagcaacaccactgatgaaagggttgggatttaaacctaagctttgatgtttaaatcatggatctgggcttttgcaacggtatcttcaagaacattgcatatagcatgggatgatgctggttgtctatgtcctattggtgatttgttcaattatgctgctcctaatgatgacaattcatcaacggatgaagatagagatgatatgatgcatcaggagacaaataagatgttggaccagacagattttgattcatctgagaagttgacagatgggggatatgaagatgttaatgaataccgtctgtatgctcggaaaagatatagaaaaggagagcaggtacttctggcttatggaacgtatacaaacttggaacttcttgagcattatggttttcttttgggtgagaaccctaatgagaaaatctacattccattagatttggatttatgcatgatcggttcttggccaagagattccttgtatattctgccaaatggacatccctcatttgcattgctgtgtgcattaaggctttggacaactcccagaaatcgtcggaaagccttaagtcatcagatctactctggatcattgttatctgttgaaaatgagctggagattctgaaatggttggtcaagaagtgcaaggaaactttgcagcaattacctacgactatagaatttgatgataatttgctcgtccttttatgcaagctacagaacagcactagctgcataacagaaatgaaccggtcaatctttgagcaagaatttgctccattcttcagatttcatggcttcaagctggattgttctatacacagtaaactcccagttcgtcttctacgatccctggaaagatggggattagctgtccagtggagatgcaactacaaaagaaccctaaccaagtgtattgtgcactgtaaaagtttagttcacgagctttcgttgcaacaaaatcaacaatagctcaaagattcaagctaactatgttctttagaatgcagaagttcttgatacaacaaaaatcaacaatagctcaaagattcaagctaattatgtttttttaatgcagaagttcttgatacatttttgcttaacagcatgtcaaattgtcaacactcgatagcagggcgaggtgctttcatagttccatgcatcacactttttggggttgcatagtttaagcataacaagcgttctgtggaatgccttctgtggaatgccgctgagatactgataattgattatcaggcatgc

SEQ ID NO: 28399 - DNA, 2762 bp, Oryza sativa
  ref <308>: DATABASE ACCESSION NUMBER: AK103841
  ref <309>: DATABASE ENTRY DATE: 2002-08-28
gactctcctcagatctctaccccatctctcccaccgcttctcagatccgccaccaacacccgcggtcgccggcggccaccgcgcgcgccatggccgcgccagcgacgccgcggctactcctctcgccgacctccaaggacctcatcgccgccgcctcctcctccttcccgtcgccgccctccccgacgacctcttccgatcccgcctccccgctcgacgccttcgcctccgacccggtcctctccgcgttcctctccccgtccttctccccctccgacttctcctccgccgcgctctcctcgggcctcgccgcctcccgcgccgagcagctgcaggaggccatccgcctcctccgccgccacctccgcgccgaggtgctccgccgccacccgctcctcctctcccacctcctctccctccgctccgcctccgcctcgctctcctccctcccctcccacctccacctcctctcctcccacctctcgctcctctcctcccatctctccgcgccgcgcgcacacctcgcgcactcctcctcctccctctccaccctcctctccaccgccgacctcctgctccactcccaccgcctcgtccgcctctcctcccgcctcctcacctccacgccgcctcctgacctcgcccgccaggccgagctccaccgcgagatccgccttctctacgaggagaagaacctcgccggcatcaatgccgtcgacgaggagatgcgcaaggtcgatgcggctgcctctaagctccgatcggaggccagcgctgtgatcgatcgcggcattgctgagtccaaccagaacgacgtctggtgcgggctgcaggtgtactataatctcggagaactgaagccggcagtggaagggctcgtggcgaagtacaaggcggcaggagcgaagagtgtggctgtggcactggacatgaaggctatatcaatggctgcagggggtggaggtggccctggaggcgtgcagaggagtggcacgccacagattggtggcagtaagaaggcggcggaggcactgtgggataggatgagacagtgcatggaggagctgcatcggtcggtcacggccgcatggcagctgcagactgtgctcaccaagaaacgtgttccattcacacaaatgctgttcctcgaggaggtttggcaggagggtgatcctctgttaacagagagagtatgggatgctattgttaaggcctttgcaagtcaactgaaatctgcctttacagcgtcaagctttgtgaaggaaatttttactcttggatacccaagattgttttcaatgattgagaacctcctcgagaggattttaagagacaccgatgtaaaaggcacccttccagctcttactcccgtagggaaaaaccacatgactgcagccattgagatattccagacagcctttctggctctttgtcatagtcgcctctctgattatatcaatagcatatttcccatgtcaggccgtggtataccttcaaaagaccaaatatcaaggttaatttctcgcatccaagaggaagttgaagttgtgagaactcatgggcatttgcttgctcgtgttctacaagaaattggaaaagttttgcttctcctagcacaaagagctgaatatcagatctctactggcactgaagcccggcaagttactggcacagtgactccagctcaactgaaaaactttgctctatgtcttcacctccaggatgttcacacacgtatttcaagcattgtgtcaacacttccaaatgttacctctgaaaaactttccaaatcccttgaggccatttatacagtcgcgtgtgattcagtgagccctctattcaaagaaatgtttgatcgtctcggatcatgcattctgaaaatgcacgagcaggactttggaactcatggaatggacgcaacaatggataacaacgcttcagcttacatggaggaactgcagaagtgtgctgtccacttccgtagcgagttcttgtcaaagcttctaccttcatcatcatcccgctcagagaccatctgtaccataatggttagaagtatggcctcaagagtcctcatattgttcataaggcacgcctctctagttaggccactctctgaagccgggaagctgagaatgacaagggacatggccgagctggagctcgctgttggtcagaatctgtttccagtggagcagctaggcgcaccgtaccgggcgctgcgtgcattcaggcctgtcctattcctggagacgtctcagcttgagaaatctccactccttcaggacttgccccctagtgtgatcctccaccacctatattctcgaggacctgatgagttacagtctccattgcagcgtaacaagctcacgccgctgcagtattctctctggcttgattcccagggcgaggatcagatctggaaaggggtgaaagcaaccttggatgactacgagatgaaggtcaggtctcgcggagataaggagttcagccctgtgtaccctctcatgcttcagattggatctgcattgtctcaggccaagggctaaacctgtgttcagttcaacccagcatcacatatgtttgtatcatcatcatgtaggcattgggtacttgagagatcgattgagctttggaatagtttatacaaatgaaatagcatttgcatttgttttttttatggaaataaaggtgttcaaagtacagactctttctcctagctcctattatgttgtgaagtgtgtgatatgattgatcattgt

SEQ ID NO: 28400 - DNA, 2931 bp, Oryza sativa
  ref <308>: DATABASE ACCESSION NUMBER: AK103842
  ref <309>: DATABASE ENTRY DATE: 2002-08-28
gggtcctcccctctttctctccctctcccgctgccgccgcctccggcttccccgtcgcctcgcgtcctctgcgtcaagtgccagcaatttgcctccctcatcagggccacatctacatgtggagttcatctcccataaaagaggatccacatagtatacctcacacatgaactctgtaataagctgtggtgatctttatatgcttcaccaactggtgaccaatgggctcttttctgagaaaacagcccagtttcctcttaattttgttaattttgcaccttggtgctcgtgaagcaagtgcactaagttcagatgatgaagcacatcttgccttcaagaaggcagttacaacttctgatgggatattcctcaactggcgtgaacaagatgtgtatccttgcaattggaaggttgttagatgtcacagtcacaccaagagagtaatttatctgtaagaccaaaataaaccctacataaatattgtgaaatacttaaaatttcaacctggctattatttttttcccttttgaatatggcattttgtaatataaaaagttcaccgccatcttcgacattggcagctccaacctctgggtgccatcagccaattgttacttctcagttgcgtgcttcttccactctcactacaagtctgggcagtcaagcacttatcagaagaatggtctgtgtcttaaaactttccccaaccgtgctattatttgtgttgtgagtttgcaacaatttggctatcagtctatactattacatggatgcactgaaatcttccccctgtttttttttttgttatttactctacagctggtggcatatcttgtattgtatgttgaaatttaaccttttaaagcaaaattggatttggtcgaaatgatgctagatggtggttatttggatttagttataaggatgctagatggtatgtttggattacagtgcgaatcaaattaggaggttgaagctaagaggtttttattcgagttaatgtttttttttataaaaaaaatctaccaaaagatatatatttgatttgcatatatgcattgaaaattacacatttgcttggtggttataccgttagtccttctgatgtatatgatgtatgtttacctgtaggatgttttcctccgttcctctatcatcattccctatgacgaggtatggctgcttcactttctgtgttggtcttgaatgattctgattcctaattattttggaagcttttctcataaaccaaaatggttttctaaacctttccacgagcaaataattgtttgcaatgcccttaagactagatgaatccatttttagcatctatgttgctacatcaattgaacaatcaccacctaccgatgcatttccttaagttaatgaatgaccgattcaaataaaagcgagaactattgaaattctcttaaattgcaaccttgccactgccagtgagtgatagaatcaagatgatcaattactccaaagtgatctttagaacatatgtggctctttgttcaaacttctcctaatttctctgcagtccaggtgatatcttcaataaatgtcaaaatcattaagaacaacccacagttgaataggcaggataaacggttggtgctcccatgtggcgatcgtggattaaagtaggaacaatggtttaattgggttattcacggagaagtgatattcgttggttgtcatggttgcctggaagggaattacaacatttgattttaagctttaatagcttaggcagcgtttgggctcactaaagtgcttcctttttcttatcttttagacttccactatgaattatttaacacccataaaagaactttccttgcatgattttctttattatgaaatcaacatttatattgacaaacctgcttagcttcagttggacaatgatacgctgcagtaaggcatctcattgaaggacattggtggattctgcactgctgttctattacttaacttcagtagagaatatatttgcccttttgcttgacttcatatggtgttatatttctcattttagatggacattcgtctaatttatctgtaccgtgatctttttctgaaaatattctctgcaaagagaggtcatctgaagcattgttaaaaaacagtaagtagcaaaaaaaatcatggtacaggcgtcaatggtacgcagtagtgaaaacatagttaggagttgcatgttatgttgatttgctattccaaaacgtgtttgaactgtagcaggatgttcctatttaaactagagcttttagccatgtattaccttttgtagcttccctgctgattacgttcgaagaaaacaaaaataatccttattgaaatatgcacattgtaaaacagtaaggggttcttatactgttttctttaattccacaatacagtaaaaagagtgagatcatatggcaacattctttgtgaaagcaacacatccatatctggatgtagtggttgccataatggagacaaggagctgttgaatgcagtattgcttgatgttaaaagtgggtcacaatttccagtgttggaatctaattcagtacatggcaatgaaatttcattgacctctgaaagtgaggtatcaaacttaaggtatactcccatggtacctcagatacatcatgttctaggtgttgaaactgaaagttgcattcattctggtgattcaaactttctggatcttgaatggctttcagcttcaggcaactcaagcgatgaaaggtccattgcaattagtactccagatgtgaacctttcagcggagaatgttattgccacaatgtcttcttttgactggtagatttgtatgatcaaatatagttgtaccatcaccatggacacattattccgatcattatgtaaaactttattttcattttttatatgcattggtgcttcatcttt

SEQ ID NO: 28401 - DNA, 3462 bp, Oryza sativa
  ref <308>: DATABASE ACCESSION NUMBER: AK103843
  ref <309>: DATABASE ENTRY DATE: 2002-08-28
gactgctttccctcctcctcatcctcatcttcatctctagacctcatcttctccagccaccaccgcctcccttcccaccggtggtggcagcgggaagacagcggctcggttgagcccggcggggagggcacgatttggtatgggaggagcagcggcgactccatccggcggtggatccgccgcctcctagtcccagctctctctcccccgatcctcctcctccccttcctccaccgccaccacccacccctctccctctctcagatctggtgcgcggggagcggtggaggctacggcggcggcggcggcgagatcggtagcagtgatggtggagaggacggatccgatggcggtggttctcgtcaaccagttcaaggacgacgacagcagcggctgctgcaacgatggataggctctgggcggctcctccactctcctcccctctctcatatccagtggctcggggtggtggggcgtggccgacgcatccggcggcggagctcggcagaaagaggatggttctagctctccgatggtttaatattgaaacgtacagcccacccaccaccaccccagtcgtccccagctaagcgctcccttgcttgcctcagtagacgagctgccaactagtagcactccagcaagcagcgggtcagcggagtccggagggcgcacgtgcgccgcagcgaggtatcagcatggccaggcggcggctggctggccggccgggttcggcaagcggctaagcaggtgtttagcggaggaaggatcgatgtccggcgccggacagagccgtggtcatcgccttggattacacattgattcggattggccagaggtcttgttgatcaatgactatgcggtgttcatggggtacctgtcgatggttgtcaccgggacggggttcctggtgctcacgtggtccaccgtcatcctcctcggtggattcgtctccatgctatccaacaaggacttctggagtctcacggtgatcacgctcgttcaaacaaggatattcgatgtttttctgaatggaaaagtaagccacattgggtactcattgaagcgcttgtgcaaggccgcacgcttcatcgcgttgccccataaccataagaaggttgggttcaggggtgctgttcgagtgcttgtcttcaccatcgtcttgtgtccgctgttcctgctctacatgtttgggctcttcgtttccccctggatttcgctgtggcgtctaatccagcaggattacggcgtgacggccggagacagcagcagcaaggcacacctgcagcctgcgctggtggttctctactccctggccctgttccagggcgtcctcttctactacagggccatctctgcttgggaagaacagaagctagtgaaagatgtggccgacaaatacatgtttgatacagtgtcgcgcagttcagtttcggactatttacatgagatcaaggtcggatgtgagaatgacccgtcctttgccagagggaggaacctgatcacatacgctgtcaagctgatggaatccacatcaccggatgggtacctttcaggtgcacggattcttgatacactcatcaagtttaatagagatgatgcatcggggagcgaattaccggggcagagtatgcagatatacaatatgattggatctgcatcctccagtcccatactccacaacttagttcagatgctggatttcaaaagtgcatatgatggagagatcaggttgcgagccgcaaggattgttgagcactttgctggtgaggtccgtttagacaaaatcctgcaggggattcgatgtgtatcttccttgcttgaactcgagcagaaaggatttcagaatgaccaccatagttctttccaagaagacgacggcgaccaactttcttttgaagaagaggatgatcaccagatttctgtcaaagaaaaggattattaccccaaagattataaacagatgcaacttacaggcatgcagatccttttaaagctctcctacgacaagaacaacttgttcctcatgagcaacacagatgatccggccttgatcaacaagattgtggcacttataacgtccaagggatcacttcacaaaaaacaacataacgaatggtcctgtatggcagagctcggggtgaagatactaagccgatttatgcgatttatgtatggccctacaaaatcaaacaatattctgtggcatgaaatatcaacaagcagcaaagcaatcggcaccttggagagtattcttgagtgtgaccaatgtgactctgtgctgaagaaacacgccataaggattctcaaaaggatattcatggatacatcttcggctatgggtgaaggagacagagaaaggttcattggctccttgatggacatgtctcttcacaacagtaatggtgactttcaaaatctggcaggtgtagatctggcgctcaagaaacaagggttaagcattctcaaagaaatatacttgaatccatcttcgattatgggcgaaggagacagagaaaggttcatcggctccctgatggacatgtttcttgacaacagtaagggcgactttggaaatctgccaggtgaagatctggacctcaagaaacaagagttaagtattctcaaagaaatatgcatggatccatcttcgtttatgggcgaaggtgacagagaaaaattcatcggcaccctgatggacatgtttcttcacaacagcaagggcgacttgtttgaaaaactagcaggtgatgatctggtgcagatatgtagaagaagtggaagcagtgccacgatcatattgaggaaatatggtcatgatattgttgattgtattgctgatactcgttcaagcgtatatagcagcatgcacagaaaaattgcagcaaagatcctcaatcatctgtgtagtccctactccactgacgaggaacatcttcagaatctgaaggaggccatcattgatttgatacccaaggtgctaagagaagcacttggttgggggttgacaggagaagagatactgcgagtggcagtttcaggccttgaaggtacccaagatgatgactggaaattgcaggaagcattggcgtccctctgtgcaaccgtgtttaacagaattgtcagcaaggatgcagatttgactgctcggttcaacaacatcgccgctggtatctgcgaccagacaacgaagcctcgcatgaccttcgcagacctcatcaatgaagctgtaaaagttcatcgcatcgaatttaaaaaaccagaaaaaccaaaaccagctgccaggccggaactgtacgagtttgtgactgcgaaatacaccccgccccactttatgtttttgggcgaggaagatcccaacgcgtgttgtatctcttgataacaccctaatttgtactttctccgtttcacaatgtaagtcattctattatttcctatatttatatggatattaatgaatct

SEQ ID NO: 28402 - DNA, 1118 bp, Oryza sativa
  ref <308>: DATABASE ACCESSION NUMBER: AK103844
  ref <309>: DATABASE ENTRY DATE: 2002-08-28
gatgtggtaggaggatggcgttatatgtttggttttggtgctccactggcagtaataatggctattggtatgtggaatttaccgccttcaccaagatggcttcttctcagggcagttcaaggaaaggcgtcagtggaagataacaaaaagaaggcaattcaggcattgagatcactgagggggcgctttaggagtgacagggtcttagcagatgagattgatgatacccttctctctattaaggctgcttatgcagaacaagaatctgaagggaacatttggaagatgtttgagggagctagcttgaaggcactcatcattggaggaggactggttctcttccagcagataacaggccagccaagtgttctatactatgcaacttccattcttcagactgctgggtttgcagctgcatctgatgctgccaaagtatcaattttgattgggttgttcaagttgttgatgacaggtgttgcagtatttaaagttgacgatcttggaaggcgtccactacttataggaggcattggtggaatagctgtttcactgttcttattagcagcttactacaagattctgaacagcttcccttttgtcgctgttggtgctttacttctgtatgtcggttcttaccaggtatcgtttggtccaataagttggctaatggtttctgagatcttcccactccgaacaagaggacgtgggatcagccttgcagtacttacaaatttcggctcaaatgcactggtgacatttgccttttcacccttgcaggaattccttggaccagccaatattttccttctatttggagccatatcgttgctctcccttgtgtttgtcatcctaaaagttccagagactaaaggacttacattggaggagatcgaatccaagctcctgaagtaagctcactggtactcaagttgtatgtgtgtgtgtgttttttttgagggcaagttgctatgtgttcattagatgaggttgatacgtgtcggtgtaaatttgttcagtcgatttatgtgattaatatagtcgtacatgtagtattttgtacatgtaaattcttgtttggactaaaaatattctagagaaatccaaaaaagctgttcttg

SEQ ID NO: 28403 - DNA, 3010 bp, Oryza sativa
  ref <308>: DATABASE ACCESSION NUMBER: AK103845
  ref <309>: DATABASE ENTRY DATE: 2002-08-28
ggcgggacataatctgcgagaacacgttgcccgtcgccgtgaagctcgccgtctccgaccagctcatgtcgtctccggcggcgtccgccgaagcatcgggcgcgagcggcgccactcgcctcgccacgacgatgtcccgtggcaggtgcgcgccgctgtcgtccaagtccagcgccgtctcggtgctcggctggctctcctgcagctggaggcagtactcgaggttccacaccacgtcgcccatggacggccgctgctcgccgtagtccgcgaggcacctcccggcggtctccgcgaacttccggagcgagttcgtgctggcgtcgccggcgacggccgggtcgacgatcttgtcgaaccggcccctccggctccactgcatcgcccactccgcgaggttgatctcgtcgggcgggaggctctggtcgatcgccggccgcgcgcacagcacctcgaagaggacgacgccgaaggagtagacgtcggagcggtcggtgagctgccgcgtcttgaagtactccgggtcgaggtagccgaagctgcccttcaccgccgtgctcacgtgcgtctgccccgtcgatggcccgacgcgggacagcccgaagtcggccaccttcgccacgaagccgtcgccgaggaggatgttcgtcgacttgacgtcgcggtggatgatgttatcggagtggccggtgtgcaggtagtggagccccttcgccgcgccgatgcagatctccagccgctgcttccacgacagcggcggcggcgtcgccgccgcggcgtcggagccgtacaggtggctcctcagggtgccgtgcgccatgagctcgtacacgaggatcatctccgaccgctcgttgcagtagccgatgagcgagacgaggtggcggtggcggatgctggagagcaccaggatctcagtctggaactccgggaacccctgcctggacgcgcgcttggcgcgcttcacggcgacgcgggtgccgtcgcggagcacgccgcggtacacgttcccgaacccgccgacgccgaggatgtttgcgtcgtcgaagtcccccgtcgccaccatgatctcggcgagcgggatgtggagcttcatgttcatcctccgcggcgtgaccacggcgctgccgaacgagccctcgccgtccggcgtgaacggcgaccacggcgtccccacgctctccttctcctcctcctccggcacaggcagcgtcgcccgccgctgtctccgccgcacaagcagtacgcacaatgccacacctgctagaaccgccgcgccgagcaccgccgcggtcacggctacgacgacgaccttgctcgtcttgccggacgagctcgccggagtcatatcaacggctctgagcttcatgatctccagcccgttcagtatcgccttcttgctgtcgctgctcgccgccctgccgatgctcaccgtgaggttctcgccggcggtcgggaccacggcgacatagtccatgtagaaagcttgggtcggactgctcagcgtcgcgtagtccttggccttcaattcccgggtacccatggcttgcatcagataaacattgaaatcgacgccttctccgatgacggagctgagctcctcgaaggcgcagaagtggaggcggacgacgtagctgctgttgccgtcgacggcgaacgtccatgtcacgttcgacgtggtcgagttcgtcgtgcgctgcgacttgtacacggcgtccggcgcgaccatctgcgtgtagccctgcgcccggtcgaagatgatctggccctggatgctggccaccgccgagaccgtcgccggggagaggtaggagtcgtcggggagccatgttcgccacatggtgtcgcccgtcggcgtcaccgttggcccgccgacgttgagccggtacagcgtctccagcgcctgatgcgacggcgagacgtcggtgttgaccgccgtcagggggaacttccacagaagctcctgcggcgcggggaacagctcgatggcgttgacgaaggcgagcccccctgattcgggcgtgaaggcgacgtcgaactcgccggagccatcggacgggaggaggaactccctcaccacgccggcgcgcggcggcgagaaggaaggaggcaggaggacgtacctccccatggccgagacgctgaaccgcgccgagaggaggtcgccggactgcgacgcgaaggggaagaagtggaggcggaggacgagcgtggtgttgccgtcgggcgccgcgtcggcagcgtagctgagccggtacgagaagccgctcgtccccgcgcgcgccgcggcgtagagaggggacggcgggctcgcgtcggggttgctgaacctcgcggacttcccggacagctcgccgtcgtccgggacgaaagtccgctgcggcgagtccgacgtcacgacgacgttcccgccggcgccgcacgcgaggtagacggagaatcgcggggagaagggcgtcgtctgcccattggaaaccggcatcaagcccacgacaaggaagagcagcaaaacgatcgcagccatccgcacaactccgagaggtgtggcgggcaccggcgacggcaatcgcgctgtaaattaagctcacgagagctacctactcgtccatggagaatggaagcgatacgaggtcggcatggtggccattccactttccccacctcgagaggtgacagcgattgggagatgagtgatcagatcacacggccgcgcgaggcggtcagctcatcattccccggcccggcggctacgtcgtggtgggaacgccggtggatgcggacaaagggcgcgagagcgatgtgttgtgtccttgtgttggtagctagcgggcagtcatctggagcgggcacgaatatctgcaaataatccaaatctgcttgacttaaagcgttcttatcggtcaaaaaacatgtgccacatacatagacgcagatggtacagggttcagcacaatctgtcaaggccgtcttttccggcccatatttgttcagctcatgagcctatcaaacc

SEQ ID NO: 28404 - DNA, 2465 bp, Oryza sativa
  ref <308>: DATABASE ACCESSION NUMBER: AK103846
  ref <309>: DATABASE ENTRY DATE: 2002-08-28
gaccgtagccaagcaaccctagccgctttccccatctcctcctcccagaactagaatttcgccaccccgaatcccttccatggtaggacttccgtttgattccgggtcgaatccgtcgcctccgatgccggaacggtgaggttttccctccctttatatggacaacacgcgtttgttttttctgttgcgcaggtttcagatcttggatggacttgctcatccttcggcggccatggatctatcggcggaagctgctgctgctgctcgtcctcgcgttcggcgagtcagatctggagccgatctgacctcttagaggtccggttggggcatgctccgtacgagctggcgtggatgaagcggcggggcgagggaggaggctggtcgtcgcctggatcctctccatcggggcctcgcgcgatgatgtctctttgtattgataattattcgatgaactttcgataattattagatctaagagatgttgttcgagggagccgtgtgctgagatgaaggcggcaaggtaagagaacatgtaacaagcgaggtgcttgtgtctgagggtcaaaagaaaaagagacgaaaaaaaaaaaacgagagatgtgacatcgcaagattggcctttgccatgttgggtgcgctcgcatggcaggccaccgtaataaagatgatctttttgtgtcctggggggagttcgcacgggggttattttgtttagccccgggttctccccccaatcttgtgtcccgttgtcccctggttgtcctcagatcccactgcgactacatcgttcaacgatcgcgcgtgaatctaaacgtggagctacagcgcaacaaccaaggtacaaaagataatctacatgtgcaatattagtcgtaatcaaatttccatatcattcagcgtttcataattatcactgccttaaaatatccctagtcacataatattcctggatttactttaaattgcttgaattacttaattattattatcattgccaattaatatccctgataaacagcagtattatcatccctagaagtgcatctcacatattgactcaagttgattaaagttacgcttggtaattggtttaagagcagctggaatactacgcaattgttctaacgaatatctagtacttgctttgtatacttaaatatatccataagtcggtgtagtggtaatatttgcttccgagattatgtgctcagctatactccgaactgtcaactatcagtttggaagtatgtgttgttggtcaaatactattatgatgtttccagcatacgattggagaactcttgtccaatttaagtgaaataagctcttgttcttgcccagaatttacagcgctcctgcgccttaatatcaactaattgtgtatgatttaaccgctcagctctttcactttgccctttctgtatttatgcatgtacgagaaggctagtaatgttttatatatttgcactgtgagaatttcttttcttggatagtcagcaatgtaacctcttttgcaagctgtagaatatgatcatatgttgtcctccttagcattatgttagtttctgtacgttgaagtacgagaatttatgttcttgaagcaaaaagttatttagcatttgtctattcatcatagtttgtactatgtagaaattgtagcattctctcgtcgttttaaggtgacctgaagacaagttcaacctgaagtcacccgaagaaaggagtattcttgcgaatcaaacttggttgaggtggccgtctgggatcttgacatctgaagcttgacatctgaagcaagatgatgatgttttgctgtgatcacctgtgctcattacatggtgcttcaggaatgacttgtctaatgttggtaattgttggtgctcatcaattttcatggttattgttggaccgactttccggtatgctggattaagctgttgcagctttgaagtctggggtgccaaccttgtttggactaattgccagatgtatcattataaatttcttcggtgagagttgagcaccatggaggttctggataacagttccgtctctgctgcggaaggtttgttttcttgaggtcaatccggaggtaaatggctgtaatttgggtcgtgtaaacagcatggcggctacatgttataccaaaaggataagacactcgtttttattttacacgatgagttacactactatattagctgacgtttttcacaaggttatgtttgatttgagtttattatgtagttaataatgagctaaaagtaagctgatgaagtcttttgtagggcagaaaacaccaagtcaatttttgaagggctctattgttttggtaaaaatcactcgagtattgttttgttttttcagagttgtgtagtgtgtttaggatgttttggttctgtttaaagaagtgcacgcacaaactgaggtaaacggttcaattcaaaatactcttaaatcttacc

SEQ ID NO: 28405 - DNA, 1718 bp, Oryza sativa
  ref <308>: DATABASE ACCESSION NUMBER: AK103847
  ref <309>: DATABASE ENTRY DATE: 2002-08-28
gaaagtccaaacttgccaagttcatccatcctccccttcccccctccgatcccctcccatcccctccccgccgcctcgtgcgatcgatcgatcgatcgatccgcaccacccacgcgcccgattcgccctcctacccaggccacctctaaccctagcgccggcggctcttctcccccgccgccaccgccgctccaaccctccccaacagtgggtttctctcccccccaatcccctcccctctaccgccgtcgatcgacgcgccaccaggaggggagcaggacgaaagccggtgctgcctaccgcctccgcaggtacctcatcgagcatcggtcggagtgcaaccggagtgccaaggtgtatttcatggattcttttcaacatggcatggatgctgataaacaccacatttttggggagcgtggcaatatgattcagttaaatatgtgtgcatctgatggtcgttctgttgttggacaacgatgccagagacttgggtgtaacaatgttgttgaaggccagacattgctctgtaaaagtcacagtatagggcaacgatgccaaatgcttggctgccctcatattgtaccagatggctcagtattatgtatgtcccatggtggaggtcgcccgcttggtgaacctggttccagtacagtagcttgctccaaatcagaaatttcaatcaagtacgaaggagagagtgggttcagagtaacccaaaatgctgggaatgatctgggtagtgcaggaatctataatcctgatggtgatgttgtgatgtgcaagtaccagggttgcagcaagcgagcccagggaaatgcaatgtactgtaagattcaccgcggcggttcaaagggctgcatggttcaaggttgtacaaagggtgcacatgggggcacacctttatgcattgctcatggcggaggcaagcgctgcgctgtcactggatgccccaatgcagcatgtggcagcagtcaaggcctcactgaccgctgtgtaaggcatggtggtggaaggaggtgcaggtttgatggttgtgtgaagggtgcccaagggaacacagacttttgcattggacatggtgggggaagacgctgcaagtttgaaggatgtggtaagagtgcacaagggcggagtgattactgcatcaaacatggtggcggcaggcgctgcaagtttcaaggatgtgccacgagtgcaaaatggggcatggatttctgctctttgcacagaaagagcttgatgagcggcagcaattcttcccatgaaatgctgccagcgccaccgcccaagcgccgggccaagaagaccaagaccgcggttggtccatctggtctctccagtgaccccaaatcagcagagagtgtgatgattaagcatgcttccaatgcgggtcaccaacaacagccgatccactctatgaaatcctcgccgtcttctgggttaactgcttcaactgagggtgatgtggcggcgaggagccatgcattatttggactgtagataccttgttgatgcataagagtggtttcgcatagacttgttaactagggggattagctgtgaactgaagtgaagataaggatcataggagatccactttttatattaacatgctttcactgtcagttgacttgagtagaactgtgcattgtgttatctgcaaggattatcaacaaatttaaatctgcatagtacctatgtatgtggttctgtcc

SEQ ID NO: 28406 - DNA, 2032 bp, Oryza sativa
  ref <308>: DATABASE ACCESSION NUMBER: AK103848
  ref <309>: DATABASE ENTRY DATE: 2002-08-28
ggatttgccccgtttcgtaccgtacacccacgctggtgaatccatacgccgctggccccggcgccgcctcccgacgctctggctctcccgactgggtcatgctggataaaacagcgtacatctccgaccgccggaacgcgtccacggctgaatcccagacgagcgagggccagatcgtccaggtgtccttctgactcgtcgatccgccgggttattcctacttcaccgtccattgcccgggactgaagggggggacggcttctccgacgagccctccgttctcgccgcggaaggatccctcgttctcttccgcgtcaatttgtccccgcgtcccaggaggtctggcacctacatgagcccgtgcaactacttcgtctacaccgctggccccgggcgtccatggctcgacctgcttcctgaccccaatgccatgcccttcaactcccagcaatttggcctcttcccttgccgcagcggcgtcagtgagcactatgatgtggccttcctcaattctgaatgggtggcctctgatgaggcttgccagttcgagctatgcaccttctcatccaagaccggaaggtggagcagcaaaccagtcttgctggacttgtccccgtctgagattcacaaggtagcgatcgagcatgagaccgacaagctgatcaccattggacacgattcgttgggtttggtcgatctctggcgtggtattattctgctcgaaaagctgttcgacgactacccggttatgagatatatgacattccctaagccagtggtgtacaccatagatgcgtacggtgcaactgtatgcggtgaaatagccccagagtgtgctcgggatgtcgcctgctgcgatggtttgatcaagtttgtggacatagaatactgctacagtgacgacgtcaatggtaatggttggaaagccacgatatggaataggatgctttcttggaaagattggcgcaagcgtttctcagttgacaaatttgacatcttggttgatcccagttactccactgttttgcccgatctatgggacgataataccaaaatgatgcaattgaagaaactgatttgtactatccccactctgagcatgtatgacgacgattttgtttacatgatgtccacgatgactgaagaagacaaaaatgcctggatcatctctgttgacatgaaacagaacactctgcaagctgtggccccaatttctgctgaaaggttctccgttctctgttcagattgtcgtccctgtgcattctccaagtacctcaagattacctcaggggttgtcattcccaatcctgtgggcgagtacaccaagagaaatcatcttcaggaccgtgttctggaagcgctacggactcaagactcgttgaatgaacttgacgattgctcagaatttgagaggtcaaacttcgaggagtacaggtcactcgttcagtccagtccagtatcatctctgcattccaatattcagaatgttgctggatattatgcttctaatgatattgagaaagcggcctccaaagctgtgaatatttgcttacgagcttcggaagacctgaatcaggtattacaagagtcaaccagttatccgtcagcacatgctgaagccatcaggagcaaaatcaatgttgtccttagagccataggcagcctcgtgcaaactgtgccagtgcaaccaagaatgacgacggttgctgattcccacggcgtttcgaagatttatagcgaagaagagaaaaacaactctcacgaaccataaactggatagtggtaacacactacacaggccccacgtggcgtaagtatggggctgtttggatagcttacccactttgccatacttatttgcatgtggtacaccatagtttcttggcaaccaaaaaagagccatacgcccatacttgtgacaagcttttatactaacgagtgcataacatatggaccataagagtaggaaagtgtatcatatgccatatctttagcttcactcaaaccctcacactaaaaatttaaacttgtc

SEQ ID NO: 28407 - DNA, 2572 bp, Oryza sativa
  ref <308>: DATABASE ACCESSION NUMBER: AK103849
  ref <309>: DATABASE ENTRY DATE: 2002-08-28
ggttgacgggtaccgtggattccaccggcggcgcagagccggagaccggagggcggcggaactccggcgagctcggcggtgaccgacggtggaaggaaggtgcattgttcgtcagtacaccaagctctcatcaactcgccgagcgcttcccctccctccgctccatccatccatggcgtcctccccgcctccatcgacggcgtcccccacctcctcctcgccctaccggaagctcctccactccgtacgcctcgccctcgccctcatcttcgctttcagatactggagttgggagcaagctggaggagttcctggagctagatgcattggcgcgtgagacccccgtggagaaatgggatggtaccctcttaatcacaactacaggaatcgatgacaaagctatttatcgttatcaatttaatcttcaagaagacacatcttcaagcacaagatttaccaagctagtgaccacgtacaaaagtcgtgctatattcagtggaactgaagtatgcctttgcctgccaactgaagctgatgttgatgacttaatattatggttggttggttttgtccgcaagatattcgtgctaagagcatctgtaagtatttctgaacttttttctctagttgtaaccagtgtgttcttcctattttctttgttcactatgttttttttccatatttcataatgactgatcatatttatactcaccattaatccctttaatcctgagtccttaatcctcaagtcaaaatgccaaatgctattcgtccatactgaccatacacagctggtgctattgtgtgtctatctcttagcagcgggtgatgctgttctctgaggatgtgtttttcttgttagaataactgtgtcatttacaaagccttctagcttatcccgtatcatgtgtggcgtactgctctaacaacagtacattatcccgtatcatgtgtggcgtactgctctaacaacagtacatttcatgccacttatatcatctaaatcgaatgtgcagattgcattatgtgaatactttttcacacactgcaggacatgtttgatgtatttctatatgtgttcccgttttatatggagtctcatacctttgtgcatgatgtgcaaaatgaaaatacatgttcctgtatttatttatttacttctgaaaattcacaaatacaaaagtaacaaaacacggtgttcattggtctatgctacagggcaaaacaactgaaaaccctaatattggagtttcctacagatgcatttgtttgataagttcttaacagccatctgatatcatatcaccaatttgtctgcctgcattttcagaccaacaatattgtgtatcctgagatgtaattaaaggatataaaactgatgatcatgattcatcctcagtacttggttacattccattcctccgaacatgtctaattttactttgtgtttgcatatgtccagttttagttgttgcacagtaaacaggcctagaattagaagcatctatctgcttttactctgttttttcttattgtgacctcttaaatggttgtttgatttcttttgtactactcagaatttagcatgtgagctctttgttgcgcaaacagacagtgctggatcaggagacgtttgtctgtcacaagattctgatgatgtccatatttccattaccacatcaagtattgaccgtctagtttctggccttaaagattatgcactctcacatgctaacacatctgacaggtgtgaagcatgctacatgaacaggttttgcattttgtagagttcataccatgtccaatctcacaatcctccctcagtgcgctgatgagcatagactggcaaagctacggtttcaagtttaaagggggtttcattgatgacgatggaaatgctgagcttcaatgggataacatggcattttctcatgtcgatattgccattcacacttaccacgaaggtgctgttgatgaatggaagagctctcaacctgaaaggcatcttctaagaaaggcacttaagtctgcattgtttggattgaaagcagaccatgcagaagactttctcaggtgccatggccagaaggttcgcgagtatgtccctgatctcgcagaatcgatagctggcttaatcttatcatccaatgatcaagagttccaagatgagtgcatcgctcttctcggcctaggctcagatcaagatctcacagaaggggcggttagatcctgcatcggtgagaagatgaaccgtatcgtagagatgaatgacaccaaggagaacgtagagcacaacgcaccttatctgttcgagtgcgagaggttcgatgaagattatagcctactggatgaagacgacccagatgaggatatgattttcgatttctagcatttccaattgtctcgtagcactcctaatccagagatctcctatgctgtgagagagctttactttgaccagagaactttataaacactaacaaagactgctctctgagactgtttcctgcctcgtgtaaacaaaattcagacattgttacgtcaaaaattcagaaactgcaagtaattgccc

SEQ ID NO: 28408 - DNA, 1179 bp, Oryza sativa
  ref <308>: DATABASE ACCESSION NUMBER: AK103850
  ref <309>: DATABASE ENTRY DATE: 2002-08-28
ggcagcggcgcctctccaccgggaaccgctcaccggccgccacacacgagtgcaggatgctccccctcgccgccggcgccggcgccgcgagaccctgcctctcctcctcaccggcgccgccggtatcctcgcccggggcgattcctctccttcgccacactcctatccctcaccaccgcaggcgccccctcgcggcgctccgaacccgcatcatgctcctccggcctctcagagccgccgcctcgccggggccggcggcgtcctcgcgcccggcaagggaccgcgtgattgacttcgggaagcacaaggggcagatgctgggcacgctcccgccgtcctacctgcggtgggtcgtcgccgagctcgactacggggacaccgcggcatgggcgagcctcgcgcgggaggtgctcgacgacccggtctacgtcgaccgcgtcgagtgggagcacgcgcaccgcttcctccgcggggacaccgactacgacggcgacggcgaggatgggccgctccatgagatggccgaccgcttcggctgggacctctccgacgaggaggggtggagccgcctcgacttccgcctcctcggcacctcctacggtggccgcatcccgcgaaagggcggccggaggcaaaccaccaccagctccctgttcgacatcggggctgaaacggacggcccgcgagggaagcgggacgagaggagggagcggatgcggctgaggagggagacgcaggtgaggggtgccaagttggatatgctcggggtgaacgccggcgtcaaggacggcggtgttctagggacgccgaggaaggcccgtactaggacgacggccaagacggacattttgggattgggtcggcgcaggagccgcggcggtgaggtgctcggcgagaaggtgttgcctggttccggcggtcagggagggaacccgttccccggccggcaagcattcctcgacaaggtcaggaagctgaaagatgatagctagtttggcgacttcaggagatcagaacaatagggtgaattgtacatgtaaatcttgattttggctgaggattattagtttacgattgactgaacgatttgtgagaggttggttatgctgaatttgtgcagttggttgcgagtttgcaattgtgtatcattgcgccctgtaattgtgattcacatttctt

SEQ ID NO: 28409 - DNA, 1089 bp, Oryza sativa
  ref <308>: DATABASE ACCESSION NUMBER: AK103851
  ref <309>: DATABASE ENTRY DATE: 2002-08-28
gagctccgtgccgaaaccctcctcctcttcctctctgcctttcttccgctccacgccgccctccgccgccgccgccatggctgatccgcggctgttctcgtcgggatccggcacccgcgacgaccggacggacgcctccggcaggcggctgtacaacccctaccaggacctgaatatcccctacaagcagctctacgacctccccacctccccggagttcctcttccaggaggagtcgctcgcccagcgccgctcctggggcgagaacctcacctactacaccggcataggctacctctcgggcgccgtcgccggcgccgccgtcggcctccgcgacgccgcgcgcaacgccgagcccggggacaccgccaagatccgggcgaaccgcgtcctcaactcgtgcggcagcaacggccgccgcatggggaacacgctcggggtcatcggcctgctctacgccgggatcgagagcggcatggtcgccgtccgcgaccgcgacgactggatcaacagcgtcaccgcggggctcggcaccggcgcgctcttccgcgccgccaacgggccgcgctccgccgccgtcgcgggcgccatcggtggggtcctcgccggcgccgccatggcaggcaagcaggcggcgaagagatatgtgcctgccctctgattcgtccgcacggtattctctctgctgtgataagaaatggtcgaatcaattggtcgccaaaaggaatgtcatttcttcgttttgctctcctggttaatttattattggagaagggttttcttctcgacattatattttagcgttatgttacatgtaatcgatatgatcggatcagatcactaaatttttggcctatgttgcaatgtaacgtcttctcgagtagctagttagctggtaccaacacaataatacatacttttacgttatgctgatggtgagtccgtgacaatgtgaaatgtaatgttcattgtagtgtagttttcctagattattatggtgtgtgtttcacttgcgatgaaacaatatgccataaaagagtaggctaatgtttgcacatttctaatctatctatggatgccatcctcatt

SEQ ID NO: 28410 - DNA, 1529 bp, Oryza sativa
  ref <308>: DATABASE ACCESSION NUMBER: AK103852
  ref <309>: DATABASE ENTRY DATE: 2002-08-28
gggaaggcctcgtcctcgtccaaattaggcccacaagtaggtgtccggagcttacaagcgaagcgaagctgcggtttcaagcggccgccggctaatccttgcgccgccgccgcccgccgcccgccgccatgattcacctccggaggagcttcctttctcgcctcctccatccaccgtgtcccaccccggccaatcccctccccctccaccgcctcctctccagcgctgccgccgccgcgcccatccccccggaacccttcgccgtcgaggactacctcgtcgactcctgcggcctgacgagagcccgagccaagaaggcctccgggaagctctcccacctcaggtccccctccaaccccgatgccgtcctcgccttcctctccggcctcggcctctcccgcccggacatcgccgccgtggtcgtcaacgacccgctcttcatctgcgccagggtggacaagacgctggccacccgcgtcgccgagctcaccgacctcggcctgtcccgctcccagatcgcgcgcctcatcccggtggtccgcagcctcttccgctgcaagtcgctcgccccaaggctcgccttcttgctcaccgtgtttggctccttcgacaggtgcctcgaggttatcaagaccaactatggcgtccttagctccaacgttgaggcggtcatcaagcccaacctcgccgtactcaaggaatgcgggatatcaatagcggataggccctcatacgcgttcgcatcgcgggtgatcagcaggcctactaagcacctggaagaagctgtggtgcttgctaacgagtttggagctaagcagggaactcgggtgtttactaatgcggtcatgatttttggaatcctcggacaggagaagctcgccaagaagttggagttcttcaagaagcttggttggtcacaggacgatttgtcattggcggtgaggagcatgccacacatcctagccatgaaggaagaaaggatgcgtcgaggtatgaagttcttgaccgaggatgttggtctagagataccatacattgcacgaaggcctgcactcacgatgtatagcattgagcgccggttgttgccacggcattgcttgatcaatgttctcaaggggaacggattgctcaaggccaattatgacttctataatatctctgtgattagcaacgatgatttcatggaaaaattcgtgcaaccatatgtggagagtgttccaggccttggtgatgcatatgcttctagctgtactggatgtggagtgcaccagttgaagctgctctcaaagcgtaagacaaagtgctgatgtttcttctagtaataccagcaagttgggacaattttaaggttagtttatcactttgattcattcacttcaggagccaaatgaaattgggctttgctctcaacaagccaaactaagatttggtcttgattaatggtgtcactatgccattcaaagactgaactttctattaaatggattagatgaatcttaatggattgagctgacatattttgtagcact

SEQ ID NO: 28411 - DNA, 2323 bp, Oryza sativa
  ref <308>: DATABASE ACCESSION NUMBER: AK103853
  ref <309>: DATABASE ENTRY DATE: 2002-08-28
gaaactgatcagatcacacacttcagactacagtcaaacagagcccttgcttgctttgcttgtgtcttcaacttcagagaccccctcctaccctcaaaaaatttcccctttcttttcctccgtttcttgcagcgacaagagaaatactaatactcctcctcctactactgctactgtgcaaggggaaggacacgacgacgaattggagagcggcgtcctctctgatccttttttttcctttattgcatctctctctctctctcgccatttttcttctaggttggtctctggatcaggccattgagggggaaagaaaaggtgcgggttttggggggaggttgttcttgcgggaggccgttgatttcgccgtgtgatcggagggagtgaaaaggagatgaatgagaaggacgccactgatttggaggagaggagtgaggccagtgagcacggccaagctctgagtttccatggtggtgccatgttcttgcaagaggctcagattgcttctcctgcagctgcaaataatgcattgacctccatggcgaatcctttccctatccctcctgggttgtggaatccaccttcacacaacatgggtttaggcgaaaccagtttttcatccttgttggggatgctgtcggccggcgcgccgccaccgtttgtggctactcccgggtttgtagattccacggcggggtttccttgctacaatggaggcaatcttggagccatgatcaatcaccctttccctggtatccaccagcctttgggtgatttccaaaacggcgtcgagccatgtagggagattgaggatattgagattgaaggatccaagaatgtgtcacaaactggtgagaagcagcaaggggatggtgagacaacgcatgccgtcgattcctcctccaaggagctaagcatgccagggcgcaatggtggcgctggccatgatgaggggactagggtgtcttgttccaagaagaggaaaagatcaggacaggatggtggggtgaagcatgcagaaggtggtgagcaattagcaactgtcggttcagcgcagaagaatgaggatgatgaaaagggtgaaccagagaggtcttctgtggcgtccgggaaatccagtgggaagcaaataaaggataatgcaggttcaccaaaggaagactatatacatgtaagagcacggcgcggtcaggctacaaacagccatagtcttgccgaaagggttaggagggagaagatcagtgaaaggatgaaatatcttcaggatcttgttcctggttgtagtaaagtaactggtaaggctgttatgctggatgagataattaactatgttcaatcattacagaggcaggttgagtttttgtcgatgaagctagcaagtgtcaatccaacactggacttcaacatagaacgcattttatctaaagatatttttcaatgtcgaggcactactgcatcatctgcctttggcttcttcccagacattgttcatccccgattacacccaccaaaatatacacaagttgggatgcccagcattgtgaaccccactgatgcatttggaagagtaatccatgctccattaggaactaacagtgcattcaaagaacctaaacatcagatgcccaacaatttgaatggagagttccaggacgtcattgagatgccttttactcatgaccatcatggatcaaatgatcaaccctgagattgattccacaactgaagcaagagatcaatatgtgccatgggctttcagcaaaactgtgatatatgagcatgttgatatcatggtactagctcacggctgatcactgaagtataagcatccaaaatgcttagttagtgctatttttctcatgttcatagcagcaattgacctcctgtggaagcctctctttggatgttccatttgctgttatagaaagttgggagataaaaaaaaaaggatgttcacatggagatctcaagcaatttgttctccactgaagtagtctacagtcttgaaatggcgagaagcttcattttgcaagaaggtgatttttctgtggtctcgtcaaccccaggattattacatacactagctagcattgtgaggctacagaaattgttctttgttgtacttgcttagcccatgttccatctgacaagcaacataggcagaaatgcagtcactgattttgtatttgttgaaaaaaaaaataaatgggcttggcctgatgtagcaagcatttgaattttgcaacgggtgcctattggcacagatgtttttattccagcaaagctgtgaattctgaaagagaagaaaagagaactgtgatcc

SEQ ID NO: 28412 - DNA, 2341 bp, Oryza sativa
  ref <308>: DATABASE ACCESSION NUMBER: AK103854
  ref <309>: DATABASE ENTRY DATE: 2002-08-28
ctgttgtctgcactggtgaatgacccaagtaaccatgtgaaggacacaactgcttggacccttggaagaatatttgagtttcttcatggttctgcacttgaaactgctcctattatcacatctgagaactgtcagcaaatacttaccgtgcttcttcaaagcatgaaggatgtcccaaatgtggcagagaaggcatgcggagcactctatttccttgctcaaggctatgtggatgcaggatccgcttcgccgctaactcccttcttccaagatattattcagagccttctctttgttactcatagggaagatgctggagaatccagattgcgtactgcagcttatgaaactctaaatgaagttgtcagatgctccattgaagaaacaggccctattgttatgcagttggtacctgtgatcatgatggagctccatcagacacttgaggcaggaaagttatcaactgatgagagggagaagcggagcgaactgcggggccttctctgtggttgtttgcaggtcataatccagaagttgggagcgatggagtcaacaaaatattccttcttgcaatatgccgatcaaatgatggaactgtttttgagagtttttgcctgtcgaaacgccactgtgcatgaggaggctatgcttgctattggtgcattggcatatgcggcaggtccaaacttttcgaagtacatgcctcagttttatcagtatttggagatgggactacagaactttgaggagtatcaggtctgtgccattaccgtgggtgttgtgggtgatttgtgcagggcactggaggacaaaattctgccttactgtgatggaatcatgacccaactcctgaaggacttgtcgagcaatcagttgcatagatctgtaaagccacctatattctcatgctttggcgatattgcactggcaattggggagaactttgagaagtatttgatatatgccatgcccatgctacaaagtgcagcagatttgtcggcgcatgctgctgcagctgatgatgaaatgctcgattacaccaaccaattaaggaatggaatactggaagcatactctggtattcttcaaggatttaagagctcccctaagacacaattactgatgcagtatgctcccaatattcttaatttccttgatgctctttacaatgggaaggatatggatgatactgtgatgaagactgcgataggtgtactgggagatctcgcggacacgttgggtgtccatgctggccctttgatcaatcaatctatctcaagcaagaaatttttggaggagtgcttagcatctggtgatccactggtcaaagagtcagctgattgggcaagggttgcaatcagccgtgcggtttcaggttgaggtcacattggtctcgagtctgcacatgcatcattccacttgtcatgtccgggtcttggttgcatcatgtctagacctgctctttggagaagtcaacccatccttacagcagagtcggaggtcctcactaactcatgcatcaatacatgtgtcagcctgtccttatcacttctgcagaagagagggttaagttggctgcctgctaactttgcttaaggcatctagaaccttcatttcttactggaggtgagatgagcttctacagttgcctggcatcccgattgttcatcggcatggcttggcatgcgtagggtctgggtgctatcgttttccattgcattcattgcatgcatcgaactttggtcggatggtcactcgatacatggtccagttgcttatgtttcaattaagcaaaaagagggctcgaatgcattgtcacaggattattttgtattagctcagggcgacaaagttcattatgtcggacctgagcgttctgtccctcccttagctggtagcttttctttaatttcctagcattttcttcacttgcattgtcttgcattcattcttggtctgttttgtaagagttcaccttttatcaaaacttcggtccagtccggtccggtacagcacgccgttgtacaagtcctcgcgtgcatcggtttatttcctggtgtatcggagcagcaggcatttgtactttctttctttttttttgggttactatcctctgctccatttcagtttccttgaagaagctgggctgctgaaaaacaaaaacaattataggtcttggagtggtttttttgggaggcggttggccgagttgaatttgtttacaaaaattgtattattctatggagctctgcctcctctctccccccatgtgtcatataatttgctggcatattatgagaatatggtgaaatgcgttgaaatgatatggtgttttgcttgc

SEQ ID NO: 28413 - DNA, 2098 bp, Oryza sativa
  ref <308>: DATABASE ACCESSION NUMBER: AK103855
  ref <309>: DATABASE ENTRY DATE: 2002-08-28
gagagctcgccgccggtgccccgacactgcggcggagcgggactgcgggagcgaggtggccgcgcgcgagcgaggctttcctctacctccgccgcatccacccctcctcctcttcctcctccacgatcacctcctccccaccctgcccagttcggctggtcctctcccgcccgccttcttcttggttcctcttcaagaaacaatcccggccatcgatcgccgattccttcgagggctctggacacctgctacaccttgaaatacctaagttgctctgctgtatttctcaatggagcatctttccgaggaactgatcatagagattctcaagaggattacaaggacaagtgatctgaattctgtctctcttgtgtcgaagcagctctacgccatcgatgcggagcaaagggctactatttgcattggttgtggactttcaacagaagatttctcagcactttgttcccggtttcctaatttgctcaaagtagagatcgattactctggttcgacacctggcaatgggaaccatattgacaaccaaggtctctttgttcttacatcttgttgtactttgcttaatgatattaccttaagcttctgctcaaaaatcaatgatgctggtattgcttgcctaacttactgcaagaagttgatgtctctgaagctgaactccataccagaagtaacttcaagtgggcttctcatggtagcttttggttgcaaggctctatcttctctctaccttaatgattgcaagggaattgctggcagcactgagtggctggagtaccttggtagtgacggatcattggaagaactcatcgtcagcaattgcaagggagtaagccagtataactttttaaagtttggtcctggatggatgaagcttaagacatttgagtatgaaaacaaggaaaacttttttagtattcacccacgttatggctcatcagtcaaggctaacacacatagatatgaactgtgctgtgagaatttgaaggatttgaagttggtgcgtcttgtaacagagccagacggcccagaaataggacttcgttttttgttggggaagtgcaaggcgttagagaaactgtgcctggagtatgttactggtgttattgacaatgacatgattgtgctatcccaggcctgcaaaaaccttaaaagcatctcactttggctaaaaccagaacattacgttgttggtggtcatatagagttcaggacaggttttactgatgaaagtctcaaggctctagccctcaactgtcctttgcttcaggatgttgaactcacatttacaggttgtgcgcactgggatccccctgaaataggcttcacacaggaaggacttgtgagtttcgtcgaatcttgtccaattcgtgttcttgtgctaaatggtgccctcttcttcaataacaaggggatgaaggccctatcctctgcacaattcctggagacactcagccttatcgattgcaacgaagtaactgatcatgggatgcgatttattgtgcattttccaagcttgattaacctcacactccggttttgtcataatgtgactaatgctggtctgagcgagctggctcatgcacaaaaattacagtctctggacgttggtggctgtggttacatttcccagaaaggtgtgctgggagctgccaaatcagtctactatgaagtgaattgcaaaagtcttggccattataagaggatgtgttgaagctgttaagtcattgcttagagtgcatcattagcattaaccagttatctttttctcgtcttactattcaccatcattttgtacttgccagtacttaattgctgtggaaagctctagcataagaacgtgttatggtgtagattgtggaatgaacgaaaatcctcagtgacttccagcactagtgttctcaagatggttctgcttattttgtcttgaatgaagttcagaattcatctttcaccatcattttgtacttgctagtactatcagttagtctttttattgctgtggtccgctgtagcataagaacggcttcttgtgtattttggaagatggctcaatgaatgaaaatcctcaatgatttccagc

SEQ ID NO: 28414 - DNA, 3011 bp, Oryza sativa
  ref <308>: DATABASE ACCESSION NUMBER: AK103856
  ref <309>: DATABASE ENTRY DATE: 2002-08-28
gactcctgtggacggcttccaacttcccccaatttttctctctttttttttcttcctttccttcgccgcgaagcactccaccgccgccgccgcccccgatctcttcctccggcggccgccatgtcgtcggcggcgaacgtgatgctggcgatccacgagaagaggaccacccccaccgacctctaccgcccgctccgcctctacatcgcctccgcctactcggagcgggaggcggccgcggccgacgacgacctcgccgcggtgcgcgacctgcgcgccgacgtcgagcagccgtcgctcccggacccgtcctccctcgagcgaaggcgggacgcgctcctcgcctacgcgcgcgccctgtccctcgtcgagccccgcttccccatctcctccgaccgcgccaacgtccactccctcgccttcacctggcacgacgccttcaagaccggcaagaaggccagcgtcgcctccatccacctcgagaaggccgccgtgctcttcaacctcgccgccgtctactcccagatcgcgctcgccgcggaccgggccaccgacgtcgggatcaggaccgcgtgcggctcgttccagagcgcggcgggggcgttcgcgtggatgagggagagcggcgtcgccgccaaggccgtcgcggccggggccaccaccgtcgacgtcacccccgagtgcgccgccatgctggagaagctcatgctcgcgcaggcgcaggagtgcttcttcgagaaggtgatagccggtgggaagccgcccgcgctgtgctccaaggttgcccggcaggtgggcatattctatgaagaagcctatgcagctcttagcgcagctcctctcagtcagcactttgataagacatgggtttctcatgtccagctgaaggcagctcagttctatgctgatgcttgctataggtgttctttggatcttcacgagaaagaagaaattgcacaggaaattgcacgtctgaagattggaattagcgctttggcagatgccaagaaggtggccaggggagttgctgccccacttcttgattctgttaataagctggagagtaatatgaagaccaacttggagagggctatgaaagagaatgaccgtgtttatctgatgagggttccggatgctagttctcttggcgcgctccctgcagcatcacttgtaaagcctacatctttggctgaagttctagatgctagcaaagagaggcttttttcatcacttgtgcctgatggaagcatgaaagcactttccaagtacactgagatggtagataacatcatcaggactcaagcggagaaattacagcaagctagtgagatcactagagttaggttgaaggaaatggacttgcccgattccattctttcattagaaggtaatatcaccttacctttagatttgaaggaagacgttgaggctgttcagataagcggaggccctgctggattggaagcggagttgcagcagcttagggatttaagcagagtcaatcaggaattacttgttcagaccgaagagatgctgcagaaggaggcgaatgaagatgctcagtttcggacgcaattcgggagtcgttggactagacctcaatctagcaccctaacaaaaaacattcaagaccgattgaatctgtttgcttctaatcttaagacagctggtgatagtgattctcagattgagcgaggtttgaaggagagctatccattgatatctattcttgacagaagaccgatagagtctgcactaccgagtatttctaggcctattatgtccttggatgggaatgaggatgctattgttggagcccttaaacaaagcttgaggcaactagaatctctaggagcacagagagcaggtcttgaagacatgcttaaagaaatgaagagaaaggatgacatactccctaaattgatggccggtgttggatcacacgatgatctttttaagaaggagatttcaaagtatgatcctgtctgtgctgagatagctgataacattgtggcgcaagaacaactgctgctacaaatacaggcacaaaatgaacagtttgctgcggtgttcaacctagaggattacaaagttgctcgtgagagatgttacaagcaaattgctgcggctgttgctaaataccgagatattaagaagaacattaatgaaggcctcaatttttatgtgacattacaggaagcaattggcaaaataaagcagcagtgcagtgacttcataatgacccgaaacattcaatgccgtgaaatgatcgaagatgtgcagaagaagctagcaggtttcagcttctcatcttcttccagccaagcaagcatgcagaggaatacttctgtgccaccagatcagaacagtccatcaccaccaccaccgtcgtcgcatgctccccatgctcagggcccatatggtgttccacccggaggcgattcaagacccgggtactctcagcccgagcaaagacctgcttactcacagccatacccgccctatggcgcgccaccgcaacagcctccatatggtgcgccgtcgcaacagccaccttatggcgcgccccaccctggtcactaccaacagccaccacaccagcaacctcccaaccatgactatggccaacaagcatatcctggaggatggcgcgggcagtactacaatccacatcagccacagccgcagccacagccgccatatcctcagccaccgtacaatgcccagggttcttaccctcctcaccagagcagctactacaggcctcaatgagagatggttttgggatgtggcagaacatgtttgtgtgcctctttttatttttcttcagactgcgcatatgtgaattacgttttatggtgtactgcttacaaagtgaggtggtgtaatatcgattggtgtcaggttggttagacaatagcctgtatcatttggtccgtattaataatgttgaatatgatatatacaggccacgcgcctgcaatccccattaatatgtgccattgttgagc

SEQ ID NO: 28415 - DNA, 1168 bp, Oryza sativa
  ref <308>: DATABASE ACCESSION NUMBER: AK103857
  ref <309>: DATABASE ENTRY DATE: 2002-08-28
gaaaagctcgcgaatcaatccacgcttcagagagagagagagagagagagaggcaggtggcgccgccgctgtcccgctcgtctccggtggccggcaggcggccgcagatctcgtctgtccaggatccagtgtgtgcggccgcgggccgccattgtttgggaggaggaggaggatgggtagtagcacaagcgccttcgtcatcaggtggatcaacttcttcaccatgatactggcactactggtggtggggttcgggttctggatgagcacccacaacgacgaatgcaggcggtccttgacgatccctgtcatgggtcttggaggagtaattttcctcatatcgctcgtggggtttcttggtgcttggaagaaaattgcttgcttgctatggacatatctggtaatgctgttcgtggttttggtggcaatcatggtgttcacagtgcttgcgtttattatcacaaataccggaactggccattctgtctctggggtgagatacaaagagtatcgtctgcaggattatagctcttggtttatcaaacagctgaatgacactgaaaaatggactcacctgagaagctgtcttgtgaaatcagatgattgtaatggcttgtcaagaagatacaagactctgaaacaatacaagcttgcagatcttactcctatggagtctggttgctgccgtccaccggcagagtgcgggtacccagctgtaaacgcttcctactttgatttgagctatcatccagtcagcacgaatgtcgactgcaaactgtacaaaaacgcacgctctgttctgtgctatgattgtgattcttgcaaagctggggttgctcaatacatgaaaacagagtggagggtggtagccatctttaacgtcatactgtttgtcatcttgtctttcgtctacttcgtcgcgtgctgtgcgcgccgaaacaccggagagagcgactccaaggttcctacaagatggcatgcatgattggcagatgaagcatcgtagagttagcttttgctattgcttgtagtggcattgttcagtcaagtctcgttggtgaaatggaatgcaagggcttttcctttctggtgtgggatgatgatgttctttgttgcagttggcttgtgaacattttaggaataagttcattttaggtcccttaacttt

SEQ ID NO: 28416 - DNA, 987 bp, Oryza sativa
  ref <308>: DATABASE ACCESSION NUMBER: AK103858
  ref <309>: DATABASE ENTRY DATE: 2002-08-28
gacaggcagctgcagctagctagctaagcttggataacagtgcaagggcgccggacggctacttggtccatggcgtctctgacgatcgtcgtcgccaccatcttcctgctcagcctcacctcggcgagcgtcgccgtccatggccggagcagcaggaggaggttcgtcaggagctacgacgagccgtgcatggagatgaggctgtacctccacgacatcctctacgactacagcaacagcacctccaactccacggcggcggcggccaccaagccgacggcgctggccaacgccgtgccgtcgaccggcggcaccttcttcggcgaggtggtggtgttcaacgacccggtgacggaggggagggcgctgccgccgtcgctggaggagacggcggtgagggcgcaggggctctacctctacaacagcaaggaggcgttcaacgcgtggctcgccttctccatcgtgttcaactccacggggcgccgcggcacgctcaacctcatgggcgccgacatcatcgccgagaagacgagggacatctccgtcgtgggcggcaccggcgacttcttcatgtcgcgcggcgtcgccaccctccgcaccgacgctttcgagggcttcacctacttcaggctgcagatggacatcaagctctacgagtgctacgtatgatgcatccatccatggtcgtataatatatactccatccgttctaaaatataagtatttttagctatgaacgcttatattttaagacggagggagtaccaaacactattcattattgtcgatgcaaatttcagtgaagatgtgacatctttggtcagggagacaaatgatcagccaattgacaaggtgatctgatgctcctagcttcgtctacctatagatttatttgttgctgctcccatcatcagatcagaccaccagctgtatgagtatatacacagtttgtatgctaaattctttctaaataaacatccttatgct

SEQ ID NO: 28417 - DNA, 713 bp, Oryza sativa
  ref <308>: DATABASE ACCESSION NUMBER: AK103859
  ref <309>: DATABASE ENTRY DATE: 2002-08-28
gactggagaagcgaatggggaagcgtcagcagcagcggcggctcgtccgcttcgccgtcgccgccgccgtcgttgtcgcggcggccctcatcctgaccgcttcggccaagaagtccggagatgtcacggagcttcagatcggtgtgaagtacaagccagagtcatgcaccctgcaagctcacaaaggagacaaaatcaaagtgcattatcgtgggtcactcactgatggatcagtgtttgattctagctatgacagaggtgacccctttgaatttactcttggaaacggccaagtgataaaaggttgggaccaagggttactaggtatgtgtgtcggtgaaaagaggaagctaaagatacctgcaaagatgggttatggggagagaggctccccaccgaagattccaggtggagcaacactaatctttgacacggagcttatcgccgtcaatggaaagacaaccggtggtgctagcaatagtgagctctaaggtcgtctttgatgttccacacaacgaagagttagcttgtgtagcgcctcctcaaaacagcggttcagtggtccttttaagagttcagtcaaaaaaggatgctgtttccttcatgttcatcgtgttacttcgaagttcaaagtattgttcaaaccatccttaatttatggtacaattttttcatgtcctctgaactttttttcccctgatgggacagaatct

SEQ ID NO: 28418 - DNA, 846 bp, Oryza sativa
  ref <308>: DATABASE ACCESSION NUMBER: AK103860
  ref <309>: DATABASE ENTRY DATE: 2002-08-28
gcgcgctagctaggtcttcagagacaagctgagttagcttcaatacatcctcaaccaaaaccttctttgttttttggtatcaataccaattatcaagctatgaaggttgtgagccaggtgaagcagatggggaggctgaacaaggctctcaaggagaagagagccaagctctacataatccgccgatgcgttgtcatgcttctccgttggagtgattgatcgatcttccgtgcaaacgcatggcagatcgatcaatcgttgttctaatcgattgatccctcctgttttggatcttttttggcctgccattttggtagggcttcagattccggcagcatgactgatatgtacatgcataggtgcatccatgcatgtattgttcccgtgctcgcgttttaggagggatcgatcgattggtaatttcacttttgaatcttttttcctttgcctctttgtttagagacaagggtttgagagaaggtgcttggctctaatgttgatgctcccattctcttcaacaaatggagaaggccggtatacaacaaccactgcatttcatttcttgatggactcgactactcgtcgatcatatgactttgaggaagataagacgattaaaacgactacaagttgatggggttctcgtgctgatgcatggcttgatgagctgtttctatgtgtctttaagtgttttatgtgttggaagaagggtttaaaccttgtgggatttaatcctaatttgtccgtagtcaaggcacacaagggtgctagctttcacaattatgttgtatcaaagtgatcttgaacgctaaattatggttctataataaaatttccttttcagcc

SEQ ID NO: 28419 - DNA, 1571 bp, Oryza sativa
  ref <308>: DATABASE ACCESSION NUMBER: AK103861
  ref <309>: DATABASE ENTRY DATE: 2002-08-28
gcgggttccaatgtcgagcggcggcggcggcggcgacgactacaagcgggaggagtcggtggcactcatggtcatcgtctccctcgcggcgctctccctcctctccctcgtcgccgccttcgcctactactgctacatcacccgcaaggtctcccgccgcctccactcgctcgacctccccaagcaccaccgccgctcctcctcctcctcgcctcctcccatgcccccgccgctgcctccccctcctccttccgcgaatgccccgacgctcgggaaggagagcccgtctagcaactccgccagcgacggcgcggcggcggcggtcgtggtcggcggggagaggggggccgtccaggtgttcagctaccgccagctgcacgccgccacgggcgggttcgggcgggcgcacgtggtggggcaggggagcttcggggccgtctaccgcggggtgctccccgatgggaggaaggtcgcggtcaagctcatggatcgccccggcaagcagggggaagaggagttcgagatggaggtggagctgctgagtcggcttcgatcaccttatcttttgggcttgattggccattgttcagagggtggacaccggctgctggtctatgaattcatggccaatgggggtctccaggagcatctctacccaaatggaggttcctgtggtggtatctcaaaattggactggcctactagaatgagaatagctcttgaagcagcaaaaggtctggaatatcttcacgagcgtgttaatccacctgttatacacagagacttcaagagcagcaacattctactggacaaggacttccgtgcaagagtgtcagattttggtttggctaagcttggatctgatagagctggtggtcatgtatcaactcgagttctaggcacacaaggttatgttgcacaagaatatgctttgaccgggcatttgacgaccaaatccgatgtctatagttacggtgttgtacttctggagttgcttactggcagggtgccagttgatatgaagaggcctccaggcgaaggtgttctagttaactgggcattgcctatgctcacagaccgagagaaggttgtgcagatcttggatcctgcactggagggtcaatattcattgaaagatgctgtccaagtggctgccattgctgccatgtgtgttcaacaagaggctgactacaggccactaatggctgatgtggttcaatcgttggttccgcttgtcaagaatcgttctactccaaagacgtgcaaccctagtgtccaagcgtagaagccacttgaaggggaagttgaatgctcagtttccaggtgcatgtcaagtttccaacagcaaactattgtgacgggttgcaatttgagacattgtttatgttctctcttttatatattgagaggggagggccacatgattaatgtcgttgatgacccaaggaagatttgttgatagtgcatcatatttttggccttttgtaatttatcgtacaagcatcagaaactgcaatggacggttgatcggttagttgttaactattactccgtatgaattatgattgctc
